United States Patent Application Publication US 2013/0332133 A1 - sequence listing, part 37

SEQ ID NO: 259451 - DNA, 526 bp, Unknown
  Bacterial polypeptide expressing nucleotide sequence isolated from the Sargasso Sea
gatgcttttacttgtagggttaggaaatcctggatccaattatactaatactagacataatattggtttcaaaatcatagatgcaataaacaatcattttaaactttcaaaacaaaaaccaaaatttaaaggattacttacaacgggcaatattgatgaaaaaaaaatatatgcaattaaacctttaaccttcatgaataattcaggtacagcgattaaagaattaatcgattactttaaaattgatgcgaaagatgtttttgtattccacgatgatatggatatagattttggaaaaattaaagcaaagtttggtggaagtagtgcaggacataatggaatagagtctatagataaatttatcggtaaagattactcaagagtaagaataggtattggtcacccaaaacagaagaaaaaagtaaataatcatgtgcttgaagattttaaagaagatgaagaagaaaaaataaatgaaatcactgagaacattgttaaacaattacctacactaattgataaaaaa

SEQ ID NO: 259452 - DNA, 574 bp, Unknown
  Bacterial polypeptide expressing nucleotide sequence isolated from the Sargasso Sea
tatgcttttattagtaggtttaggaaaccctggtccaaattatgacaacaacagacataatattggttttaaagttattgatgcaataaaccaacaattcagcctttcaaaacaaaaaccaaagtttaaaggtcttttaactactggaaatattgataataaaaaagtttatgcaataaaacctttaacatttatgaataattcagggacctgtatcaaagagcttatagagtattttaaaatagatgcaaaagatgttttcgttttccacgatgatctggatattgatctaggaaaaattaaagctaaatttggaggaagtagtgcaggtcatcacggaatagactctatagataaatcaattggaaaagattactcaagagttagaataggtattgggcacccaaaaaacggaaaaaaagttgatgatcatgtcttagaagactttagtgagaatgaagaagaaaaaattaaagatataactgaaaatatagttaaacaaattccaactcttattgaaaaaaaaattgatactttctcaagcaaggttaatgaaaatttgaatgggatttaa

SEQ ID NO: 259453 - DNA, 565 bp, Unknown
  Bacterial polypeptide expressing nucleotide sequence isolated from the Sargasso Sea
atgattttaataactggacttggcaaccctggtaaagaattcttaaaaacaagacataatgttggttttgatatagttgattcgatacattctgaatttaattttccaaaattttctgaaaaattcaactctttatattcaaaaaaaactatatatgacaaaatcattgtgattcaaaaaccaatgtcatatatgaatttaagtggaggcccaataaaaaaaattttcaatttttttaaaattaatgatactcaggatattattgtttttcatgatgacttagaccttgagttctcttcacttagaataaaaaattctggagggcatggaggtcataatggtattaaaagtattatagggctgattggacctaactttaatagaataaaatttggaattaaaaactctttatacaaagaaaaaaatattgatgctgataaatttgttttggataaatttaacttagaagaattaaaaatgattgagactattaaaaaaaaaataattattaatttcgaattgctaataaaaaaagatttttcatcttttaaaaacaatttttaac

SEQ ID NO: 259454 - DNA, 568 bp, Unknown
  Bacterial polypeptide expressing nucleotide sequence isolated from the Sargasso Sea
atgtataagctttgtattgttgggttgggtaatcctgacaaaaaatataataatactcggcacaatattggtaaagattggttgaaagaactttcaaaagcctacgagataaattttattacaaaaacaaaatttgaagctgaaattggcgaatctcataatggctcaatcttatgggtgatacccaacaattatgtcaataattcaggtagaacattatataaaattatcaaatcatctaatttaaagcctgaggattgcttaatactgcatgatgaacttgatttagatattggttctttacgcttaaaatatgcaggaggacatggtggtcacaatggtcttaaagatatatctaataaaataggctctcttaaatttttaaggcttagaattggaattggacatccaggctctaaagatgaagttacaaattgggtcttaaataaatttactcctaatgaaaaaaaacaacttattgaatcgtattcaaaatttgttgaagtatttgaattaattacctcaaaaaaaatacaagaagcacaaaaacttctgcatactaaataat

SEQ ID NO: 259455 - DNA, 574 bp, Unknown
  Bacterial polypeptide expressing nucleotide sequence isolated from the Sargasso Sea
tatgcttttattagttggattaggaaatccaggaccaaacaatacaaataatagacataacattggatggaagataattgatgctattaatttagagtttaaattatcaaaacaaaaaccaaaatttaaaggtcttcttaccacaggcaacatagactctaaaaaagtttatgctatcaaaccacttacattcatgaataattcagggactgcgatcaaagaattaatagactactttaagattgatgtaaaaaatgtaattgtctttcatgatgatatggatattgattttggaaaagtaaaagctaaaatcggtggaggtagcgcaggccataacggtatagagtcaatagacaaatttatcggaaaagattattccagagtgagaataggaataggtcatcctaaggaaaaaacaaaagtaaatagtcatgtattagaagactttaaggaagacgaagaagaaaaaattcaagaaattacaaataatattgttaaactaataccaactttaatagaaaagaaaatcgatttattttctagtaaagttaatcaaaatttgaatgggatttaa

SEQ ID NO: 259456 - DNA, 562 bp, Unknown
  Bacterial polypeptide expressing nucleotide sequence isolated from the Sargasso Sea
tatgttgttacttgtaggtttaggaaatccaactcctaatagtcaaaataacagacataacattggttttaagattgtagatgcaattaaccggaaatttggactgtctaagcaaaaaccaaagtttaagggattattaactactggaaatattggtgataaaaaaatatatgcaattaaacctctcacatttatgaataattcaggaatttgtataagagaactacttgaatactttaaaatagatgcagaagatgtgattgtatttcatgatgatctagatattgaatttggaaaaattaaagcaaagtttggtggatcaagtgcaggtcacaatggaatagcatcaattgacaaatttataggcaaggaatattcaagagttcgtattggcataggaaagccagaaaataaaatatctgtttctgattatgtgctaaacgactttaatgaggatgaacaagttcatttagactcaataacaaataatatcattgaatctttaactatattgattgaaaaaaaattagatttattttctagtactgttaacaacaattaa

SEQ ID NO: 259457 - DNA, 373 bp, Unknown
  Bacterial polypeptide expressing nucleotide sequence isolated from the Sargasso Sea
tatgaatctttcaggcaatgccgtacaaaaagtaaaaactttttacaacattgataaaaataatgttataattatacacgatgatatagatcttgaactgggtcgaattaaattaaaagatggtggtggagatggtggacataatggtttaaaatcaatagcaaaaatgataggcagtgaatttataagaataagagtaggtgtaggtagaccagaaaaaatcgatgtgtcatcatatgtgttaaataattttctagaaaatgaagtctctttattaaaaaaaattatcctaaaaagttgtgaaggtataaaactattaattgcagatgaaaatgaacagtgtaagaagttattttcagaaagaactctctaa

SEQ ID NO: 259458 - DNA, 180 bp, Unknown
  Bacterial polypeptide expressing nucleotide sequence isolated from the Sargasso Sea
aatgaaaattatagtaggactagggaatccaggcccaaaatatttaaatactaggcacaacataggattttcaattattgatgcttttgcaaaccaaataactattgaaaagaaagagcgtaaagcgaaatgtatcatgcaattcggagaccacaatgatacagatatagtgttggttaa

SEQ ID NO: 259459 - DNA, 580 bp, Unknown
  Bacterial polypeptide expressing nucleotide sequence isolated from the Sargasso Sea
atggaaacctttttagtagttgggttaggaaatcctggctcaaggtatgctaatacaagacataatgctggaactgatttcgttcatatgctttgtgagaagtatgacgttgagttaacagaaaagagaaaatataaagcttctataggaaaatttctattgaaggatatggaagtcatcctttctatccctaccctatttatgaatcaaagtggaaaaagcgttgctcctactgtaaagggggaaaatataaaattaaaaaatcttcttgttgttcatgatgacctagatctttctcctggggtatcgaaattaaaattctctggaggagatggaggtcacaatggcttaaaagatattatgcagagcttgtctggtaaaaaagattttaagaggctaagaattggtataggtcatccaggcgacacaaaaaaagttaattcctttgtcgtaaaaaaaggatcttctagcgaaagaaaaaataaaattatagcgatgcataatgctttggaagtttttgaacttgttgcttttgacgattgggaaaaagctttgacgcaattacattcaaaaaaataat

SEQ ID NO: 259460 - DNA, 572 bp, Unknown
  Bacterial polypeptide expressing nucleotide sequence isolated from the Sargasso Sea
tatgcttttgttagtaggtttaggaaatcctggtccaaataatacaaataatagacacaacattggtttcaaaattattgatgcaatcaatcaggaatttaatctttcaaaacaaaagccaaaatttaaagggcttttaacaactggcaatattgaaaataaaaaagtatacgcaataaaacctttaacttttatgaataattcaggtgtttgtattaaagagttgatcgaatattttaaaattgatgcaaagaacgttatcgtattccacgacgatttagatattgatttaggaaaagttaaagcaaaatttgggggcacgagtgcaggtcataatggtatagagtctatagataaatttattggcaaagattattcaagagtaagaataggtattggtcgccctaaacaaaaaagtaaggtcaataatcatgtgctagatgattttaatgagaatgaagaagaaagaatgaaagatataaccgggcacatagttaaaatggttctaactttaattaataaagaaatggatctattttcaagcaaagttaatcaaaacctgaatgggattt

SEQ ID NO: 259461 - DNA, 562 bp, Unknown
  Bacterial polypeptide expressing nucleotide sequence isolated from the Sargasso Sea
catgaagaagtttttaattgttggtttagggaatgtaggtgatgaatatacagggactcgtcataatataggttttgatattctagataacctaatttcaagtttcgaaggagatttcaaagaagataagcatggaaaaatatttaaaacaaaattctctggaaaaagcttagtttttttgaagccaaacacatttatgaatttaagcggaaaagcagtattatactgggcaaaaaaagaaaagattaacctttccaacatacttgtcatagtcgatgatttgaatcttgattttggaatatcacgacttagaaaaagtggtactgatggcggacataatggtttaaaggatattaattctaaattaaatactatcaagtatccaagattaaggtttggtattgggaataattttaaggatggtaaacaaatagattttgttcttgaaaaatggaatgatgatgagactaaaaatttgagtaaacttattgaacacaattcgtcaattgttttagattatgttaagcacggtattgacaatacaatgaacaaattcaattaa

SEQ ID NO: 259462 - DNA, 529 bp, Unknown
  Bacterial polypeptide expressing nucleotide sequence isolated from the Sargasso Sea
atgatttcagatgaattaaaattattagtaggcttaggtaaccctgggactgaatatcataaaactcgacataatgttggatttatggttctggaagaaatagccaggcaaaataattcaacctttcgtgaaaataaaaagctctatggcaaaacttgcgaaattggttcgggtattaataaaacaaggcttttaatgcctaccacattcatgaacgacagtggcaaatcagttcggtcagcgaaggattggtttaattttgaaaccaatcaattgatagtcttagtggatgatattgatcttccactgggaaaaataagactccgttcgaaaggaagttcaggtgggcataatggattaaaaagtattgtcagtcatcttgggactaatgaatttaaacgattaaaaattggaataggttctccatctgaaattctaaaagagagaaaatctaaaactgtttctcatgttttgggtaaattctcaaaagaagaattaatcaaattaaatttcattataaagaaataat

SEQ ID NO: 259463 - DNA, 595 bp, Unknown
  Bacterial polypeptide expressing nucleotide sequence isolated from the Sargasso Sea
atgtttttacatgttggtttaggcaatcctggctctgagcataagctagatcgccataatattggttttatggctatcgatcatcttctgaatttctatagaattaatgatactcttaaaaaaaaatttaatgggcattattacaaattatcacaaaaaaatggaactattttttttttgaaacctcaaacttttatgaataactctgggagtagtgtttcatcactaattaaattcttttcaattaaaccttcttcagtaatagtttggcatgatgaaattgatttagataagggtagaataaaagtaaaatttggaggtgggcacggagggcataacggcataagagatataataaaacatattggcgaaaattttctaagagtaagaattggtattggcagacctgataataatttagatccgtcaaaatgggtgttatcatcgttttataaaaatgagtttgatgattgggtaaatgatttattgtcaattatggcttcagaagtagaacttcttcatctaaacaatagcatagactttatgaacagagtagcaattttacgaaacaaccaaaatattgagattatgtaat

SEQ ID NO: 259464 - DNA, 580 bp, Unknown
  Bacterial polypeptide expressing nucleotide sequence isolated from the Sargasso Sea
atgtctttaaagctaatagttggtctcggcaatcctgaacaaagatatttaactacaagacataatgttggtttttgggtattggattccttggctgaaaaattatccaaaaaattttcacaacagaagaagtatgagtcagaattgtttgagtatgagtttgattcaaaattatttcatatgatgaaacctcttagttatataaataatagcggaattccaattagaaaatttattaagaataagaatatcgaagtagaaaatattttaatcatctatgatgatttagatttagatgttggaaaaattagacttaaacagggtggtggaagtggaggccataatgggctcaatagtattattgaacaaattggatcaaaaaatttctggagattaagaataggaattggtaaacctgatgacaaaaataaagttatagattatgttttaggaaaaccttcattggatgataaaaatttaattcaccaaagtatagaggtaatgctgagtgaaatagatgctttttttaatggtgaatccgtaaaacttatgaataagttaaatggggagaataagtaat

SEQ ID NO: 259465 - DNA, 541 bp, Unknown
  Bacterial polypeptide expressing nucleotide sequence isolated from the Sargasso Sea
atgcttttgctagtaggtttaggaaatcctggtccaaataatacaaataataggcacaatataggtttcaaaattattgatgcaataaatcaacaattcagtctgtcgaaacaaaaaccaaaatttaaaggacttttgaccacgggaaatatagaaaatgaaaaggtgtatgcaattaaaccattaacttttatgaataattctggagtatgtattaaggaactaattgaatatttcaaaatagacgcaaaagatgtaattgtatttcatgatgatctagatattgatttaggaaaaattaaagcaaaattcggtgggagtagtgcgggacataatggtatcgagtcaattgataaatttataggaaaagattactcaagagtaagaataggaattggtaggcctaaacaaaagggcaaggtaaataatcatgtgctagaagactttagtgataatgaagaagacagaattaaggatattacaaacaatatagttaaattagttcctacgttgataaaaaaagaaattgaccttttcaagc

SEQ ID NO: 259466 - DNA, 568 bp, Unknown
  Bacterial polypeptide expressing nucleotide sequence isolated from the Sargasso Sea
aatgtttctttttattggtttaggtaaccccggcttaaaatacatgaacaatagacataatattggttacatgattattgataaaattaatgaattttatgagtttccaaattttgttaataaaaagcattcttgtctatcaataaaaaaaattgatgatcaaaaagttattttactaaaaccaactactttcatgaatctttctggtattagtgcacaaaatatcaaatctttttacaacatcaaaaacgaaaatatttatgtgtttcatgatgaaatagatcttaaaccttcagaaattaaaattaaaaacggtggaggtaataatggtcataatggattaaaatcaatagataatcatataggtaaagattattatagaataagagttggtgttggaaggccattgaataatgagacttgtaagaagagtgatttaatttctaattgggtgttatcagatttttctaaaacagagaaaaaagagtgggtagacaataaaattaattttatttcaaaaaacttctatgatcttaaagataaagtgtttgatgtttttgtgaaatag

SEQ ID NO: 259467 - DNA, 541 bp, Unknown
  Bacterial polypeptide expressing nucleotide sequence isolated from the Sargasso Sea
atgaatgatatatatttgattggattaggcaatccaggtaaaaaatactcaaaaaataggcataacataggatttttgttacttgaaaatctctcaaaaaaatataattcaaattttttgataaaggataaacttaaaagttcctgttcagaatttaaaattaataattctacttacaggttatttttaccaaatacatttatgaataatagtggtgaggctgtccgagcaatattagactggtacaaaattaatttagatcagattattgtaatagtagatgataaagatcttccccttggaaaaataagatttagaaaaaaaggaagttcaggaggacataatgggcttaaaagcatcattgaaaaattgcagacttataactttaatagaataagaattggtattgggtcacctccatcaattaaaggaaaaaataatttcaatactatttctcatgtattaggcaatatttctatagaagaaaaatcaatattggataaagtttataagagggtaataaaatccctcgaacaattaa

SEQ ID NO: 259468 - DNA, 439 bp, Unknown
  Bacterial polypeptide expressing nucleotide sequence isolated from the Sargasso Sea
atgcttttacttgtaggtttaggaaatcctggtccaaataatactaacaatagacataatattggtttcaaaattatagatgcaatcaactcagagttcagcctttcaaagcaaaaacctaaatttaaaggacttttaacaactggaaatatcaaggataaaaaagtttatgcgataaagcctttaacatttatgaataattcaggagtttgtataaaagaacttattgattattttaaaattgacgcgaaaaatgtaatagtttttcatgatgatttagatatagacctgggaaaggttaaggcgaaagttggtgggagtagcgctgggcataacggtattgagtctatagataaatttattggtaaagattactcaagagtgagaattggaattggacgccctaaacaaaaaagtaaagttaacacccatttttaga

SEQ ID NO: 259469 - DNA, 343 bp, Unknown
  Bacterial polypeptide expressing nucleotide sequence isolated from the Sargasso Sea
atgaaatatttgattgtcggacttggtaacataggaccagaatatgaattgacccgtcataatattggctttctcactttagatagactagccgataaacatggagctaaattcgaaatggaccgactcgcctatcacactgaattgaaacataaaggccgaacaattcatctcattaaaccgacaacctatatgaacctgagcggcaaagccatgcgccattggatgaccgagcttaagattgctaaagagaactgcctagttattgtagatgacattgccattccttttggtaagcttagaatgcgtgctaaaggctcttcagccggacacaatgggtaaa

SEQ ID NO: 259470 - DNA, 574 bp, Unknown
  Bacterial polypeptide expressing nucleotide sequence isolated from the Sargasso Sea
atgtatcttttagttggattaggtaacccaggtaaaaaatattgctataatagacataacattggctatatggtaattgatcatttagcaaaaaattatgcgttacctagttttaaaaaaaaaactaaatcttctttttctctaggtttaatagaatcatataaagttatattactaaaaccaactacttatatgaatttatctggtgaaagtatattagaaataaaatctttttataacattgatttagataatgtatttgtttttcacgatgaaatagatcttaaattaggtgaaattaaggttaaaaaaggtggtgggcataatgggcataacggtctaaaatccatagataattgtataggctcatcataccacagaattagaattggagtagacagacctattgttgacagaatacaaaacaaaagagatattgtatcgaaatgggttttaacggactttactgaaagtgaaaaagaaaatataatacataaaaatttaagttttatatcaaataatttggtaaatctaatttcaaaagaatttgagtgttttaataataataaataat

SEQ ID NO: 259471 - DNA, 439 bp, Unknown
  Bacterial polypeptide expressing nucleotide sequence isolated from the Sargasso Sea
atgaaactctttgttgggcttggcaaccctggtgaaagatataaaataactaggcataacgttggttttatggttttagataatttgattaagcaatcatcagttgaaggctgggataataagtttgattcatttttaaacaaaattattattaaccaaaaaagtgtgatactccttaaaccactgacttttatgaatatttctggttatgccgttcaaaaagttaaaaagttttatggcattgatcctaacgatatagtcattatacatgatgatatagaccttgaattaggtaaaattaaatttaaaaaagggggtggagatggggggcacaatggtttgaaatcaataattaaattgataggttctgaatttaatagaatacgaattggtataggtagacctgaaaaaattagtgtatcatcatatgtccttaata

SEQ ID NO: 259472 - DNA, 496 bp, Unknown
  Bacterial polypeptide expressing nucleotide sequence isolated from the Sargasso Sea
tttgttctcaatattcaaatattttagaaaaggtagtgtctcaccaaataataaaaagtttcttattgtaggtcttggcaatattggtgaagaatataaaaatactcgtcataatattggatttgatatagttgatcagctaggtgtaattttaaacggaacatttaattccgctaagtatggagatattttaaaatcaaaatatgctgggaaacaaattatattgttgaaaccaaataccttcatgaatttaagtggtaaagcagttgtatactggttaaaaaaagaaaaaattcaaattaataacttaatagtcgttgtagatgatttaaatatcaattttggtaaatctaggcttaaagcatcaggttctgatggtggacacaacggattaaaagacatagtaaattcattaaatacttcaaattttacaaggttaagatttgggattggaaataattttaaaaagaaagatcaggttgattttgttctgagt

SEQ ID NO: 259473 - DNA, 547 bp, Unknown
  Bacterial polypeptide expressing nucleotide sequence isolated from the Sargasso Sea
catgcagcttattgcgggtttgggcaatccgggtgaaaaataccaagataatccccataacatcggattcagaacactcgatcaacttatgaaggcactcgatcttgagggctttcaaagacgtttcaatagtgaattccagagaacattagaaaacggccaagtgactttgatgctcaagcctgaaacctatatgaaccgcagtggagaagcgattgccgaatgcgcaagatacttcaagattccttcagaaaaaatccttgtgattagtgatgacctggatcttccagccgggaaagcacgactgcgagtctcaggagggcatggcggccataatgggctcagatccgtcattcaatccctgggcacggaccaattccttcgagccagaatcggaataggcaggcctaattcttcaagctatgggaaagagacctctgtgtcccaatacgtgctgggcaaaatggaagaaacgaaagcggaactatgtctgcaggcgatggaaaaagttgtggatatgctggtccgttttgtacgccagtcacgt

SEQ ID NO: 259474 - DNA, 475 bp, Unknown
  Bacterial polypeptide expressing nucleotide sequence isolated from the Sargasso Sea
tatgttgtctgatgaattaaaattattagtaggcttaggcaatcctgggactgagtacgaaaaaactcgtcataatgttggatttatggtgctagaagaaatcgcaagaaaaaataattgtagctttcgtgaaagcaaaaaactttttggtagaacttgtgaatacgggtcaggcatcgaaaaaacaaggcttttaatgcccaacacatacatgaatgaaagtggaaaatcagtaagatcagccaaggattggtttgattttaaaaataatcaattaatagtcctagtagatgacatggatctcccactaggaaaaataagagtccgctctagagggagttcaggaggtcataatggattaaaaagcattatcaaccatcttggtactgctgagtttaagcgattaaagattgggataggagcaccaagtaacacccacaagagagaaaatctaaaactgtttctcacgttttag

SEQ ID NO: 259475 - DNA, 678 bp, Unknown
  Bacterial polypeptide expressing nucleotide sequence isolated from the Sargasso Sea
aatgcaactatttgttggtctcggaaatccaggacaacagtaccaaatgaaccgtcataacattggttttatggctgtagacgaaatagcaaatgccaattcgtttggcccttggcgttccaaattccaaggtttgttttgtgaaggaaatctagaaaatcagaaaattataattctgaagccctcaacttttatgaatttatcaggacaatcagtaggcgaactagctcgtttttataagattaattcgcaggatataactgtttttcacgatgaactggatttaactcccggaaaatgccgttttaagtttagtgggggccacgccggccacaatggtttaaaatcaatccacagccacataggtgaaaactacaaacgcataagacttggaattggacatcctggtcaaaaagatctggtctcaaaatatgttttggaaaatttctcaaaaaaagagcaacagtggcttgaaaagcttctgaaaaaaattgctgacgaagctactcacctagccaacgatgcttctgaaaagtttattaataaaatttctctgagttccgaaagtcaaaataaaaaagataaacaaattgaggaattaaaagttgcaactccatctgaaaaaactaattttcgggcggaagaaagcgaaatgcagaaatctactctgcaaaaatt

SEQ ID NO: 259476 - DNA, 613 bp, Unknown
  Bacterial polypeptide expressing nucleotide sequence isolated from the Sargasso Sea
atgcaactaatagttggcctcggaaacccgggggggaaataccaatatacccgccataatatcggatatatggctatcgataatattgtttcagtacaacaagattataaaattaaaaagaaatttaattctattatttatgaaacgataatagataataatagaattatcctgataaaaccagaaacatacatgaataattctggcgatgcagtctctcaaattgcaaatttttataagatagactcaaaaaatatattagttttacatgatgaactagatatcccatttggaaaaattagaattaaatctggaggcggtaacgcaggccataacggactgaaatcaatttctaaaaaaattgacaataattacacaagagtcaggcttggtatagggcatcctgggaataaagagagggttaatggtcatgttatgggtaacttcacgggatctgagaaacagaaactcaatcaaattctgaattacctaacaaataacatccatgaaattttaaataaaaaagagcgcttcattattaactttgaacttgtcgaagtccaaaaccaagaaattaatccattaaaaaaaatattaggtttatttaagtgag

SEQ ID NO: 259477 - DNA, 562 bp, Unknown
  Bacterial polypeptide expressing nucleotide sequence isolated from the Sargasso Sea
atgtttctaatttgtggacttgggaacccaggcgtaaattataaaaataccagacataatgtaggtttccatttagtggataatataatctcatattttaattttgataaaatcaaagaagataaaataaaagagttatattcaggtctaataaataatcaaaaaatctttgtgttaaaacctctgacattcatgaatttatctggaaaagctgtttcagaaattgtaaatttttataaaataaaattagaccatacttatattatacatgatgaccttgatttagaattatcgaaagtaaaaataaaacaaggtggtggaaacggaggtcataatggattggaaagtattgaccaatttattggagaaaattatttcagaatacgtattggaattgatcatcctgggcataaagatttagtttcaagttatgttttaaataaattttcaaaatcagaagaagaaataataaataaaaaaattgataaaatggttaaaaatatagaattaatattttcagatattcctctatttctaacaaaaataagtgagcaaaattaat

SEQ ID NO: 259478 - DNA, 514 bp, Unknown
  Bacterial polypeptide expressing nucleotide sequence isolated from the Sargasso Sea
gatggccgatgcgctccggctggtggttggcctgggcaatccaggcacgaagtacgaggggacgcgacacaacatcggcttcatggcattggagcggatggcatcacgcgagggcttcagttttcgtcagcagagcaagctgcatggcctggctgcggagcacggcatcggtgaaagccgattgaggctgctcatgccgcagacctacatgaacgacagcggtcggtccatccgcgcagcgctcgactggtttggcttcacgccggaacaactgctggttctggtggatgacatggacatccccctggggcgcctgcggttgcgggcccagggcagtgctggaggccataacggtttgcggagcacaattcagcacctgggcactcaggcctttccgcgcttgcgcatcggcattggtgctcctgctgacaaccccgcggaacggcgggcccgcaccgtgtcccacgtgctcggtcccttcagtcgtgcggagcagtctgaggtggatgccgtg

SEQ ID NO: 259479 - DNA, 586 bp, Unknown
  Bacterial polypeptide expressing nucleotide sequence isolated from the Sargasso Sea
atgccggatgatccaataaaacttattgtgggcctcggaaaccctggcccacagcatgatagcaatcgacataacgctggagtgatattcctgcatcacctatgtaaagcatatggcaatagtcttcgtagcgaggctaaattttttggtgagttttcctcaatcagcatagggggcacagaaattaaactgcttttccctacaactttcatgaacaacagcggcaaatctgttgcagctgtttgcaaattttttaagatcgcgccagaaaacatgttagtcgcttacgacgagatcgattttgatgttggcatcagtcgttttaaagaaggcgggggtcacggggggcataacggtgtgcgtgatatcataagctcaatagggggcaagaaagatttctaccgattgagaataggtgtcggtcatccaggtcacaagtctatggtgtctaattatgtgttaaatgatccgtctaggtcagaggctgataccattatgtcaaatattgaagacgctataagaattctcccgacggccgtagatggcaattgggaggaggcgatgcgtctcctgcacactgattaaa

SEQ ID NO: 259480 - DNA, 630 bp, Unknown
  Bacterial polypeptide expressing nucleotide sequence isolated from the Sargasso Sea
cctgcactggatttcccgcagaaaaaaaggcatcactgcgccaaaatacctagcaggaaagcggcgcatgaaactcttcgtaggtctcggcaaccctggcgcgaaatacgcgggcaaccgtcacaacatcggcttcatggcactggatcagatcgcctctgatcacgggttttcaccgtggaaatccaaatttcaggcacagatgagcgagggcactctgaccggtgagaaggtgatcttgctgaaaccacagaccttcatgaacaattccggtcaatccgtgggggaggcgctgcggtttttcaaactcacccctgcagatgtggtggtctttcatgacgagcttgatcttgcgcccggcaagtgccgggtcaaacagggcggcggccatgcaggccacaatggcctgcgttcgatacacgctcatattggtgcagattacgcgcgcgtacgtctgggtgttgggcatccggggcataaggacgctgttgcaggctatgtgctgcgtgatttcccaaaggccgatcagggctggctggacgatctgctgcgcggtctgtccgatggggcgcactcgctcgcgaccggtaacagcggacgcttcatgaatgctgtcgccctgcgggtcgc

SEQ ID NO: 259481 - DNA, 604 bp, Unknown
  Bacterial polypeptide expressing nucleotide sequence isolated from the Sargasso Sea
atgcaagaaatatatttaattggacttgggaatcctggtaaaaaatattacaatagtagacacaatataggctttttactgcttaaaaagctctcaaaaaaatataattcaaattttttattaaaagataaacttaaaagttcctgctcagaatttcaaatcaataattctaccttcaggttatttttaccaaatacgtttatgaataacagtggtgatgcggtccaagcaatagttaattggtacaaaataaacttagatcagattcttataatagtcgatgataaagatcttccccttggaaaaataagattcagaaaaaaaggaagctcaggtggacataacgggcttaaaagcatcattgagcaattgcaaacacaaaactttaagagaataagaattggtattgggtcacctcctctaataaaagaagaaaatcatttcaataccatttcacatgtattaggaaatatttctttagaagaaaaattaatattagataaagtgtataagagagtgatagaatccctcgaacaatttaatactaaaaaagaagatcatataattaatgaattaaactcttttaacaaagaccaactttaag

SEQ ID NO: 259482 - DNA, 544 bp, Unknown
  Bacterial polypeptide expressing nucleotide sequence isolated from the Sargasso Sea
atgggtcttggcaatcctggcgatcagtatgcccaaacacgtcacaatgtcggcgctcaactactgctggatgctgctgaacacgaaggcctcaaatggcaactggaaagcaaactcaaggcccatacagtcaagcgggccgatggccaacgtctgctgcttagcaccaccttcatgaatgacagtggccaagcattgcaggctgtgatgcattactataaaataccgatcggggcagtattggtcattcacgatgaactcgactttgggccaggcactgcgcgcttgaagtttgcaggcggccatggcggtcacaacggcttgcgggacatcatccgcgctgtgggcgcgcaattttggcgactgcgcctaggcatcggccacccaggacacaaagaccgcgtgcatggctatgtgttgcaacgtgccaatgccaacgaccaacagcgcattgataccgcaagtgcgcatgcagccgacatcatgccattgtgctttgccggcaaatttcaacaagccatgcagcagttgcatgaggaggacc

SEQ ID NO: 259483 - DNA, 341 bp, Unknown
  Bacterial polypeptide expressing nucleotide sequence isolated from the Sargasso Sea
tttgattgttgggcttggtaatccgggtttaaaatatgacaacaccagacataatataggatttaaggcattagaccatgttgcaaaacagactgatgccttatttgtttcttctaaatatggtgaaataacatcttttaaatataaaggaaaatctgtttttttactcaaacctaatacttatatgaatttaagtggaggggctgtaaattactggttaaaaaaagaaaaaatattgtctagtaatttacttatagtaactgatgatttaaatcttttattggggaaattaagattgaaaactaatggatctgacggtggtcataacgggttaaaaaaca

SEQ ID NO: 259484 - DNA, 520 bp, Unknown
  Bacterial polypeptide expressing nucleotide sequence isolated from the Sargasso Sea
tatgtacaatagacataatatcggttatctgattatcgataaaatatatgaagtatacaaattcccaaaatttcttcagaaaaagaattcttttttatcaattaaaaaaatagaaaatcaaaaagtaatattacttaaaccaactactttcatgaatctttctggagttagtgtgcaaaacataaaatctttttacaatataaaaaatgaaaatatttttgtttttcatgatgaaatagatttgaagccctctgaaattaaaatcaaaaaaggtgggggtaacaatggtcataatggattaaaatcaatagataattttattggtaacgattattacagaataagaataggtgtagggagacctgctaataatatgttatataaaaaaagtgaaattgtctctaattgggtgttatctgatttttcaaataaagaaaaaaaagaatggttagagagtagtcttaatttaatttcagaaaaattcaaaagcttaaaaaataaggaatttgatgttttttga

SEQ ID NO: 259485 - DNA, 390 bp, Unknown
  Bacterial polypeptide expressing nucleotide sequence isolated from the Sargasso Sea
ttaaaccatctacctatatgaacctatcaggaaaggccgttaattattggatgcaaaaagaaaaaatttctactgaaaacattctagttattactgatgatttatcacttcctcttggaaaaattagacttagaacaaaaggaagcgatggtggccataatggcttaaaaaacattcaactaatattaaatacaactaactattcaagacttagatttggaataggaaacgattttcaaaaaggcaaacaagtttctcatgtattaggaccatggaaagaggaagaaattgaagtgctttccagtaaaattgaaatagccgtagaatgtattaaaagtttttgtaccgttggagtttctatggcaatgacaaattggaacaataaataat

SEQ ID NO: 259486 - DNA, 553 bp, Unknown
  Bacterial polypeptide expressing nucleotide sequence isolated from the Sargasso Sea
tatgcttttacttgttggattaggaaatcctggacctgatagcgaaaataatagacacaacattgggtttaaaataatagatgcaattaactctcattttaaactttcgaaacaaaaaccaaaatttaaaggtcttttgacaactggcaacatagagtccaaaaaggtttatgcaattaagccgcttacatttatgaataattcgggtactgctattaaagaactaatagattattttaaaattgatgcaaaaaacgtaatagtttttcacgatgatttggatatcgattttggaaagataaaagccaaggtaggcgggtcaagtgcaggtcataatggcattaagtctttagacaaatttataggtacggattattctagagttagagtgggcataggacatccaaaagaaaaaaggagtgtaaatagacacgtccttgaggattttaaggatgatgaggaagaaaaaattaaagaaattacggaaagtatcgtaaaactagtacctaccttaattgataaaaagatagatttgttctcgagtaaagtaatc

SEQ ID NO: 259487 - DNA, 562 bp, Unknown
  Bacterial polypeptide expressing nucleotide sequence isolated from the Sargasso Sea
atgccagatcaaccaataaaactgattgtgggtttggggaacccaggcccacaacatgaaagaaataggcataatgctggcgttatatttctgcatcatctttgcaaagcctatggcaataatcttagagttgaaactaaattctttggtgaattttcctctatagttatagatggcgccgatataaaacttcttttcccaacaacttttatgaataacagcggtaaatctgttgctacagtttgcaaattttttaagctcgcgccagaaaatctgttagtcgcctacgatgagattgattttgatgttgggatcactcgttttaaggaaggtggtggtcatggaggacataacggcgtgcgtgatatcataaatgccttaggcggtaagaatgatttttcccgattacggattggcgttggacatccaggccataagtctatggtggctaactatgttctgaatgacccctctcgagtagaggcggatgctattatgtcaaacattgaagacgccataagaattcttccgaccgctataaagggtaatgggaagaagcaat

SEQ ID NO: 259488 - DNA, 419 bp, Unknown
  Bacterial polypeptide expressing nucleotide sequence isolated from the Sargasso Sea
tatgaatgaagtatttttaattggtttgggaaatcctggcaaaaaatatcaatacaatagacataatattggtttcttaattcttgaaaatctttcaaaaaaatacaatgcaaattttttattaaaagataaacttaagagttactgttcagaatttaaaattaatgattctacctatagattatttttaccaactacgtttatgaataatagtggtgatgctgtccgagcgatagtagattggtacaaaattaatgtagaccaagtttttataatagtagatgataaagatctacctcttgggaaaataagatttagaaaaaaagggagctcagggggacataatggtttaaaaagtatcattgaaaaattgcaaactcaaaactttaatagaataagaattggtattgggtcacctt

SEQ ID NO: 259489 - DNA, 613 bp, Unknown
  Bacterial polypeptide expressing nucleotide sequence isolated from the Sargasso Sea
gatggccgatgtgctccggctggtggtcggtctgggcaatccaggcacgaagtacgagggaacccgtcacaacatcggcttcatggcattggagcggatggcatcacgtgaggggttcagttttcgtcagcagagcaagttgcatggcctggcggcggagcacggcatcggtgaaagccgactgaggctgctcatgccgcagacctacatgaacgacagcggtcggtccatccgcgcagcgctcgactggtttggcttcacgcccgaacaactgctggttctggtggatgacatggacatccccttggggcgtctgcggttgcgggcccagggcagtgctggaggccataacggtttgcggagcacaattcagcacctgggtactcaggcctttccgcgcttgcgcatcggcattggtgctcctgcggacaatcctgcggaacggcgggcgcgcaccgtgtcccacgtgctcggtcccttcagtcgtggggagcagtctgaggtggatgccgtgctggacggtgtgttggaggccatccagcgcattcagcgccagggtctggaccgcgccggcaactggatcaatggcttccgtccagcttcagtggaatga

SEQ ID NO: 259490 - DNA, 508 bp, Unknown
  Bacterial polypeptide expressing nucleotide sequence isolated from the Sargasso Sea
atgaagtatctgattgtcggtcttggtaatgttggagaagaatatgaaggaacaagacacaatattggatttgaaattctagactctttttctaaaaaaaataaatctgattttattgttgataaacacgctgaaatttcaacactcaatttaaaaggcaaaaaggttaacctgataaaaccatctaattatgtaaacaatagtggaaaagcagtaaattattggtgtcagaaaataggaattaaaaaagaaaatctattagtgatcgttgatgatatagcattaccatttgggaaaataagattaaagaaaactggttcagatggtggacacaatggtctcaaaagtatagacattcatctaaatgatagggattattgtagactaagatttggaattgataataacttcagaaaaggacaacagtcaaaatatgttctaagcaaattttcaaaagaagaatacaaagagttagaattttttattatagatgcttgtgaggcaattg

SEQ ID NO: 259491 - DNA, 555 bp, Unknown
  Bacterial polypeptide expressing nucleotide sequence isolated from the Sargasso Sea
tattgtttgtaggtcttggtaatcctgatcctaaacataaaaataatcgacacaatattgggtttatgttgatcgatgcattaaataaaaaatttaacttttcaaaacaaaagccgaaatttaaaggtttattgacaagcggagaaattaataatcacaaaattatattagtaaaaccattaacgtttatgaataattcaggtgtatgtttaagagaaattcaagattattataaaattgaaaaaaaaaatatatttgtttttcatgatgatttagatttggagcttggaaaaattagatgtaaaaatggtggctcaagtggtggacataatggtattaaatcaataacaactattttaggggatgattttaatagaataagaatcggaatagatcatccaggaaacaaaaattatgtagatcagcatgtacttaatgacttttctggagaagagaaaaacataatcgaagagtctatttcaaaaatattagaaaacgtttatctgctttttgaaaataaactcgatgatttttcaagtaagactaataattaat

SEQ ID NO: 259492 - DNA, 452 bp, Unknown
  Bacterial polypeptide expressing nucleotide sequence isolated from the Sargasso Sea
cctggtcgtgggtcttggaaacccgggcgataagtatcttggaagccgccacaacctcggctacgaagtcatcgaaaagcttgcggagatgcagcgagcgaagttagaggtctctcgtccggccaaggcgcgagttgccgtagttgatttcttcggtcttcggtgcattctcgcttgcccgactacttatatgaacctaagtggtgaggccgtatctccattaataaggaacaatggcgtgacggatattagtcgggtgattgttgtccacgatgagcttgatttggagcccgggagggtaaaaatcaagcgcggcggttcttccgctggtcacaacggtttgaagtccattagtcagcatttaaagaacgacgaatttattcgcatccgagttggggtcgggaaaccccctcaccctgatcaaggaaaaaattgggttttgcggcgaccaa

SEQ ID NO: 259493 - DNA, 574 bp, Unknown
  Bacterial polypeptide expressing nucleotide sequence isolated from the Sargasso Sea
actgattgtcggcctggcaaaccccggcgcagaatacgcggcgacccggcacaatgctggtgcctggtacgtagatttactggctgaccgccatcgcgccccgctgcgcgaagagagcaaattcttcggttacacctcgcggattaaccttgccggcgaagatgtccgcctgttggtcccgaccacctttatgaatctcagcggcaaagccgtggcggcgatcgccaccttctaccgcattaatccggatgagattctggtggcgcacgatgagctggatctgccgcccggggtggcaaaatttaagctcggtggcggccacggcggccacaacggtctgaaagatatcatcagcaagctcggtaataaccccaactttcatcgcttacgtgtcggaattggccatccgggcgataaaaacaaggttgtcggctttgtgctgggtaaacctccgacgagcgaacagaaactgattgatgaagccgttgacgaagcggcgcgttgcaccgaggtgtggctgaaagaaggtctcaccaaagcgaccaaccgtttacacgcttttaaagcgcaataa

SEQ ID NO: 259494 - DNA, 511 bp, Unknown
  Bacterial polypeptide expressing nucleotide sequence isolated from the Sargasso Sea
atgaaactattggtaggtttaggcaaccctggagcgaagtacgaacagacacggcataatataggtttttttattgttgatcaaattgcaaagaaatattcctcagaaaattggcgcaaaaaatttcagggagttgtttgcagttgtgacataaatacatttaaagttctgattttaaaacctgagacatttatgaataattctggactgtcagttttagaggcgagcaagttttttaaacttaatctcgctgatattattgtgatacacgatgacttggaccttcaacccggtcagttaagaattaaaacggctgggggtcacgctggtcacaatggtttaaaatccatccaccaattattaggcccgagctacaataggattagaattggtataggtcatcctggggaccgtgacaaagtctcgtctttcgttctgtctaatttctcgaaaacagataagttgtggctagggaaaataacacaacactttctcgatgaattgacaatgt

SEQ ID NO: 259495 - DNA, 548 bp, Unknown
  Bacterial polypeptide expressing nucleotide sequence isolated from the Sargasso Sea
catgaaagaaatatttttaattggtcttggcaaccctggcaaaaaatatctaaacaacagacataatataggtttcttgcttcttaaaaatttttcaaaaaaatataattcaaattttttattaaaagataagataaaaagttcctgctcagaatttcaggtaaatgattctaatttcagattatttttaccaaatacatttatgaataacagtggtgatgctgtccgagcaatagttgattggtacaaaataaatttagatcagattttcataatagtggatgataaagatcttccccttggaaaaataagatttagaagaaaaggaagctcaggtggacataacgggctgaaaagcatcattgaacaattacagacacaaaactttaagagaataagaattggtattgggtcacctcctctaataaaagaaaaaaataatttcaataccatttcacatgtattgggaaatatttctttagcagaacaatcaatattggataaagtgtataagagagtaatagaatcgctcgaacaaataaatacta

SEQ ID NO: 259496 - DNA, 592 bp, Unknown
  Bacterial polypeptide expressing nucleotide sequence isolated from the Sargasso Sea
atgactgaatcaattcagttaattgtgggcctgggtaatccaggcccagaatacagccagacccgccacaacgcaggtcaatggtttgtagaacaactagcccgccgctataacgtttctcttcgtcctgacagcaaattttttggcctgactggcaaatttgtcacccaaggtcaggaatataaattgctggttcccactacgtacatgaatttaagtggcaaagccgttgcagctatggcgcagttctataaacttttacccgaaaacattctggtggctcacgacgaaatggcgatagcgcccggcgtagctaaatttaaactgggtggcggtcatgccggtcacaacggtttaaaagacatcaccagtaaactcggcaacaatgccaatttttatcgcctgcgactgggtattggccatcctggccacaaagatttagtcacaggttatgtgctgggcaaagcaccgcagtccgaacagaagctgatcgatgaagctttagatgaatcgatgcgttgttttgagctctggttaagcgatggcttaattaaagcgcagcacaggttacatagttttagcgcgacttaag

SEQ ID NO: 259497 - DNA, 613 bp, Unknown
  Bacterial polypeptide expressing nucleotide sequence isolated from the Sargasso Sea
gatggccgatgtgctccggctggtggtcggcttgggcaatccaggttccaaatacgagggaacccgtcacaacattggcttcatggcattggagcggatggcatcacgcggggggttcagttttcgtcagcagaacaagttgcatggtctggcggcggagaacggcatcggtgaaagccgactgaggctgctcatgccgcagacctacatgaacgacagcggtcggtccatccgcgcagcgctcgactggtttggcttcacgccggaacaactgctggttctggtggatgacatggacatccccttggggcgtctgcggttgcgggcccagggcagcgctggaggccataacggtttgcggagcacgatccagcacctgggcactcaggccttcccgcgcttgcgcatcggcattggtgcgccggcggacaatcctgcggaacggcgggcgcgcaccgtgtcctatgtgctcggtcccttcagtcgtgcggagcagcctgaggtggatgccgtgttggacggtgtgttggaggccatccagcgcattcagcgccagggtctggaccgcgccggcaattggatcaacggcttccgtccggcctcagtggaatga

SEQ ID NO: 259498 - DNA, 562 bp, Unknown
  Bacterial polypeptide expressing nucleotide sequence isolated from the Sargasso Sea
atgtttttaatttgtggacttgggaacccaggtgtaaattataaaaataccagacataatgtaggtttccatttagcagataatgtaatctcacattttaatttagatataatcaaagaagatagaaaaaaagaattatattcaggtgtaattaataatcaaaaaatctttgtgttaaaacctcttacattcatgaatttatctggaaaagctgtttcagaaattgtgaatttttataaaataaaattagaccatacttttgttatacatgatgaccttgatttagaattatcgaaagtaaaaataaaacaaggtggtggaaacggaggtcataatggattggaaagtattgaccaatttataggggaaaattattttagaatacgtattggaattgatcatcctggacataaagatttagtttcaagttatgttttaaataaattttcaaaatcagaagaagaaataataaataaaaaaattgataaaatggttaaaaatatagaattaatattttcagatattcctctatttttaacaaaaataagtgagcaaaattaat

SEQ ID NO: 259499 - DNA, 703 bp, Unknown
  Bacterial polypeptide expressing nucleotide sequence isolated from the Sargasso Sea
atgcaactatttgttggtctcggaaacccaggacaacagtaccaaatgaaccgtcataacattggttttatggctgtagacgaaatagcaaatgccaattcgtttggcccttggcgttccaagttccaaggtctattttgtgaaggaagtctagaaaaccagaaggttttaattctgaagccctcaacttttatgaatctgtcaggacaatcagtaggcgaactagctcgtttttataagattaattcgcagaatataactgtttttcacgatgaactggatttaactcctggaaaatgccgttttaagttgagtgggagccacgccggccacaatggtttaaaatcaatccacagccacataggtgaaaattataaacgcataaggctaggaattggacatcctggtcaaaaagaactggtctcaaaatatgttttggaaaatttctcaaaaaaagagcaacagtggcttgaaaagcttctgaaaaaaattgccgccgaagctactcacctggctaatgatgcttcagaaaaatttattaatcaaatttctcttggctccaaaaacgaaaataaaaaagataaaaaaggtaagaaatttaaagttgcaactccatctaaaaaaactaatttccagacggatgaaaataaaatgcaaaaatctactctgcaaaaattgatggacaagtttagtagaaagtaaa

SEQ ID NO: 259500 - DNA, 691 bp, Unknown
  Bacterial polypeptide expressing nucleotide sequence isolated from the Sargasso Sea
tttgtgcaattattcagcttttggcgataagcacgcagttttttgtcaagcgcaccgtcagacagtaaactacacgtcgtttatcgaaacactcaggacaaaacacgtggcgattaaattgattgtcggcctggcgaaccccggcgcagagtatgcggcaacgcgacacaacgcaggcgcatggtatgtcgatctactggcagagagattacgcgcccccctgcgcgatgagccgaaattcttcggttacacctcccgagtaacgcttgaaggtgaagatgtccgtctgctggtaccgaccacatttatgaatcttagcggcaaggccgtcggtgcgatggccagtttttatcgtattaaccccgatgaaattttggtcgcgcacgatgaattagacctgcctcctggcgtcgccaaatttaagcttggcggaggccatggcggacataatggcctgaaagacatcattagcaaattaggtaataaccccaactttcatcgtttacgcgttggaattggccatccgggcgataaaaataaagttgtcggatttgttttaggcaaaccgcctgtttcagaacagaagttaattgatgaagcgattgacgaagcggcacgttgtaccgagattttgttcaaagatggcctgaccaaagctacgagccggttacacacctttaaagcgcaataa

SEQ ID NO: 259501 - DNA, 604 bp, Unknown
  Bacterial polypeptide expressing nucleotide sequence isolated from the Sargasso Sea
catgatcaagctgatcgtcgggctcggcaatccgggcgctgaatacaccgcgacgcgccacaacgccggcttctggctggtcgatcaactggcgcgcgaagcaggcacgacgctgcgcgacgagcggcgcttccacggcttctacgcgaaagcccggcttcacggcgaagaagtgcatctgcttgaaccgcagacgtatatgaatcgctcggggcagtccgttgtggcgcttgcacagttcttcaaaattcttcccgacgaaattctggtcgcgcacgacgaactcgacatgccgccaggcagcgtcaagctgaagctcggcggtggcagcggcggccataacgggctgaaagacatcaccgcgcatttgtcctcgcaacagtactggcggctgcggatcggcatcggtcatccgcgcgacctgattcccgaaagcgcgcgggccggcgccaagccggacgtcgccaattacgtgctgaaaccgccgcggcgggaagaacaggacgtgatcgatgcgtcgatcgaacgggcattggccgtcatgccgcaaatcatcaaaggcgagctcgagcgggcgatgatgcaattgcatcgcaatccctga

SEQ ID NO: 259502 - DNA, 589 bp, Unknown
  Bacterial polypeptide expressing nucleotide sequence isolated from the Sargasso Sea
atgataccggatcaaccaatcaagctgattgtgggtttggggaacccaggcccacaacatgaaaggaataggcataatgctggcgtaatatttctgcatcatctttgcaaagcttatggaaataatctccgcggtgaggctaaattttttggtgaattttcctctatcgtcatagagggagccgacataaaacttctttttccaacaacttttatgaataacagcggcaaatctgttgctacagtttgcaatttttttaagctcgcgccagaaaatttgttagtagcctacgatgagattgattttgatgttggcgttactcgtttcaaggacggtggtggtcatggaggacataacggcgtgcgtgatatcataaatgccttaggcggcaagaatgattttttccgattacggattggcgttggacatccaggccataagtctatggtggctaactatgtcttgaatgacccctctcgagcagaggcgaatgcaattatgtcaaatattgaagacgccataagacttcttccgaccgctataaatggtaattgggaagaagcaatgcgtgttttacacagtaattaaa

SEQ ID NO: 259503 - DNA, 601 bp, Unknown
  Bacterial polypeptide expressing nucleotide sequence isolated from the Sargasso Sea
atgatcaaactgatcgtcggcctcggcaatcccggggcggaatacaccgcgacgcgccacaacgccggcttctggctgatcgaccagctcgcccgcgaagccggcacgacgctgcgcgacgagcgccgcttccatggcttctacgcgaaagcgcgcctgcacggcgaagaagtccacctgctcgagccgcaaacctacatgaaccgctccggccagtcggtcgtcgcactcgcgcaattcttcaagatcctgcccgaccagatcctcgtcgcgcacgacgagctcgacctgccgcccggcaccgtgaagctcaagctcggcggcggcagcggcggccacaacggcctgaaggacatcaccgcgcacctgtcgtcgcagcagtactggcggctgcggatcggcatcggccatccgcgcgacctgattccggaaagcgcgcgcaccggcgcgaagcccgacgtcgcgaacttcgtgctgaagccgccgcgtcgcgaggaacaggacgtgatcgacgcgtcgatcgaacgcgcactcgccgtgatgccgatggtcgtcaagggcgaactcgaccgcgcgacgatgcagctgcatcgcaactgat

SEQ ID NO: 259504 - DNA, 703 bp, Unknown
  Bacterial polypeptide expressing nucleotide sequence isolated from the Sargasso Sea
atgcaactatttgttggtctcggaaatccaggacaacagtaccaaatgaaccgtcataacattggttttatggctgtagacgaaatagccaatgccaattcgtttggcccttggcgttccaagttccaaggtctattttgtgaaggacgtctagaaaaacagaaggtcataattttgaagccctcaacttttatgaatttatcgggacaatcagtaggcgagctagcccgtttttataagattaattctcaggatataactgtttttcacgatgaactggatttaactcctggaaaatgccgttttaagttgagtgggggccacgccggccacaatggcttaaaatcaatccacagccacataggtgaaaactacaaacgcataaggcttggaattggacatcctggtcaaaaagatctggtctcaaaatatgttttggaaaatttctcaaaaaaagatcaacagtggcttgaaaagcttctgaaaaaaattgctgacgaagctactcacctagccaatgatgcttcagaaaaatttattaatcagatttctattggctccaaaaacgaaaataaaaaagataaaaaaagtaaggagttaaaagttgcaaatccatctgaaaaaaccaattttcagacagatgaaaacaaagtgcagaaatctactctgcaaaaattgatgaacaagtttagtagaaagtaaa

SEQ ID NO: 259505 - DNA, 562 bp, Unknown
  Bacterial polypeptide expressing nucleotide sequence isolated from the Sargasso Sea
atgtttttaatttgtggacttgggaacccaggtgtaaattataataataccagacataatgtaggtttccatttagcggataatataatctcacattttaatttagataaaatcaaagaaaataaaaaaaaagaattatattcaggtgtaattaataatcaaaaaatctttgtgttaaaacctcttacattcatgaatttatctggaaaagctgtttcagaaattgtaaatttttataaaataaaattagaccatacgtttgttatacatgatgaccttgatttagaattatcgaaagtaaaaataaaacaaggtggtggaaatggcggtcataatggattggaaagtattgaccaatttataggggaaaattattttagaatacgtattggaattgatcatcctggacataaagatttagtttcaagttatgttttaaataaattttcaaaatcagaagaagaaataataaataaaaaaattgataaaatggttaaaaatatagaattaatattttcagatattcctctatttttaacaaaaataagtgagcaaaattaat

SEQ ID NO: 259506 - DNA, 598 bp, Unknown
  Bacterial polypeptide expressing nucleotide sequence isolated from the Sargasso Sea
tatgcaagaaatatatttaattggacttgggaatcctggtaaaaaatattacaacagtagacacaatataggttttttactgcttgaaaagctctcaaaaaaatataattcaaattttttattaaaagataaacttaaaagttcctgctcagaatttcaaatcaataattctaccttcaggttatttttaccaaatacgtttatgaataacagtggtaatgctgtccgagcaatagttgattggtacaaagtaaacttagatcagattttcataatagtcgatgataaagatcttccccttggaaaaataagatttagaagaaaaggaagctcaggtggacataacgggcttaaaagcatcattgaacaattgcaaacacaaaactttaaaagaattaggattggtattgggtcacctcctctactaaaaggagaaaataatttcaatacaatttcacatgtattaggaaatatttctctagaagaaaaattaatattggataaagtgtataagagagtaatagaatccctcgaacaaataaatactaaaaaagaagatcatataattaatgaattaaactcttttaacaaagactaa

SEQ ID NO: 259507 - DNA, 589 bp, Unknown
  Bacterial polypeptide expressing nucleotide sequence isolated from the Sargasso Sea
catgagcgaaattaaattaatcgtaggtcttgccaatccgggcgccgaatatgcgcagactcgccataatgcgggcgcttggtatgtggaagaattggcccgtatctgtggcgtcagcttagtgccggacagcaagtattttggcctcaccgccagagccgtattgcatggtaaagatgtgcgtttgctgatcccaaccacctatatgaacttaagcggcaaagccgtgggggccttagcgagtttcttccgtattacgcctgaagaaattctagtggcccacgatgagttggatatgccgccaggtgtggctaaatttaaactcggtggcggtcatggtggccataacggtttaaaagacattattgctaaactggctaatgataaaaacttctaccgtttacggattgggattggccatcctggtgataagaataaagtaagtggttacgtactgggtaaggcgccagccaaagaacaagagctgatcaacgccgccgtagatgaagctgtacgttccactgaagtgctatttaaagaggacatggtgaaagccatgactcgtctacactcctttaaagcggagtaa

SEQ ID NO: 259508 - DNA, 574 bp, Unknown
  Bacterial polypeptide expressing nucleotide sequence isolated from the Sargasso Sea
atgcttttattagttggactaggaaatccaggacctgacagtgagaataatcgacataacatcgggtttaaaataatcgatgcaatcaattctcattttaaactttctaaacaaaaacccaaatttaaagggcttctaaccactggaaatatcgagtctaaaaaagtttatgctataaaacctttaaccttcatgaacaattcaggaacagcaataaaagaattgattgattattttaaaatagatgcaaaaaatgtaatcgtatttcatgatgatttggatattgattttggtaaagttaaagctaaagttggtggaacaagtgctggtcacaacggtattaaatctatagacaaatttattggcacagattactcgagagtgagggtgggtataggtcacccaaaggaaaaaagaagggttaatagtcacgttctcgaagattttaaagatgacgaagaagaaagaataaaagagattactgaaaatattgttaaattagttccaactttgatagacaaaaaaatcgatttattttcaagtaaagttaatcaaaatttaaatgggatttaag

SEQ ID NO: 259509 - DNA, 604 bp, Unknown
  Bacterial polypeptide expressing nucleotide sequence isolated from the Sargasso Sea
atgaaagaaatatttttaattggccttgggaatcctggaaaaaaatatttaaacaatagacataatataggtttcttgcttcttgaaaatttttcgaaaaaatataattcaaattttttattaaaagataagcttaaaagttcctgctcagaatttcaaatcaatgattctaatttcaggttatttttgccaaatacttttatgaataacagtggtgatgctgtccgagcaatagttgattggtacaaaataaatttagatcaaatttttataatagtcgatgataaagatcttccccttggaaaaataagatttagaacaaaaggaagctcaggtggacataatggtcttaaaagtattattgaaaaattacaaactcaaaactttaagagaataagaattggtattggttcacctcctctaacaaaaggaaaaaataatttcaataccatttcacatgtattaggaaatatttccatagaagaaaaatcaatattagataaagtgtataagagagttatagaatccctcgaacaaataaatactaaaaaagaagaatttataattaatgaattaaattcttttgacaaagaccaaccttaag

SEQ ID NO: 259510 - DNA, 604 bp, Unknown
  Bacterial polypeptide expressing nucleotide sequence isolated from the Sargasso Sea
catgaatgaaatatttttaataggattaggaaatccgggtaaaaaatactcaaaaagtagacataatatagggtttttattgcttgaacatctctcaaaaaaatataattcaaattttttattgaaagataagctcaaaagttcctgctcagaatttcaaatcaatgattctactttcaggttatttttaccaaatacgtttatgaacaacagtggtgatgctgttcgagcaatagtggattggtacaaaatcaatttggatcagattttaataatagtcgatgataaagaccttccccttggaaaaataagatttagaaaaaagggaagctcaggtggacataacgggcttaaaagcatcattgaacaattgcagacacaaaactttaaaagaataagaattggtattggatcacctcccctcatggaaggaaaaaataatttcaataccatttcacatgtattaggaaatatttctctagaagaaaaatcaatattggataaagtgtataagagagtaatagaatccctcgaacaaattaatactaaaaaagaagaatttataattaatgaattaaattcttttgacaaagaccaaacttaa

SEQ ID NO: 259511 - DNA, 370 bp, Unknown
  Bacterial polypeptide expressing nucleotide sequence isolated from the Sargasso Sea
cttgtctgccatccgactcatcgtcgggctcggcaatcccggcacgcaatacgaaggcactcggcataatgccggtgccttttttgtgcgccgtctcgccacacaattcgggttaacgctagccgcggaccgcaacgcagtgggcgattcagcgcgaggcactgtcgctggacacgacctgcggctgctgattcccgagacctttatgaacgaaagcggccgatcggtagccgccatggcgcgctactaccgcatcgagaccaatgcaattctgatcgcccacgacgagctcgatattccgcctggtgagtcccgattcaagcacgacggcggccacggtgggcataacggtctcagggatatcatccct

SEQ ID NO: 259512 - DNA, 604 bp, Unknown
  Bacterial polypeptide expressing nucleotide sequence isolated from the Sargasso Sea
catgaaagaaatatttttaattggtctagggaaccccggcaaaaaatacctaaacaatcgacataatattggtttcttactgcttgaaaatttttcgaaaaaatataattcaaattttttattaaaagataagcttaaaagttcctgctcagaatttcaaatcaatgattctaatttcaggttatttttaccaaatacgtttatgaacaacagtggagatgctgtccgagcaatagttgattggtacaaaataaatttagatcagattttcataatagtcgatgataaagatcttccccttggaaaaataagatttagaagaaagggaagctcaggtggacataacgggctaaaaagcatcattgaacaattacagacacaaaactttaagagaataagaattggtattgggtcacctcctcttataaaaggaaaaaataatttcaatactatttcacatgtattaggaaatatttctctagaagaaaaatcaatattggataaagtgtataagagagtaatagaatcactcgaacaaataaatactaaaaaagaagaatttataattaatgaattaaattcttttgacaaagaccagccttaa

SEQ ID NO: 259513 - DNA, 583 bp, Unknown
  Bacterial polypeptide expressing nucleotide sequence isolated from the Sargasso Sea
cttggctgatatccgccttatcgtgggtctgggtaatccaggccccgaatacgaaaatacccgacacaatgccggtgaatggtttctcaaccaacttgccgacgcctacaacgccccgctaaaaccagaaaccaaattcttcggtaaaactgctcgcattaccattgcaggcaaagatatccgtttgctctaccccactacctttatgaataaaagtggacaagccgtagcagcactggctaacttttaccgcatagaaccagaacaaatattagtagcgtttgacgaattagatttacccccaggtattgcaaaatacaaagtgggcggaagctctagtcaaaatggcgtgcgtgacattgtggctaaaatgggtaacaacaagaattttttgcgtttgcgcataggtattggtcatccaggtcataaaagccgcgttaccggccatgttcttggaaaaccaccagcagaagaaaaagcagccattgaaagtgccatcgatgaagcggtacgctgtacagaaattttgctgaaagaagaccttaagcaagcacaaaacaggttacactcgcacaaagggtaa

SEQ ID NO: 259514 - DNA, 574 bp, Unknown
  Bacterial polypeptide expressing nucleotide sequence isolated from the Sargasso Sea
tatgcttttgcttgtaggtttaggaaaccctggtcccaataatacaaacaatagacataatattggttttaaaattatagatgcaataaactctgaatttagtctgtcaaaacaaaaacctaaatttaaaggtcttttaacaactggaagtattcaagataaaaaagtttatgcgattaagccattaacttttatgaataattctggagtttgtatcaaagaacttattgattattttaaaattgatgcaaaaaatgtaattgtttttcatgatgatttagatatagacctaggaaaagtaaaagctaaatttggtggaactagtgcaggtcataatggtattgagtctattgataaatttattggaaaagattattcaagagtaagaattggaattggtcggcctgaacaaaaaagtaaagttaacaatcatgtcttagaagattttaatgaaaatgaagaagatagaattaaagatattactgaaaatattgttaaattaattccggctttaattaacaaagaaatggatttattttcaagtaaggttaaccagaatttgaatgggatttaa

SEQ ID NO: 259515 - DNA, 589 bp, Unknown
  Bacterial polypeptide expressing nucleotide sequence isolated from the Sargasso Sea
catgagcgaaattaaattaatcgtagggcttgccaatccgggcgctgaatatgcccagactcgccataatgcgggtgcttggtatgtggaagaattagcccgtatttgtggtgtgagcttagtcgccgatagcaagtattttggcctgacagccagagccgtattacacggtaaagatgtgcgtttactcataccgactacgtatatgaacttaagtggtaaagccgtaggtgctttagctaatttctttcgtattacacctgaagaaattctggtggcccacgatgagctggatatgccaccgggcgtggctaaatttaaactcggtggcggccatggtggtcataacggtttaaaagacattattgccaaattagccaatgataaaaacttctatcgtttacggattgggattggtcatcccggcgataaaaataaagtcagtggttacgtactgggtaaggctcccgcgaaagagcaagagctgatcaatgctgccgtagacgaagccgttcgctcaactgaaattttatttaaagaggacatggtgaaagccatgactcgattacactcctttaaagcggagtaa

SEQ ID NO: 259516 - DNA, 607 bp, Unknown
  Bacterial polypeptide expressing nucleotide sequence isolated from the Sargasso Sea
catgcagcttattgtgggtttgggcaatccgggtgaaaaataccaagataatccccataacatcggattcagaacaatcgatcaactgatgacggcactcgatcttgagggctatcaaagacgtttcaatagtgaattccagagaacattagaaaacggccaagtgactttgatgctcaagcctgaaacctatatgaaccgtagtggcgaagcgattgcagaatgtgcaagatacttcaagattccttcagaaaaaattcttgtgatcagtgatgacctggatcttccagccgggaaagcacgactgcgagtctccggagggcacgggggccataatgggctcagatccgttattcaatgcctgggcacggaccaattccttcgggccagaatcggtattggcaggcctgattcatcaagctctgggaaggaagcctctgtgtcccaatatgtgctgggcaaaatggaagaaacgaaagcggaactttgtctgcaggcgattgagaaagttgtggaaatactggtccgttttgtgcgccagtcacgtttccaaagcacatcaatcagcattcccactccggctctgcctgcaacagggcaaggttga

SEQ ID NO: 259517 - DNA, 595 bp, Unknown
  Bacterial polypeptide expressing nucleotide sequence isolated from the Sargasso Sea
catgattcatagcccattgaaactattagtaggactgggtaacccagatgcgcatcttttaaaaacaagacataatgttggtttctggtttgtcgatcaattcgcagaaaaaatttctcaacaattcaaacttgttaagaaatatgagtcagaaattatagagcttgaggacaaaaatctaaatattctgaagccaatgaattatatcaataatagcggagtagcaattcagaaatttattaaacaatcatcaataaacgcaaatcagatactagtaatttatgacgacctagatctcaaggttggacaaattagactaaaaaaaggaggtagtagcggcggacataacggtttaaatagcatcattagcgaatgtggatcaaaagatttttggcgattaagaattggcattggtaagccaattgcaaaagaagaaacagtaaaatatgttcttggcaagccatctctagcagatactgagatcatttatgaatcattcaataaaatactggttaattttgatgacattcttaaaggaaatttctcaaaagtaatgaacttatttaatcagaggtctgaaagagatggggtttaa

SEQ ID NO: 259518 - DNA, 574 bp, Unknown
  Bacterial polypeptide expressing nucleotide sequence isolated from the Sargasso Sea
tatgcttttacttgtaggtttaggaaatcctggtccaaataatactaacaatagacataatattggtttcaaaattatagatgcaatcaactcagagtttagcctttcaaagcaaaaacctaaatttaaaggacttttgacaactggaaatattcaggataaaaaagtttatgcgataaagcctttgacatttatgaataattcaggagtttgtataaaagaacttattgattattttaaaattgacgcaaaaaatgtaatagtttttcatgatgatttagatatagacctaggaaaggttaaagcaaaagttggtgggagtagtgctggacataatggtattgagtctatagacaaatttattggtaaagattactcaagagtcagaattggaattggacgacctaaacaaaagagtaaagttaacacccatgttctagaagattttagcgaaaatgaagaagacagaataaaagatataacagataatattgttaaattaataccggctcttataaataaagaaatggatttattttcaagcaaagtaaatcagaatttgaatgggatttaa

SEQ ID NO: 259519 - DNA, 622 bp, Unknown
  Bacterial polypeptide expressing nucleotide sequence isolated from the Sargasso Sea
atgtccaatcggttgagattggtcgtgggcctcgggaatcccggcggcaagtaccaggggacacgccacaacatcggcttcatggccctggagcttctggctgagaagaacggctttcagtttcgccatcaatccaaattgcacggtctcactgccgatgtcggcattggtgatcagcgtttgcgtttgttgatgccccagaccttcatgaatgacagtggtcgctcgatcagagcggcactcgactggttcgatctggttccggatcagctgctcgttctcgtggacgacatggatctacccctcggtcgcctgcggttgagagccaagggcagtgcaggtggtcataacggtctgcgcagcacgatccaacatctgagcactgagatgtttccaagactgcggatcggaatcggtgctcctgctgagaatcccaccgaacggaaggctcgcactgtctcccatgtgctcggtagcttcggaaaagatgagcaggggacggtcaaacaggtgctgaatgaagtgctcgatggattgcagctgatccagcgggtcggcattgagcgagcagggaacagcatcaatgcctttcgccccgagcatcactccgcgcagcgatgac

SEQ ID NO: 259520 - DNA, 580 bp, Unknown
  Bacterial polypeptide expressing nucleotide sequence isolated from the Sargasso Sea
aatgtctttaaagctaatagttggtctcggcaatcctgaaaaaaaatatttatctacaagacataatgtaggtttttgggtattagattcattagctgaaaaattgaccaaaaccttctcacaacagaagaagtatgagtcagaattgcttgaatatgagtttgattcaaaattgtttcatatgatgaaacctcttagttatataaataatagcggaattccaattagaaaatttattaagaataagaatatcgaagcagaaaatattttaataatctatgatgatttagatttaggtgttggaaaaattagacttaagcagggtggtggaagtggcggccataacggactaaatagtattattgagcaaattggatcaaaaaatttctggagattaagaattggaattggcaagcccaatgataaaaataatgttatagattatgttttaggcaaaccttcattggatgataaaaatttaatccaccaaagtatagagataatgcttagtgaaatagatgctttttttaatggtgaatctacaaaactaatgaataagctaaatagggagaataagtaa

SEQ ID NO: 259521 - DNA, 607 bp, Unknown
  Bacterial polypeptide expressing nucleotide sequence isolated from the Sargasso Sea
catgcagcttattgcgggtttgggcaatccgggtgaaaaataccaagacaatccccataacatcggattcagaacactcgatcaactgatgaaggcactagatcttgagggctttcaacgacgtttcaatagtgaattccagagaacattagaaaacggccaagtgactttgatgctcaagcctgaaacctatatgaaccgcagcggcgaagcgattgccgaatgcgcaagatacttcaagattccttcagaaaaaattcttgtgatcagtgatgacctggatcttccagccgggaaagcacgactgcgagtctccggagggcacggcggccacaatgggctcagatccgtcattcaatgcctgggcacggaccaattccttcgggccagaatcggaattggcaggcctgattcttcaagctctgggaaagagacctctgtgtcccaatacgtgctgggaaaaatggaagaaacaaaagcggagctttgtctgcaggcgatggaaaaggttgtggatatgctggtccgttttgtacgccagtcacgtttccaaagcacatcaatcagcattcccactccggctctgcctgcaacagggcaaggttga

SEQ ID NO: 259522 - DNA, 604 bp, Unknown
  Bacterial polypeptide expressing nucleotide sequence isolated from the Sargasso Sea
atgaaagaaatatttttaattggattgggaaatcctggtaaaaaatactcaaaaagtaggcataatataggttttttactacttgaaaatttttcgaaaaaatataattcaaattttttattaaaagataagcttaaaagttcctgctcagaatttcaaatcaatgattctaatttcaggttatttttaccaaatacgtttatgaataacagtggtgatgctgtcagagcaatagttgattggtacaaaataaatttagatcagattttcataatagtcgatgataaagatcttccccttggaaaaataagatttagaagaaaaggaagctcaggtggacataacgggctgaaaagcatcattgaacaattacagacacaaaactttaaaagaataagaattggtattggatcacctcctctaataaaaggaaaaaataatatcaataccatttcacatgtattaggaaatatttctctagaagaaaaatcaatattagataaagtatataagagagtaatagaatcactcgaacaactaaatactaaaaaagaagaatatataattaatgaattaaattcttttgacaaagaccaaccttaag

SEQ ID NO: 259523 - DNA, 579 bp, Unknown
  Bacterial polypeptide expressing nucleotide sequence isolated from the Sargasso Sea
agatgattagtcatcaagatctcagtcattattgcgctgaaagctatcgagagtcggactttgaagaagccaacattgaagtcattgtcagggagaatgtattcgcttttcgcggaacagatgaacctaaagacgcgattcgagatctgagaatcctgccactttggacacgtgaactcggctggtgtccggcgggatttctcagggcatctaaaaggctggttaataaagtgactagtgtttgtttagagcgagacatagatcataaaaagattgagttaacagggcattccttgggtggggcagttgctctaatcgttggtgctctgatgactagggatgagataccaccgttacaaatcgtaacatttggcgcacccagatgtggacgattaaagatattagacggggttccagtgacacaatacagacacggcaaggatattgtgccgttggttccccctctaatgcgaagacatacaaagctgttagagtttggcaagcctgggaagagctatattaaagatcatttcatgttgaactatgtaaagatgaataaatctccagattattactgat

SEQ ID NO: 259524 - DNA, 760 bp, Unknown
  Bacterial polypeptide expressing nucleotide sequence isolated from the Sargasso Sea
ttggggccgcagcggtggcgctgctttccctgcccacgccccaggcgccctccccgcggccagtgcaggcccggaagagactcggccgcgccccatggcgcctgggatcgcggcagccgcggcacacccgcgcggtcaagtttactctttcgcggccgcccccgcgcttcctgtcaactttcggcacttggggccgcagcggtggcgcggctttccctgcccacgccccaggcgccgtccccgcggccagtgcaggcccggaagagactcggccgcgccccatggcgcctgggatcgcggcagccgcggcacacccgcgcggtcaagtttactctttcgcggccgcccccgcgcttcctgtcaactttcggcacttggggccgcagcggtggcgcggcggtccctgcccacgccccaggcgccgtccccgcggccagtgcaggcccggaagagactcggccgcgccccatggcgcctgggatcgcggcagccgcggcacacccgcgcggtcaagtttactctttcgcggccgcccccgcgcttcctgtcaactttcggcacttggggccgcagcggtggcgctgctttccctgcccacgccccaggcgccctccccgcggccagtgcaggcccggaagagactcggccgcgccccatggcgcctgggatcgcggcagccgcggcacacccgcgcggtcaagtttactctttcgcggccgcccccgcgcttcctgtcaactttcggcacttggggccgcag

SEQ ID NO: 259525 - DNA, 739 bp, Unknown
  Bacterial polypeptide expressing nucleotide sequence isolated from the Sargasso Sea
atggatgaaatgattgaaaaggttaaaaatggatatatacttaatatttacaaagacaagttagagctatctaaagcggtttttaagtttattgaaagtcacattattcatactttaaaaaagaaagacaggttccaattttgtttaagtggaggttcaactcctaaatctgtctacaagcttttatcaaaaagtgatcttagatgggatatggttgatgtctttttaggggatgaaagatgtgttgatccaaattcagaattgagtaactcgttaatgttgaagaattcattgttaactaattttggatctaaagcttttttttatgaaattttcaatgatttaaatgctgatgatgaagctacaaaaaatcaatttatttctaaattatttgaaaaatgcggatcaaaccctccaacttttgatttaacattattaggtcttggagacgatggtcatacagcctcactattcccttatcaaaaaaataataatgtagatgattttgttatttttaatgaaggtaaaggtttaaaaagaatttcattaactccaaaggttctttcagcttcttcaaagatagtatttttagttagtggcgcttctaaaagaattgctcttgagaggttattagatgaaaaagagccgtcagatagaacaccatcaaaattaataaaatctattaatcaaatttcaatattttgtgatcaggaatcagcaaaagaattagaaatttagt

SEQ ID NO: 259526 - DNA, 688 bp, Unknown
  Bacterial polypeptide expressing nucleotide sequence isolated from the Sargasso Sea
actgctttggctcacacacctaccaacgcgtcgatcgcgaaggaaccttccataccgagtggctgcagtgagccagtacgagctgatcacattggctgatcgcgacagcctggccaaacgagcagccgaaaccgtcgcccaggtcattgacctcaccttggccgagtgcgatcgggtccaaatagcactctccggtggctcaacacccgaagccacttaccacctgctgggccgcgagcacctggcctgggaccgcgttgatctgctgatgggagatgagcggtatgtgcccgctgatgatcccctcagcaatgcccgtatggtgcgcaacagccttatggctgaaggtcccggcaagcatgcctgctttcacccggtgccaaccgatggcggcgatgtgaacgctgatgtggctcgcttcaacagctcactcgagcagatctgcggtagcagtccaccgcaatttgatttgatcctcctgggtttaggcgatgacggtcacacggcatccctcttccctggtaccgccgctacgcaggtcaaggatcattgggtgaccgtcggcgaaggcaaagggatccccaggatcacactgactccaccggtactttgtgccgcgcgtcaagttgtgtttctagtggcaggagcggccaaacagcaggcgcttgctcgccttctcgatgcctct

SEQ ID NO: 259527 - DNA, 622 bp, Unknown
  Bacterial polypeptide expressing nucleotide sequence isolated from the Sargasso Sea
atgaccaactaccgcatccagcgggcgaaggatcctcaggacctcgcccgtcaggcctgtgaaactgttgccgcccaaattgatctggccttggatcaacgggaccgctgccagatcgctctctccggtgggagcacacccgccagcgcttactccctgctcggtcaggaacggttgccctgggaccgggtggacgtcgtcctgggtgacgagcgctgggtggctgccgatgatgcgtccagcaacgccggcatgctgcgccgcacccttctcgcacccgggcctggagcttcagccgcttttcatcccgtgcccaccgtggaactggacagccctgaggcaagtgcccaggcttttgctgaccagatttctcagctgtgctcaggagcaccaccggtgttcgatgtgatgctgctgggcctgggtgatgacggccacaccgcatcccttttccccggcactgaggctccagcggtgctggatcgctggacgaccatcgggcgcggcaaggggttggatcgcatcactatgacggctcctgtgctcagtgccgcccgtcaggtgatcttcctcgtcagtggggccggtaaacaggaggccctcaggcgactggtcgatccct

SEQ ID NO: 259528 - DNA, 696 bp, Unknown
  Bacterial polypeptide expressing nucleotide sequence isolated from the Sargasso Sea
gatgaccaaataccgcatcgagcgggcgagagattcccatgacctcgctcgcaaggcctctgaaatgattgccgctcagattgatctggcactggaccaacgcgatcgctgccagatcgctctctctggtggaagcacgcctgccagggcctactccctgctcggacaggagaggctgccctgggatcgggtggacgtcgtgttaggcgacgagcgctgggttgctgccgacgatgagtccagcaacgccggcatgttgcgacgcaccctgctctcccccgggcctggagcttcggccgcctttcacccggtgcccaccgtggaactggaaagccctgaggccagtgcccaggcctttgctgaccagatttctcagctttgctcaggagcaccaccggtgttcgatgtgatgctgctgggcctgggggatgacggccataccgcatcccttttccctggcactgaggctccagcggtgctggatcgctggacgaccattagccgaggcaaagggttggatcgaatcaccttgacggctcctgttctcagtgccgcccgtcaggtgatcttcctggtcagtggggccggaaaacaggaggccctcaggcgactggtggatccctccgaatctttcgatcgcacccccgctcggctggttcaacctgctagtgatgtgctggtcctcgccgatcagga

SEQ ID NO: 259529 - DNA, 739 bp, Unknown
  Bacterial polypeptide expressing nucleotide sequence isolated from the Sargasso Sea
atggatgaaatgattgaaaaggttaaaaatggatatatacttaatatatacaaagacaagttagagctatctaaagcggtttttaagtttattgaaagtcacattattcatactttaaaagagaaagacaggttccaattttgtttaagtggaggttcaactcctaaatctgtctataagcttttatcaaaaagtgatcttagatgggatatggttgatgtctttttaggggatgaaagatgtgttgatccaaattcagaattgagtaactcgttaatgttgaagaattcattgttaactaattttggatctaaagcttttttttatgaaattttcaatgatttaaatgctgatgatgaagctacaaaaaatcaatttatttctaaattatttgaaaaatgcggatcaaaccctccaacttttgatttaacattattaggtcttggagacgatggtcatacagcctcactattcccttatcaaaaaaataataatgtagatgattttgttatttttaatgaaggtaaaggtttaaaaagaatttcattaactccaaaggttctttcagcttcttcaaagatagtatttttagttagtggcgcttctaaaagaattgctcttgagaggttattagatgaaaaagagccgtcagatagaacaccatcaaaattaataaaatctattaatcaaatttcaatattttgtgatcaggaatcaacaaaagaattagaaatttagt

SEQ ID NO: 259530 - DNA, 248 bp, Unknown
  Bacterial polypeptide expressing nucleotide sequence isolated from the Sargasso Sea
catgaaacaaaccgtttataccgccagcccggaaagccagcagattcatgtctggagtctcgatcttgagggtaacctgaagcttgttcaggttgtggatgccccgggtcaggttcagccgatggtggtgagcccgaataaagagtatctctacgttggcgtacgtccggagtttcgcgtcctggcttaccgcattgcgcccgataacggcgcgctgactttcgccggcgaagcggcgctgccgggca

SEQ ID NO: 259531 - DNA, 715 bp, Unknown
  Bacterial polypeptide expressing nucleotide sequence isolated from the Sargasso Sea
gatgaccaactaccgcatcgagcgggcaagtgatgctgagtcgcttgcccgcagggcatcggacaccattgcagcccagatcagcctggtgctcgatcaaagggatcgctgccgcatcgcactctccggtggcagtacccctgccaaggcctattcctttctcggtcaggaccatcttccctgggatcgggtcgatgtgttcctcggtgatgaacgctgggtcgctgccgatgatgactccagcaatgccagcatgctgcgtcgcactctgctggcggatgggccgggacgatccgcccgtttccacgccgttctcactgtggagttggcggatgccgaggccagcgcagcggcttttggcgaccttgtcgctcaacactgtcccggggagccgccagtgtttgatctgatgctgctcggactcggcgacgatggccacaccgcctcgctgtttccgggaaccgaggcaccaacgatcaccgatcgctgggcgacagttggccggggcaagggcttggaccgcatcacactcacggcgccggtgctgagtgctgcccggcaggtgatctttctcgtgagtggagcgggcaagcaggaggccctgaggcgactggtggatccctctgaatcctccgaacgcacccccgctcgcctggtgcagcctgctagtgatgtcctgatcctcgccgatcaggatgcaaccgccagcctctga

SEQ ID NO: 259532 - DNA, 380 bp, Unknown
  Bacterial polypeptide expressing nucleotide sequence isolated from the Sargasso Sea
agatccgcatggcaaaattgagtgcgtccagacgctggatatgatgcctgccgattttaccggcgtacgctgggcggcggatattcatctgacgccggatggccgtcatctgtacgcctgtgaccgcaccgccagccttatcaccattttcagcgtatccgaagatggcagcgtgctgtcgattgaagggtatcagccgacggaggcgcagccgcgcggtttcaatctcgatcacagcggtaaatatctgatcgctgcggggcagaaatcacaccatattgcggtctatgagatcgccggtgagcaggggctgctgaccgagaaagggcgctacgccgtcggtcaggggccaatgtgggtggtggttaacgcttactaag

SEQ ID NO: 259533 - DNA, 643 bp, Unknown
  Bacterial polypeptide expressing nucleotide sequence isolated from the Sargasso Sea
atgaaacaaatcgtctataccgccagtcctgaaagccagcaaatccatgtatggcagcttgataccagcggtgatctgaccttgcgccaggttgtggatgtcgcaggccaggttcagcccctggttatcagcccggacaggcgttttctgtatgccggtgtacgcccagaattcagggttatcgcctggcatatctccccggaagacggcacattgtccgatgccggccatgctgcgttacctggcagccctacgcatatctcaaccgaccacaccgggcgtttcttattctgtggctcttataatggtggttgtgtcagtgtgaccccactgaacgacggcctgccgggtgaagtggttgaagtgattgaaggcctggaagggtgccactctgccaatatcagcccggataataaaaccttgtgggtaccggcattaaaacaggatcgcatctgcctgtttaccctggaagacagcggtaaattaacaccgcaaaaaccggcagaagtgaccacggtggaaggagcaggccctcgccatatggtattccatccaggtgggcagtttgcctactgtgttaacgaactcaacggcactgttaatgtctgggcactgagtgacccacacaatcaaatcgcctgtg

SEQ ID NO: 259534 - DNA, 748 bp, Unknown
  Bacterial polypeptide expressing nucleotide sequence isolated from the Sargasso Sea
cacagtgcttcctcttgctttttattttgaatattcaaatttcaaaataatttttagtaacaaaaaattaataattttatcaattacaactggtttcgttttattcctaggaatgggtctacaacaatacgcattacaaatatcacagatttcaaatgtagcatttcttacagcgctttatgttcctattgttggaattatttcaagatttatttttaaaacaagattacattgggttatttggatagcagtattattatgtttatatggatcctatttactttcttctaatcaaagtattgaaatacaaaaatctgattctttaattttcatagcagcaatttgttttgctttgcacattattttaatagatgtttttattaaaaaaataaatagcccttttacatttggatgtactcaatattttattgtatttattatatctcttataattgctttaatatatgaacagccaacattagaaaatatttctattgaatggtttgagatactttacaccggtattttatcagcaggcataggatatactttacaaattattgcccaacataaagccagtccaacaccagcagcaattatattatcgatggaagctgtctttgctgctctagctggatggatattaattaatcaaactcttgatacaaataaaatcctaggatgtattgcaatttttataggagtaattatagtacaaattgtaccaaaaatgagaaaatccaaatga

SEQ ID NO: 259535 - DNA, 541 bp, Unknown
  Bacterial polypeptide expressing nucleotide sequence isolated from the Sargasso Sea
gatgtgttttaccactggcaattcatactcatgggaaaaagtacttgttccagactctgtagataaaaaaacaaaatctccttggaatttctttgaggactttgaaaatgaaaaagtaggaagattgagaaccaacaaatttacaaccaacgataagggcacaggtctcaaaccatttgaaattaaggaagaccctgatggtaatacctatctcgctgtgacagtgaaagatggatggaatgttgatcaagcagggtggacaaaggaaacaactgaaagagcagaatttcaggtgtttcctaaaaaggcattaggtaaagaaatatggatcagtttcaaaacaagacttccagaagattttactcatatcgacgatagagtattattttttcaattcaaaaatatgatatcaacaggaaaagtcagtcctctgataggattacgttattataaaaatggaaatagattaaaaataggaggacagaccggaggaaatgcacgtcgatctatgagtcaaaaggaaaaggacctttatcgtatt

SEQ ID NO: 259536 - DNA, 852 bp, Unknown
  Bacterial polypeptide expressing nucleotide sequence isolated from the Sargasso Sea
ctcgtcatttagatttaaatgaaatttcaaaaaaaataaattgtgtatcgtatgaaaatttctttcaaaaagattatgattgggtctatatctcctcaattccatctaaaaactttgaattctcaaaaaagtgtttaaaaaatggttggcatgttctttgtgaaaaaccttcttttttaagtaaagataattatagtgaaataatagaaattgcaaaaacacaaaaattactttttatggagaattatacgcacaccttgcatccgagatatagtttattgaaaaaaatattaagtaatcaacaaagcgaagtcaaatatattgattttaaatttttttaccctggtccaaatgataaaaaaaattttagatatcatgaatcaatgggaggcggtgttcaatttgactctcttgggtatttaattgatactttaatttatctgtcgattattgataaaccttttgatttcaaaatatctcaatcacaaaaaaatggttgcgttaattttataaatattgcttctaaagaaggtaataaatttatttctttgacaacgggtatagatttgcagtatgatgcatccatatcattcagtggagataattggaaaattgttttgcacagggcttttgcaatagataaaaatcacacctcagaaatcgtaattcaaaatggatttaatgaaacaaaacaattagttgattcaagcgatcaattcaagaatatgattaatttatttattaatataattaaatctaaagaagatataaaatttggtcttttttctcatcatcttaatacgtataatgttcggtcaacaatattaaaaaatatttataataagttataat

SEQ ID NO: 259537 - DNA, 769 bp, Unknown
  Bacterial polypeptide expressing nucleotide sequence isolated from the Sargasso Sea
ttgaatgcaaatggtattcacgaccaagacaaccttggtcattggtctgatcaaaacaaacccgctgcctgcgatgcttgcgatgctaatgccacctgtgacaacattgctggttcccatgtctgcacatgtaacaccggatacagcggtgatggacagacatgttatgataatgatgagtgtgccagtggtgacaacacttgtcacgccacctttgccacatgtaccaatactgacggttcataccaatgtgcttgtaacgaaggatatcaaggaaacggtattgaatgtgaagactttaatgaatgctataacgatccttgccacgccgatggtaactgcgccaacaatgatggatcatttgtctgcacctgccatgacggttacactggtgacgggtttgagtgtgtcgacgataatgaatgtgatgatggcagcaataactgtcatgctgatgctgcttgtgccaatagtccaggatcattccagtgtacttgtaacgatggatactccggcgatggagtcaattgcgtcgataacaatgaatgcgcttccgatgatttgaacgaatgtcacaaatgggccacatgttccaatgttccaggttcttatgaatgtgcttgtaatggaggtttcagtggtgacggatacggatgcactgacaatgatgaatgtaccaatgacgacaataactgcaatgctgatgctacttgcactaacaatgatggtagtttcacatgtgcatgtaacgcgcggatattctggtgaa

SEQ ID NO: 259538 - DNA, 1621 bp, Unknown
  Bacterial polypeptide expressing nucleotide sequence isolated from the Sargasso Sea
atgttttcccgacgctatatcgcgatgtggtgcgcggtcctgctgttcgtggccgtcgcggcgctcgctgcccggcacacgatcgcgtggctgtggctcgtaatcccggccgccctcgtcgccctcggcctgtacgacctgaagcaggaccgccacgcgatcctgcgcaactatccgctctggggccacttccgcttcctgttcgaattcatccgacctgaaatccgccagtatttcgtcgaggacgacaccgacgagaagccgttctcgcgcgcgcagcgcagcctcgtctaccagcgcgcgaagaacgtcgccgacaaccggccgtacggcaccgagctgaacgtgaaggccgtcgcgcacgaatggatcagccactcgctcgcaccgacgaagctgccgaaccacgatttccgtatccgcgtcggcgcgaaccgcgcgcagccgtacgacatttcgatcttcaacatctcggcgatgagcttcggctcgctgtccgcgaacgcgatccgctcgctgaacctcggcgcgaagaaaggcggtttcgcgcacgacacgggcgaaggctcgctgtcgaagtaccaccgcgaaaacggcggcgacatcatctgggaaatcgcgtccggctacttcggctgccgaaacgacgacggcacgttcaatcccgacaagttcgcgaagcaggccgccgatccgcaggtcaagatgatcgaggtgaagctgtcgcaaggtgcgaagcccggccacggcggcgtgctgccggctgcgaagatcacgccggaaatcgccgagacgcgcggcgtgccgatgggcaaggactgcatctcgcccgcgacgcactcggagttctcgacgccgcgcgggctgctcgaattcgtcgaacggctgcgcacgctgtcgggcggcaagccgaccggcttcaagctgtgcatcggccatccgtgggaattcttcgggatcgcgaaggcgatgctcgaaaccggcatcgtgccggacttcatcgtcgtcgacggcgcggaaggcggcaccggtgcggcgccgctcgaattcaccgaccacgtcggcgtgccgctgcaggaagggctgctgctcgtgcacaacacgctcgtcgggatcggcgtgcgcgatcgcgtgaagctcggcgcgagcggcaagatcatcaccgcgttcgacatcgcgcgtacgctcgcgatcggcgcggactgggtgaactcggcgcgcggcttcatgttcgcggtcggttgtatccaggcgcagcactgccataccgaccgctgcccgaccggcgtcgcgacgcaggacccggtgcgccagcgcgcgctcgtcgtgcccgacaaggccgagcgcgtgtacaacttccaccgcaatacgctgcacgcgctgcaggagctcgtgcaggcggccggcctcgcgcatccgtcggagctgcgcgcgcatcacatcgtgcagcgggtcgcgccgcatgaagtacgactgatgtcgcagttgctgaagtacctgaagcccggcgcgctgctcgacggccagacctgcggcttctcgctgtacgacaagtggtggccgattgcacgcagcgattcgttcacgctcggcgaagccgtgtacgcgtcgatcgaatgac

SEQ ID NO: 259539 - DNA, 1513 bp, Unknown
  Bacterial polypeptide expressing nucleotide sequence isolated from the Sargasso Sea
atgtctgatgatattgtagagtttaactggaaagagcctgtgttttgcgcagaaggaatggaactatttccaagggatacattagatcgcgctagatacgcttcttttttacacaattatttggcagttaatgccatcgatggcggctatgttttaaacctaaatgcaaagtgggggtctggtaaaacctactttattaatcgctggatggaaagtattaaagatacgcaccctgttgtttacattgatgcatggaagcaggattactctgacgatcctatgcttaccgttatttcatctttgataaatgctttaagtgagcaattgcctgctgaaaatgaaattctgtcaaatattactgaaaaatcagcccgatttatcaaagcagctgcgcctgctttactcaaaggattggtgaaaaagactgttggtttgaatttagatgatattaaagttgaaggtgagccaaaaagtgatgacaaattcatttctgatactttaagtgaatctgccgccgcagttgcacaatgcttagtaaaagaccacaacgataaattgcagtcagtcaactatttgcgaaatgaaattaaagcgttaattacggcagtcattgcacataagcaaggtgctttaaaaatgcctgcttttatctttattgatgaactcgatcgctgtcgacctagttatgccgtagaaatgttggaagtggttaagcacttctttgaattagataatattgcctttattgtggcgactgatactgaacaactacagcatgcggtgaaagcagtttatggtgatggctttgatgctcaaacctatttaggtcggttctttaggcggcgctactcgttaaccgagctttctcgctatgaatttgtaagccatattactgaaaataaagtcacttataatcctaagtggaaggaatttgtacctagcctagctgaattagatgactttactaatgtggtttctattgtggcggatagatttaggctttcgctaagggaaacagagcagttggtcgataagtttttatcagtgctaagcaatgctcaaaaaacgctgaatccttatttattgttaattttatttgtattaagagataaacattactcactatatgacgaatggatggaagcaattaataaagaggctagctttggtcaatctattggaaaattaacttatcgaatggatattttccccatgttttataaaagcagtgatcaagttttttttccaagagagaaacgagccgattctctggttgatcttcaacaaagccttgatatgattttatctattatgaataaggtgtgttctccttggaaccagagagaaaaagataaatttatagacaatttggaaggtgcattatattcatcttcatctcctaacctaactgtaagagcaaataagttgtatcaaataagtcttatgagtctcaaagccaataagtcagattataaaaactgggttgagctagcggtgtcttttgataaataga

SEQ ID NO: 259540 - DNA, 456 bp, Unknown
  Bacterial polypeptide expressing nucleotide sequence isolated from the Sargasso Sea
aaaactggcagctgctgtcaccagctttgccgggcttgggctttgcgggtgccgggcgctggatattggcgccagcaccggcggctttaccgaggtgttgcttgcgaatggggcggggcatgttgtcgccatcgatgtcgggcaggggcaactgcatgaacggctggcggctgatgctcgggtgaccgtgctggatcacactaatgcacgctatcttaccgcgtcaatgttgccctttgcgcctgatgttattgtttgtgatgcctcattcatctcgctgaaaaaattgctgccagcggtgcttgatctggccgtggccggggccagactgatcgtgctgatcaagccgcaatttgaagtcggtaaagggcttgtgggaaagcggggtgtggtgcgtgacccggccttgcatcagcatgttgttgccgatattgccaactggctgcaaaccgacat

SEQ ID NO: 259541 - DNA, 760 bp, Unknown
  Bacterial polypeptide expressing nucleotide sequence isolated from the Sargasso Sea
attgatgatatttggagtaataaaaaaaatctttcatataagaaattgagccttcattccagactagttattaggacaagtttgtctctaatattattcggatcattaggattttttatcactgaatcattgctaaatagtcaattttttaatgatttgaatttctttgaaagattatcatcatcaatctttgaaacagtgagtgcaagaactgcaggctttacaaattaccctatctccttgaactctatctcagatacgggcctcttattattaatgacccttatgtttattggagcaagtactggaggtactggtggaggcataaaaacaactacatttattgctttaatggctgcaactagatcaactttaagaggtcagaaagatgtaattattagcaatagattaatttcagataaagttattctaaaggcagttggaatcacagttggatctttgcttttcgttcttttaatggcaatgctgctaagtacaactaatacttttgttaaaaaagaatctttcacattcctagaaattctgttcacttgcatatctgcatttgcaacagttggttttgatattggtttaactgcaaaattaaatcatttcggccaatttattcttattgtcggtatgtttgtgggtagacttgggatacttttgctattaagtgcactgtggcaggctctttataagagtagaatagatagacaaaagagaattggctatcctagggctgatctttatgtttagg

SEQ ID NO: 259542 - DNA, 311 bp, Unknown
  Bacterial polypeptide expressing nucleotide sequence isolated from the Sargasso Sea
tatgttagtacgtcttgataaagagctggtaaggcgaggcttagtgcagacgcgtgctaaagctcaatttttaattcaatctggcgtcatactagttaatgaaagaatagttataaaacagtcttacgccgtgaataaagatgatgacttaagactagtccggaaccctaatccatgggttagcagggctggcttgaaattggagtatgcaataaggcgttttaaattaggaccgttggatggaattgctttagacatcggagcatctactggtggttttacagatgtattactattttatggctgcaaaa

SEQ ID NO: 259543 - DNA, 619 bp, Unknown
  Bacterial polypeptide expressing nucleotide sequence isolated from the Sargasso Sea
agccttcattccagactagttattaggactagtctgtctttaatattatttggatcattaggattctttatcattgaatcattgctaaatagtcaatttttcaatgatttaaatttgtttgaaaaggtaatatcgtcaatctttgaaacagtaagtgcaagaactgcaggttttacaaattatccaatctcattgaactctatctcagatacgggtctattgttattaatgacactaatgtttattggagcgagtactggaggaacaggtggaggtataaaaacaactacatttattgctttaatggcggcaactagatcaactttaagaggtcaaaaagatgtaattattagcaatagattaatttcagataaagtcattttaaaggcagttggaattactgtaggctctttactttttgttcttttaatggcaatgctgttaagtacaactaatacatttgttaaaaaagaatcttttacattcttggaaattctgttcacttgcatatctgcatttgcaacagttggatttgatattggtttaactgcaaaattaaatcattttggccaatttattcttattgttggcatgtttgtgggtaggcttggtatccttt

SEQ ID NO: 259544 - DNA, 376 bp, Unknown
  Bacterial polypeptide expressing nucleotide sequence isolated from the Sargasso Sea
cttgttaagtgaactattaaattacaaaacattttttcaaggttttaaaataaaaaaagaacgaatagataaactcatggtttcaaatggtcttgctaaaagtagggagcaagctaattctcttcttatgtcgggtaatgtttttgttaatgaaaaacgtgttgaaaagccaggacagcaagtccaaacagatttaataattgagataaagggtaaaacttatccttgggtttcgagaggaggtcttaagttagaaaaagctatcttggaattcaatctaaattgtaatttaataatagcccttgatattggagcaagtactggtggctttacagatgttttactatcaaaggggcaaaaaaatttatgcagttga

SEQ ID NO: 259545 - DNA, 789 bp, Unknown
  Bacterial polypeptide expressing nucleotide sequence isolated from the Sargasso Sea
ttgtcatgggtggactgggatggagagttattgatgatatttggagtcataaaaaaaatctttcatataaaaaattgagtcttcattctagactagttattaggacaagtttgtctctaatattttttggatcattaggattcttcgttactgaatcattgcttaatagtcagttttttaatgatttaaatttgtttcaaaagttattatcatctatcttcgaaacagttagtgcaagaactgcaggctttacaaattttccgatttctttgaactccatctcagatactggcctcttgttattaatgacattgatgtttattggagcaagtactggaggtactggtggaggtatcaaaacaactacatttattgcgttaatggctgcaactagatcaactttaagagggcagaaagatgtaattattagcagtagattaatttcagataaagttattctcaaggcagttggaattactgtaggctcattactgtttgttcttttaatggcaatgttgcttagtacaactaatacgtttgttaaaaaagaatctttcacattcttggaaattctttttacttgtatatctgcatttgcaacagttggttttgatatcggtttaactgcaaaattaaatcattttggtcaatttattctaattgtcggtatgttcgttggcagacttgggattcttttgcttttaagtgcactttggcaggctctttataagagtagaatagatagacaaaagagaattggctatcctagggctgatctatacgtttagg

SEQ ID NO: 259546 - DNA, 157 bp, Unknown
  Bacterial polypeptide expressing nucleotide sequence isolated from the Sargasso Sea
gaaaggctgctacacgatcgcgcaggacgaggcgaccagcgccgtctacgggatgccgaaggcggccgcggcgatcggcgcggcgtcggcgatcctgccgctcgagcggatcgcgccccagctgatctcgcgcatcacgcgtccgctgcgcgactga

SEQ ID NO: 259547 - DNA, 733 bp, Unknown
  Bacterial polypeptide expressing nucleotide sequence isolated from the Sargasso Sea
aagactttggtcctcaatttttcatagtatatctgcgtacaataatgcaggtttttctttatggtcaaatagtatagaagactatagaacaaattttttggttaatactgtgtttgtttttctcattgtgatgggtggactgggatggcgggttattgatgatatttggagtaataaaaaaaatctttcatataaaaaattgagccttcattccagactagttattaggacaagtttgtctctaatattattcggagcattaggattctttatcactgaatcattgctaaatagtcaattttttgatgatttaaatttgtttgaaaggttattatcatcaatctttgaaacagtgagtgctagaactgcaggctttacaaattaccagatctctttgaattctatctcagatacgggtatcttacttttaatgacactgatgtttattggagcaagtaccggaggtactggtggaggtataaaaacaactacatttattgctttaatggcagcaactagatcaactttaagaggtcagaaagatgtaattattagcaatagattaatttcagataaagttattctaaaggcagttggaataacagttggatctttgctttttgttcttttaatggcaatgctgttaagtacaactaatacgtttgttaaaaaagaatcctttacattcctagaaattctgtttacttgtgtatctgcatttgcaacagttggt

SEQ ID NO: 259548 - DNA, 490 bp, Unknown
  Bacterial polypeptide expressing nucleotide sequence isolated from the Sargasso Sea
ttggatataggtgcttcgacaggaggtttctcagatgttttgttatctaaaaatgctaagaaaattttttgtgtagatgttggatttaatcaattacatgaaaaattagtttcaaatccaaaaataatcaatatccaaaaaacaaatgcaaaattattaaataataaaatcataactgataaaattgatcttattgtttgtgatgttagttttataagtatgaaaaaagttataaaaccttctttaaattttttaaaaaattatggaattatcattggtttaataaagcctcaatttgagtcttcaaaaaaagaaataaaaaaaggtggggtaattttggattcagaagttcataaaagaatatgtgatagttttgtggaatggtttaaaattgaatgtaagatggatgtaatgggattgatagaaagcccattaaaaggaccaaaaggaaatactgaatttttaatttgcgcaagaaaaaaattataaa

SEQ ID NO: 259549 - DNA, 899 bp, Unknown
  Bacterial polypeptide expressing nucleotide sequence isolated from the Sargasso Sea
tggtttgtgggaagcattttttacatctacttctgctataacagttactggcctaaccataattgatattggtgttgatttaaatttctttggtcaagtttgcttggcttttatgcttttatcaggtggcctaggattaatggctattactacctttttacaaggttttgttgtaaaggggacaaagctgagaactagattagacaaaggaaagactttagatgaatttggagttggaggaattggtcgaacttttcaaagtattgctattactgcaacttgtatcatatctttaggcgcaattgttttatattcttttggatttgtagatattcaaaatcattggcaaagactttggtcctctatttttcatagcatatctgcatataacaatgcaggtttttctttatggtcaaatagtctccaagactatagaacaaattttttggttaatagtgtgtttatttttctcattattatgggtggactgggatggcgcgttattgatgatatttggagtaataaaaaaaatctttcatataaaaaattgagccttcattccagactagttattaggacaagtttgtctctaatattattcggatcattaggatttttcatcactgaatcattgctaaatagtcaattcttcaatgatttgaatttgtttgaaaagttattatcatcaatctttgaaacagtgagtgcaagaactgcaggctttacaaattacccaatctccttaagctctatctcagataccggtctcttgttattaatgacacttatgtttattggagcaagtactggaggtactggtggtggcataaaaacaactacatttattgccttaatggctgcaactagatcaactttcagaggtcagaaagatgtaatta

SEQ ID NO: 259550 - DNA, 439 bp, Unknown
  Bacterial polypeptide expressing nucleotide sequence isolated from the Sargasso Sea
gatgcttcgcgacgagggacgactggcggcggagacggacgtctcgggcgaagacgcgcgcgagaatcgacgaacgacgcgaacgagcgccaagaagggcgacaagaagtcggtgctgatcgtcgatgacgtcgcgtgcgtgcgtaaatttcacgcgggacagatcggaaggctcgggtaccagagcatcgaggcgggcgagggcaccgaggcgctgcgactgtacggggagaatcacgcggggattcaaggcattttattggatttgatgatgcccgtgatggatggatactcgacggcgaacgagattcgagcgctggaggaaaagcaagatttgcgacggatgcccatcatcgccgtgacctcgctcaccgatcaagagatgaaggcgaatagcaagtcgacggcgttcgacggacacgtcgataaaccgacatcc

SEQ ID NO: 259551 - DNA, 718 bp, Unknown
  Bacterial polypeptide expressing nucleotide sequence isolated from the Sargasso Sea
atgaataaaatattaattgtaacaccaacttataatgaattagcaaatattgaacatttatttatttcaatttttgataggcatccggatgttcatattttagttgtagacgactcatctcctgatggaactggggattttatcaagaaacataaactatatgaaaaatctcttttcctcatttctcgtccaggtaaaatgggcctagggtcagcgtactgtgatggttttaattgggctctttctagagattatgataagattattcaaatcgatgcagatttctctcacaatccaaaatatttatcaaatatgcttgaaactagttctaattatgatttagttattggaagtagatatattaatggtgttaatgtagttaattggcctatgaatagattgatattaagttatttagcgaatctttattgtagaattattcttggtattaaaataaaagattttacaggtggatttaaatgttttaatagaaaagtacttgaatcaattaattttgagaatgttaagtcagaaggatattcattccaaattgagattaatttaaaagctttttctaatcatatgtcaataaaagaaattccaataatatttaatgatagagctcgtggaacttcaaaaatgagcaaaaaagttattttagaggcaatttatatggttcctcttcttaaatttaaaaagatatttaaattattatgaa

SEQ ID NO: 259552 - DNA, 945 bp, Unknown
  Bacterial polypeptide expressing nucleotide sequence isolated from the Sargasso Sea
ttgtgtgtaaaggggacaaagctgagaactagattagacaaaggaaagactctagatgaatttggggtggagggaattggtcgaacttttcaaagtattgctattactgcaacttgtatcatatctttaggtgcaattgttttatattcttttggatttgtagatattcaaaataattggcaaagactttggtcctctatttttcatagcatatctgcatataacaatgcaggtttttcattatggtcaaatagtctccaagactatagaacaaattttttggttaatagtgtgtttatttttctcattattatgggtggacttggatggcgcgttattgatgatatctggagtaataaaaaaaatctttcatataaaaaattgagccttcattccagactagttattaggacaagtttctctctaatattattcggatcattaggattcttcgtcactgaatcattgctaaatagtcaattcttcaatgatttgaatttgtttgaaaagttattatcatcaatctttgaaacagtgagtgcaagaactgcaggctttacaaattacccaatctccttaagctctatctcagataccggtctgttgttattaatgacacttatgtttattggagcaagtactggaggcactggtggtggtataaaaacaactacatttattgccttaatggctgcaaccagatcaactttcagaggtcagaaagatgtaattattagcaatagattaatctcagataaagtaattctaaaggcagttggaatcacagtaggctctttgctgttcgttcttttaatggcaatgctgctcagtacaactaatacgtttgttaaaaaagaatctttcacattcctagaaattctgttcacttgcatatctgcatttgcaacagttggttttgatattggtttaactgcaaaattaaat

SEQ ID NO: 259553 - DNA, 554 bp, Unknown
  Bacterial polypeptide expressing nucleotide sequence isolated from the Sargasso Sea
cggcatcagcggcgccaccatcttcggggatggttccgtagtcatcattcttgatatccattccctgattcgtgccgctcatgtgcaaaccactgcccttatctcggatgaggcggttccggccctgcctcaagaacccgaagaagaagccctaccccaacgcgaaactccgctggtcatggtcactgatgactcggttaccgtgcgcaaagtgaccacccgcttgctggaacgtaatggctacgaagtggtcaccgccaaggacggcatggatgccattgccaagctggaagatattcgcccggatgtaatgctgctggatatcgaaatgccccgcatggacggtttcgaagtggccagccatgtgcggcacgacagccgcttacaaaatgtgccaatcatcatgatcacctcccgtaccggcgagaagcaccgcgaacgggccttcgatattggcgttaactgctacatcggcaaaccgttccaagagagcgaactgctttccaccattcgcgagctgcttggtgaactgcaggaagtggataacggatgac

SEQ ID NO: 259554 - DNA, 584 bp, Unknown
  Bacterial polypeptide expressing nucleotide sequence isolated from the Sargasso Sea
tgcgcggcacgttagcagctggaagcgacgttattatcgacgtaaacgttattgtgaaggtaatgtaaccttaggtaacaacgtgtctattggcgcaaattgcatattacgcgactgccacattacagataacgctgttatcgaagccaactctatcatcgaacaggcaaatgtaggcgaagcctgtgtggtagggccttatgcgcgcttacgccctggtgcggttatgcacaaaaacgccaaagttggcaactttgtggaaatgaaaaagacagtattaggcgaaggtgcaaaagcaaaccatcttacttaccttggcgatgccgaggttggtgctaatgcaaatattggtgcgggcaccattacctgtaactacgatggcgtaaataaatcgaaaaccattattggtgagaacgcatttatcggctctaactcatcacttgtagcgccagtaaacgtaggcgataacgcaaccgtaggtgccggctcagtaatcacatcggcagttgacgacagtgccctcgctgtcgcccgtggcaagcagcgcaacatagctaactggccacgccccaccaaaaaataaa

SEQ ID NO: 259555 - DNA, 130 bp, Unknown
  Bacterial polypeptide expressing nucleotide sequence isolated from the Sargasso Sea
atgacgataaaagtactagtggttgatgattcggcactgatccgtaacttattgggcaagatgatcgaggccgatcctgagttttctttggtgggcatggccgccgatgcttatatggccaaggatatgg

SEQ ID NO: 259556 - DNA, 857 bp, Unknown
  Bacterial polypeptide expressing nucleotide sequence isolated from the Sargasso Sea
gcacgtaacggcgaagaagcgctaactaaagctgtagagttcgagccagactgtataacactggacattaatatgccggtaatggatggcatgacgtgtctggcgatgctcaagaaactttatccttgtcctattatcatggtgtcttcgctcacgcaaaagggggccaccattaccctagaggcactcgcgcttggcgcaagtgactttgtgttaaaaacagggggcactgtttcgcgggatatttcagatttagaggcgcctttaataaacaaaattcacgccctagccaaaactggcaaaccacagcgtcctacaattaaaccgcccccagtcgtgacacaaaaagttgttcgccacaaaacgagcgtaccctttgaagtcgtgctggtaggcgtttccactggtggtcccaaaaagcttgaacacctggtagctaacttaagccccgcatttccggttcctatcgttatttcacagcacatgccagcctctttcaccagtgcgctggctaagcgcttggacggaatcagtccgctcaacgtggttgaggtgaatgcgaagatgcccataaaggctggcaatgtttatcttgcaaaaggggatgctgatcttgccttctcaaaagtcggcggtgaagtctcagcgcgccctgtgccatcaagcccaagttttctgtggcatccaagtgtggatcgtatggtagacagcgcacttaactgctacaagccactttctatgctgtgcgtacagctgaccggaatggggtgtgatggtgttgccgctatgagcaaagcgtttaaagaaggtgcgacaacgatcgcagagagtgaggcgacctcagttgtcttcggtat

SEQ ID NO: 259557 - DNA, 867 bp, Unknown
  Bacterial polypeptide expressing nucleotide sequence isolated from the Sargasso Sea
ggaggaattggtcgaacttttcaaagcattgctattacggcgattagtatcatatcctttggtgcaattgttttatattcttttggatttgtagatattcaaaataattgggaaaggatatggtcctcgatttttcacagcatatctgcatataacaatgcaggattttctttaatgtcaaatagtcttcaagactatagaacaaattatttggtgaatagtatttttgtttttctcattgttatgggtggattgggttggcgggttattgatgatatttggagtaataaaaaaaatctttcttataaaaaattaagccttcattccagactagttattaggacaagtttgtctctaatattgtttggatcattaggattctttatcactgaatcattgcttaatagtcaattttttagtgatttaaatttgtttgaacggctattatcatcaatctttgagacagtaagtgcgagaactgcaggctttacgaattatccaatctccttgaactccatatcagatactggcctattgtcattaatgactttgatgtttattggagcaagtactggaggtactggcggaggcataaaaacaactacatttattgctttaatggctgcaacaagatcaactttaagaggtcagaaagatgtaattattagtaatagattaatttcggataaagttattttaaaggcagttggaattacagttggatctttgctttttgttcttttaatggcaatgttgctaagtacaacaaatacgtttgttaagaaagaatcgttcacattcctagaaattctgttcacttgtatatctgcatttgcaactgttggttttgatataggtttaactgca

SEQ ID NO: 259558 - DNA, 855 bp, Unknown
  Bacterial polypeptide expressing nucleotide sequence isolated from the Sargasso Sea
tttggccaagttttcttagcttttatgcttttatcaggtggtctaggactaatggccattacaacatttttacaagggtttgttgtaaaggggacaaaactcagaactagattagacaaaggaaagactttagatgaatttggagttggaggaattggtcgaacttttcaaagcattgctattacggcgattagtatcatatccttgggcgcaattgtcttatattcttttggatttgtagatattcaaaataattgggaaagactatggtcctcaatttttcatagtatttctgcatataacaatgcaggattttcgttaatgtcaaatagtcttcaagactatagaaccaattatttggtgaatagtgtttttgtttttctcattgttatgggtggattgggctggcgggttattgatgatatttggagtcataaaaaaaatctttcttataggaaattaagcctacattccagactggttattaggacaagtttgtctctaatattgtttggatcactaggattctttatcactgaatcattgctaaatagtcaattttttaatgatttaaatttgtttgaacggttaatgtcatctatcttcgaaacagtaagtgcaagaactgcaggctttacaaattttccgatttctttgaactctatctcagatacgggcctcttattattaatgacacttatgtttattggagcaagtaccggaggtactggtggaggaataaaaacaactacatttattgctttaatggctgcaactagatcaactttaagaggtcagaaagatgtaattattagcaatagattaatttcagataaagttattctaaaggcagtg

SEQ ID NO: 259559 - DNA, 664 bp, Unknown
  Bacterial polypeptide expressing nucleotide sequence isolated from the Sargasso Sea
attcggatcattaggattctttatcactgaatcattgctaaatagtcaattttttagtgatttgaatctatttgaacggttattgtcatcgatatttgaaacagtaagtgcaagaactgcaggctttacaaattacccaatttctttaaattctatatcagatactggcctattgttattaatgactcttatgtttattggagcaagtaccggaggtactggtggaggcataaaaacaactacatttattgctttaatggctgcaactagatcaactttgagaggtcagaaagatgtaattattagtaatagattaatttcagataaagttatcctaaaggcagttggaattacagttggatcattgctttttgttcttttaatggcaatgctgctaagtacaactaatacgtttgttaagaaagaatctttcacattcctagaaattcttttcacttgcatatctgcatttgcaactgttggttttgatattgggttaacttcaaaattgaatcatttcgggcaatttattcttattgtcggaatgtttgtgggcagacttggtatccttttgcttttaagtgcactttggcaggctctttataagagtagaatagatagacaaaagagaattggctatcctagggctgatctttatgtttaa

SEQ ID NO: 259560 - DNA, 556 bp, Unknown
  Bacterial polypeptide expressing nucleotide sequence isolated from the Sargasso Sea
tgcaagaactgcagggctttacaaattatccaatatccgtgaactctatatttatactggcttattgttattaatgactttgatgtttattggagcaagtactggaggtactggtggaggcataaaaacaactacttttattgctttaatggctgcaactagatcaactttaagaggtcagaaagatgtagttattagcaatagattaatttcagataaagttatcctaaaggcagttggaatcacagttggatctttgctgtttgttcttttaatggcaatgttgcttagtacaacaaatacgtttgttaagagagaatctttcacattcctagaaattctgttcacttgtatatctgcatttgcaactgttggttttgatattggtttaactgcaaaattaaatcattttggccaatttattcttattgtcggcatgtttgtaggcagacttgggatccttttgcttttaagtgcactttggcaggctctttataagagtagaatagatagacaaaagagaattggctatcctagggctgatctttatgtttag

SEQ ID NO: 259561 - DNA, 1324 bp, Unknown
  Bacterial polypeptide expressing nucleotide sequence isolated from the Sargasso Sea
cttgtttattattttccttggaactttaattttgagttcaccattatgttcatcttcaaaagttggtttgtgggaagcattttttacatcaacttctgctataactgtaactggcttaaccataatagatattggtgttgatttaaatttctttggccaagttttcttggcttttatgcttttatcaggtggtctaggattaatggccattacaacatttttacaagggtttgttgtaaaggggacaaagctaagaactagattagacaaaggaaagactttagatgaatttggagttggaggaattggtcgaacttttcaaagcattgctattacggcgattagtatcatatccttgggcgcaattatcttatattcttttggatttgtagacattcaaaataattgggaaagactatggtcttcgatttttcacagcatttctgcatataacaatgcaggattttcgttaatgtcaaatagtcttcaagactatagaacaaattatttggtgaatattgtttttgtttttctaattgttatgggtggattgggctggcgtgttattgatgatatttggagtcataaaaaaaatctttcttataagaaattaagccttcattccagactagtgattaggacaagtttgtctctaattttattcggatcatttggattctttatcactgaatcattgcttaatagtcaattttttaataatttaaatttatttgaacggttattgtcatcaatctttgaaacagtaagtgcaagaactgcaggttttaccaattatccaatctccttgaactctatatcagatactggcttattgttattaatgactttgatgtttattggggcaagtacaggaggtactggtggaggtataaaaacaactacatttattgctttaatggccgcaactagatcaactttaagaggtcagaaagatgtaattattagcaatagattgatttcagataaagttattcttaaggcagttggaatcacagttggatctttgctttttgttcttttaatggcgatgttgctaagtacaacaaatacgtttgttaagaaagaatctttcacattcctagaaattctgtttacttgcatatctgcatttgcaactgttggttttgatattggtttaactgcaaaattaaatcatttcggccaatttattcttattgtgggaatgtttgtgggcagacttggtatccttttgcttttaagtgcactttggcaggctctttataagagtagaatagatagacaaaagagaattggctatcctagggctgatctttatgtttag

SEQ ID NO: 259562 - DNA, 1087 bp, Unknown
  Bacterial polypeptide expressing nucleotide sequence isolated from the Sargasso Sea
gcttttatgcttttatcaggtggtctaggattaatggctattacaacgtttttacaagggtttgttgtaaaggggacaaagttaagaactagattagacaaaggaaagactctagatgaatttggagttggaggaattggtcgaacttttcaaagcattgctattactgcgattagtattatatccttgggcgcaattgtcttatattcttttggatttgtggacattcaaaataattgggaaagactatggtcctcgatttttcacagcatttctgcatataacaatgcaggattttcgttaatgtcaaatagtcttcaagactatagaacaaattatttggtgaatagtgtttttgtttttctcattgttatgggtggattgggttggcgggtaattgatgatatttggagtcataaaaagaatctttcttataagaaattaagccttcattccagactagttattagaacaagtttgtctctaatattgttcggctcattaggattctttatcactgaatcattgctaaatagtcaattttttaatgatttaaatttgtttgaaagtttaatgtcatctatcttcgaaacagttagtgcaagaactgcaggctttacaaactttccgatttctttgaactctatctcagatacgggcctcttattattaatgacgcttatgtttataggagcaagtacaggaggtactggtggaggcataaaaacaactacatttattgctttaatggctgcaacaagatcaactttaagaggtcagaaagatgtaattattagcaatagattaatttcagataaagttattctaaaggcagttggaatcacagttggatctttgctttttgttcttttaatggcaatgttgcttagtacaactaatacttttgttaagaaagaatcattcacattcctagaaattctgttcacttgcatatctgcatttgcaacagttggttttgatattggtttaaccgcaacattaaatcattttggtcaattgattcttattgtaggaatgtttgtgggtagacttggaatccttttgcttttgagtgcactttggcagg

SEQ ID NO: 259563 - DNA, 3568 bp, Unknown
  Bacterial polypeptide expressing nucleotide sequence isolated from the Sargasso Sea
gatggatcagcgtgaagagcaggtcgagcgtcacgtattgcaaattgacttgctgttggagtcgagcatccgcgcggtgaagagtctgcgggatgtggccgtggatcacctgcgcttaggtgagttggtgcgtaaagaacgtttacctcaatacggcaaatttaacgaaagtggtcagtattttaccttagagcctaactacgccaagggcggtaagccctttaccaacatggggcggatcacgggcgcgggttccctcgatggtcgcagcgataagttctaccaagagctggaaatgctgttcgaattgtcactgtctttccctgtcgccaaagaagccgcacctaaagcctcggcgatttattatttatcgcgccaacggatgatgtcctacttcccttggaccaatggtgaccagcgttttagggacgagctgctcaataagaaacaattccaatacgccaccccggcgatgaacccgcagcgcagtgtgttttggagtgaggcctacgtcgattcgacgggcaaaggcttgctgaccaccttaggtgtgcccgtttatctcgatgatgagtttatgggttcaattaacctcgatatgactttagcctcattggcgcggcaaattcgagtgtacttcaagatgccggggacggtgatcctactcgatcagcagaacaatattttgtcccacagtgacttcgatggctctgatatcaatcgggtgtaccacatcagtcagcgcattccgtctgagctgcattcgctccccgagtccgaattatttgatgcccacgaaggcatcattcgtaacggttactatattcactcggttgcgctgcataacgcgccgtggcgcttgttgtatctgcaaaatgaagacgatctgttccaagattcggtcgaaaaactgcaactgacctttatcctcgtcgtcatcgccctgtcggtgctggtgaccatagtgcactggcaaacgcgtcgctccttcgtgagccctgcatcgcgcctattgtcgcacttagagggctgctcccaagagccgcgtaaaccgccagaaaaaatcactccgggctgggagccttggttcctgctggtgagccgcatctttgaggaaaacaagcaatatacccatcatttggccgagcagaataagcgactcgacaaactggtcgcgcgccgtaccgagcggttaaaagatgcgaccgaacgccgcgagcgtgagtatgcgttgttgcgctccttactcgactccatcccagaagccattgtctttaaagataaagaaggcaattacctcggttgtaacaaggccgccgagcggatgctaggttacaccgaaagcgagatgatcggtctgtcgtcggaggatttaacctcgccagaaatgggcattcgtattcgcgccgaggatgagcagatcttaaaagatcgcacgccgctgcgttatcaagagaaggttgagttagcgggtaaacctgtattgctcgatactcttaaactgcctttctataaccgccgtggcgagctacaaggcttgattgccgtgtggcgcgatgtgacgcgtgagtacgagtcagccgagcaattacgtctgtcggaggagcgttaccatttagcgatggacgcggtggaagacggtctgtgggactggtatctggattcggagcatattatttgtaacccatcctactattcgatgctgggctataaacccaatgaattcccagcgttggtgtcggctatcgaccagctgacgcaccccgacgatagaattcgggtcgaagaataccgtaatcagtatctgcaaaatcccgtcgatgcctatgagatcgagtttaggattttaggcaaaaacggcagttatcactgggtgctttcccgcggtcgggtggtggaatttaccgccgatggtcagccaaagcgtatggtcggtacccataaggacatcacgcgccataagagtaacgaagtggcgctgttggaggcgaagcaggacgcagaactggcgaacctgtataagagtgagttcttggcgaatatgagccacgaaatccgcacgccaatgaacgccattatcggtatgttgcagttagcgcagcgcacctcgctgacggcgcagcagaaggattatctcgaaaaagccgggttctcggcgcagtcgttattgcggattattaacgatattctcgacttctctaagattgaggccggtaaattagagctggagcgggtgccgttcccactggataaagtgctcgaccatgccctcgatctcaacgcgcttaaggcgcaggagcaaggtgtcgagttattactgtatgcgccagtaacggcaggcctcattcttaagggcgacccgctgcgtctaggccaagtgctgatcaacctcttatcgaatgcagtgaagtttacccaatccggtgagattgaactgggttgcgaagatgtcggcgagcgcgaccatcgaattaccttaaaattttgggtgcgggatacggggattgggatcagtaaagatcagcaggaaaaactgttcgatgcctttgcccaggccgatggttcgacgacccgtaagtacggtgggacgggattaggtttatcgatcagtaagcatttggtctccatgatgggtggcaagatgcaggtgcagagtgagttaggcgttggcagtaccttcagctttacaatcagcttcgaaattgccgaagaggccaaggttgagcccttagtagtgcctgaaaaactcaataatttacgcacacttgtggtggacgataacccgacggcgctgcaaatttattcggcattgatgcgcgatttccacttcgaggtggatacggctgccagcggcgccgaggcgctatacaagttgtcgcgggatcctatcgatttattattgctcgactggatgatgcctgaaatggatggcggcgatgtgatcaccgccatagataccatggtggccgaaggccgcatcgcgaaacgacccattatcatcatgatgaccgcttatgcggcagagcctttacagcacgaagtcgacagtgccaatgtgtttgccgtgttgcaaaaaccctttaaggcatcgagtctgttcgatgaaatcatcgccgcctttgccgatgaaccaaggctcaatgtggtgcagcctattgccgaagtgcctgtcgaagagggcgaacacacagggcttgtgctcttggtggaagataactttatcaaccaacaggtggcgactgagttgctaaagagtgctggatacgaagtcgttgttgccgggaatggtcaaattgctctcgatattatcgactcgcgccccttcgatgcggtattaatggatattcaaatgccagtgatggatggtttaaccgcggcgagggcactgcgtgaacgctttagcgccgacgtgctacctattatcgccatgacggcccatgcgatgtcgggcgatcgggaaaagagtctcgcggctgggatgaatgcccatattactaagccgatagtgttaactgaactgtttgaaaccttatcgcattggataaaacacaagaataatcatcattaa

SEQ ID NO: 259564 - DNA, 1144 bp, Unknown
  Bacterial polypeptide expressing nucleotide sequence isolated from the Sargasso Sea
atggcagataaaaaagtggaagtattcgctgcaatcatcattggttgtgtaggcgttttctttgtttttggtatgccattctttgttggtggtattatttctgagttggggttgagtcaatcacaagccaatttagtatcttctgcagaaattgctggaatggctttgtcttcaatgctggggtttttttggatccagagatacgaatggaagaccatcgcgtattttgggatcacagtcatcattttgggaaactttatatccagtattggattttcagaagagccttctttctctttgcttgttatggttcgattcttaactggcctatttggtcatggcgtttgtttttctcttggagtggctgcaattggacgcacaaataatccagataaaaatttcgcttacagcgtagcggctcaagtcatcatgggatctttgaccgctttgcttgttccaatggcaatgtcaaaatatggcatttcaggaatgactattcctgctatttttcttgccctcatcggattgttctttgtgaaatatctattcgtcaataacccatcagaaacaaatgatggtcaaacacaagatgggtcacagattattttcctgcccctgatagggcttctgattatggtggtttggcaaatgggtgttggtcccttttttaataatttagtgccatatgggatcggcaacggaatatccagtgatgcaattggaatagcattatttgtcagtactgcaatgagtatcattggtccaatttcagcttcaatgttgattgataaagttgaccgctctcatgctattttcggagcactcacggttcagattctgatcatattgagttttaccggtgaaatcacctggattggattcatgctgagagccatttgctttcaagtggcttggaactttgtgggcccattcttaatgggcatgattgctgcagtggatcggtccggaaattattcggttatgattcctgcatctcaattgggaggtatttcaataggtcatgcagtcattgcttctctattaaattctggcaatccttcacttataaactattactctgggtcatttattgccttatcgattttgatctatttcatactcttcaaaaatcgatctgaatgaa

SEQ ID NO: 259565 - DNA, 739 bp, Unknown
  Bacterial polypeptide expressing nucleotide sequence isolated from the Sargasso Sea
tttgaaaaaaagagctgatttacttttagtcgaaaaaaaaatagttgaatctcgttcaaaagcacaagctgtcattatggcaggtcaaattttcatagatggaaaaaaagttcttaaaagtggagagcttcataatatagaatctgatatagattataggagtttgcatcctcagtgggtatctaggggagggttgaagttacttaaagctttgagtcattttcaaataaaaccagatggatatatttgtttggatattggtgcttctacaggaggtttctcagatgttttgttatctaaaaatgcaaagaaaattttttgtgtagatgttggcattaatcaattacatgaaaaattagtttcaaatccaaaaataatcaatatacaaaaaacaaatgcaaaattattaaataatgaaatcataactgataaagttgatcttattgtttgtgatgttagttttataagtatgaaaaaagttataaaaccttctttaaattttttaaaaaattatggaattatcattggtttaataaagcctcaatttgagtcttcaaaaaaagaaataaaaaaaggtgggataattttggattcagaagttcataaaagaatatgtgatagttttgtggaatggtttaaaattgaatgtaatatggatgtaatgggattgatagaaagtccaataaaaggaccaaagggaaatactgaatttttaatttgcgcaagaaaaaaattataa

SEQ ID NO: 259566 - DNA, 205 bp, Unknown
  Bacterial polypeptide expressing nucleotide sequence isolated from the Sargasso Sea
gtcctgctgactggcatgggccgcgacggcgcgatcgggctcaaggcgatgcgcaccaagggctaccacacgattgcgcaggacgaggcgacctgcgccgtctacggcatgcccaaggcggccgcggcactcgacgccgccgccgcgatcctgcccctgccccgtatcgccgcggcgctagccgccgccatcggtgcgggctaag

SEQ ID NO: 259567 - DNA, 730 bp, Unknown
  Bacterial polypeptide expressing nucleotide sequence isolated from the Sargasso Sea
tatgagaaaaagattagacctaatattatttgaaagaggttttttctcctcgagaaataaggcacaaatccatattcttgcaggggaagtttttgtcaataatgagaaaatcacttcatcttcaaggttaattgatgagactgcagaaatagaaattaaattattaaaagataattttgttagtcgagggggtctgaaactggacgaagcccttaatcattttaaaattaatattaataatttagtttgcttagatattggagcttcgacaggtggttttacagactgcctacttagaaaaaaagctaagaaagttttttgcgtcgatgttggttatggtcaattagattataaacttagagagaatactaaggtaaaaaatttggaaagaacaaatgctaggtatttaacaaaagaggaaataggcgagaagattgacttaatagttatggatgtatcatttatttctataacaaagtttgaaagtttttttaaggaatttgcttataaaaactctctattcataggtttaatcaagccccagtttgagctatctagagataaactgggtaagaatggtattgtgagaaatccaaagtatagacaagaggctatagagaatatcattaattttttaaacggtttctacctaaatatactagaaccgattgaatccccgataaaaggctccaagggaaatatagaatatttagtttgtggaaggaactag

SEQ ID NO: 259568 - DNA, 628 bp, Unknown
  Bacterial polypeptide expressing nucleotide sequence isolated from the Sargasso Sea
cctggctgcgcagtcaggtgcaggtgccgttgctggtgaatcacaagcacaagtacatctcgttcggcaccggcaatccgcaactgtgtttcatgtactcgctgacggacccgcgctcgggccgctcggtcaagctgcatcaacgttttgtgttcagcctgagctggtcgccggaggacttcagggaagtcaccgaggacgtcggcgcaatggtcgaagcgggcgaactggatctgttctgattgttgtcataggaaaaaacatgtcgaaaattctggtggtggatgattcgagcacggtgcgcgacgaagtggccggctttctgaagaaaaacggtctggacgtcgacacggcggtggacggcaaggacggcctcgccaagctgaaggccagccccggcatcaagctggtgatcagcgacgtcaacatgccgaacatggacggcctgacgatggtcgagaagattcgcggcgagctcgcgaacacgaccgtcaacgtcatcatgctgacgacggagagcagcccggccatgaaagagcgtggcaaggcggcgggcgtgaagggctggatcgtcaagccgttcaagggcgacgcggtgctggaaacgttccgcaagctggcaagctaa

SEQ ID NO: 259569 - DNA, 499 bp, Unknown
  Bacterial polypeptide expressing nucleotide sequence isolated from the Sargasso Sea
tatggcgatcaggtgcgcgcagccagtgccgacatggcgccagcacccgacaccccccgctgccggaggcacgggcaaagccgtggtgtctcagcagttgtcgggccccagccaggtgcctttggtgctggtggtggacgactccatcacggtgcgccgcgtgacgcagcgcctgctgcagcgcgaaggctaccgtgtggccctggcggccgacggcctgcaggcgctggagcgtctgcaggaagagcgcccgacggtggttctgtccgacatcgaaatgccgcgcatggacggcttcgatctggcgcgcaacatccgtgcagacggtgccttgcgtgatctgcccatcatcatgatcacctcgcgcattgctgaaaagcaccgcgagcatgcgatggaactgggcgtgaaccactacctgggcaagccgtattcggacgaagaactgctgagcctgattcagcactacgcccgcatcgccgcagcggccgaggcctga

SEQ ID NO: 259570 - DNA, 1006 bp, Unknown
  Bacterial polypeptide expressing nucleotide sequence isolated from the Sargasso Sea
aatgaggatcgccattgccaacgacatgcccctggcggtcgaagccctgcgccgtgcgctggcggcagaacccgagtaccagttgatctgggtcgccggcaacggcgaggaagcagtcagccgctgccgcgacgacctgcccgacctgctgctgatggacatgctcatgcccggcatggacggcgtggaggcgacccgacgaatcatgcatgacacgccctgcgccattctcatcgtcacctcggacgtcgaacgcaacatgtcgcgggtgttcgacgccatgggtgccggcgcactggatgtggtcgccgcgccgtcgcttggcccgcagcaggtgctcgatgccgcgaccgtgcggcgcaagatccacaacatcgcctggatgatcggccacaagacctcgcgctcggtcaaaccgacgcccgtgcgcagtgccgacaaccgtggcaagagcctggtggccatcggtgcatcggcgggcggcccggcttcactggtggaactgctgcggcagattccggcggattttcctgccagcatcgtgctggtgcagcatgtcgacgaagtcttcgccgccggcatggcccagtggctcggcagtgaatcgcacatccccgtgcgcctggcgcgggaaggcgaagtgttgcagccggctaccgtgctgctggccggcaccaacaaccacctgtatctggcgcccgaggggcgcctggtctatcgacgcgaacctgccgatcaggtctaccggccctctatcgatgtattcttcgaaagtgtggccacctactggcgaggtgatgctatcggcgtgttgctgacgggcatgggccgcgatggtgccaggggcctgaagctgatgcgcgaacgcggctttcataccatcgcccaggaccaggccagcagcgccgtctacggcatgcccaaggccgccgtggcactgggtgccgcagcagaagtgctagccctggacagaattcccgcgcgcctgatcgagcgcctgggctaa

SEQ ID NO: 259571 - DNA, 739 bp, Unknown
  Bacterial polypeptide expressing nucleotide sequence isolated from the Sargasso Sea
caacccggacaacagcaacaaggtggtcatcgtcaccgacttcaacaagatggcaaacggcttcctcatcgacagcgtcagcaggatccaccgggtctcctgggaggatgtggagtcccccagccagttcctggaggcgggcgagaatgactgcgtggtggcggtggtcaggcgcgacggcaacctcatcatgatcctcgacttcgagaagatcatcgccgacatcaaccccgaactgagcatggaaaagtacgatgtgacccaggatcgcaaggtcatcatcgacgatcgcatgatggccatgcgccaggccaaaaccattttggtggtggacgattccgccttcatccgcaagatgatcgagaccaccctgcgcaccgcgggctacaacgtggtgactgccaaggacgggggcgacgggctggagatgctgatggagttcgatcgcctgtcgcaggaggagaagatcccggtggccgagttcgtcagcggcatcatcaccgacgtggagatgccccgcatggacggcatgcacctgctcaagcggctgcgcgatacccccgccttcaagaccacccccatcgtcatgttctcgtcgctgatgagcgatgacaaccgccacaaggcgctgcagctgggcgccaacgacaccatcaccaaacccgagctgggccgcatggtcggcatgatggacaacttcctgcttggcatccccatccccagacccggcaacctgtga

SEQ ID NO: 259572 - DNA, 319 bp, Unknown
  Bacterial polypeptide expressing nucleotide sequence isolated from the Sargasso Sea
ttgtccagcacagatgaagataaaataaggcttgaccaacttttagttttgaatggtttagtaaggtcgaggacgcatgcaaaggatttgatcctcagggggcaagtgatttgtgaccaagaagttgctaaaaaagcaaacaggttagtttctacaaaatcagaactaaaagtgatcaacttatcaaaagaatgggtttcaaggggtggctttaaacttgttggagccatcgaacactttaaaatagagttaaaaaataaaatttgcttggatattggagcttcaacaggaggatttactcatgttttacttcgggggg

SEQ ID NO: 259573 - DNA, 3712 bp, Unknown
  Bacterial polypeptide expressing nucleotide sequence isolated from the Sargasso Sea
atgaaatcgagtgagccggatctccagctaaaatcgccgatccaaaagaattataaccgtgccgttttttatacttatatcggtgtaattgtcctgtcgttgctgacggcgtggatgtttttcgatcgccagaaaagccagcagatggatcagcgtgaagagcaggttgaacgccatgtattgcaaattgacttactactggagtctagcattcgtgcggtgaagagcttgcgggatgtggctgtggatcacctacgtttaggtgagttagtgcgtaaggatcgcttaccgcagtacggcaaatttaacgaaagtggtcagtattttaccttagagcctaattacgccaaaggtggcaagccattcactaatatggggcggatcacgggcgcgggttccctcgatggtcgcagtgataagttctaccaagagctggaaatgctgttcgagttatcgctgtctttccctgtggccaaagaagccgcacccaaagcctcggcaatttattatctatcgcgccagcggatgatgtcatacttcccttggaccaatgatgatcaacgttttagagacgagttgctcaataaaaaacaattccaatacgcgacgccagcgatgaacccgcaacgcagcgtgttttggagtgaggcctacgtcgactccacaggtaaaggcttattgaccaccttaggtgtgcccgtttatctcgacgatgagtttatgggttcgataaacctcgatatgaccttagcctcattggcgcggcaaattcgggtgtacttcaaaatgccggggacggtgatcctgctcgatcagcagaataatattttatcccacagtgattttgatggctctgatatcaatcgggtgtatcacatcagccagcgcattccttctgagctgcattcgttgcctgagtctgaattattcgacgcccacgaaggcattattcgtaacggttactatatccactcggttgcgctgcataatgcgccttggcgcttgttatatctgcaaaatgaagacgacctgttccaagattcggtcgaaaaactgcaactgacctttatccttgtggtcatcgctctgtcggtgctggtgaccatagtacactggcaaacgcgccgctcttttgtgagccctgcatcgcggctgttatcccacttagagggctgctcccaagaaccgcgtaaaccaccggaaaaaatcacccctggttgggagccttggttcctattggtcagccgcatttttgaggaaaacaagcaatacactcaccatctggccgagcaaaataaacgactcgataaactggtcgcgcgtcgtactgagcggttaaaagatgctaccgagcgccgcgaacgtgaatatgcgttattgcggtccttactcgactccatcccagaagccattgtctttaaagataaagagggcaattacctcggctgtaacaaggccgccgagcggatgttgggttacaccgaaagcgagatgatcggtctgtcgtcggaggatttaacctcgccagagatgggcattcgtattcgtgccgaggatgagcagatcctaaaagatcgcacgccgctgcgttatcaagagaaggtcgagttagcgggtaaacctgtgttgctcgacaccctgaaactgcctttctataaccgtcgtggtgagctgcaaggcttaattgccgtgtggcgcgatgtgacgcgtgagtacgagtccgccgaacagttacgtctgtcggaagagcgttaccacttagcgatggatgcggtagaggacggtctatgggactggtatttggattcggagcatattatttgcaacccatcctattattcgatgctggggtataaacccaatgaattccctgcgttattgtcggcgattgatcaactgacgcatcccgacgatagaattcgcgtcgaagaatatcgtaatcagtatctgcaaaacccggtcgatgcttatgaaatcgagtttcggattttaggtaaaaatggcagttatcactgggtgctttcccgtggacgggtagtggaatttaccgccgatggtcagcctaagcgtatggtcggtacccataaggacatcacgcgccataagagtaacgaagtggcgctgttggaggcgaagcaggacgcggaattggccaacctgtacaagagtgaatttttggcgaatatgagccatgaaatccgcacgccaatgaacgctattatcggtatgttgcagttggcgcagcgcacctcgctgacggcgcagcagaaggattacctcgaaaaagccggtttctcggcgcagtcgttactgcggattattaacgatattctcgacttctctaagattgaggcgggtaagttagagttggagcgggtgccgtttccgctggataaagtgctcgatcatgccctcgatctcaacgcgcttaaggcgcaggaacaaggcgttgaattattgctgtatgcgccagtgacggcagggctcattcttaagggcgatccactgcgtctaggccaagtgctgatcaatttgttgtctaacgcggtgaagtttacccaatccggcgagattgaactgggatgtgaagatgtcggcgagcgcgatcaccggattaccttaaaattctgggtgcgggataccggtattgggatcagtaaagatcagcaggaaaagttattcgatgcctttgcccaagccgatggttcgacgacccgtaaatacggcggcacaggcttaggtttatcgatcagtaagcatttggtctccatgatgggtggcaagatgcaagtacagagtgagttaggcgtcggcagtacctttagttttaccatcagctttgagattgctgaagaggccaaggttgagcccttagttgtgcctgaaaaactcaataatttacgcacacttgtggtggatgataacccaacggcgctgcaaatttactcagcgttgatgcgcgatttccactttgaggtggatactgccgcgagcggcgccgaggcgctgtataagttgtcgcgagatcctatcgatttattgttgctcgactggatgatgccagaaatggatggcagtgatgtgattagcgccatcgataccatggtggccgaaggtcggatcgcgaaacggccaatcattattatgatgacggcctatgcggctgaacctttgcaacttgaagtcgatagtgccaatgtgtttgctgtgttgcaaaagccctttaaggcctcgagcctgttcgatgagattattgccgcctttgccgacgagccaaggctcaatgtcgcacagcctattgctgaagtggctgtcgaagaaggtgagcacacaggtttagtgctcttggttgaagataactttatcaaccaacaggttgcgacagagctgttaaagagtgcgggttacgaagtcgtcgttgcaggaaatggccaaattgcgttggatattatcgactcgcgccccttcgatgcggtattaatggatattcaaatgccagtaatggatggtttaacggcggcgcgggcactgcgtgaacgttacagcgctgatgccttaccgattatcgccatgacagcccatgcgatgtctggtgatcgggaaaagagtctcgccgcagggatgaatgcccatattactaagcctatcgtgctatccgaattatttgaaaccttaacccattggattaagcacaaacataatcaccattaat

SEQ ID NO: 259574 - DNA, 610 bp, Unknown
  Bacterial polypeptide expressing nucleotide sequence isolated from the Sargasso Sea
atggacttagctgagcttgaaacttctaattcatatgatttaattttattaggagcgtcaactggtgggcctgaggcgcttaagcaaatcattggcaagctaaagcccaatatgccacccatattagtagttctgcatatgcaacctaaatttttggttcgttactgtgagcggctaacgagaattactacacttaaagtaaaaagatttatggatcatgaaaaggttattccaaattctatctatattgctgatggatcaaaccatatggagataagcaaaactggatcggattactttttgaataaagggaatgcagaaaaagtaaaaggccactgcccaagtgtggatgttctttttaactcagcagcaaaaatcaaaaattcaaatcttttagctattttattgactggtatgggatcagatggagcagaaggattaaattcattaaaaaattctggggcttttacagtaacgcaaaatgaagaaacttcagaagtttacggcatgcccaaagccgctcttgaaataggggctgcaaagtgcgttcttagtctggaacaaatcactgaaattctaagcgcacaagaagttcaattttcttgttaaa

SEQ ID NO: 259575 - DNA, 265 bp, Unknown
  Bacterial polypeptide expressing nucleotide sequence isolated from the Sargasso Sea
cgacgtgttcttcaacagcgtcgccgacggctggcagggcgaggcgttcggcgtgctgctgacgggcatggggcgcgacggcgcgctcggcctgaaggcgatgcgcgcgaaaggctgctacacgatcgcgcaggacgaggcgaccagcgccgtctacgggatgccgaaggcggccgcggcgatcggcgcggcgtcggcgatcctgccgctcgagcggatcgcgccccagctgatctcgcgcatcacgcgtccgctgcgcgactga

SEQ ID NO: 259576 - DNA, 520 bp, Unknown
  Bacterial polypeptide expressing nucleotide sequence isolated from the Sargasso Sea
gactccccggccatcgtcatcacccagcacatgccgccgggctttaccaccagctttgcggcacgcctgaacgggctgtgccagatcacggtgaaggaagccgtgcagggcgaacgtatcctgcccggtcatgcctatatcgctccgggcggcaagcagttctccattgcccgcagcggcgccaactatgtggccgtggtcaatgatgagccgccggtcaaccggcacaagccttccgtggaagtgctgttcaagtccgtcgccgcctgcgtgggtcgcaatgcctttggcgtgatgctgacaggtatgggggccgacggtgccgccgcaatgcgcgagatgaaggacgccggcagctacaactatgtgcaggacgaagccagttgcatcgtcttcggcatgccgcgcgaagccattgcccatggtgccgccgatgaagtgctgccgctgacgcagattgccagcgccttgctgggcaagctgcgcacttcgcccgaccatgtgcgccaccgtatctgag

SEQ ID NO: 259577 - DNA, 497 bp, Unknown
  Bacterial polypeptide expressing nucleotide sequence isolated from the Sargasso Sea
tattactcagcatatgccacccggcttcactaccacttacgcacgaaggctaaatagcctatgtgaaatagaggtaagggaagcgaaaggtggcgaacgcttattacccggccatgcgtatttagcaccaggtgataaacaccttgtggttgaacgtagcggggcagattatcgaatagctttatctgacggaccgagagaatcgggtcacaaaccgtcggtggacaagctctttaggtcgttagcggacagcgctggggcaaatgccgtgggtgtactattaactggaatggggcgcgatggtgcccaaggtttgttgcaaatgaaacagcgaggcgctaccacattttgccaagatgagaaaagttgtgtggtatttggcatgccaaaagtagcaatagaaatgaatgcggcttgccatattacgcctttggcgtcgatagcagatgcgatactagatactttagagtctatcggtgtaggaacacggctttgag

SEQ ID NO: 259578 - DNA, 226 bp, Unknown
  Bacterial polypeptide expressing nucleotide sequence isolated from the Sargasso Sea
cgaggcgttcggcgtgctgctgacgggcatggggcgcgacggcgcgctcggcctgaaggcgatgcgcgcgaaaggctgctacacgatcgcgcaggacgaggcgaccagcgccgtctacgggatgccgaaggcggccgcggcgatcggcgcggcgtcggcgatcctgccgctcgagcggatcgcgccccagctgatctcgcgcatcacgcgtccgctgcgcgactga

SEQ ID NO: 259579 - DNA, 711 bp, Unknown
  Bacterial polypeptide expressing nucleotide sequence isolated from the Sargasso Sea
tggttttaaaaggctttgctaaaagtagagagcaagctaattctattctcatgactggaaatgtatttgctgataataagcgtgtgaaaaagcctggacaacaagtatcacaaaattcaaaaattgaaataaaaggtaaaacacatccatgggtgtctaggggaggtatcaaattaaataaagctatatcagaatttaatttagactgtaattccattatagcacttgatattggagcaagtacaggaggttttacagatgtcttgttaacaaatggtgctagtaaaatttatgcagtagatgttggatatgggcaattagactggaaattgagacaagatgaaagagttatagttaaagaaaaaacaaatgctagatatttaacaaatgaaattattcaagaccccttagatgctttagtttgtgatgcatcttttatatcgttgaagaaagttttaccttcaggacttgggtttctaaaatctcatggatggttggtagctttaataaaaccccaatttgaagtaggtaaaggtcttgttgggaagggtggtgtagtaaaagatcataaactgcatgaagcagtaatcaataatataacaaaatggatagaatttgaaattaaaatgaatgtttcaggagttatagagagtcctattttaggccctagtggaaacaaagaattcttaattgtagctacaaagatttaat

SEQ ID NO: 259580 - DNA, 288 bp, Unknown
  Bacterial polypeptide expressing nucleotide sequence isolated from the Sargasso Sea
catgaacgacaaacgcaagattcaggtgctgtgcatcgacgattccgcactgatccgcagcatcctgaaggagatcatcaacagccagccggacatggaagtggtgggtgtggcgcccgatccgatcatcgcgcgcgacctcatcaagcagaccaatccggacgtgctcacgctggacgtcgaaatgccgaagatggacggcctcgacttcctggaaaagctcatgcgcctgcgcccgacgccggtggtcatgatctcttcgctgacggagcgcggctctgaaaccac

SEQ ID NO: 259581 - DNA, 340 bp, Unknown
  Bacterial polypeptide expressing nucleotide sequence isolated from the Sargasso Sea
aatgaatgcctccggaaattcaatccaggtcctgattgtcgatgattctgcgctggtgaggaaagtgatgaccgaaatcctttcttcggattccctgattgaggtggtcggaacggctccggatgcacagattgcaaccaggcaaatccggaaactgaatccggatgtcatcaccctggatatccagatgccgggaatgaatgggttggattacctagagaggctgatgaagtcccagcccaggcctgtggtgatggtcagttctctgacccaaaaaggagcccctgaggctttaaaagctcttgaactcggggcggtcgaagtgataggaaaactggat

SEQ ID NO: 259582 - DNA, 1021 bp, Unknown
  Bacterial polypeptide expressing nucleotide sequence isolated from the Sargasso Sea
atgaacatcggcatcgtcaacgacttgccgctggccgtggaggcactgcgccgcgtgatcgcgctgcgcacggaccaccgcgtgctgtgggtcgcgaccgacggcgacgaggcggtggatttctgcgtcgcgcatccgcccgacgtcgtgctgatggatctcgtgatgccgaaggtcgacggcgtggccgcgacgcgccagatcatggcgcgcgcgccgtgcgcgatcctgatcgtgacggcgagcgtcagtgcgaatacatcgtcggtgtacgaggcgatgggcgccggtgcgctcgatgcggtcgacacgccgacgctcgcgctcgggctgtcgacggatgcgtcgccgcaggcgctgctcgcgaagatcgaccagatcggccggctgctcgaaagccgcaccgcggcgctcgtgccgccggggccggcgcccgagcgcggccagccgacgctcgtcgcgatcggcgcgtccgcaggcgggccgaccgcgctgactgcgctgttgcgggcgctgccgggtgattttccggcggcgatcgtgatcgtccagcacgtcgaccaggcgttcgcgctggggatggccgagtggctcgacggctatacgcggctgccggtgcgcgtcgcgcggcagggcagcgtgccgcaggccggcgaggtgctgctcgcggcgaccaacgatcacctgaccctgtcgccgcgcggcgtgctcggctatacgcggcatccggtcgagacgccgtaccggccgtcgatcgacgtgttcttcaacagcgtcgccgacggctggcagggcgaggcgttcggcgtgctgctgacgggcatggggcgcgacggcgcgctcggcctgaaggcgatgcgcgcgaaaggctgctacacgatcgcgcaggacgaggcgaccagcgccgtctacgggatgccgaaggcggccgcggcgatcggcgcggcgtcggcgatcctgccgctcgagcggatcgcgccccagctgatctcgcgcatcacgcgtccgctgcgcgactgac

SEQ ID NO: 259583 - DNA, 466 bp, Unknown
  Bacterial polypeptide expressing nucleotide sequence isolated from the Sargasso Sea
ccaacacatgcccggaagtttaccaaaagttttgcggaaaggcttgaccatcattgcaggttgacggtgaaagaagcagaatccggagaaagaatttgcccgggaaccgcctatcttgcaccgggtgaccagcatctcctgctgaaaaaccaggacaagggatattgtgtcgaactcaacgacggaccgttggtctgccgccaccggccttctgtggatgcgttgttccgctcagcggctcaggtcgccaggcatcatgcgaccggggtgatcctcaccgggatgggagacgatggtgcccaaggaatgcttgaaatgaaagaggcagggagtttcaacatcgcccaggatgaagcaagctctgtcgtctatgggatgcctaaaatggctttttccaaaggcggggttgatgaagtgcattccttgaatgaaatccctcatgtgctggtcaagcactcacactgaa

SEQ ID NO: 259584 - DNA, 255 bp, Unknown
  Bacterial polypeptide expressing nucleotide sequence isolated from the Sargasso Sea
ccgcgcgcaacgccggggccaacgccctgggcgtcatcctcaccggcatgggcaaggacggcgcggtgggcatgctggaaatgcgcaacgccggtgcctacaacgtcgcgcaggacgaggcgtcctgtgtggtctacggcatgcccaaggaagccgtggcccacggcggcgtgcacgaagtcctgccgctgtcgcagatcggcccgcacgtgctggccaagctgtcggcacatggccgcgtgacgcgggtttaac

SEQ ID NO: 259585 - DNA, 1114 bp, Unknown
  Bacterial polypeptide expressing nucleotide sequence isolated from the Sargasso Sea
aatgccgtgccgtccggccgccgatgccgtccggcggcgccgaacaggcaaccccttccatgaacccggcccacctccaacattacgaaccgaccggagaattccgcttgtgaacatcggcatcgtcaacgacctcccgcttgccgtcgaggcgatgcgccgcgcgatcgcgcgccggcccgagcaccgcgtgctgtgggtcgcgaccgacggcgcgcaagccgtcgagctgtgcgccgcgcagccgcccgatgtcgtgctgatggacctgatcatgccgaaattcgacgggatcgaagcaacgcggcggatcatgcgatccgaacgaccgtgcgcgatcctgatcgtgacgagctgcatcggcgcgaatgcatggcgcgtgttcgaggcgatgggcgccggcgcgctcgacgcggtcgatacgccgcggctcggcgacggcgcagccggcgacacgacccgcctgctgctcgcgaagatcgaccagatcggccgcctgctcgacgcacccggcggcacgcgcctcgccggcacggcctcccgcgccggcggcgggccgctgatcgcgatcggcgcatcggccggcggccccggcgcgctcgcgtcgattctcggcggcctgccggccgatttcagtgcaccgatcgtgatcgtccagcacgtcgaccgcgcgttcgccgagggcatggcgcaatggctcgacggccagacgcccctcaccgtgcgcgtcgcgcacgaaggcgaccgcccgcagcccggcgtcgcgctgctcgccgcgaccgacgaccacctgcgcatcacgcgtgccggcacgctcgaatacacgcgcgagccggccgccacgccgtatcgcccgtcggtcgacgtgttcttcaacagcctgaccgagcactggcccggccgcgtgatcggcgtgctgctcaccgggatgggccgcgacggcgcgatcggcctgaaggcgctgcggatgaagggctaccatacgatcgcgcaggacgaggcgacgagcgccgtgtacggcatgccgaaagcggccgcgacactcggcgcggcgcgcgcgatcctgccgctcgggcgcatcgcgggtgagctggcggcgctcgcgagaatctga

SEQ ID NO: 259586 - DNA, 835 bp, Unknown
  Bacterial polypeptide expressing nucleotide sequence isolated from the Sargasso Sea
tatgcctgtagtcatggtaagtgccttgacaactaaaggcagtctggaagcacttcgcagtcttgaacttggtgcagttgatattgttgaaaaacctaaactggatgtcagggaagggctagaagatatttctatccagatctgcgataagattaaagccgcagcccaggctaggttgaagactgcacaccaaaggtatctcacgccgcaaaaaaaacttagcgctgacgctattctccctgcaaagtcctccgtttctaaaagtaaaggacaggaatcattgattgcaataggtgcgtcaacagggggaactgtggcattaagagagctccttactccactgccctcagatatgccgggtattgtaattgtgcagcacatgcccaaggcattcacaaagtctttttcagaaagcctggataaggaatgtcgtttgaacgttcaagaagcaggtgaaggcgaaaaggtagaacgtggaaaggtgctggtttcaccgggagatcagcatatgatgctcaagcttgagggaaatggatactcagtcaccatgaacaacggtgagcttgtgaacaggcatcgtccatcagttgatgttctctttcgttctgtcgccaacctggcaggatcaaattcaatcggagtgatccttactggtatgggagatgatggagcaaaaggaatggttgagatgcatgatgcaggatctcacactttagcacaggatgaagaatcatgtgtggtatatggtatgccgcgaaaagctgtggcaaatggtgcggtggatgaggtactcaatctcgaagaaatttcaaaacgcttaattgaattaagttga

SEQ ID NO: 259587 - DNA, 967 bp, Unknown
  Bacterial polypeptide expressing nucleotide sequence isolated from the Sargasso Sea
agctttagccttacgtcctgacgttattacgatggacatcgaaatgccggttatggatggcatttcggctgtgcgcgaaatccttaaggtgcagcgcacacctattctgatgttttcatctttaactcatgaaggtgcaaaagcgaccttagatgcgctggaagcaggcgccatcgatttcctgccgaaaaaatttgaagatattgcccgtgataaagccgaagccgctgatgtgctgcgtcagcgtgttaagacagtagccagacgtcgtgtgatcagcagaccctccagtttaacagggtctgctagctcaaccttagcatcccgtacttcagcaacgccggccgcaagcccaacagccataccagcgagagcgcctttagctcaaagcctagccgccagagctttagctgaacgtgctgaattgcaaaatcgtgctgctgagcgtgccgaaactcaccgttctggcagctttgactccagcgggaaaaactacaagctggtcgctattggcacatccactggtggtcctgttgcgttgcaacaaattatcaccgctttgcctgccaatttccctttgcctatagtccttattcagcatatgccggcggcttttaccggtgcttttgccagcaggttaaatggcttagcgaaaattgaagtgaaagaagcggcagataatgatgtgttgcgccctggtgtggcttatctggctccaggcggcaaacaaatgctgctggatggcaatgaaaaccaagccagattgcgcgttcgcgaagatgattcgccccgtattacgttcaaacccagcgtagatatcacctttggcactgcagcaaagatctttaatgacaaagtgctggctatagtgctgacgggcatgggatcggatggcagagaaggttgccgtttactaaaacaatccggctcccgtatctggtctcaggacgaagccagttgtgtagtt

SEQ ID NO: 259588 - DNA, 529 bp, Unknown
  Bacterial polypeptide expressing nucleotide sequence isolated from the Sargasso Sea
catgagtaaaatcagggtgttgtcggtagatgattctgcattgatgcgtcaaatcatgaccgaaattattaacagccacagtgatatggaaatggtggcgacggcgccggatccgttggtcgcccgggatttaatcaaaaaatacaatcccgacgtcctgacgctggatgtggaaatgccgcgcatggacggcctcgatttccttgagaagttgatgcgcctgcgtccaatgccggtggttatggtttcttcactgaccggtaaaggttctgaggtcacgctgcgggccctggaactgggggcgattgactttgtcaccaagcctcagttggggatccgcgaaggcatgctggcgtatagcgagatgattgcggagaaaatccgcaccgcatcgcgggcaaaactggccgcccacaaacccttggcggcaccgacgaccttgaaaacggggccattactcagttcagaaaaactgctggtcatcggcgcctcaaccggaggaacagaggcaattcgccattactccagc

SEQ ID NO: 259589 - DNA, 709 bp, Unknown
  Bacterial polypeptide expressing nucleotide sequence isolated from the Sargasso Sea
acccaaaaaggggctcctgaggctttaaaatctcttgaactcggggcggtcgaagtgataggaaagcccgataccacggtccgggaaggaatggaggaaatctcgatccagatcgtggatgcggtcaaggctgcggctcaggctaaattgaaaaagaatacggatatctttctcaaggctcctgaaaaactgactgcagatgtgatcattcccaaaaatccgccgaagcatttgagtcactcgattgaaccgatcattgcaatcggtgcttcaaccggaggtacggaggcattgatgacgcttttgactcagcttcctgaaagcatgcctggaattgtgatggtccaacacatgccgggaagttttaccaaaagtttcgcggaaaggcttgaccatcattgcaggttgttcgtcaaagaagccgaatccggagaaagaatacgcccgggaactgcctatcttgcaccgggtgaccagcatctcctgctgaaaaaccaggacaagggatattgcgtcgaactcaacgacggaccattggtctgccgccaccggccttctgtggatgcgttgttccgctcaacggctcaggttgccaggcatcatgcgaccggggtgatcctcactggaatgggagacgatggtgcccaaggaatgcttgaaatgaaagaggcagggagtttcaacatcgcccaggatgaggcaagctctg

SEQ ID NO: 259590 - DNA, 739 bp, Unknown
  Bacterial polypeptide expressing nucleotide sequence isolated from the Sargasso Sea
agcacttacactagcagcaccttaccccgcactgacagcaatattgggcaacaaagctgctgagcgcccggcgctgagtcgtagtagcctggagcgcccgcgtttgactgaacgcgtggcaccggctgccggtgctgggcgttacagtgccagtggcaaaagttacaaactggtggctattggcacctccaccggtggacctgtagcgctgcagcgtattattaccagcttaccggctgattttccgctgccgatagtgcttattcagcatatgccggcagccttcaccggtgcttttgctcagcggctaaatacgctggccaagattgaagtacgcgaagcgcaagataacgatgtactgcgacccggagtggcttatctggcaccgggtggtaaacaaatgttgatcgaaggtcatgagcgcgatgcccgtttgcggatcaaagaagatgactcgccacgcatcacctttaaacccagtgtagacattacctttgccactgccgctaaagcctttactgacaaagtgctggcgatagtactcaccggtatgggttcggatggccgggagggtgcacggctgttaaagcaagccggttcaagaatttgggcgcaagacgaagctagttgtgtggtgtatggcatgccgcaggccatagccgccgccggtttgatggatatggaagtggcgctgaatgatgtcgcaagccggctgataacggaagtgctccatggataa

SEQ ID NO: 259591 - DNA, 573 bp, Unknown
  Bacterial polypeptide expressing nucleotide sequence isolated from the Sargasso Sea
attgcccgccccgcctaacggagtgtttatggcagtcaaggtcctggtggtggacgattcgggtttcttccgccgccgcgtctcggaaattctttccgccgatccaagcatccaggtggtcggcacggccaccaacggtaaagaggcgattgatcaagccattgcgttgaagcctgatgtcatcaccatggactacgagatgcccatgatggacggcatcaccgcggtgcggcacatcatgcagcgctgcccgactccggtgttgatgttctcctcgctgacccatgaaggcgcccgagtgaccctcgacgccctggacgcaggggcggtggacttcctgccgaagaatttcgaagacatctcgcgcaaccccgagaaggtcaagcaactgttgtgcgagaaagtccacagcatttcccgcagcaaccgtcgcagcctattcagcgcccccgcgccggccccgacacctgttgccgcaccggctcccacgagtgcctcgacgttcgggcgccccgcgcctgcaccggttgcccgccccgcagcggcacctgtgcgtgcgtctgcgccagcggc

SEQ ID NO: 259592 - DNA, 622 bp, Unknown
  Bacterial polypeptide expressing nucleotide sequence isolated from the Sargasso Sea
cagcaagcacagagtttgttcttccgaaaaaaccactggaaaacggaaagctaccggtcaagaaccgcttgtcgcgatcggtgcctctacgggtggaaccgaagtcttaagggaaattctgagttctttacctccaaccatgccaggtattgtcatagtccaacacatgcccaaggcttttaccggttcttttgccaacagcctggaccgggtttctgaattggagattaaagaggcggaagatggagatatggttgaaagcggaaaggccttcctggctccaggagacgcacacatgatcctgaaaaccaacggctcttcatatcaagtcaaactggatacaggcgagctggtcaatcgccataggcctgctgttgatgtcctctttcgatcggttgcctccattgcgggttctgccgcagtcggagtgattttaaccggaatgggaaatgatggtgcaaaaggaatgaccgagatgcatgatcaaggagcactgaccctagctcaggaccaggaatcatgtgtggtctatggtatgcccaaggtcgccgtagaaagtggagcggtggatgaaagtctcactccggagcagattgtcaaacgcctgattgagtggagttga

SEQ ID NO: 259593 - DNA, 376 bp, Unknown
  Bacterial polypeptide expressing nucleotide sequence isolated from the Sargasso Sea
caagaaccgcttatcgcgattggcgcttctactggtggaaccgaagtcttgagggaaattctgagttctttacctccaaacctgccagggattgtcattgtccaacacatgcccaaggcttttaccggttcttttgccaacagcctggaccgggtttctgaactggagattaaagaggcggaagatggagatatggttgaaagcggaaaggccttgctggccccaggagacgcacacatgatcctgaaaaccagcggatcatcttaccaagcccaattggatacaggcgaactggtcaatcgccacaggcctgctgtcgatgtcctctttcgatcggttgcctccatcgcgggttctgccgcagtcggagtgattt

SEQ ID NO: 259594 - DNA, 389 bp, Unknown
  Bacterial polypeptide expressing nucleotide sequence isolated from the Sargasso Sea
cctggtgctgccggggcgggtgctcattgctcccgggggcaagcacctggtgctgcggcgggacggacagcagtattacgtggaaacattggatggcccgctggtgagccggcacaagccttcggtggatgtgctgttccgctctgcggccaaggccgcgggcagcaatgcagtgggcatcatcatgaccggcatgggggacgatggcgcaagggggatgcgggaaatggccgattgcggcgccgccacctatgcccaggacgaggccagcagcgtggtcttcggcatgccgaaagaagcgatacacatgggtggcgtcggtgacgtcctcccgctcgatcatatctccgccgtgatagaacaatatgcctctagagaacctcaatgag

SEQ ID NO: 259595 - DNA, 565 bp, Unknown
  Bacterial polypeptide expressing nucleotide sequence isolated from the Sargasso Sea
atggctataaaagtattagttgtagatgattctagcttttttcgacgtcgagtcagtgagattgttaaccaagatcctgatctcgaggtcattgctgttgctgttaatggcaaagaagcggttgatatggctgcaaagttaaaacctcaagtgataaccatggatattgaaatgcctgtgatggacggtattagtgctgtcagagcaatcatggccaataatccaacgcctattttaatgttttcatccttgactcatgatggggctaaagcaacactcgacgcactcgaagcgggtgcattagattttttgcctaagcgttttgaagatattgcgaccaacaaagatgaagctattttgttgctgcaacaacggattaaagctcttggacgccgtagaatataccgtccaagcattgcacctttgcctgcgagtagttcagaatctcgtcgccctataggtggcgctgaatcaacactcgcagctcgtcgaccgttaacctcaagattatctaatcacagtgcaacaaatagtgcgctgacattatctcaacggtgcttctgct

SEQ ID NO: 259596 - DNA, 541 bp, Unknown
  Bacterial polypeptide expressing nucleotide sequence isolated from the Sargasso Sea
ccccggtggtactcaggccttggaacatatcctcaccgcactgccacgggtttgccctggcatcatcatcgtccagcacatgcccgaacgctttaccgcagccttcgccgaacgcctcaacggcctgtgccagatcgaagtgctggaagcacgccatggcgaccgggtcatgcccggccgcgccctgatcgctcccggcggccgccacatgctgctcaaacgcagtggcgcgcagtacatggtggaagtggtcgacggcccgcccgtcagccgacacaaaccttcggtggacgtactatttcgctcaaccgctcgcgctgccggggccaacgccaccggcatcatcatgaccggcatgggcgacgacggcgcccgtggactacgcgagatgttcgaggccggcgcgcagaccttgggccaggacgaagccagctgcgtggtctatggcatgcccaaggaagcgaagaaactcggagcagtcgggcgcgagattccgctggagcaaattcccgcgcagatcctgcgcgccgaacgcgcctga

SEQ ID NO: 259597 - DNA, 226 bp, Unknown
  Bacterial polypeptide expressing nucleotide sequence isolated from the Sargasso Sea
atggcagtcaaggtattagttgtcgacgattcgagcttcttccgtcgtcgggtcagtgagatcatcactcaggatcccatgctgacggtgatcgatacggcccaaaatgggcgcgaggccgtggacaaggcgatccagctacgcccagatgtgatcaccatggacatcgagatgcccgtgatggatggcatcagtgccgtacgcgagatcatggccaagtgtccga

SEQ ID NO: 259598 - DNA, 839 bp, Unknown
  Bacterial polypeptide expressing nucleotide sequence isolated from the Sargasso Sea
tatggcggtcaaggttctggtggtcgacgattcgggtttctttcgccgcagggtgacggagattctggcgggcgacccgcaaatccaggtggttggtaccgccaacaatggccgcgaggcgattgagcagacccttgcgttgcatccggacgtgatcaccatggattacgagatgccggtcatggacggcatcgaagcggtgcgccagatcatgcagcgctgtccgacccctgtcatcatgttctcctcgctgacctacgagggcgctcgcgtcagtctggatgcgctggatgccggcgcggccgactatctccccaaaaactttgaagacatttcgcgtaacccggataaggtgcgccagctgctgtgcgagcgagtgcagggcttggcacgtaccaaccggcgctcgctgggtttgagcaacacgcaccacgcgcagccagccagcaccctgagtacgccggctcgcagcatcagcccgacgcccgccgcaccgccgccgcgcccggctgctgcgccgactacgccggccaaaaccagcccggcgccgcgcaagcgcagctacaaactggtcgccattggcacctccacgggcggcccggtggcgctgcagaaggtgttgacgcaactgccggccaacttccccgcgccgctgctgctggtacagcacatgcctgctgcctttaccaaggcgtttgccgagcggctcgataaactctgccgcatctccgtgaaggaagccgaggacggcgataccttgcggccggggcgcgcactgctggcgccgggcggcaagcagatgatggtcgactcgcgcggtgtggtgcgcatcctgcccg

SEQ ID NO: 259599 - DNA, 685 bp, Unknown
  Bacterial polypeptide expressing nucleotide sequence isolated from the Sargasso Sea
cctcgccagagtgcgagttcagtattaggcggtacatcgacccctgcgcaacctgcgccagcgcctgtgcgctcttcacctgcgacctcgattcgtccaagtggtaagcaatataaattattgctgattggcacatcgacgggcggtcctgttgccctgcagaagattctgactcagttcccagcaaattatccgcatccaattttgcttatccagcatatgcctgcggccttcacgcccgcctttgcgaaccgtttaaacggtttgtgtaagattgaagtgaaagaggcggctaacggtgatgtattgcgtccaggttgcgcttaccttgcaccaggtgggatgcaaatgatggttgagcgtgctggtgttactggccgtgtcaaagtcttggctggcagcgcagagatgaactacaagccctgcgttgacattacctttgcctctgcgtctaaatcctatggcggtgatgtgctggcggtcgtgctaacgggaatgggagccgacggccgcgaaggcgcacgtatgttgaaatcggctggcgcgaccatttgggcacaggatgaggcgagctgcgtggtctatggtatgccgcaggcggtggccagtgcgggtatcgctacacagtccatttctctggataacatggcggagtcgattctaaaagagtctgcgcgtggctaag

SEQ ID NO: 259600 - DNA, 751 bp, Unknown
  Bacterial polypeptide expressing nucleotide sequence isolated from the Sargasso Sea
atgagtaaaatcagggtgttgtcggtcgatgattctgcattgatgcgccaaatcatgaccgaaattattaacagctatagcgacatggagatggtggcaaccgcacccgatccgctcgtcgcccgggatttgatcaagaaatacaaccctgacgtgctaacgctggacgtcgaaatgccgcggatggacggtctcgatttccttgaaaagctgatgcggctgcgtccgatgccggtggtgatggtgtcgtcgctgacggggaaagggtcggaagtgacgctgcgggcgctggaactgggggcgatcgattttgtcactaagccgcagttggggatccgcgaagggatgctggcctacagcgagatgattgcggagaaagtgcgcacggcgtcacgcgcacgtctgaccgcccataaaccgcttgcggcgccggtcaccttaaaggcggggccgctgctcagttcggaaaagctgattgcgattggcgcctcgacgggcggcactgaggcgattcgccatgtgctgcagccgctgccgctctccagtccggcggtcattattacgcagcatatgccgcccggttttacccgctcgtttgccgagcgtctgaacaagctgtgtcatatagccgtgaaagaggcggaggacggcgaacgtgttctgccaggccatgcctacattgcaccgggcgataaacacatggagctggcgcgcagcggggcaaactatcaaatcaaaattcatgacggtc

SEQ ID NO: 259601 - DNA, 814 bp, Unknown
  Bacterial polypeptide expressing nucleotide sequence isolated from the Sargasso Sea
gatccgctgtttgcgatggacaaattggcccggcaatggccggatgtcattgtattggatattgaaatgccgcgtatggacggcattacttttttgaagaagattatgcacgagcgaccaacgccagtggtgatctgttcaacactgacggaaaaaggtgcggaaaccaccatgcaggctatgtctgccggcgccgtagaaattattaccaagccaaaaatggggttaaaaacctttttacagcaatcctctgccgaactgttaagagccgtacgggccgccgcgcaagccagagtaagaaagctggccgttgtcgccagtccggtatcaaccccggcaaagctatctgcggataccattttagccgccggcaataaggagtcgatggcacaaaccaccgagcggattattgctatgggcacctccaccggcgggactcaggcgcttgaacaggtgctgacggctttaccaaaagtctgtgccggtattgttatagtgcagcatatgcccgaaaagtttacggcctcttttgcggagcgattaaataatttgtgccagatagaggttcgtgaagccagacatgacgacagagtcatgcctgggctggcattgatcgcccccggtggtaaacatatgctgctaaaacgcagtggcgcttattacaaagtagaagtgattgatggccctcaggttaaccggcaccggccgtctgttgatgtgctatttcgctcggtcgcccgtttcgccggcagaaatgcggtggggattattatgactggcatgggagatgacggtgccagaggcatgaaagagc

SEQ ID NO: 259602 - DNA, 766 bp, Unknown
  Bacterial polypeptide expressing nucleotide sequence isolated from the Sargasso Sea
atggctgttaaagttttagtagttgatgattcaagcttttttcgccgcagagtgagtgaaattcttgaacaagacagcggcattgaagttataggtttcgctgtaaatggtcgagaagctgtcgataaaacagctcaattacgacctgacgtgatcaccatggatgttgaaatgccggtgcttgatggtattagcgcggtcaaagagatcatggcgagtaacccaactcctattttaatgttctcctcgctaacacgcgcaggcgcatctgccaccttagatgcacttgatgccggcgcgatggactttttaccgaaaaagtttgaagatattgctcgtaataacgacgacgcaataaagctattacaaaataaagttaaagaaataggccgccagcgaattggtagaattaccagagcgcctgctgctccaagtattaaaccagcgccaagcacttctgagcgctttgctaataagcctatagtgcaacctgctcgtagctttaaaagcgcaagcccaacgccttctagtagcgcatcaacacgtgctagtggtaagcaatatcaattaattgctattggcacatcaacaggtggcccggttgcactacaaactatattgactcagttacctgctaatttcccacacccaatactactcatacaacacatgccagcagcatttacacatgcgtttgcaacccgattagatagcttgtgtaaaattaaaaaagaagaagcacagcaaggcgatagactgcaaccag

SEQ ID NO: 259603 - DNA, 1078 bp, Unknown
  Bacterial polypeptide expressing nucleotide sequence isolated from the Sargasso Sea
atgactaaaaaaccactacccccatacaaggttcttattatcgatgactcggctgtggtcaggcaaacactctcgggaatctactcttctgatcctgaacttgaagtagtaggtacagctccagatgcgttgattgcactcaagaaaattggtgaattgaaacctgatgttctcagtcttgatgtgcagatgccgcggatggacggtcttacatttcttgagcgacttatgaaatcaaatcctatgcctgtagtcatggtaagtgccttgacaactgaaggcagtatggaggcattgcgcagtctggaactaggtgccgtggatattgtggaaaaacctaagttggatgtcagggaaggacttgaagaaatctccatccagatatgcgataaaattaaagctgcagcccaggccagattaaagactgcaagacaactatatctcaatcctccgaaaaaactaagtgctgacgcaattcttcctgcaagctcctcagtttctaaaaataaaggaaaggaatcattgattgccattggatcctcaaccggaggtaccatagctttaagagaactcttaactccactgcctgcagatatgcccggtattgtaattgtgcagcatatgcccaaggcattcacaaagtctttttcagaaagcctagataaggattgtagtttgaaagtttgcgaagcaggtgaaggagaaaaagtggaacgaggaaaggtgttggtttcacctggagatcagcatatgatgctaaagcttgaaggaaatggatatgcagtcactatgaacagcggtgagctagtgaacaggcatcgtccttcagttgatgttctttttcgttcagtagccaacctagcagggtcaaattcaatcggagtaatccttactggtatgggagatgatggagcaaaaggaatgtttgaaatgcataaagctggatcctacaatttggcacaggacgaagagtcttgtgtagtatatggtatgcctcgcaaggcagtggaaaatggtgcggtggatgaggtgcttaatctagaaggaattttcaagcgtttaattgagctaagttgaa

SEQ ID NO: 259604 - DNA, 1057 bp, Unknown
  Bacterial polypeptide expressing nucleotide sequence isolated from the Sargasso Sea
atgacgataaaagtactagtggttgatgattcggcactgatccgtaacttattgggcaagatgatcgaggccgatcctgagttatctttggtgggcatggccgccgatgcttatatggccaaggatatggtgaatcagcatcgccccgatgtgattacattagatattgagatgcccaaggtggatgggctgacctttttagatagattgatgaaggccagacctacggcggtggtaatgatttcctcattaaccgaggagggtgccgatgccacctttaacgcgctaggattaggcgcggtggattttatccctaaaccgaaattagactcaccccaagattttaatgaatatcaagatttgattctggagaaaattaaatcggcggcgaatgcgaagctgaaaacccaacgcactcaacccgttgccgtgactccgccaagcctaaaacccaccctatcaaatcgcgtgatcaatactcaactgctggcaattggcgcttcgactggcggcactgaagccattttatatctgttgcaacagtttcctgcagtcatgccaccgatagtgatcacccaacatatgccgccgggctttacccgtacctttgctgaaaggctgaataaacttacccgtttgaatgttaagcaagccgatgatggcgaacgtttattgccctgttatgtgtatattgcgcccggagatcagcatttagaagtgattaaggtcggcggcagttttaagacccgattgacccaaggtgataaggttagcggccataggccctcggtggatgtgttatttaattcggttgcggcgtgtgcggggaccaataccacggcggctatcctcactggcatgggtaaagatggtgccgatggtatggcattaatcgaccagcaggggggcaaaacctttgctcagggggagcagagctgcgtggtgtttggcatgccaagggaagcgattaaacgcggtgttatccatcatgtggtcgaactgccgcaactggcggataaaatgctcaactatttagcctcgcttaagcgagactaaa

SEQ ID NO: 259605 - DNA, 1066 bp, Unknown
  Bacterial polypeptide expressing nucleotide sequence isolated from the Sargasso Sea
catgagtgaacctgccaaagtactgatcatcgatgattcagccgttgctcgccagacgctgaaaaatatcctttccgaagaccctgaacttgaagtggtgggaaccgcacctgatgcgctgattgccctgaaaaaaatttcagaattgaatccggatgtcctgaccctggatgtgcagatgccgaaaatggatggactgacctttctggaaaggctgatgaaatccaggccgatgccggtagtgatggtcagttcctatacccaggaaggttcagaaacagctatgcggagtcttgaacttggagcagttgatatcattgaaaaaccaaaatttgaggtacgtgaaggtttgaatgaaatcgcgatcctgatcacggataaggtcaaggccgcagcccaggcgaagatgaaaacggcgcgtcagattttcatgcagacctcaccgaagcaaagcacagaggttgttcttccgaaaaccactggaaaacggaaagctgcaggtcaagaaccgctaatcgcgattggtgcctctacgggtggaactgaagtcttgagggaaattctgagttctttaccttcaaccatgccagggattgtcattgtccagcacatgcccaaggcttttacaggttcttttgccaacagccttgaccgggtttctgaactggaaattaaagaggcagaagatggagatagggttgaaagcggaaaggccttgctggccccaggagacgcacacatgatcctgaaaaccaacggatcttcataccaagtcaaactgaatacaggcgagcttgtcaaccgacacaggcctgctgtcgatgtcctctttcgatcggttgcctccagtgcgggttctgctgcagtcggagtgattttaaccggaatggggaatgatggtgccaaaggaatgactgagatgcatgatcaaggagcactgaccctagcccaggaccaggaatcatgtgtggtctatggtatgcccaaggtcgccgtagaaagtggggcagtggatgaaagtctcactccggagcagattgtcagtcgcctgattgagtggagttga

SEQ ID NO: 259606 - DNA, 1132 bp, Unknown
  Bacterial polypeptide expressing nucleotide sequence isolated from the Sargasso Sea
catggtctttaaagtccttgtcgtggacgactcgactttttatcgtcgtcgagtaaaagaaatactcgatggcgatagggaacttgaagttgttggggaagcgagaaatgggcgcgatgcacttgaaaaagcagaagcgcttaagccggatgtgataacgatggatgttgaaatgcctgtcatggacggcatttcagctgtaaaggccataatggacaaacggcctacacctattcttatgttttcttcgcttacgcatcatggtgcgcaagcgacattagatgcgttagaagcgggcgcgctcgatttcttaccgaagaaatttgaagatatcgcgcaggacagaaaagacgcatcgcgcttgttgtgtacaaaagtacgcttaatagcgcgtcgtggtattggtcttaagcgtccgtcgtttcgctctacagaggcaagaaagcttcctgataatgcgccaaagcaggcgttttttaaaacatcagggttgctatcagggcataaagacgcagccaaacaaccaaccgtttcgtctgtaagagcgacgggaaagcactacaagtgtttggcaattggggcttctacaggcgggcctgtggcgcttcaaaaagtgctgtctcctttacctgcagagtttccataccccattttgcttgtacaacacatgcctggaacatttactacggcatttgcacagcgtttagacacaaactgtaagattagagtaaaagaagccgagcacggcgacattctaaaaccaggtcatgcgtatcttgctcccggtgggaagcaaatgttgctagaaaccataggtgcgaataaacgcattgccattgttgatgcaagtgcgagtgacaaggtgaattataagcccagtgttgatctcactttcagttctctggctaaagcttatggtggggatgtattaggaattatattaacgggtatgggagctgacggcagagaaggatgccgaatgctcaaggaaaaaggcgcaacgatttgggctcaagaccaagattcctgtgttgtgtacggtatgcctcaagctgtagccgttgccaatatatccagtaaaaatataaacattgatgatatgagcagttgcgttcaaaccgaaatgcgatag

SEQ ID NO: 259607 - DNA, 1063 bp, Unknown
  Bacterial polypeptide expressing nucleotide sequence isolated from the Sargasso Sea
atgaaacagatcaaggtcatgctggtggatgattccgccgtggtaaggcaggtattgcaggccattctcgagcaggagccggatatcaaggtcatcgccaccgcgtctgacccgctgtttgcactggagaagctgaagaaggagtggccggacgtgatcgtgctggacgtggagatgccgcgcatggacggcattaccttcctcaccaagatcatggccgagcaccccactccggtggtcatctgctcctccctgaccgagaagggggcagagaccacgctgcaagccatggccgccggcgccgtcgatatcatcaccaagcccaccgtcggcctgaaaagctttctgcaggagtcggcgcaggagctggccatggcggtacgcgccgccgcccaggccaatgtcagacgactggccaaagtgcccgcccccagcgtcgcccccaagctcaacgccgacgccatcatgcccgccgccagccagcatgccatggcccagaccaccgagcggatcgtggcgatcggtacctccactggcggcacccaggcgctggaagccgtgttgaccaccctgccccgggtctgtcccggcattgtcatcgtgcagcacatgccggagaagttcaccgcttcatttgccgagcggctcaacagcctgtgtcagatagaagtgcgggaggccaagagcaatgacagggtgatccccgggctggcgctgatcgcccccggcggcaagcacatgctgctcaaacgcagcggcgcctactatcacgtcgacgtgatggacggcccccttatcaaccgccaccgcccctcggtggacgtgctgtttcgctcggtggccaagtttgccggcggcaatgccaccggcatcatcatgaccgggatgggggatgacggcgcccgcggcttgcgggaaatgctggaggcgggcgccaacaccttcgcccaggatgaggcctcctgcgtggtcttcggcatgcccaaggaggccatcaagcttggcgcagcccgccatgtcttgccgctgcaggatatccatcacgccatcgtgggccgctaac

SEQ ID NO: 259608 - DNA, 1078 bp, Unknown
  Bacterial polypeptide expressing nucleotide sequence isolated from the Sargasso Sea
catgaccatacgggtgcttatcgtcgacgactcggccctggtacgagaggtactgacccagatgctgagcaaggcggaagatatcgaggtgatcggcgccgccttcgatcccatcttcgccatgcagcagatgaagaagtgctggcccgacgtcatcatcctcgacatcgagatgccgcgcatggacggcctcaccttcctcaagaagatcatggccgagcaccccaccccggtcatcatctgctcctccctcaccgaagagggggccatgatcaccctggaggcgatgtcggcgggggccatctccatcgtcaccaagcccagcgtcggcatcaagagcttcctgcaacagtccgccaacgacttcatccaggagatccggggcgccgtcggcgccaagctgcgcaatctgctgcccggtgccgccccgctgccggtcaccccgaggcgcaatgccgacgaggtgctctccccgccggcggagcggatctcctttcgcaccaccgagaagatcgttgcactcggcacctccaccggtggcacccaggcgctggagtacctgctctcccgcctgcccgccacctgcccggggatcgccatcgtccagcacatgccggcccgcttcaccgcctcctttgccgagcgactcaacggcctctcccagctggaggtgaaagaggccgagaccggcgatcgcctgctgcccggggtcgccatcatagcgccggggggcaagcacctgctgatccagcgcagcggcacccagtatctggcggaagtcaaagaggggccgccggtctcccgtcactgcccctcggtggacgtgctgtttcgctcggtggcggtgagtgcggggcgcaacgccctcggcgtcatcatgaccggcatgggggatgacggcgcccgcggcatgcgggagctgcacgacacgggtgcacgcaccattgcccaggatgaagccagttgcgtggtattcggcatgcccaaagaggccatagcccacggcggagtggatgaagtcatgtccctcacccacattacccagacgctcagccgtccggatctacgaggcgtgtaa

SEQ ID NO: 259609 - DNA, 1117 bp, Unknown
  Bacterial polypeptide expressing nucleotide sequence isolated from the Sargasso Sea
atggcagtcaaggtattagtggtcgacgattcgagcttcttccgtcgtcgggtcagcgagatcatcactcaggatcccatgctgacggtgatcgatacggctcaaaatggacgtgaggccgtggacaaggcgatccagctgcgcccggatgtgatcaccatggacatcgagatgcccgtgatggatggcatcagtgccgtacgcgagatcatggccaagtgtccgactccgatcctgatgttctcctctttgactcatgagggggccaaggcgacgctggatgcgctggatgccggggcgctcgatttcctgcccaagaaatttgaagatatcgcccgtgacaaggatgaagccgttcgtctgttacagcagcgagtcaaggagatttctcgcaagcgtttcctgatggcagcacctgctcgtccgaaagcgcctgaacccgctgcccgttccccgctaggcagcccaatcgcccggccagcagcgcgtcaggccgagccgccgcgagccatgcctgcagctgccttcaaacgcagtggcaagagttatcagctggtggccatcggtacctcgacgggtggcccggttgcgctgcagaacgtgttgaccaaattacccggtgatttccctcatcccatcttgttgatccagcatatgccggcgacctttaccgccgcgtttgccgctcgactcaatggtctgtgccagatcggagtcaaggaagcggaagatggcgatgtgctcaaacctggccatgcctacctggctccgggcggcaagcagatgctgctggaagggcgtggtgcgggtgcccgcatccggattgtcgatggcaatgacaaggtgaattacaaaccttgtgtggacatcacctttgcctctgccgccaaaacctatgccgacaaggtgcttgccatcgtattgaccgggatgggggcggatggtcgggatggtgcgcgtctgctcaaggagcagggctctaccatctgggcacaggatgaagcctcctgcgtggtatatggcatgccacaagcggttgccaaagccggcatcgccacggaatcactgccgctggatcgggttgcacaacgaatcctggttgagctgggccgctaac

SEQ ID NO: 259610 - DNA, 1029 bp, Unknown
  Bacterial polypeptide expressing nucleotide sequence isolated from the Sargasso Sea
tatggccataagggtattagttgttgatgactccagttttttccgtcgccgtctgacggaaattctgagtcaggatgctgagttagaggtcattgacaccgccaataatggtaaagaggcggtggaaaaagctttagccttgcggcccgacgtcattacgatggacatcgaaatgcccgttatggatggcatttcggccgtgcgcgaaatcttaaaagtgcagcgcacacctattctgatgttttcttcgttaactcatgaaggtgcaaaagccactttagatgcgctggaagccggcgctatcgatttcctgccgaaaaaatttgaagatatagcccgcgataaagctgaagcggccgacgttttacgccagcgtgtaaaaacggtagccagacggcgggtcattagcagaccttcaggtttaaccggctcagcaagctcagctttagcttcccgagcgtcatcaacctttgcgacaggttcaacagccgtaccagcacgagcacctttagctcaaagtctggcagccagagcattggctgaacgtgctgaactgcaaaacaaagtggcagagcgcgctgaaactcagcgaggtggcagttttgagtccagcggtaaaaactacaaacttgtggctattggtacttcaactggtggtccggtagctttgcaacaaattatcactgctttacctgctaattttcctttgcctatagtgctgattcagcatatgcctgcagcctttaccggtgcttttgccgccaggttaaatgggctggcaaaaatcgaagtgaaagaagcagcagataacgacatattacgtcctggcgtggcttatctggcacctggtggcaaacaaatgcttgtcgatggtaacgaaaaccaagccagattacgggtccgcgaagacgattcgccgcgtattacttttaaacccagtgtagatattacttttggcaccgcagcaaaagtctttaatgacaaggtgctggctatagttctgacaggtatggggtctgatggccgcga

SEQ ID NO: 259611 - DNA, 1054 bp, Unknown
  Bacterial polypeptide expressing nucleotide sequence isolated from the Sargasso Sea
atggcaataaaggtattagtggtagacgattcagccttaatccgcagtctgttgggcaggatggtcgagtccgatcctgagttgtgtctcgttggcatggcagtcgatgcctatatggccaaggatatggtgaatcaatttcggccagatgtgattaccttagatattgaaatgccaaaggttgatggactcacttttttagatcgattaatgaaggcaagaccaacagctgtcgtgatgatttctgccttaaccgaagagggcgcagatgcgacattcaatgcactagctctgggagctgtggattttattcctaagcctaagctggattcacctcagggatttaatgaatatcaggatttaatcctcgaaaaaattaaatctgcggcaaaggcaaagttgcaaagcctgcctgcgccgaccataacggtgaaacccagtttaaaaccagccttaaatcaacgtactgttaatacccagttagtggctattggagcttccactggcgggactgaggctattttgcatcttttacaacaatttcctgcggttatgccgccaattgtgattacgcaacatatgcctgctggatttacccgtacctttgcagaacgactaaacaaactcactcgccttaatgtaaagcaagctgaggaaggggagcggttattaccttgttatgcctacattgcaccaggggatcagcacttagaaatcatcaaagttggtgggagttttaaagcaaagcttagccaaggtgacaaagttagtgggcatagaccatcggtggacgtgttattccattcagtggctcaatatgcaggcgcgaatgcgacagctgtgatcctaactggtatgggtaaagatggggccgatgggatggaagcgatagataagcaaggtggcaaaacctttgcacaaggagagcagagttgtgtggtatttggtatgcctaaagaggcgatcaaacgcggtgcgattcatcatatagtagaattgcctcaattaggggataaactgctccagtatttggcatcattaaaacgagactagg

SEQ ID NO: 259612 - DNA, 1126 bp, Unknown
  Bacterial polypeptide expressing nucleotide sequence isolated from the Sargasso Sea
atggccattaaagtattagtcgttgatgactcaagcttttttagacgacgtgttagtgaaatagtcaatcaagatcctgaactggaagtgatcgcgacggctgctaacggggctgaagcggtgaagatggctgctgagcttaatccccaagtaatcactatggacattgaaatgcctgtgatggacggtatcacagccgtccgtgaaatcatggcaaagtgtccaaccccgattctgatgttttcatcattaacccatgatggcgctaaggctaccttagacgccctagacgcgggtgcgttagattttttacctaaacgttttgaagatatcgcgaccaataaagatgaagcgattttgttattgcagcaaagagtcaaggctcttggtcgtcgtcgaattttccgtccagtggcgcgtcctagcgttgccccaattcccccaagaccaaacactggctcggtattagggaatgtgaccacacctgttcaaagtgcacctgcgccagtgcgtacgtcacctgtatcgtctattcgtgctagtggtaagcaatacaaattattgttaatcggtacgtcgacgggggggcctgtcgccttacagaaaattttgactcagtttccagcaaattatccgcatcctattttgctaattcaacacatgccagctgcttttaccccagcatttgcaaatcgtttaaatggtttatgtaaaatcgaggtaaaagaagcggcaaatggcgatattttgcgtccaggttgtgcgtatctagcgccaggtggaatgcagatgatggtagagcgtacaggcgtcacaggccgaataaaagtgctcgctggtagtgctgaaatgaattataagccttgtgtcgatatcacttttgcttcagcctcaaaagcctacggtggagatgtgcttgctgtagtgttaactggaatgggagctgacggccgagaaggagcacgcatgcttaaagctgccggtgcgaccatttgggcgcaggatgaagcgagttgcgtcgtttatggtatgcctcaagcagttgccagtgcgggtattgccactcaatccatttcattggagcacatggctgagtcgattttaaaagagtctgcacgtggctagc

SEQ ID NO: 259613 - DNA, 1078 bp, Unknown
  Bacterial polypeptide expressing nucleotide sequence isolated from the Sargasso Sea
aatgaatgcctccggaaatacagtccaggtcctgattgtcgatgattctgcgctggtaaggaaagtgatgacggaaatcctttcttcggattccatgattgaggtggtcggaacggctccggatgcacagatcgcaaccaggcaaatccggaaactgaatccggatgtcatcaccctggacatccagatgccgggaatgaatgggttggattacctggagaggctgatgaagtcccagcccaggcctgtggtgatggtcagttctctgacccaaaaaggggctcctgaggctttaaaagctcttgaactcggggcggttgaagtgataggaaaacccgataccacggtccgggaaggaatggaggaaatctcgatccagatcgtggatgcggtcaaggctgcggctcaggctaaattgaaaaagaatacggatatctttctcaaggctcctgaaaaactgactgcagatgtgatcattccgaaaaatccgccgaagcacttgagtcactcgattgaaccgatcattgcaatcggtgcttcaaccggaggtacggaggcattgatgacgcttttgactcagcttcctgaaagcatgcccggaattgtgatggtccaacacatgccgggaagttttaccaaaagtttcgcggaaaggcttgaccatcattgcaggttgactgtcaaagaagccgaatccggagaaagaatacgcccgggaactgcctatcttgcaccgggtgaccagcatctcctgctgaaaaaccaggacaagggatattgtgtcgaactcaacgacggaccgttggtctgccgccaccggccttctgtggatgcattgttccgctctacggctcaggtcgccaggcatcatgcgaccggggtgatcctcaccgggatgggagacgatggtgcccaggggatgcttgaaatgaaagagtcagggagtttcaacatcgcccaggatgaggcaagctctgtcgtttatgggatgcctaaaatggctttatccaaaggtggggttgatgaagtgcattccttaaatgaaatccctcatgtgctggtcaagcactcacactga

SEQ ID NO: 259614 - DNA, 1093 bp, Unknown
  Bacterial polypeptide expressing nucleotide sequence isolated from the Sargasso Sea
catgaccgcagtgcagaagatcaaagttttgtgcgtcgacgattcggcgctgatccgcagcctgatgaccgagatcatcaatagccagcccgacatgacggtgtgcgcgaccgcgcccgatccgctcgtcgcgcgcgagctcatcaagcagcacaaccccgacgtgctcacgctcgacgtcgaaatgccgcgcatggacgggctcgacttcctcgagaagctgatgcgcctgcggccgatgccggtcgtgatggtgtcgtcgctgaccgagcgcggctcggaaatcacgctgcgcgcgctcgaactcggcgcggtcgatttcgtcacgaagccgcgcgtcgggattcgcgacgggatgctcgactacgcggaaaagctcgccgacaagatccgcgcggcgtcgcgggcgcgcgtgcgccaggcgccgcagccgcaggccgccgcgcgcacggcggacagccactcggccgcgccgatgatcaacaacccgctcgtcagtaccgagaagctgatcatcatcggcgcgtcgacgggcggcaccgaggcgatccgcgaagtgctgacgccgctgccgccggatgcgccggccgtgctgatcgcgcaacacatgccgccgggcttcacgaagtcgttcgcgcaacggctgaacggcctgtgccggatcgcggtgaaggaagccgagcacggcgagcgcgtgctgccgggccacgcgtatattgcgccgggccacgcgcacctgttgcttgcgagaagcggggcgaactatattgcgcaactgtcggacgagccgccggtgaaccggcaccgcccgtcggtcgacgtgctgttccgctcggcggcgacgcacgcgggcaagaacgcgctcggggtgatcctgaccgggatgggccgcgacggcgcggccggcctgctggaaatgaaacgcgcgggcgctcacacgttcgcgcaggatgaagcaagctgcatcgtgttcgggatgccgcgcgaggcgatcgcgctcggcggcgcggacgagatcgtgccgctcgccgagatgagccgtcgcgtgatggcgcgcctggcgacgatgggcgaccgcgtgcagcgcgtttga

SEQ ID NO: 259615 - DNA, 565 bp, Unknown
  Bacterial polypeptide expressing nucleotide sequence isolated from the Sargasso Sea
atggtctttaaagtcctagtcgtggacgactcgaccttttatcgccgtcgagtaagagaaatactcgatggtgatagagaacttgaagttgtcggggaagcgagaaacgggcgtgatgcactcgacaaagccgaggcgcttaaacccgatgtaataaccatggacgttgaaatgccagttatggatggtatttcggctgtgaaggttattatggataaacgtcctacgcctattttaatgttctcttcattaacgcatcacggcgcccaagcgacgcttgacgcgttagaagcgggcgcgctagattttttacccaaaaaattcgaagacatcgctcaagacagaaaagatgcttcgcggctactttgtactaaagtcaggttgatagcgcgaagaggactgggtttgaagcgcccatcctttcgcaatattgagtccagaaaacttcctgataacgcgcctaaacaagcgtttttcaaaacgtcgggtttactttctggtcataaagacgcggccaagcagcctaccgtttcgtctgtaagaccaaccagggaagccagtataa

SEQ ID NO: 259616 - DNA, 1048 bp, Unknown
  Bacterial polypeptide expressing nucleotide sequence isolated from the Sargasso Sea
catgcctataaaagtcctcgtagttgatgactctgcgttaatccgccaaatcctttcagaaatagtaacccgtgatccaggtttaacgcttgtgggtgcggcgccggatgcttatgcggcgaagcgaatggtgcaagagttcaggccagacgttattactctggacattgaaatgccgaaggtagacgggttacgttttttagaagtaatgatgaaggcgatgccgaccccagttgtgatgatatctacgctgactgaaagaggtgccgacgcaacactgcgtgcgctcgaactaggcgctgtggattttatggcaaagccaaagctcggcgtagcgcaaggtatggctgaatacgcggcggttattgttgaaaagataaaagcagcagcgcattcgaggttaggccaaccaacgcaaacacgctgcacaaaacatgcttctatgcgctacacaggaaccgaaaagttaattggtataggcgcatcaactgggggaaccgaagcaataaaagacgttatcatgcattttccccgcaatgcaccggccaccattatttcccaacacatgcctccagggttcacaaccacctacgccaagcggctcgatagcctttgtgaaataaccgtgagagaagcgcacggaggggagcgtttattgcctggatttgcgtacttggcaccaggtaataaacatttaaaagtagagcgtagcggcgctgactatcgtttaacccttgatgatggccccaaggtatcgggacacaagccctccgttgatgtgatgtttgactcgctggctgagcatgctggcgcaaacgcggtgggtgtgctgcttacaggcatgggacgggatggagcaaaaggccttaagagtatgcacacaaaaggctctgttacgttttgtcaggatgaaaaaacctgcgttgtttacggtatgcctaaagtggctgtagaaatgaaagccgctagttttatcaagccgttagaagatatctcagatgcaattctagatacgctagaagcattgggcgcgggctcgcgcctttaa

SEQ ID NO: 259617 - DNA, 1126 bp, Unknown
  Bacterial polypeptide expressing nucleotide sequence isolated from the Sargasso Sea
aatggccattaaagtattagtcgttgatgactcaagtttttttaggcgacgtgttagtgaaatagtcaatcaagatcctgaactggaagtgatcgcgacggcctctaacggggccgaagcggtgaagatggctgccgagctaaatcctcaagtcattacaatggatattgaaatgcctgttatggacggtattactgccgttcgtgagatcatggcgaaatgtccaacaccgattttgatgttttcttcattgacccatgatggcgccaaagccacgctagacgctctcgatgcgggggcgctcgatttcttacctaagcgctttgaagatattgcgaccaataaagatgacgcaattctattattgcagcaaagagtgaaagccttaggtcgccgccggattttccgccctgtggttcgtccaacgacacctacgccgccacctcgccagagtgcgagttcagtattaggcggtgcatcgacccatgcgcaaccttctccagcgcctgtgcgttcttcaccagcgacctcgattcgtccaagtggtaagcaatataaattattgctgattggcacatcgacgggcggtcctgtggccttgcagaagattctgactcagttccctgcaaattttccgcatcctattttgcttatccagcatatgcctgcggccttcacgcccgcctttgcgaaccgtttaaacggtttgtgtaagattgaagtgaaagaagcggctaatggtgacgtattgcgtccaggttgcgcctatcttgcaccaggtggaatgcaaatgatggttgagcgcgctggtgttactggccgtgtcaaagttttggctggcagcgcggagatgaactacaaaccctgcgtcgacattacctttgcctcagcatctaaagcctatggcggtgatgtgctggcggtcgtgctaacgggaatgggagccgatggccgcgaaggcgcacgtatgttgaaatcggcgggcgcgaccatttgggcacaggatgaggcgagctgcgtggtctatggtatgccgcaggcggtggccagtgcgggtattgctactcagtccatttctctggataacatggcggagtcgattttaaaagagtctgcgcgtggctaa

SEQ ID NO: 259618 - DNA, 1138 bp, Unknown
  Bacterial polypeptide expressing nucleotide sequence isolated from the Sargasso Sea
tatggtagtcaaggtcttggtggtagacgactccggtttcttccgtcggcgcgtgtcggaaattctgtctgctgaccccagtattcaggtcgtgggcacggccaccaatgggcgggaagccatcgatcaggcgttggcgctcaagcccgacgtgatcaccatggattacgagatgccgatgatggatggcatcactgcggttcgaaatatcatgcagcgctgtccgacgccggtgctgatgttctcctcgctgactcatgaaggcgcccgtgtcacgctcgatgcgctggatgcgggggcagtggatttcctgccgaagaacttcgaagacatctcgcgcaaccccgagaaggtcaagcagatgctgtgcgagaaggtgcacagcatcgcgcgcagtaaccgccgtttcagtgcggccgcggtggctccggcgccgactgcggctagtccgagcgcggcgccgaccagtcgtcctgctgtctcgacgcgacctgctgcacctgctcccgctgtccctgcgcgtccggcagcagcggccggtggcgcagcccctacgtcatcagcgcccaagcgcaaggcctacaagctggtggccatcggcacctcgaccggtggcccggtggcgctgcagcgcgtgctgacccagcttccggccaattttccggcgccgctggttctgatccagcacatgccggcggccttcaccaaggcttttgccgagcgcctggacaagctctgccgcattcaggtcaaggaagctgaggatggcgatatcctgcgcccaggcctggcgctgctggctcctggtggcaagcagatgatggtcgatgcgcgtggcgcgataaaaatcctgccaggtgacgaacgcctcaattacaaaccctgcgtcgatatcaccttcggctctgccgccaagtcctacggtgacaaggtgctggccgtggtactcaccggtatgggcgccgatggccgtgagggtgcgcgcctgctcaagcagggcggtagccaggtgtgggcgcaggacgaggccagttgcgtgatctatggcatgcccatggccgtggtcaaagccaatctggcggatgcggtctacggcctggatgacatcggccggcacctgaccgaggcctgccagtga

SEQ ID NO: 259619 - DNA, 1057 bp, Unknown
  Bacterial polypeptide expressing nucleotide sequence isolated from the Sargasso Sea
gatgacgataaaagtactagtggttgatgattcggcactgatccgtaacttattgggcaagatgatcgaggccgatcctgagttatctttggtgggcatggccgccgatgcttatatggccaaggatatggtgaatcagcatcgccccgatgtgattacattagatattgagatgcccaaggtggatgggctgacctttttagatagattgatgaaggccagacctacggcggtggtaatgatttcctcattaaccgaggagggtgccgatgccacctttaacgcgctaggattaggcgcggtggattttatccctaaaccgaaattagactcaccccaagattttaatgaatatcaagatttgattctggagaaaattaaatcggcggcgaatgcgaagctgaaaacccaacgcactcaacccgttgctgtgactccgccaagcctaaaacccaccctagcaaatcgcgtgatcaatactcaactgctggcaattggcgcttcgactggcggcactgaagccattttatatctgttgcaacagtttcctgcagtcatgccaccgatagtgatcacccaacatatgccgccgggttttacccgtacctttgccgagcggctaaataaacttacccgtttgaatgttaagcaagccgatgatggcgaacgtttattgccctgttatgtgtatattgcgcccggagatcagcacttagaagtgattaaggtcggcggcagttttaagacccgtttgacccaaggtgataaggttagcggccataggccctcggtggatgtgttgtttaattcggttgcggcgtgtgcgggggccaataccacggcggctatcctcactggaatgggtaaagatggtgccgatggcatggcattaatcgaccagcaggggggcaaaacctttgctcagggggaacagagctgtgtggtgtttggtatgccaagggaagcgattaaacgcggcgttatccatcatgtggttgaactgccgcaactggcggataagatgctcaactatttagcctcgcttaagcgagactaa

SEQ ID NO: 259620 - DNA, 775 bp, Unknown
  Bacterial polypeptide expressing nucleotide sequence isolated from the Sargasso Sea
atgataaatgtattaataatcgatgactcccctttaattagagggttgcttacagaaatactgcaacaagctaacgacattaacgtagtgggctgtgctgaagatccataccaagcacgcgaaatgatcaaaaaacttaatcccgatgtacttaccttagacgtagaaatgccaaaaatggatgggattagctttttaaaaaacctaatgcgcctaaggcctatgcccgtggttatgatttctacgcttacgcagaaggggtcgcccattacattagaggcgttagagctaggtgctgtggattttattgctaagccaacaagtaacgtaagagcccagctgagtcattacgcgtcactggttcaacaaaaggtaagaatagccgccggtgcacgaatacgcagctttaaaaaagcgccacccgatacaaaacctataagttcagagactgaatttttattaaataaagtgattgcaattggtgcatctaccgggggtaccgaggcaataaaagaagtactaataaaaatgccagttaattgccctcctattgtaattactcagcatattcctcccgtatttagtgcctcgtttgctgagcgtatggatagaacatgcttaattaatgtgaaagaggcacaacatggcgacaagctaagcccaggttgggcttatattgcccccggcgggcttcatttaagcgtaaaaaagcgaggaattgctttgtattgccagctcgacgatggtgagcctgtaaatcggcataaaccagccg

SEQ ID NO: 259621 - DNA, 780 bp, Unknown
  Bacterial polypeptide expressing nucleotide sequence isolated from the Sargasso Sea
cgccggttgacgcgagccgtgccaggggcgtgctggaggcggggcatgacgatctgcagcggctgaaactggctggcgagcaggatgccgcactggaacgcttcatgctcgatggcgtcgctggcctggcacagggctacaggcactatctagatgtgttgcataggcagcgcccggccactgacgccccctcgccgcagtgggacagctgggccagggcggtactgggtgcattcgaccgtttccagctgctctgcgcggtgcgcaagggaagctggggcgtcgaggaaatgaatctgcgcatcgcccgggccctgcagcgagctggtctgctggttgccgaccacggctggtacgaggggcggccggtgctggtgacgcgcaacgactacagcctgggcctgatgaatggcgacatcggcattgcactgaacctgccggatgatgagctggggcgccaggtactgcgcgtggtcttcccgcgcaacgatggcagtggcgagttgcgccatatattgcccagtcgactgagcagcgtggagaccgtgttcgccatgaccgtgcacaagtcgcagggctcggagttcgagcattgcgcgctgctcatgccggatgcgcttaacccggtattgaccaaggagctggtgtacaccggcatcacccgtgcccgacgctggttcagcctgatcgaaagccgtgccggtattttcgagcaggcggtgctgcgccgtgtcgagcgtcgcagcggcctgcgcgaagcgctggaggcgaccgagtaat

SEQ ID NO: 259622 - DNA, 808 bp, Unknown
  Bacterial polypeptide expressing nucleotide sequence isolated from the Sargasso Sea
aaagcaaaaagaatctctgcttaattcatgggaagcgcaaaggggactaagggatgtgatgacatttttgagaggaattggaatatctcatagttttgcacaaaagatttatgctaaacatggattaaacagcattcctctgattaaagctaatccttatttgttaacagaattttctggaataggatttcttacagcagacggaattgcccttaatcttggatttgataaaaattctccgtatcgtgcctctgcaggattgctttatatgcttgaacagcaggtacaaaaaggacacacatgttatcccctgtctgacttactggagaagacagcctccgagctacttatagaaaaaaatactttgggaatccccttaaatcaactgattgaagatcgactgatacattgtaatgaacaaaattttgaaaatgagggggaaaaaaaatttatttccagaattcgttattacagatcagaacagcgaatagcagaaaacatttttcgaatccttaatagcaaagcttatacaatctttcagcgagaatcatctataattgaagagcaggaaaggaaagtcggattaaaacttgatctgacccaaagggaagctgtaagagctgttcttaaaaataaagttttaattgttacaggtggacctggaactggtaaaaccactcttgtaaggtttatacttggccttattagtcctaaaattccttctatagccctagctgcgcccacgggtcgtgccgcaaaacgcattacagaaacaacaggctcatcatcatctacaatacatagactc

SEQ ID NO: 259623 - DNA, 2134 bp, Unknown
  Bacterial polypeptide expressing nucleotide sequence isolated from the Sargasso Sea
atgaataacgccacagcccttgcagccaattggtacaatgcaggtgcactcagacttaaagcaccactggctgagttgctcaaatattgggaaaaagagcggcttatcactgcacttgatcgccattttgcccttgagatggcccgtcttcatcccaatgacgcccaagagccactgtttatgctgctgtgcgccctgttgagtcagcaactgtcggcccaacatacttgtctagtgctcgaatatatagtgccaaccaatccgatggcggaatcgataaaccgctgtcaaatccgtttaagccttactgaactgattgacgcactgcaacactttgacaccattggagcaccaaatagcaataaaccactgatttttgaggatggtagactctatcttgagcgttatcatcattttgaaacccaagtcgccagcgccttaacaaggttatcagcgacggcgctttcgttaacgccctcgcagcctttagcatcggataatcagtcacttttacaactacgcaggcaactggattgtttatttccaagcgcagcccacaccgttgaagcaaacatcgattggcaaaaggtcgccaccgctactgcgctcggtagaaagctggcggtgataactggtggccccggtacaggtaaaaccaccacggtgactaaattgctgttgttacaacaattagggttaccaaagcagataagacttgtcgccccgacaggcaaagcggccgcccgtttaagtgaatccattaaggcctctaaagcgagactcgagcaggaacttaagcaggctcaagcgacaaacgaactggcgcaaaaccacgaaacccaagccctgttagccgcgcttaagcaagtaccggaagaggcatcaaccttacatcgcctgctgggtgtcatccccaactcagcgcattttcgccatcatcaaggcaacccattacggctcgatcttttgattgtggatgaagcctccatggtcgatttacctatgatgtacaagctgcttagcgcattgccggaacacgcaggcttaatattgctaggggatcaggaccaactcgcttcagttgaggcaggcgccgtacttgccgatatttgcgccggacttaagcaagcctcgactcaacataccgaatggaaaatgcgttatagccaagcacaggccgaacaattaaccgcgctcacgggctttaatttaaccccctttatccacgctgagcctaaaattggcgatagcctgtgtatgttaacccacagccatcgatttaaaggcgatgcggggattggcttgctggccagcgcagtcaaccgtgccgatctcgcgggcattttagcggtatggcaaagagggctggccgaattaacctggctagaacacagcgtagatcacagccaaactcaagcaaaaatcagtgaacctagcagtaataccggacttaaagcactacttgcacaggcctgtgagcaatacggtgactatttgcgcctattacaaccaacgcacgccaccacaatacacacgagtgagccattttgcccgccaagcgccatggaggcgattgccaaatttaatcaatatcgcatgttgtgcgccatgcgaactggcgattatggtgtcgaagggattaatcttgcggtaacgaaggcgttagcacaggccaaacttattcagccgcagcaggaattttacctcgggcgcccgattatcatccaaagcaacgactataacttaggtctgtttaacggcgatattggtttgattttgcaggatgaagagagagctgaccgactgatggcccactttatcaaagccgatggcgaactgcttaaagtgctacccgcaaggctacctagccacgaaacctgttacgccatgacggtacataaaagtcagggcagtgaatttaatcgagtcgccctagtgctcccgccaaatcctagtctcgttcagtggcaattgctcaccaaagagctgatttacactgctattacccgtgcaaaacaacactttagctgtttaggtacacagcaagtcttcgagcgtgctagcttgcaagctacccagcgcgcctcaggtttagcggatagactctggcgcgataagtcgataatcaattaac

SEQ ID NO: 259624 - DNA, 2026 bp, Unknown
  Bacterial polypeptide expressing nucleotide sequence isolated from the Sargasso Sea
gatgattgaacggctcaaggctctggcgctggcggggcgcatccgccagctggatctgcaatttgccaaactggtggccgatctgggtggcagcccagagctggtgctgggggcggcgctcgcctgcttcgagctggggcgcggccatgtctgtctaccgctggagatgctgacagtcggatctttgcgcccgttcgggctggatccggatcagagtcgggatctgctggccgatctggcggatcctgcccgctggcccgccctgtttgcagagagtccgctggttggcaccgagcaggatgaggggctcgccccgcgctggccgctgcggctgtggcacgggcggctctacctcacccgctaccacgatcatgagcagggggtggcccgtcatctgcgcgctttgagtgaacgtgccgaatggccggagatcgccccggccctgtcgcggctgtttgcccgcgactacggcctggtgttcggggcgctgctcaaggcccgcctcgcccctgacttctcggcccgccactttatcgaaaagtatctggatctggtgttcccgagcgaggtggattggcccgccatcgaagggctgctggccagtgcccaggcggcgagcgatttgagcaagctggatgcgctggtgcccgaggcactctgctgcaacggccagaagctggcggcggccaccgcggcggcgcgcccctttgcggtcatctcgggtggccccggcaccggcaagaccaccacggtcgccaaactgctcgccattctggtggagaccggcctgcaggcaggcaaggccccggcgatccggctggtggcccccaccggcaaggcggcggcgcgcctaaccgagagtatcggctctgccctgcaggccctcgatctgccccccgagtgggtcgaggcgatccccaccgaggcaggcaccttgcaccggctgctcggggtgatcccggggcgcagccagttccgccaccacgcgggcaacccgcttcacctcgacttgctggtggtggatgaggcctccatggtggatctgccgatgatggcgcgcctgctcgatgcgctgccaagccacgctcgcctgatcctgcttggcgacaaggatcagctcgcctcggtggaggcgggggccgtgctcggcgatatctgcagctttatcgaacagggcatcagccccgcccaggcggactggctctcccgccagaccggctaccgcttgcagggctcgcccgcgggggcgccggtgcgcgacagcctctgtttgctggccaagagctggcgctttgatcagcactccggcatcggccagctggcgcgtgcctgcaacagcggcgatgctacggcggtggaatcagtctggggcgcgggctttgccgatatcagcctgcacccctgggcgggggaggcctacgacgccctgattgcccagggggtggccggttacggcagctatctgaaggcggcccgcgcgggggaagcgcccgccgccgtgttcaaggcattcaacagcttccagatcctctgcgccctgcgtgacggcccgtttggcgtcgaggggcttaacgagcggctggaactggccttgtcacgggctggcctgattgcccgcgacggcgactggtatgccggtcgcccggtgatggtggtgcgcaacgaccacggggtcggcctctacaacggcgatatggggctctgcctgcccgatgaaagcgggcggctcaaggtctggttcgagcagccggatggcaccctgcgggcgcttttgcccagccggctgccgccccacgagacggtctacgccatgaccatccacaaatctcagggctcggagtttgcccacaccgtgctggtgctgcccgacagtcccagcccgctgctcacccgcgagctggtctataccggcatcacccgcgccaaggcgcggctcgatctctacggcgatcgcgccctgctggcacaggccgtgcggaaaaagaccgaacgttattccggattggcggagaggttgggggagtga

SEQ ID NO: 259625 - DNA, 2122 bp, Unknown
  Bacterial polypeptide expressing nucleotide sequence isolated from the Sargasso Sea
catgaaccacagcaccgaactgactcccccaaaagaatcaacccaatgggttgaagctggcgcactcagactcaaggcgccgctcgcagagctactcaaatactgggaaaaggagcggctgatcaccccgctcgatcgccattttgcccttgagatggctaggcttcaccccaatgacgcccaagagccactgtttatgctgctgtgcgccctgttaagccaacagctctcggcccaacatacctgcctagtgctcgaacatatagtgccagccaatccgatggcagagacggttaatcactgccagatccgtttgagcctgccagagctaattgcaaggctgcaaaattttgaggccgttggcgaaccttacagcaataaaccactgatttttgatggcggccgactctatcttgagcgttatcatcatttcgaaactgaggttgccagcgctctgacgaggctatcttcgagtcagcccatcaacgccacggataaagactcagatgcgtcgctacgcaggcagctcgattacttatttccaaatgcagcatcttcccatgcagcaccagcccttgagcctaatatcgactggcaaaaggtggcaacggcaacggcgctcggcaagaagcttgcggtgatcaccggcggccctggtacaggcaaaaccaccacagtgactaagttactgttgctacagcaattaggttcaccaaaacagataagactcgtcgccccgacaggtaaggccgccgcccgtttaagtgaatcgataaaggcctcgaaagcaagactcgagcaggaactcaaacaggctcaagcgacaaacgaacaagtacaaagtcacgaaacccaagcgctgttagccgcgctcaagcaagtgccggaagaggcatcaaccttacatcgtctgctgggggttatccccaattcggcgcagtttcgtcaccatcagggcaatcccctgcggctagatctcttgattgtcgatgaagcctcaatggtcgatttgccaatgatgtataagctgctcacggccctccccgaacaggcgggtttgatactgcttggggatcaggaccaactcgcctcggttgaagcaggcgcagtgctagccgatatttgcgcaggactaaaatacgagtcagaccaacactctgaatggcgaatgcgttatagccaagctcaggccgaacaattgagcaagctcaccggctttgatctgcgcgcctatattcaccgcgagccaaagattggcgacagtttgtgtatgttgacccacagccacagatttaagggcgatgcgggcattggcctattagccagcgcagtgaatcgctccgatctggcggggattttggccgtatggcaacggggactggccgagcttacttggctagagcacagtatggatctgagccagacccaagccaaaatcagcgagcctgcaaacaacagcggccttcatgccctgctaacacaggcctgtgagcaatacgccgagtatttacgtccgctgcaaatttcagagccaagcagtgtgccaagcgccatcgaggccattgcccgctttaaccagtatcgcatcctgtgtgccatgcgcagtggcgattatggtgtcgaaggtatcaatcaagccgtgactaaagcgctgtctcaagccaagctgatccatccccagcaagagttttaccttggcagaccgattattatccaaagcaacgactataacttgggcttgtttaacggtgatattggcttgattttgcaggatgaagacaggccagagcgcctgatggcccactttattaaagccgatggcaaactgcttaaagtgctccccgcaaggctgcctagccatgaaacctgctacgccatgacggtacataaaagtcagggcagtgaatttaatagcgtcgccctcgtacttccgccaaatccgagcctagtacaatggcaattgctcaccaaggagcttgtctacactgcgattacccgtgcaaaacaacactttagctgtttaggaacacagcaagtcttcgagcgtgcaagccagcaagccacccaacgggcctcaggtttagccgataggctctggcgcgataaagcgatgacagattaa

SEQ ID NO: 259626 - DNA, 2260 bp, Unknown
  Bacterial polypeptide expressing nucleotide sequence isolated from the Sargasso Sea
ctgcccgaacccgccgatttcggcattgcactcgcggaagggttcgcgcgccgcatcggcgatctggctcgtcgcgccggtgcgccggccgcggccgcgcggtgggcggcgcgcgccgcgttcgcgacgagtcgcgcgaccgcgggcggccacgtatgcgtcgcgctcggcgcgctcgcgcagcgctacgaagcaccgctcgacgaagtccgctcggcgctcgccgcgagcggcgtggtcgcattccgcacgctcgcacgcggcgacgagcggccgctgatcgtcgaccgccacgaccacctgtacctgtcgcgctatttcgactacgaacggcggcttgccgatgcgctcgtcgcgcaggccggtgtggccgcgccggacgaaggtctcgcgcccgaccggttgcgcgacagcctcgcgcgttacttcgggccggcaaccggcgaagtcgactggcagcgcgtcgcggcgatcgtcgcgctgacgggccgcgtgacgatcgtcagcggtggcccgggcacgggcaagacgacgaccgtcgtcggcgtgctggcctgtctgctcgacgcgcatccggggctgcgcgtcgcgctggccgcgccgaccggcaaggccgcgcagcggatgcaggaagcactgcacgcacgggccggcgacctgccgcccgaactcgcggcgcgcctgccggagacgtcgttcacgctgcaccggctgctgggcggcggcggggcggccggcttccggcatcaccgagacaatccgctgccgtacgacctgatcgtcgtcgacgaggcgtcgatgatcgacgttgcgctcgccgcgcatctgctcgatgcgctcgcgccgggtgcgcggctcgtgctgctcggcgacaaggaccaactggccgcggtcgaggcgggcgccgtgtttgcagagttgagcgcgcggccggcgtttaccgccgcggcgcgcacgcgcatcgcgcaggcgctcggcatcgacgaggcggcattcgtcgcggcgttgccggtgcaggacgaagccgcgaccgcagcgattcacgtcgcgcatccggcgagcgccgtggcccgggcgccggcgccggccgcggccgctacgcccaaacctgcgtcgcgccggaaagtcgatgagcgacaggcatcgctcttcgacgacgaaccgcaggaggacgaagtttcgccgaccagcgtcgcgccgccgccggtcgcaggtccggtgccgaccgaaaccggtgagccgggcgaggccggcgcggcaggcgaggcccccgcgtggatcgaggtcgacgaacttgcgtggctcgacgccgtcgagctgccgccgttcgacgcgggcgacgcggcgcttgcatcggtcacgtcgctactgcccggcgaaccggccgccgcgccagccacgcccgccgcgcccgcacccgcaccgctcgccgactgcgtggtctggctcgagcgcaattaccgcttcggtctcgattcgccgatcgggcggctgtcgctcgcgatccgcagcggcgacgtgcaggccgcgctcgacgcgctgcccgccgacgattcggccgccgcgtcattccacgacgatgcgggcgagtcgctcgcgtcgtcgacggtcgagcggctcgcgcgccgcttcggtgcttacctcgacgcgttgcgcgacacgctggccgcgccggtgcccgatccgctgccgctgttcgacgcgctcaaccggttccggatcctgtgcgcaacccgcagcggcttgcgcggcgcggagcacgtcaatgcgctcgtggccgcgcacgtgcgccacgcggcgcgggtgccgctggcggtcggcgcgcactggttcacggggcggccgatcatggtgacgcgcaacgactatgcgctcgggctgttcaacggcgatatcggcatcgcgctgcccgacgcgcaaggcgtgctgcgcgtgtggttcaggcgtgcggacggcaccgcgcgcgcggtgtcgccggccgcgctgccaccgcacgaaaccgcgttcgcgctgaccgtccacaaatcgcagggctcggaattcgacgaagccgcgctcgtgctgccggcgtcgttcggccgcgtgctcacgcgcgaactcgtctatacggccgtcacgcgtgcccgcacgcgcgtgcaggtgatcgggccgcggcgcgtgctggcgcaggcggtcgcgacgcgtacgcagcgcgattcggggctcgcggcacgcgtcgacgaggcgcttgcacggcgtcgcacggaggcttcgcgatgat

SEQ ID NO: 259627 - DNA, 541 bp, Unknown
  Bacterial polypeptide expressing nucleotide sequence isolated from the Sargasso Sea
atgtttcaggacaacccgctgctagcgcagcttaaacagcaactgcattcccagactcctcgtgttgaaggggtcgttaaggggacggaaaaaggttttggcttcctcgaagttgatgcgcagaaaagctactttattccgccgccgcaaatgaaaaaagtgatgcatggcgaccgcatcagcgccgtgatccacactgaaaaagaacgtgaaagcgccgagccggaagagttgattgaacctttcctgacccgtttcgtcggtaaagtgcataagaaagatgaccgactgtcgatcgttcccgatcatccgctgctgaaagacgccataccctgccgcgccgatcgtagcgtgagccatgattttaaagagggtgactgggccgttgctgaaatgcgccgtcatccgctgaaaggcgaccgcggcttttatgccgaattaacccagtttattaccttcagcgacgatcatttcgttccgtggtgggttaccctggctcgccacaatctgaaaaagaagccccggacggcgtgcgaccgag

SEQ ID NO: 259628 - DNA, 1791 bp, Unknown
  Bacterial polypeptide expressing nucleotide sequence isolated from the Sargasso Sea
cgcagatgaaaaaagtgatgcatggcgaccgcattgttgcggttatccatacagaaaaagatcgtgagtctgcagagccggaagaactgatcgaacccttcctgacgcgcttcgtgggtaaagttcagggcaaaaatgatcgtctgtccatcgtgccggatcatccgttactgaaagatgctattccatgtcgtgccacccgcggcgttgaacatgaatttaaagaaggcgactgggcggttgcagaaatgcgccgtcatccgctgaaaggcgatcgcaccttctacgccgagttaacccaatttatcacttttgctgatgaccactttgtcccgtggtgggtcacactggcacgccataatctggaaaaagaagcaccggacggcgtagcaaccgaaatgctggacgaaggcctggttcgtgaagatttaaccgccctcaatttcgtcaccatcgacagcgccagcaccgaagatatggacgatgcgctgtatgctgaagaacaagctgacggtacgctacaattaaccgtcgccattgccgacccaacagcctggattgcagaaggcagtaagctggataaaacggcaaaaattcgcgcgttcaccaattatttaccggggttcaatatcccgatgttgccgcgtgagctgtctgacgatctttgctctctgcgcgcgaacgaagtgcgcccggttttagcttgtcgtatgagcattaccgccgatggcacgattgaagacaacatcactttcttcgctgcgacaattgagtcaaaagcgaagctggcctatgacaatgtttccgactggctggaaggtacaggcgagtggcaaccagaaaacgacgcgattgcggaacagatccgtctgctgcatcgtatttgcctgagccgaggagagtggcgtcataaccacgcgctggtctttaaagatcgcccggattaccgtttcgttctcggtgaaaaaggtgaagtactggacatcgtcgctgagccacgccgcatcgcaaaccgtatcgtggaagaatccatgattgcggcaaatatttgcgccgcccgtgtgcttcgcgacaagctgggtttcggtatttataacgtccatatgggattcgacccggccaacgccgacgctctggccgcgctgctgaaaacccacggtatgcacgtcgatgccgaagaagtcctgactctggaaggtttctgcaaactgcgccgcgaactggatgctcagccatccggcttcctcgacagccgaattcgccgcttccagtcctacgctgaaataagtattgaaccaggtccacactttgggctgggtctggaggcatatgccacctggacttccccaatccgtaagtatggcgatatgatcaaccaccgtctgcttaaggccgtcatcaaaggcgaaaccatcgcccgacctcaggatgataccaccgtgcaaatggcagaacgtcgtcgcctgaaccggatggctgagcgtgacgtgggtgactggctatacgcccgtttcctgagtgataaagccggtaccgatacccgctttgcggccgagatcattgacgtcagccgcggtggcatgcgcgtgcgcttagttgataatggcgctgttgcatttattccagcaccgttcctgcacgccgttcgtgatgaactggtatgcagccaggaaagcggcaccgtgcaaattaaaggtgaagttgtttacaaagtcacggatgtgattgacgtaactatcgctgaagtacggatggaaacccgcagcgttatcgcgcgtccagccgcgtaac

SEQ ID NO: 259629 - DNA, 705 bp, Unknown
  Bacterial polypeptide expressing nucleotide sequence isolated from the Sargasso Sea
gcggcgtcgggaatatcaataacgcggtgatggcgcgccttggcgaaaacccggatattccgccgtttatgatgtattccgaagtgctacaggagtcagtggttcatctgctggaaacgggaaaagtcagaggggccagcgcatccagcctgacggtttccgacaaagcgttgcggaaaatctacgataacatggactttttcgccgaacgcattgtgttgcggccgcaggagatctccaacaacccggagatcattcgccgccttggcgtcattgcgctgaatgtcgggctggagttcgatatttacggtcatgccaattcaacgcacgtagcaggtgttaatctgatgaatggcattggcggcagcggcgactttgagcgtaatgcttacttatcgatttttatggcgccctcgattgcaaaagaggggaaaatatcgaccattgtgccgatgtgcagtcacgtcgatcacagcgaacacagcgtgaaagtgatcattaccgagcaggggattgccgatctgcgcgggctttcgccgattgagcgagcccgtaccattattgaaaattgcgcccacccgctataccgggattatctccatcgttatctgcaatccacatctggtgggcatatacaccacgatcttagccgcgtctttgaactgcacacctcgttactgaaaacgggttctatgctgggttaac

SEQ ID NO: 259630 - DNA, 1011 bp, Unknown
  Bacterial polypeptide expressing nucleotide sequence isolated from the Sargasso Sea
gtgggaacgcgcgtcggcggatcggtgccggtcgcttcgatcggcgcgcgcgggttcgatgggtgggattccaaatcttgggaattcttgttacatgtcgtcgacgctgcaattgttgaggagcatgaaatcgttcgtgaaggacgtcggcgtcgccgcgagtttggaaaagccgacgctctcggcgctcaaggatttcttcgagagcgatctcggtgaattgagcgcggcgggagtgaagctcgcgatgagtcatgtacgcgatgaattcggtgaatacgatcaacacgacgcgatggagtttctcacggttttattggagacgattgaaaatgaaatcggcgacgcggcggcgtgtcccagtcggaagaattttctctggcgcatcgatcacgaactcaagtgcgcggcgtgcgggaaagcgaacacgattcaggagacaatgtacgcgttgacgcttcagatcgagccggatgagcgggaatccgtggagacgcttctcgagcgtttcttcgcgacggagagcgtgcatcgaaagtgcgacgacgaggcgtgtcgccacgaaacgagccaatcatccaggcgcatcgtctcgcaaccgaaaattcttcttcttcacctcaaacgtttctctgcgacgtacgagcgaggcgagatgcacttgcacaagttatccgcgtccattcgattgccgcgatcggtgtcgctgcgactcttcgccgacgaatccgaggaccgatcgcccggcgtcgaaacgcctcgcgcggactcgcactctccgtcgtcgaccgtcggcacaccgatgaacgacacgtacgcacttctctctgtcatctcgcacttcgggagctcgattcagacgggtcattacgtgtgccatcgacgcgaagaccgatcgtcttcgtggcgcacgttcgacgacgaacgagtgacgccgtacgtggcgcgaaacgacgacgacggcgcgcgcgcgctcatctcagcgcaagagttcgagcgcgagtgctatgt

SEQ ID NO: 259631 - DNA, 736 bp, Unknown
  Bacterial polypeptide expressing nucleotide sequence isolated from the Sargasso Sea
aatgagtaaaggatttaccaatttaggtaatacatgttatatgaattcggcactacaatgtttatcacatttggaacttcttaatccagggtgtaatgatttaacagtagactgtacaaaacgtagtaataaaaataattatgatttaatgggagaatggatgaaattacaaaaagctatgtgggatagatcaaataatgatgtaattaatacaattggaatcttaaaagaatttataagaagatgtcagagcgataatatatattttgaatcttttcaacaaaatgattgtggggattttattaatacatttctagatttacttcataattctataaaaagaagagttattgttgaaataacgggaactccaaaaaataaatatgatgaacttaaaattaaaagtattcattcgtggaaaagtttttttgagaatagttattcccacattattaaaaacttttattcagaactgttatcaattacctgttgtccaaaatgtaaatatatgacaacaaatcacgaaccgattatgaatataacattaactatgaaagaaaattatgattcgatttatgattgttttgacgagtttgttaaagagattacattagatacaggggaagaatggacgtgtgataaatgcaatgagaaagttagaccacagaaaaaactaacattaaaagaattgtctcctgttttgattttatctgttaaacaatatagagtagataac

SEQ ID NO: 259632 - DNA, 163 bp, Unknown
  Bacterial polypeptide expressing nucleotide sequence isolated from the Sargasso Sea
atggaaaataaacatattgataaaggactcactggaatgtctaatttaggaaatacatgttacataaattcagttatacaaattatatcaaatacacatgaattaggagaatatctcataaatgttgataagttaagaaatgttaacgaacatataatacaaa

SEQ ID NO: 259633 - DNA, 571 bp, Unknown
  Bacterial polypeptide expressing nucleotide sequence isolated from the Sargasso Sea
ctggcgctccgcgacgtctgcgagggcgacccccacccgcgcttcctcgtcgaggtgcagtccgccagcggcgcctggccgcgcgacgcctcttcgcagcagcaacaaccacctgcttccttcttgtcccccgatcgtgctggtgctgcgggctttccgtcgccttcgtccgtgtcctactccgacggcgaggcggcgatgcagatcaacaacagcaacagcaacagcaacaacaacaacaacaacaacaacaacaacaacaacaacaataacaacaagcgcgcgcggccgtcgctgcccgtgctgccctacccgcccccgccgcagggcgtgggactggtgaacctgggcaacacctgctacatgaacgccacgctccaggcgctcgcccacacgcgcctcttcaacgactacttcaccctccgcgccgcggcgcccccggctccggcctcaccagccgcgtcgcccaacaaaggcgccgcctcgaccgatgatgaggaggtggatccggcctcgtccttttcgggcgccatcgagggctcgtcggtgggtccggaggcgaacgacgagg

SEQ ID NO: 259634 - DNA, 591 bp, Unknown
  Bacterial polypeptide expressing nucleotide sequence isolated from the Sargasso Sea
aatgacagataaatataatgaatataaagataaaggattaactggattatctaatttaggaaatacatgttatttaaattcatgtatgcaaatattatcacattgttatgatttaaatattatattagataagttagatttaaataaattaaataaaatagatgatagtattttattaatagaatggataaatttaagaaatttaatgtggtcaaaaaattgtattatatcacctaatagatatgtcaatactattcagaatatatctaataaaaaaaatatagaattatttagcggatttgcacaaaatgatttacctgaatttttagtatttttaattgactgttttcacaattctttaaaaagaaaatttgaaatgaatatttcaggtaaatgtataaataaaaaagatgagttagctattagttgttttaatatgataaaaactatgtattctgatagttattcagaaatactaaatttattttatggtatacaaatatcttttttatattctgatgataataaaactattttatctaataaacctgaaccatattgtttaattgatttaccaataccaattaataa

SEQ ID NO: 259635 - DNA, 232 bp, Unknown
  Bacterial polypeptide expressing nucleotide sequence isolated from the Sargasso Sea
aatggatcaatcttacttttataaaaaaggactatgtggtcttagaaatctaggtaacacgtgttatattaatagtattacacaatgtattaataatgatcgcacttttgtagaatattttctaacaggcagatataaggaagattctaataaaaaagtcagtatgaatttattgaatgaatttattaatatagtaaaaaatttatataaagaaaatgcttgtgttgaaccc

SEQ ID NO: 259636 - DNA, 631 bp, Unknown
  Bacterial polypeptide expressing nucleotide sequence isolated from the Sargasso Sea
aatgaacggattaatcaatcttggaaacacatgttatatgaattcaattattcaatgtataagtcatttagattttttaagttatgataatgaaaaattattgacaaattgtgggaaaacagtacaccgtaatgattttgatttaatgcagtcttggttaaaattagataaatcattaaaaatatcgaaaactggtagaatcaatccaactgatttctaccgaacatttatcgaaaaattacaaaaaaacgattattactttatagggtttgaccaaaatgatgctggtgagtttatgactatattttttgatttattacataaaacaatagaacataagattcgattagaaattagtggaaccattaaaaataagcgagataaaatagcagttgatagtattcgtgattggaggcgattctttgaagataaatattcatatattgtaagttcaacatattcacaattattaaatattacaagttgtaatgaatgcgattatatgacaacaaatcatgatccaatacaaatcattacattacacttaaaacccgattcgtctactatttatgatttattaagagattatgtgaaacttgaaagattagatgaatggaaatgcgatcaatgc

SEQ ID NO: 259637 - DNA, 780 bp, Unknown
  Bacterial polypeptide expressing nucleotide sequence isolated from the Sargasso Sea
ccgctcgcggtcaagctcggcaccatcacgcccgccggcgcggacgtgtactcgtacgccgccgacgaggacgacatggtaacggatgccaaactcgcggagcacctcgcgcactggggtatcgacgtcatgcgcatggagaagacggagaagtccatggcggagctgcagattgacctcaacaagggcttcgagttcgataagatcacggaggcgggcgcggagctggcgcaggcgagcggcgccaggcgcgtcgggctcaagaacctgggcaacacgtgctacgtgaactccgtcctccagtgcctcaaggaagttgccgcgtacgaacaaaggtactgcgcgggcgccgacgccatcttcgagtcgtccccggcggaccccaccggcgacttttgcacccagatggccaagatcgccgtcggtttggtcaccgatcggtacgcaaagggttcgggccccggcgacgacgcgcccgtcgccgccgtccagccgagaatgttcaaggcgatcgtcggcaagggtcaccccgagtttagcaccggccggcagcaggacgcggtggagtactttcagcacctgctcgaggtgatgacgcgcgcggagcgagccgagacgggacgcgcgggcgcgagcgacggttcgaagtttacggcgtctcagtttgagtttgaggttgaggaacgcgtcgcgtgtgtcgagtccggcaaggttcggtacgttacccgccgcgagaacgtgctgcccctcgaggttccggtggagtggccacgaacaagg

SEQ ID NO: 259638 - DNA, 687 bp, Unknown
  Bacterial polypeptide expressing nucleotide sequence isolated from the Sargasso Sea
acctatgtacaaatctttggctcaatctaactgatggttcgctgctttgtggccgcaagaattgggatggcagtggtggtaatggccatgcattggaacattataacgaaacaaaatatccactttgtgtaaaacttggaaccatcactcctgaaggggccgatgttttctcgtacgctgaagatgaaatggtaacagatccgaaattggccgaacatttggcccattggggtatcgatattcaaaaacaaaagaaaactgacaagagtttggccgagatggaactagaaataaataagtctgtcggcgctgaatacgctgctattatggaatcaggagaatctcttgaacctgcttatggaccaggacgtactggtattgtcaatttgggtaacacgtgctacatttcatcgattcttcaagcactttttgccttggatgaattcaaagaggtttttggaaagaaaaatgaattcgaacctgaaccagtgaacaatataaagacgcagatttctagaattggatctggtttgatcggtggagactatgctaaaccaatatctacaccagatggcaagaaattgaacgatgaacaaatgggtatctctccgggattgttcaaatcagttgttgctcaaggaaatgctgattttgtcggtaaccagcaacaaggaactgatttatgat

SEQ ID NO: 259639 - DNA, 802 bp, Unknown
  Bacterial polypeptide expressing nucleotide sequence isolated from the Sargasso Sea
ttgactccaaagaatgacgtttccacgtgcgaagacgccgcaaaagtggggactcgcggcaaagcgggactaagcaacctgggtaacacttgcttcatgaatagtggtcttcaatgcttgagtcattgctcactgctcacagattacttcttatctgacaaatatgaagcagatatcaatacagacaatcccatcagcttgggcggagagctggcgaaggagtacgccaacttgattggagcactttggcgcgatggtgctctgactgtgacacctcgtaaatttaagtcttcactcgctcgctttgcaccgcagtttagtggatatatgcaacaagatgcgcaggaacttttggcgttcctgttggatggcttgcatgaagatttgaatagagtgaagaataaaccatacattaccgaaaaggattcggatgggagatcggatgaggacatagcgacagaatcatgggaagctcacacggcgagaaacaactcatgcatcgtggataccttccaagggcaatatagatcgacgttggtgtgcccatcgtgcggaaacaaatctgtcaagtttgaccctttcatgtatctttccatcccagtaccgtcggcacgcgagcgcatgataaaagtgactctggtcacttacggtgatgaagtgtcggctgtcacttacggtctgaagctaccaaagacgggtgacgtggccatgcttttgagtgctttatgtgaggctgcggatatcgatacaatggatgagcgtgtggtgctttgtgaagtttacaatcaccggttggagcgca

SEQ ID NO: 259640 - DNA, 1342 bp, Unknown
  Bacterial polypeptide expressing nucleotide sequence isolated from the Sargasso Sea
atggccgactcacccaacaatctcgcccacgagcatccttcacttgaacactattggatgccttttaccgccaatcgccaatttaaagcgagccctcgattactcgccaaagctgaaggcatgtattacaccgatatcaatggcaacaaggtattagactcaaccgcggggttatggtgttgtaatgcgggtcatggtcgacgtgagatcagtgaggccgtcagcaaacaaattcgagaaatggattacgccccctccttccaaatgggccatcccatcgcttttgaactggccgaacgtttaaccgaactgagtccagaaggactcaacaaagtattctttaccaactcaggctctgagtcggttgataccgcccttaaaatggcactttgctatcacagagctaatggccaagcgtcacgcacccgctttattggccgagaaatgggttaccatggcgtaggatttggtgggatctcggtgggtggtttaagcaataaccgtaaagccttcagcggccagctattgcaaggcgtggatcacctgccccacaccttagacattcaacattccgcctttagtcgtggcttaccaagcctcggtgctgaaaaagcagaggtattagaacaattagtcacactccatggcgccgaaaatattgctgccgttattgttgaacctatgtcgggttcggcgggggtgattttaccgccacaaggttacttaaagcgcctacgcgaaattacccaaaaatacggcatcctgttgatttttgatgaagttattaccgcatttggccgtgtaggtgccgcattcgctagtcagcgctggggcgttatccccgacataatcaccacagccaaagccattaataatggtgccatccccatgggcgccgtgtttgtgcaggattatatccacgatacttgcatgcaagggccaaccgaactgattgaatttttccacggttatacctactcgggccatccagtcgctgccgccgcagcactcgccacgctctcaatctacgaaaatgagcagttgtttgaacgcagcttcgagcttgaacgttattttgaagaggctgttcatagcctcaaagggctgcccaatgtgattgatattcgcaacaccggattagttgcgggtttccagcttgcgcctaataacgaaggcgttggcaaacgcggttatcgggtgttcgagcgctgttttcatcaaggcacgctcgtgcgggcaacgggcgatattatcgccatgtccccaccactcattgttgagaaacatcaaattgaccaaatggtaaatagtctcagcgatgccattcatgccgttggatgat

SEQ ID NO: 259641 - DNA, 973 bp, Unknown
  Bacterial polypeptide expressing nucleotide sequence isolated from the Sargasso Sea
caccgcaatgaagactttatctctggcgcggtagcgctggccaaccagaccggtgctgatatttaccatggtaaatacgctgacgagcctatcgaatatgcccgcaaggccggtaatggcgataaatttgagattggcaaatggacactcgaagttattgcaacgcccggccatactaaagacagtatttgtgtgttggctatcgacaacgaacaggacggtcagcctatcggcgtatttaccggcgataccttatttgtcagtgaagtcggtcgcacagacttctaccccgaggaaatggaaaaaatggctggccagctttatgacagcctacaaacgctggccaacctgggtgatgacattattgtgtacccggctcatggcgcagggtcggtgtgtggctcaggcatggcagaacgtgagtttaccaccataggcattgagaaacggcaaaacccgggctatcaatgtacctctaaaaaagcctttatagagcgtaagttaaaagagaatcattatattgctccctactttagcaaaatggagcagtctaacgttaccgggatggatacgcctttaccgccagtggcgtgccagaagctggcacaggatgctcagtcagcctggcagaaaagcgcagaacgtcccggcgtgctcattgatgtaagaagtcatgcccagtttcgagactgtcactatcccggcagtcttaatttgccgggcggcttactcagcgcttatggtggttggtttctggactactccacacctatcgcactggtggcagattcccatcaacaggcaaccgaaagctccgaacagctgtggcggatgggctaccagcagattagtggttatctgaccatggtaccaaagccagataccattgaggcttaccatcgtcagcatgtgaacgccgttaatgcagataaggttgatgagcgcattagagcaccacgtgctaactggcaac

SEQ ID NO: 259642 - DNA, 652 bp, Unknown
  Bacterial polypeptide expressing nucleotide sequence isolated from the Sargasso Sea
tgcccgtgagttgcagacgcaactggcccggcaagtgcgactggaagacgattatccgccgctacgtcacctggcgggcgtggatgtcggcttcgaggagggcggcgccatcactcgcgctgccgcgctgctattggacgccgatactctggaaccgctggccgaatgcgtggcgcgcatccccaccagcatgccctacgtgccagggctgctgtcctttcgcgaactgccggccttgcttcgagcattggctggcctgccagacgaacctgatctgatcttcgtcgacggccatggcatcgcccacccgcgcggcctgggcatcgccgcgcatttgggtgtggtcagcggcttgccgaccattggtgtggccaagaagattctcacggggcatcacgccgagctggccgaggcgcgcggggctcgtgtcgagctgctgaacaggatgggcgaacaaattggctgggtgctgcgcagcaaggaccgcgtgcggccgctgatcatctcgccgggcaaccgggtcagcctcgagcgtgccccggagctggtcatggcctgtgtcaggcgccaccgcctgcccgaaccgactcgcctggctgatcgcctggcttcgcgacgcgatgccaggcgcgatcagccttctctcttttaa

SEQ ID NO: 259643 - DNA, 619 bp, Unknown
  Bacterial polypeptide expressing nucleotide sequence isolated from the Sargasso Sea
ctggctgcatccccgttcgcggactgggatggcagcccggcggctgcccgtgagttgcagacgcaactggcccggcaagtacgactagaagacgatcatccgccgctacatcacctggcgggcgtggatgtcgggttcgaggagggcggcgccatcactcgcgctgccgcggtgctattggacgccgatactctggaaccgctggccgaatgcgtggtgcgcatccccaccagcatgccctacgtgccagggctgctgtcctttcgcgaactgccggccttgctgcaggccttggctggcttgccgcaggagccggatctgatcttcgtcgacggccatggcatcgcccacccgcgcggcctgggcatcgccgcgcatttgggtgtggtcagcggcttgccgaccattggtgtggccaagaagattctcacggggcatcacgccgagctggccgaggcgcgtggtgcttgtgtcgagctgctgagcagtaggggcgagcagatcggttgggtgttgcgcagcaaggaccgcgtgcggccgctgatcgtctcgccgggcaatcgggtcagcctcgagcgagtgcccgaactggtgatgtcctgcgtcaggctcaccgttg

SEQ ID NO: 259644 - DNA, 682 bp, Unknown
  Bacterial polypeptide expressing nucleotide sequence isolated from the Sargasso Sea
tatggatcttgcgtcattacgcgcgcagcagcttgaactggcctcttcattgatccgcgaggatcgtctgaagaacgatccgccggatctgatcggcggggcggacgttgggtttgagcagggtggcgaagtgacgcgagccgcgatggtcttactgaagtatcccacgcttgaactggttgaatacaaggtggcgcgtatcgccactaccatgccttacattcccggttttctctcctttcgtgaaacccccgcgctgatggccgcctggcaactgctctcgcacaagccagatctgctgttcgttgacgggcacggcatttcgcacccgcgccgtctgggcgtggccagccattttggcctgctggtggacgtcccaacgattggtgtggcgaaaaaacggctgtgtggcaagtttgaaccgctcgctgctgaacccggtgcgctagtgccattgctggataaaggcgaacagctggcatgggtctggcgcagcaaagcgcgctgtaacccgttgtttatctctacgggccaccgcgtgagtatggacagcgcactggcgtgggtacaacgctgtatgaacggctatcgtctgccggaaccaacgcgctgggcagatgcggtggcatccgaacgcccggcttttacgcggcttgcagcaaaagcgccccatatcgggtaa

SEQ ID NO: 259645 - DNA, 625 bp, Unknown
  Bacterial polypeptide expressing nucleotide sequence isolated from the Sargasso Sea
atggcaaacctgaacaccttagatttgaataataaaccctctggtcagattgaattgaatgatcagatcttggaaaccgaataccatcctcaggccatcaagcaggcagtggttggttttctcgcggcaaataggcagggcactcactctaccaaaacccgtgcagaagtttcatatagtacaaaaaagctctatcggcaaaaaggtacgggaaacgctcgttcaggaagtaataaatccccactgcgtcgtcatggaggaataacttttggtccttctccaagaaactattcgatcaggtccaacaaaaaattccggaagttagctttgcgatcggccattgctgaaaaaattcgacaaaatcagttggtgattcttgaaaaactgaagttagaagatcataaaaccaggaacttaaagaaagttctggcaacgcttgaagctcccaaagccttgatcgtcactgaaaacatgtctcgggaactgatgcttgcttcaaggaatctccaaggagttcatgcgattaatcagcagagtattaatgtctatgaactgcttcgtttccctaaagtcatttttgtcaaagatgcgatggaatccctgaatgcgaggttaagcggatgaa

SEQ ID NO: 259646 - DNA, 466 bp, Unknown
  Bacterial polypeptide expressing nucleotide sequence isolated from the Sargasso Sea
atgcggatcctcggcatcgatccgggcctggcccgggtgggctatggggtgatcgacaccacaggcgggcagcagcggatgctcgactgcgggatcatccgtaccgatccaggccgacccgatggtgaacggatggtggagatcgccggggatctgcgccagctgatccgccgctggcgaccgcaactggctgcggtggagaagttcttcttctaccgctcaagcaacaccatcagcgtggtgcaggcccgcggtgtggtgatgatgaccctggcgcggttcaaggtgccggtggtggagttcccgccgatgcagatcaagcttgccctcgccggattcggccatgccgacaaggacgaggtgctggaagccgtgatgcgggaactgaatctctcggatcctccacgccccgatgatgccgccgacgctctggcggtggccctcaccggctggttccagcgataaa

SEQ ID NO: 259647 - DNA, 383 bp, Unknown
  Bacterial polypeptide expressing nucleotide sequence isolated from the Sargasso Sea
aactatttttaccgatctttgcgccgtcatacacaagtatcgacccgaagaggctgcaattgaagacgtttttatgggaaagaacgctggatctgcgctgaagctgggtcaagccagaggggttgcgttggcagcttgtttggcaaatgacctttacacatatgaatattcagcgaggaaagtcaaacaatcgatagttggtacaggagccgcaactaaagctcaggtaaatcgtatggtgcaaattttgttgggaattaacgaaaatatagctgaagattctgcggatgcgcttgctatagcaatttgtcatgccaatactcagagtaggttgattagattatctggtgcaaaatcttttagtaaaaaaaggttgcgttgaa

SEQ ID NO: 259648 - DNA, 481 bp, Unknown
  Bacterial polypeptide expressing nucleotide sequence isolated from the Sargasso Sea
ttgcggcgagtaatcggaattgatcctggatcaagaaagactggctatggaataattgaaatttcgttatcaaaaataagctacgtaaccagtgggcacatttctgttgatgacgaggttttcccaaaaagactgggcatcatttattctgaggtcctagaattagtgaggaattatgatgtccaagagatggctatagaagacgtttttctggcaaagaaccctaattctgccctgaaattggggcaagcgaggggagtcgcaattgccgcaggaattgccaaagacctagagattttcgaatatgcggcgcggcaagtgaaaaaaacgatcgttgggaaaggcggtgccagcaagactcaaattcaacacatggttcgagtattgctaaatttaccgggagttcctcaagccgatgcagccgatggcctagcgattgctctctgtcatgctcatagtactagacgatcagacctatgat

SEQ ID NO: 259649 - DNA, 382 bp, Unknown
  Bacterial polypeptide expressing nucleotide sequence isolated from the Sargasso Sea
ttgaaaatacttggaattgatcctggccttagaaacactggatggggtgttattcatttagagagtgataaattgaaatatgttaatgatggagtaattagtactaaaaggaatcttaatgatggcgaaagacttttatatatttttcaaaaattagaggatattattttaaaatttaaaccaaatataattggaattgagaaaacttttgtgggagagggtaatatatcaagtttgaaattaggtatggcaagaggtgtttgtttattagttgctgcaaaaacaaatatttcgattagagagttagcaccaaaattagttaaaaaatcagtaactggaacaggtaatgcagataagcagcaagtaaattcaatgattaaaa

SEQ ID NO: 259650 - DNA, 268 bp, Unknown
  Bacterial polypeptide expressing nucleotide sequence isolated from the Sargasso Sea
atggcgacacggctgatcggcctggatcctggattgcgccgcaccggctggggcgtaatcgaggtggaaggcaactgcctcgttcatgtcgcgtccggcgcggttacgtcgaccgcagcactgccccttgccgaacgtctctcccagttatacgaggccctggccgtcgtactgactgcccacgaccccgccgaggctgcagtcgaggaaaccttcaccaataagaacccgtcctccaccctgaaactcgggcaggcccgcggcgcgg

SEQ ID NO: 259651 - DNA, 604 bp, Unknown
  Bacterial polypeptide expressing nucleotide sequence isolated from the Sargasso Sea
gatttgaacaataaaccttctggtcagattgaattgaatgatcagatcctggaaaccgaataccatcctcaggccatcaagcaggcggtggttggttttctcgcggcaaatcggcagggcacccactctaccaaaacccgtgcagaagtttcatacagtacaaaaaagctctatcgccaaaaagggacgggaaatgctcgttcaggaagtaacaaatctccattgcgtcgtcacggaggaataacatttggtccttctcccagagactattcgatcaggtccaacaaaaaattccggaagttagctttgcgatcggccattgccgaaaaaattcgacaaaaccaattggtgattcttgaagaactgaagctggaagaccataaaaccaagaatttaaagaaagttctagcaacgcttgaagctcccaaagccttgatcgtcactgaaaacatgtcttgggaactgatgcttgcttcaaggaatctccaaggagttcatgcgattaatcagcagagtcttaatgtctatgaactgcttcgtttccctaaagtcatttttgtcaaagatgcgatggaatccctgaattcgaggttaagcggatgaa

SEQ ID NO: 259652 - DNA, 265 bp, Unknown
  Bacterial polypeptide expressing nucleotide sequence isolated from the Sargasso Sea
atgataatattaggaatagatcctggagtgagtggagcaataagtattttagaaaacaaaaaggttatagatgtttttgaaatgcccacaatgattgatggcaaaaagaataaaaaacaaattaatggatctcaagtagcaaatatctttagagagacaatgaatgtctacaaagaaacaatagtggtggttgaacacgttaacgctatgcccggacaaggcgttaccagcatgtttaattttggacaatcattcggtgtaatca

SEQ ID NO: 259653 - DNA, 502 bp, Unknown
  Bacterial polypeptide expressing nucleotide sequence isolated from the Sargasso Sea
aatgcgcctgattggctttgaccccgggcttcgaactacggggtggggagtgattcagtttaggggaaatcaccttagttatattggtgatggtgttgtttcgacagagccctcatactcgttagccgagagattagtgcagatatatactggtctgtcagagataattttaaagtttgagcccgatgaagcagcagttgaagaaacatttgttaatgttaatccaatctctactcttaagttgggccaggcaagaggaatcgccatggtagtgcctgcaagtcacggggtgcctgtgagtgagtatactccaaatctagtaaaaaaaaccattgtcggaactggccacgcaagtaaaaagcaagtccagatgatggtatcaactttactcccagaattcagaagaggctctactgatgcagctgatgctctagcagtagctatttgccacgcgcatcatcgcaacaatgttttttcacagaaagctgcagaagtgttttaa

SEQ ID NO: 259654 - DNA, 547 bp, Unknown
  Bacterial polypeptide expressing nucleotide sequence isolated from the Sargasso Sea
gatgcctgtggaagcctttaggaccatcgggattgatccgggttcgcgggtgaccgggatcggggtcgtggaggcacggggccagtctttgcactatattcacagtgaatgcgtgcgcacaggaaccggctctttgggggcacgactggttcagattcaccagcggatccgggaagtgatagaccgtttccagccggtgagcggggctattgaaaaagtgttcgtctcggcgaacccccaatcagcgctggtgctcggacaggcgaggggaagtgcgttgttggcgctggcggagagtgacctcgagatcagtgaatacagtgcgctggaaatcaagcgggcaatcaccggcacaggccgcgcggacaaggaacaggtgcagcacatggtgagagtcctgttgggcatggaccgaaagccgcctcaggatgcggcagacgcactggcgtgtgctatctgtcatcttcatcatgccgagggccaacagcggcagaccgttgcccaagctgcggatccactgggaaagccaaaaggactgcagcagtga

SEQ ID NO: 259655 - DNA, 538 bp, Unknown
  Bacterial polypeptide expressing nucleotide sequence isolated from the Sargasso Sea
caaatacaaaattttgatggtgatttgatttttacaacacatgaagaggcacccagaaatccattggttcctttactatttgatgagattacagcaaaacagccttctgtaattaagggtctaataattcagaagcttgattccggtttaaatgaaaataaattgattttaggtatagatcctggaaaaagaattggactatccgtatattatttaggttatcaaatagataattcattttttatctcaattgagaagcttgtacagaatttaattatgattatggccgagttaaaatctcaaaaaaagattctaaaaattggtaatggtgatatgataattgcaaacaaaattgttcaactactaaatcttagattctgttcaaattttgaaattgagtttgttgacgaaagaaacaccacattaaaaattaaaaattataatcagagaggcaaacgtgatatgttatcagcacagtttatcacacaacgaaatggttattggcgtactgttttaccattatcaattacaggttagt

SEQ ID NO: 259656 - DNA, 625 bp, Unknown
  Bacterial polypeptide expressing nucleotide sequence isolated from the Sargasso Sea
catggcaaacctgaacaccttagacttgaataataaaccttctggtcagattgaattgaatgatcagatcctggaaaccgaataccatcctcaggccatcaagcaagcggtggttggttttctcgcggcaaatcggcatggcacccactctaccaaaactcgtgcagaagtttcatatagtacaaaaaagctctatcggcaaaaaggtacgggaaacgctcgttcaggaagtaacaaatccccactgcgtcgtcacggaggaataacatttggtccttctccaagagactattcgatcaggtccaacaaaaaattccggaagttagctttgcgctcggccattgccgaaaaaattcgacaaaaccagttggtgattcttgaagaactgaagctggaagatcataaaaccaagaatttaaagaatattctagcaacgcttgaagctcccaaagtcttgatcgttactgaaaacatgtctcgggaactgatgcttgcttcgaggaatcttcaaggagttcatgcaattaatcagcagagtcttaatgtctatgaactgcttcgtttccctaaagtcatttttgtcaaagatgcgatggaatccctgaatgcgaggttgagcggatga

SEQ ID NO: 259657 - DNA, 261 bp, Unknown
  Bacterial polypeptide expressing nucleotide sequence isolated from the Sargasso Sea
tatgtcagtcatattaggtattgatccaggaactaatattacaggctacggaattattaattcagagaataataatttatcttatattcaccatgaaataataaaaaccggactcaaaaatctttatacaactaagttgtccttaatacataaaaatacacaacgtttaattgagttatataaaccagatgagattgcattggagtcagttttttttagcgtgaatgcagggacggcaattaaacttgtcaagctagaggt

SEQ ID NO: 259658 - DNA, 332 bp, Unknown
  Bacterial polypeptide expressing nucleotide sequence isolated from the Sargasso Sea
attgaataagtcttcgaaaataatattaggtatagatccagggactacaataatgggatttggaataatagaggtcaataataagaaaatgaagttaatagaacttaacgaacttaagttaacaaagattaaagatcattatttaagattgaagttgatttttgaaaggacaattgaattaattgaaaaattcaacccagatgaaattgcaattgaagcaccattttttggtaaaaatgttcaatcaatgttgaaattaggaagagctcaaggagttgccatggcagcaggtttatcaaggcaaattcctgttactgagtatcacctaaaaa

SEQ ID NO: 259659 - DNA, 466 bp, Unknown
  Bacterial polypeptide expressing nucleotide sequence isolated from the Sargasso Sea
gatgcggatcctcggaatcgatccgggccttgctcgggtgggctacggggtgattgacaccagcggcgggcatcagcgcatgctggattgtggaatcatctgcaccgaccccggccgaagcgatggtgaacgcatggtggagattgccagcgacctgcggcaactgatccgtgcctggcgaccggagctcgcggccgtggagaaattcttcttctaccgctccagtaacaccatcaacgtggtgcaggccaggggggtggtgatgatgaccttggcccgattcaaggtgccggtggtggagttcccaccgatgcagatcaagctggcgctggccggtttcggccatgccgaaaaagatgaagtgctagaggcggtgatgcgagagcttgatctgaccgaaccgccgcggccggatgatgctgccgatgccctggcggtggccctgacgggctggtttcagcgatga

SEQ ID NO: 259660 - DNA, 133 bp, Unknown
  Bacterial polypeptide expressing nucleotide sequence isolated from the Sargasso Sea
cttgaatattattttaggcattgaccctggtagccggctaacaggttatggtgtgattcgccagcagggttctaaatttgagtatattgccagccggttgtattcggatgacccccttggcgaaatgccgggg

SEQ ID NO: 259661 - DNA, 466 bp, Unknown
  Bacterial polypeptide expressing nucleotide sequence isolated from the Sargasso Sea
atgcgcatcctcgggatcgatccgggcctggctcgggtgggctacggggtgattgacaccagcggcgggcatctgcgcatgctggattgtggaatcatccgcaccgaccccggccgcagcgacggtgaacgcatggtggagattgctggcgatctgcggcaactgatccgtgcctggcgaccggagctcgcggccgtggagaagttcttcttctaccggtccagcaacaccatcaatgtagtgcaggccaggggggtggtgatgatgaccctggcccgattcaaggtgccggtggtggagttcccaccgatgcagatcaagctggcgctggccggtttcggccattccgagaaagatgaagtgcttgaggcggtgatgcgcgagcttgatctgaccgaaccgccgcggccggatgatgctgccgatgccctggcggtggccctgacgggctggtttcagcgatgac

SEQ ID NO: 259662 - DNA, 319 bp, Unknown
  Bacterial polypeptide expressing nucleotide sequence isolated from the Sargasso Sea
tatgatcattttaggcatagacccaggctcaagaaaggctggatttggtttggtagagcttaaaggaagggacataaattacttggactcttttactcttaaatttgatactaagttaatgttttttgataggttaaagaaaatttatgaaagttgctgcgaggtttttaaagagtatagtccagatgaggtggccttcgagtctctcgtgtatgttaagaatgtttcctcactagttaaactttctcaagcaaggggtgtgatgctatctgctttgtttagtcacggagagagtaatattttgaatactctccaaatt

SEQ ID NO: 259663 - DNA, 502 bp, Unknown
  Bacterial polypeptide expressing nucleotide sequence isolated from the Sargasso Sea
atgactattattttaggaattgaccccggcacaaatattacaggcttcggtcttattaacatatctgaggattcaaagatatcttatatacatcatgaaattattaagacaggtctgaaaaataagtatactactaaacttgctatgattaatgaagctacatcagatatcattaataaacataatccggcacatgtcgcaattgaatctgttttttttagtgtaaatgctggaactgctatcaaattaggacaagcaagaggcgccgcaatttgcgcttgtagtagacaatatttagatatttatgaatatagtccccgcagagttaaaatggttgtcacgactgatggtggtgctgataaagaacaactacaaaagaaagtaaaatcgatactaaacatcaggaggaagctagaaattgatgcttctgacgcacttggagttgctatttgtcatggaatgacattaaacaacgatcctgattcattaaaaataatctaac

SEQ ID NO: 259664 - DNA, 487 bp, Unknown
  Bacterial polypeptide expressing nucleotide sequence isolated from the Sargasso Sea
atggtaatattaggaattgatccaggtttaatcaatacaggctatggactaattcagattagtggtaaaaataatttaaaagtagtagattttggtataatttctccaaataaaaaggaaaagttatccaatagactaaaaacaatttatgatgatttatcattaattattaaaaagtatagtcctaatattttatcaattgaagaagttttttttggtaaaaatgtaaaatcagctttactattaggtcatgcaagaggtgtttcaatgttgtgtgcttcaaataataatatcccggtttttgaatattcaccaaggaaaattaaacaatctattactggaaatggaaatgcagataaatcacaggttaaattcatggtttcacaagaattaaatttaaaaaatatggattttcctgatgatgcttcagatgctcttgcaattgcgatatgtcacaacaatcaaataaaattaaatgaattatgat

SEQ ID NO: 259665 - DNA, 496 bp, Unknown
  Bacterial polypeptide expressing nucleotide sequence isolated from the Sargasso Sea
ttgaaaattttaggcattgatcctggcagtcgggttaccggttatggactggtagagcatcacggaaattcgacccgttatctggacagcggttgcatacgtttgccagacaaatggaaacttgcagataaactggtacagatttccaatgaacttggagcactgattgagaaaaaccgtccagactgcgcttccatcgaacagattttttttgctcataacgcccgttctgcattgattctcggtcatgttcggggagtgatccttctgaaaatggcggaaaccggcttgcccatccatgaatatcctccgcttcaagtgaaacaggcagtggtgggagtaggacgggctaccaaggatcaggtgattcacatggttcagattctcctcaacaaacgtcaggattttaaggaggacgaagccgatgctttggcctcggccattactcatgcccatcttcacccaaccctggaaaggatgcagggcaaaggatgaa

SEQ ID NO: 259666 - DNA, 219 bp, Unknown
  Bacterial polypeptide expressing nucleotide sequence isolated from the Sargasso Sea
tatgatcttaggtatagatcccggttcccgggtaacggggtttggtctagttaaatctgcaggtagtaagatcgaatatgtctattgcgactgtatccgcacaaattctgctgatatgcaaaagagactaaaaacgatttttgacgaactttgtactgtaattgaggagtatcagccagaagaggttgcgatagaagaggtttttatggggaaaaatgc

SEQ ID NO: 259667 - DNA, 143 bp, Unknown
  Bacterial polypeptide expressing nucleotide sequence isolated from the Sargasso Sea
tatgattctagggatagacccagggtcccgagtgacggggttcggtcttattaaatctgatggtgataagatcgaatatatagattgcggctgcgtgcgcacgaactctcagaacatgagaacgcggttaaaaacgatttttg

SEQ ID NO: 259668 - DNA, 499 bp, Unknown
  Bacterial polypeptide expressing nucleotide sequence isolated from the Sargasso Sea
aatgacagtcatattgggaattgatccaggaacaaacatcacaggatacggtattattaagttagaggagtctaagcctatctatttacatcatgagatactcaaaactggacttaaaaatatgtacaccattaaattatcaatgatttacgataataccaaaagattaatagaacaatataaaccagatgacattgcattagagtctgtcttttttagtgtaaatgctggcacggctataaaattaggtcaagcacgcggagcagcgctgtccgcatgcagcggagagcatagaaacatttacgagtacagcccgagaagagtcaaaatgatcattactggcaacggagctgcagataaggcagaggttcaaaagttcgtcaagagaaaactaagattaagaaggaaacttgaagaagacgcgtctgatgctctaggagttgcactgtgtcatggagtaacatcaactgataccccagaagatattaaaccgatatag

SEQ ID NO: 259669 - DNA, 439 bp, Unknown
  Bacterial polypeptide expressing nucleotide sequence isolated from the Sargasso Sea
ttgaaaattctcggcattgatcctggcagtcgggttaccggttatggactggtagagcaccatggaaattcgacacgttatctggacagcggttgcatacgtttgccagacaaatggaaacttgcggataaactggtacagatttccaatgagcttggagcactgattgagaataaccgtccagactgcgcatccatcgagcagattttttttgctcataacgctcgatctgcattgattctaggtcatgttcggggagtgatccttctgaaaatggcggaaaccggcttgcccatccatgaatatcctccgcttcaagtgaaacaggcagtggtgggggtaggacgggcttccaaggatcaggtgattcatatggttcagattctcctcaacaaacgtcaggattttaaggaggacgaagccgatgctttggcctccg

SEQ ID NO: 259670 - DNA, 365 bp, Unknown
  Bacterial polypeptide expressing nucleotide sequence isolated from the Sargasso Sea
tatgcgcattttaggtattgatcccggaagcagaaaaaccggttatggtttaattgagcattcaaacaataaatcttttcatttggatagtgggtttatcagactgaatgaaaaggaaacactcacagagcgattattaatgctttccatagaactgggaaaaataatcgacagattaaatccaaattgtggagcaatcgaaaaaattttttatgctaaaaatgctcagtctgcactttctttagctcatgcccgcggagtaatcttgctgaaattttcagaaaaacaactgcctattcatgagtatcaggcacttaaagtaaagcagacagttgtaggtgctgggagggcagataaagggcaaa

SEQ ID NO: 259671 - DNA, 199 bp, Unknown
  Bacterial polypeptide expressing nucleotide sequence isolated from the Sargasso Sea
ttgagtgattctcttcgcattttgggtatagaccctggaagtagaaaaactggctatggttttattgagcattctggtaacaaatctcgtcatttagatagcggattcatcaaactaaatgaaaaagagacactcgcagaaaggttgtacatgctttctcgtgaactgggtaaaattattgacagaatcaatccaaatt

SEQ ID NO: 259672 - DNA, 301 bp, Unknown
  Bacterial polypeptide expressing nucleotide sequence isolated from the Sargasso Sea
atgacagtcatattgggaattgatccaggaacaaacatcacaggttacggtattattaaattagaggagtctaagcctacctatttacatcatgagatactaaaaactggacttaaaaatatgtacacacttaaattatcattgatttacgataataccaaaagattaatagaacaatataaaccagatgacattgcattagagtctgtcttttttagtgtcaatgcgggcacggctataaaattaggtcaagcgcggggagcagcgctatctgcatgcagcggagagcatagaaacatta

SEQ ID NO: 259673 - DNA, 496 bp, Unknown
  Bacterial polypeptide expressing nucleotide sequence isolated from the Sargasso Sea
ttgaaaattttaggcatcgatcctggcagccgggttaccggttatggactggtagagcatcaaggaaattcgacccgttatctggacagtggttgcatacgcttgccagacaaatggaaacttgcggataaacttgtacagatctccaatgaacttggagcattgattgagaaaaaccgccctgactgcgcttccatcgaacagattttttttgctcataacgcccgatctgcattgattctcggccatgttcggggagtgatccttctgaaaatggcggaaaccggcttgcccatccatgaatatcctccgcttcaagtgaaacaggcagtggtgggggtaggacgggctaccaaggatcaggtgattcatatggttcagattctcctcaacaaacgacaggattttaaggaagacgaagccgatgctttggcctcggccattactcatgcccatcttcacccaaccctggaaatgatgcagggcaaaggatgaa

SEQ ID NO: 259674 - DNA, 247 bp, Unknown
  Bacterial polypeptide expressing nucleotide sequence isolated from the Sargasso Sea
aatggcaattattttaggtgtagacccaggttcgcggatcacaggttacggcgttatccaatgccaagggcggcagcaactttatttaggcagtggctgcattcgtacctcgggtgatgatctgccgttaagattaaagcagatctttgatggtataagtgaaattattcgccaatatcaacccgatgagtttgccattgaacgggtatttttggctaaaaatgccgactcagccttaaaattgggc

SEQ ID NO: 259675 - DNA, 496 bp, Unknown
  Bacterial polypeptide expressing nucleotide sequence isolated from the Sargasso Sea
atgattaaaatacttgggattgatccgggaacaaacattacaggatttgggataattggctttgagaaaaatcagtttaattatatacatcattcaatcgttaagaccggactaaagaataaatatacaacgaaacttgctattctgaatgaagctactgaaaatatccttaaccaattttcacctcatcatgttgctgtagagtctgtattcttcagcgtgaatgcggggacggctataaaattaggtcaagccagaggggcagctatctgtgcatgcagcagaaaaggtatagaaattttcgagtacagtccacgaaaagtcaaaaacatggttacttcaaatggagctgctgataaagatttacttcaaaaagaagttaagaaaaaattaaacataagaagaaaacttgagatagatgcatcagatgctctaggtgttgcaatttgtcatgcactaatgttaactgagaatcaggatattcctagcgtttaaa

SEQ ID NO: 259676 - DNA, 487 bp, Unknown
  Bacterial polypeptide expressing nucleotide sequence isolated from the Sargasso Sea
atgcgcattttaggtattgatcccggaagcaggaaaaccggttatggtttaattgagcattcaaacaataaatctcgtcatttagatagtggatttatcagactgaatgaaaaggaaacactaatagaacgtctattaatgctttccacagaactggaaaaaataatcgaaagattaaatccaaattgtggagcaatcgaaaaaattttttatgccaaaaatgctcagtctgcactttctttagctcatgcccgcggagtaatattgttgaaattttcagaaaaacaacttcctattcatgagtatcaggcacttaaagtaaagcagacagttgtaggtgctggaagggcagacaaagggcaaattaaacacatggtcaagattctgttaaaaataaatgactctctgcaggaagatcaggcagacgcacttgctgttgctctcacccacgcccacttgtggagagcaaataataattggttataat

SEQ ID NO: 259677 - DNA, 532 bp, Unknown
  Bacterial polypeptide expressing nucleotide sequence isolated from the Sargasso Sea
ctgagcgtgaacgttatactcggcatcgatcctggcagtcggttaacgggctacggtgtcgtgcgtcagagcggtatgaagttcgaatatgttgccagcggctgtatccgtttaaacacggatgatttattacctgagcggctgctggatatctttaatggtgtcagtgaaataattgctcaaacccggccgaccattttcgctatcgagcaggtgtttatggctcgtaatgcagactccgctttaaagctgggacaagctcgcggtgcggcgatcgttgctgccaaacatgccggactcgaagtgttcgaatactccgcccgccaggttaaacagtctgtagtcggcaccggcgccgccgacaaagctcaggtgcaacatatggtgcgcactttacttaaactgcctgctaaccctcaggccgatgctgccgatgcccttgcagttgcgttatgtcatgggcatactcagcaaagtttagttagtctggccgggcaagcacgtaaaaccgtgcgtggacgcctgcgctagt

SEQ ID NO: 259678 - DNA, 520 bp, Unknown
  Bacterial polypeptide expressing nucleotide sequence isolated from the Sargasso Sea
atggcgcttattctgggtattgatcccggttctcgacgcaccggttacggcgtagtggatgtggtgggaaatcgttcccgcgcggtggctttcggtactattacgacttcccacaaggagatcccgccgcggttgggtgagatattcgcgggaattgatcaggtggtgaaggaatacgggccggctgaagtgagcatcgaaaaagtgtttatggctcgcaatgcggattctgccctgaaattgggccaggctcgcggtgcagctattgcggcagtgatgcaggcctgtgtgccagtgtttgaatattcggctcgccaagtaaaacaggccgttgtgggcaaaggtggggcggaaaaaaatcaggtcggggaaatggtgaagtatctgcttaaactggatcaacgcccgcaggaggacgccgctgatgccctggctatcgcgctttgtcatgctcatatgcgtctctccctggctagaatggctggtgccacatcggtaaggcgcggccgggttcgttagt

SEQ ID NO: 259679 - DNA, 358 bp, Unknown
  Bacterial polypeptide expressing nucleotide sequence isolated from the Sargasso Sea
aatggttatactgggtatagatccaggttctcggatcacaggctacggtttaattgcacgcaagcaaggtaaactggtgtatgtagcaagcggatgcattcgcgttggaacggcagatttgccttctcgtcttgctaatatctttaccggggttggcgatattattcgtcaatataaacccgaccagtttgctattgagcaagtatttatggcgaaaaaccctgattcagcgttaaagctaggtcaggccagaggtgccgctattgtggcagccacccaagcgcaaattcctgttgctgaatacagcgcaaggcaaattaagcagtcggtagttgaaaaggtggtgcagataaaacgc

SEQ ID NO: 259680 - DNA, 416 bp, Unknown
  Bacterial polypeptide expressing nucleotide sequence isolated from the Sargasso Sea
catgagcatcattttggggatagacccgggttcgcgcatcacaggttacggcgtcattcgcatcgtggccggcaaggcggagtacctgggttcgggctgcatccgcaccgacttgggtgagctgccgtcgcgcctcaagcaggtctatgacggggtgagcgagatcatcacccagttcaagccggacgagtttgccatcgagcgggtctttatggcgcgcaatgccgattcggctttgaagctgggtcaggctcgcggtagcgccatcgtggcggcggtcaatgccctgctgccggtgagcgaatactcggccacccagatcaagcaggcggtggtgggcaccggcggcgccgccaaggagcaggtgcagcacatggtgacccatctgctcaagctctcggccactccccaggcgg

SEQ ID NO: 259681 - DNA, 410 bp, Unknown
  Bacterial polypeptide expressing nucleotide sequence isolated from the Sargasso Sea
aatgagtatcattttaggaatagacccaggatcaagaatgacaggaatcggcatcatttcatcggaaaataacaacatcaatcacatacatcatgacgtcattaaaacaaaaacggattgcctcagcgagcgcctgcacattatttatcaaggcatttatgacgccatcagtcaataccaaccacaaatgacggcgattgaagaagtctttttttctcgcaatgctcaatctgctctcaaattgggccaagccagaggcgccgctatcacggcatgtgctaaccacggattcagcgttgccgaatacagcgcacgccaaatcaaacaagcagtggttggttatggtgcagccagcaaaactcaaattcaacaaatgatcaaaatcatgcttcatttagacacaacaccac

SEQ ID NO: 259682 - DNA, 514 bp, Unknown
  Bacterial polypeptide expressing nucleotide sequence isolated from the Sargasso Sea
atgaccctgattctaggcatcgacccgggttcgcgtattaccggctatggcgtggtgcgcgataccgggcgcggttgcgagtacgtggcctcgggttgcatccgtaccggcaacggtcctttggccgagcgtctgcaaatcgtctttcgcggcgtcagcgaggtgattcgcatccatggtccggtgaccatgggtatcgagcaggtgttcatggcgcgcaatgccgattcggcgctcaagctggggcaggcgcgtggtgcggccatcgtcgcagcggtggaggcggggctggaagtcagcgagtacaccgcgacccaggtcaagcaggccgtggtcggcaccggtgcggcggacaagcagcaggtacagatgatggttatgcatctgctcaagctggtgcagaaaccgcagatcgacgcctccgacgccctgggcatcgctctgtgtcatgcccatcacaggcagagtctcattcctcacgggcttgctggcgccaagcggcgtggcggccgtc

SEQ ID NO: 259683 - DNA, 520 bp, Unknown
  Bacterial polypeptide expressing nucleotide sequence isolated from the Sargasso Sea
atggttatactgggtatagatccaggttctcggatcacaggctacggtttaattgcacgcaagcaaggtaaactggtgtatgtagcaagcgggtgcattcgcgttggaacggcagatctgccgtctcgtcttgctaatatatttaccggggttggcgatattattcgtcaatataaacccgaccagtttgctattgagcaagtatttatggcgaaaaaccctgattcagcgttaaagcttggtcaggccagaggtgccgccattgtggcagccactcaagcgcaacttcctgttgctgaatacagcgcaaggcaaattaagcagtcggtagttggaaaaggtggcgcagataaaacgcaagttcagcacatggtaaaacacctgcttagcttaagcggcgctccccaggccgatgctgccgatgcattagccgttgccttgtgtcacgcacacactgaacagagcctgttgaacatggcagggcaagcccgaaaaaccgttcgtggtcgtttgcgctaat

SEQ ID NO: 259684 - DNA, 505 bp, Unknown
  Bacterial polypeptide expressing nucleotide sequence isolated from the Sargasso Sea
ttcggcgtgctcgaacggcacgggcacaagctcgtctacgtggcctcgggcacgatcaagagcaatggcaatgccgacctgcccagccgtctgaagacgctgtatgacggggtgtctgagctggtgagcacataccggccggactgcgcttccatcgaaaaggtgttcgtcaacgtcaacccgcaatcgacgctgctgctgggccaggcccgcggcgcggtgatctgcggcctgatgagcggcaacctgcccgtgttcgagtacaccgcgctgcagctgaagcaggccgtggtcggctatggccgcgccaacaaggaccaggtgcaggaaatggtcgtgcgcttgctcaacctcgcaggcagaccgggcgccgatgcgtccgacgcgctgggcgtggcgatctgccatgcgcacggcggcgagacgctggccgccatggctggtctggcgccgcagcttgcgcaaaaggggctgcgcgtgcggcgcggccgcctcgtcggctgac

SEQ ID NO: 259685 - DNA, 520 bp, Unknown
  Bacterial polypeptide expressing nucleotide sequence isolated from the Sargasso Sea
attgataaaaatattaggcattgaccctggttcaataaatacaggatatgggattatcgaatctaaagggaatcataataaacatattaataatggtgttattaaagttaaagctgaaacgcttgctgaaaaattaaaaataataaattctgaagtaacaacaataattaaaatatttgaacctgatgagattgctattgaaaaagtatttatgcatcgtaatgcggattctgccctaaaacttgggcaggcaagaggtgctgctattacagcctgcgcgatgaagggtatacccttatttgaatacagtgcaaatcaagttaaacaagcgtgtgtgggtaaagggcatgctaccaaagaacaggtacaacatatgataaaaattctgttgtgcttggaaaagaagccattagcagatgctgctgatgcgctagcgatagcgctatgccatgcaaactcacgtgaaagtttattgcgcatgcaaggagttagcggaatgaaatatgggcgattacaatga

SEQ ID NO: 259686 - DNA, 544 bp, Unknown
  Bacterial polypeptide expressing nucleotide sequence isolated from the Sargasso Sea
atgcgaattctcggcatcgaccccggcctgcgcgtcaccggcttcggcgtcatcgacgtcagcggccaccggctcgcctatgtcacgagcggcgtgatccgcacgccgacggccgacctggccacccggctcggcacgatcttccagggcgtctcgaccatcgtgcgcgagcacgcccccgatcaggccgcgatcgaaaaggtgttcgtcaacgtgaacccgcagtcgacgctgctgctcggccaggcacgcggcgccgcgatctgcgggctcgtcgcgggcggcctgccggtcgcggaatacacggcgctgcaactcaagcaggcggtggtcggctacggccgcgcgaccaagacgcagatgcaggaaatggtcacgcggctgctcaacctctccggacaaccgggctccgatgcggccgacgcgctcggcatggcgatctgccacgcgcacggcggcgatacgctcagcacgctcggcggcctcgcgccggcactcgcgaagaaagggctgcgtgtgcggcgcgggcggctggtcggctgac

SEQ ID NO: 259687 - DNA, 523 bp, Unknown
  Bacterial polypeptide expressing nucleotide sequence isolated from the Sargasso Sea
atggctattatccttggtattgaccccggtagccgtttaacgggttacggggttgttcgccagacagggcagaaattcgaatacatagccagtggttgtatccgcttaacgctaaacgatatacctgatcggttaaaacaaatatttgatggtgtcagcgaaatcattcagcaaacccagcctgatgtctttgcaatagagcaagtgtttatggcgcgcaacccggactcggctttaaaactcggacaggctcgtggtgccgctatagtggctgcaaaaaacgccgggcttgaggtgtttgaatactcagcccgtcaggtcaaacaagctgttgtaggtactggtgctgcggataaaactcaggtgcagcatatgatccgcaccttattaaaattaccaggcaatccacaagccgatgctgccgatgcccttgctgtggctatgtgtcacgggcatactcaccaaagtttattgcatatggcaggacaggctactaaaacagtgcgtggccgcctgcgctgat

SEQ ID NO: 259688 - DNA, 544 bp, Unknown
  Bacterial polypeptide expressing nucleotide sequence isolated from the Sargasso Sea
catgagaattctcggcatcgaccccggcttgcgcgtgaccggcttcggcgtgatcgatcaacacggccaccggctcagctacgtcgcgagcggcacgattaaaaccgccgacgccgatctgccctcgcgtctcggcactattttcgaaggcatttcgacgctgatccgtcagcattcaccggatcagtcggcgattgaaaaggtattcgtcaacgtcaatccgcaatccactctgctgctcggccaggcgcgcggcgcggcgatctgtgggctggtggcgggtggcgtgccggttgccgaatacacggccttgcagttgaagcaggccgtggtcggctacggccgcgcaaccaaggagcagatgcagcagatggtggtgcggctgctcaacctctccggcgtgcccggcaccgatgcggccgacgccctcggcatggcgatttgccacgcacacgggggctcgacgctgagtacgctgggtggtattgcaccgtcgctcgcgaagaaaggcttgcgtgtgcggcgtggacggctggtgggctag

SEQ ID NO: 259689 - DNA, 523 bp, Unknown
  Bacterial polypeptide expressing nucleotide sequence isolated from the Sargasso Sea
atggcgattattttaggggttgacccaggttctcggatcacaggttacggcgttatccaatgccaggggcggcagcaactttatttgggcagcggctgcattcgtacctcgggtgaggatttaccattaagactcaagcaaatctttgatgggatcagtgaaattattcgccaataccaacccgatgaatttgcgattgaacgggtgtttctcgccaaaaatgccgactcggccttgaaattgggccaagcccggggcgcggctatcgtagccgcgacagtggccaacttacccgttgccgaatacagtgccacccaaattaaaaatgcggtggtcgggacggggcgagccaagaaagaacaggttcaacatatgatccagcaattgcttaagctgcccgcggcgccacaggccgacgctgcggatgcgctcggcgttgcggtatgtcattatcacaccaatcaaagtttggtcgccttaagcggtcgagcgacaacaagaacatatggacggtacagatgat

SEQ ID NO: 259690 - DNA, 238 bp, Unknown
  Bacterial polypeptide expressing nucleotide sequence isolated from the Sargasso Sea
aatgataaattcattaagaatattaggatgttactctggttcaggtggttataataggtatccgtcatcacaattacttatcttaaataataaatcatatttgattgattgtggagagggtacacaatttttattaaaaaaatataaaactaaattaagttcaattgataatatatttatctcacacctacatggagatcattattttggacttccttggtttaatatcatactttaa

SEQ ID NO: 259691 - DNA, 733 bp, Unknown
  Bacterial polypeptide expressing nucleotide sequence isolated from the Sargasso Sea
aatatttgttacacatcttcatggagatcactgtttaggtattttaggtcttttacaaacaatgtcattacaaaaaagaacagaagctgttgagatttatggtccatctggaattgaagaattcattacagcaaatatcaaagtattaaattttggattaccatttccagttttcattacaattgtagatgaaggtaatgttgtaaaagaaaaaaattaccaaataaattgttgtgaagcacaacatggaattcctgcattttcatattgttttgaagaaaatgaaagagctggggtattctatccagaaaaagcaaaagagttgggaatcccagaaggaaaattatggcaggagttacaaaatggaaattccatcgagattaacgggaaaaatattgattcgtcacaagtaacaggggagaagagacagggtaagaaaattggcatatcaggggatacacgtccaactcaaaaattaaaagaattttttaaaaatagtgattatttgagttttgattgtacattttcatatgaactaaaggatagagcaattgaaactaatcattcaacagcaaaagaagccgcagaacttgcaaaagaagcaaatgtaaaaaatctcattttaacacacttttctgcaagatatagtgacgaatcagttttgatagatgaagcaaaacagacccataattcagttatagctgcaaaagatcttcttgaaattgatatttag

SEQ ID NO: 259692 - DNA, 439 bp, Unknown
  Bacterial polypeptide expressing nucleotide sequence isolated from the Sargasso Sea
aatgaataattcattaagaatattaggttgctactcaggttcgggtggttatggaagatatccttcctctcagttgttaatactaaataataaaaattatttagttgactgtggcgagggtactcaatttctattaaaaaaatatgaaactaaattaaattcaatagataatatttttatctctcaccttcatggtgatcattattttggattgccaggactgatttctcattataacctcaaggggaggactaaagatttatccatttatggcccaattggattaaaaaaaattatttcattaatcatgaaatctagtaattcatggacaagctataaattaaatataattgaactggaaccgaaagatttgacatttattgagaatgataaaattagtgtaagtagtattaaattatctcataggattccttgtaca

SEQ ID NO: 259693 - DNA, 808 bp, Unknown
  Bacterial polypeptide expressing nucleotide sequence isolated from the Sargasso Sea
atgcttgactttctgtttcttggcacctcggctgctacacctacaaaatctagaaatcttagctcgttagctatacgaagacaaaacaaggctaacttctggctcattgattgtggtgaagccacccaacaccgtattctcttttcaagtctatctcttgcaagaattaattgtatttttattactcacttacatggggatcatctttttggactagcaggacttattgcttcacgttctttacaaggtgcacaaaaccctctaaaaattttcggtccacaagggttaaaagagtatatcaatgtatctctcaaaacatcttcttgcaggccgctttatcccctagaaattatcgaactcaatcaaaaaggagcaagctggaagcaagaagggtgggaaattaaagcaatccctcttgaacatggagttacttgttttgcttatagttttactgaagaaaaaatagctgctccgtttctttttgaaaaagcacagaaattaaaaatacccagtggtcctttatggggagagctacaacggggaagcagaataagcctagaagatggtcgacaatttgaaggaaaggactttctaggagaaacacgtcaaaaactaaagtttatcgttgcaggagataattacaccccatctcttttagaagaagacctcaaagatgcaaacttacttattcatgaagcaacctacaccgatgacgtttataaaaacctaggaaaaaaacagctccacagcacagcaaaaaagctcgctaaatctgtagcttttactggattgaaaaatttaattttaa

SEQ ID NO: 259694 - DNA, 661 bp, Unknown
  Bacterial polypeptide expressing nucleotide sequence isolated from the Sargasso Sea
gagctgcaagcgtttataaattctgcactaaaaagtagtttttgcaaattatcatttccattgaatttcgtgcaagttgaaaattttgcatcaaaaaataagttattatttgaaaatgataaaataaaggtgaattgcgcctgccttaagcataaaatacctgcatatggttatcgcgtgagtgaaaaagataaacctggcatatttgatattaaaaaggcagagtcaatgaaaatagcccctgggccaatttattcagaattgcaacaaggtaaaaaggtagtattggctgacgggaggacatttaatggggaagaattctgtggtcctccaaggcagggaggaagttttgtttattgcacagatactgtattcagcgaatcagcagtgtccttatcgaagaatgccgatttgctggtacatgaatcaactttttcagatgaggatgaaagcatggcctatgaaaaattacattccacgacaataatggcagctaaaacagcattattatctaaaacaaaaaaattaattattactcatttaagtccaagatacactaataaaagcgcaattacaccaagcgatttgcttaaagaggctcaaaaagtttttccaaatactcagcttgcaaaagatttcctaactacagaaataaaataaa

SEQ ID NO: 259695 - DNA, 430 bp, Unknown
  Bacterial polypeptide expressing nucleotide sequence isolated from the Sargasso Sea
tatgaagtttgaattaaccatcctaggttgcggaggttctattccaactttagatagaaatcctacttcacaatatcttaatattcaagaccgtcattttttaattgattgtggtgaaggaactcaaattcaattaagaaaatatagatgtaagttttcaaaaattgatcatatttttattagtcatttacacggcgatcactttcttggattatttggatatttatctactctagatttattagggaggacaaataatattaatatttatgctaattcagagttgagtaatttaatagaatctcataacaaaacaacagggaaaaaattcaactttgaaataatctttcattctttagattttaagtctcctaaaaatatttttgaagacaatgttttagaagttttatcatttcctgttaatcataat

SEQ ID NO: 259696 - DNA, 749 bp, Unknown
  Bacterial polypeptide expressing nucleotide sequence isolated from the Sargasso Sea
actgaatcgcggggacgtggaggttgtctttttgggcacgggatccgccatgccggccaagtatagaaacgtgtcgggatttttcgcgagattcggaggcgaggggtacggcggaaacatcgcgttggatctgggtgaagggtcgctcgcgcagatgattcgacggtacggtgcggaagatgtggaggcaaaactcgaggagatgcgactggtgtggatctcgcacattcacgccgatcatcacgtgggattgacgcgcgtgctcgccgcgcgcgccgacgcgtttaggcgcgcgggcgtcgaaccgccgacgatacccgtcgtcggtccgcgtccgttgcgacgattcttagagttatacgccgaggtagaggacctgtgctgcgatttcgtcgatctcagcgagacgacgcaggacgagtgggacagcgagacgatgagtcccgccgtcgctcgattgcgaaacgcgttgacgggctccgacgtgcgcgaaatcgtcgccgttcccgtcttccactgcgcgcacgcgtacggtgcgaaactcgtcggtcatcgaggatggtccatggtgtattctggggacacccgtccgtgtccgagtctcgttcgagcggccaaagacgccacgctcttgattcacgaggcgacgtttgaaaacggcatggaggacgaggcgaagaagaaacgtcactccaccacgggtgaggcggttcagacgggcatagacgcccggtgctatcgcaccattc

SEQ ID NO: 259697 - DNA, 335 bp, Unknown
  Bacterial polypeptide expressing nucleotide sequence isolated from the Sargasso Sea
accccctagagagggtgaaagttttgtttattgcacagatacagtctttagtgaatcagctgtttcactatcaaaaaatgccgatttactcgtacatgaatcgactttttcaagggaggatgaaaacatggcatacgaaaaattacattccacaacaatcatggctgccaaaacagcattattatctaacacaaaaaaattaattattactcatttaagtccaagatataccaataaaaacgcaattactccaagcgatttgcttaaagaggctcaaaaggtttttccaaatactcagcttgctaaagattttttaacggcagaaataaaataaa

SEQ ID NO: 259698 - DNA, 210 bp, Unknown
  Bacterial polypeptide expressing nucleotide sequence isolated from the Sargasso Sea
aatgaaatttgaagtaacgatactcggtagcgcatcggctacaccagtttataacagaaatccaacggcacagttgcttaactgcaacgaacgccattacttaatagactgcggcgaaggtacacagcaacaactaattaaatacgggtttaaggcttctaagatagattatattttcatcagccatttacacggcgaccatttttttgg

SEQ ID NO: 259699 - DNA, 790 bp, Unknown
  Bacterial polypeptide expressing nucleotide sequence isolated from the Sargasso Sea
attgaggaaatacaaatgtaagtttcaaaaaattgacaacattttcataagtcaccttcatggagatcattatttaggtttaataggctttttatcaagtttaaatttattaggcagaaaccgtaaattaaatatttatgcacctgaaaaacttcaaaaaatattagctgttcatgaagaggtcaatggaagaaaattcgattttgaaattattttccaaccattaaagtttgatgcgatgcattgtatttatgaagacaatgttgttcaagtattttcatttccagtaacacattctgtgccaacatgtggattcctttttaaagaaaagattagaccaagaaagattttaaaagataaaataaaagaatttgatatctctatttcagatatcaataaaattaagtcaggaaatgattttattcaaaacgataaagtagtgaaaaatgatttgctgacacttccagctccaccaccaaggtcttatgcttattgtgcagataccatgtatgataaaaccatagttgattttataaagaatgttgatttactataccatgaagcaacttttttgtcttctatgaaatctagagctaaatcaacgaaacattcaactgctgaacaagctgctttaatagctaaagacgctgtagtatctaagttattaattgggcacttttctgcaagatataaagaagttgatttatttgaattagaagctaaagcagtttttacatcaaccaaggcagttgttgatggagatgagtttgagttaaattttaataattaa

SEQ ID NO: 259700 - DNA, 487 bp, Unknown
  Bacterial polypeptide expressing nucleotide sequence isolated from the Sargasso Sea
actggtctactctggtgacacgaccccggctcccagtctggttgccgctggccgccagtgggcgcagcaaggatccgcggtcctgcttgtgcacgaagcgacgtttctcgataccgcagaggggcgggagcatgcggtgcggaagcgtcactccaccgtcgccgacgctgtcggggcgggctgcgcaatcggggcatggaggacagtgctgacgcatttctcgaaccggcacccgagctttcctgtccctgcggtggccctgggccaccagcagccccgtcaaggccagtccgttggcaacgacgagcgcccagcggctgaggagaggcgaagagtgttttgcgagctcacagaggagcttgccgcctacgcttcgcggtgcgccttcgctcttggctgcctgtactgtcagaaatcgcaacatgttgccatctgttgtccgcaggtccgcgattgtggcgctggacggccttgtggtgacggctga

SEQ ID NO: 259701 - DNA, 457 bp, Unknown
  Bacterial polypeptide expressing nucleotide sequence isolated from the Sargasso Sea
cctgggccttccgggccttccgggccttccgggccttccgggccttctgggccttctgggccttccgggccttccgggcattcagcccgggccttccgggccttccgggccttccaggccgccttccgggcattcagcccgggccttccgggccttccgggccttccgggccttccgggcattcagcccgggccttccgggccttccgggccttccgggccttccgggcattcagcgcgggccttccgggccttccgggccttccgggcattcagcccgggccttccgggccttccgggcattcagcgcgggccttccaggccttccgggccttctgggcattcagcccgggccttccgggccttccgggcctttggcggggattgacccgtactgccctcttccgcctcaggtcgtccccgcctcctgcttggctcgctctgcggcccccgcacct

SEQ ID NO: 259702 - DNA, 343 bp, Unknown
  Bacterial polypeptide expressing nucleotide sequence isolated from the Sargasso Sea
gccgctgccaccggcgactattttgatccacgaagccacgtttgaagatgaaatggcagaggacgccgtagcgaagaagcactgcaccgtctcggaagccattgatgtcgggcggcgcatggacgcgcaccgcatcatcctcacccactttagccaacgctacccgaccattccaaacctgccggcgcacctttcctcccgggtgcttgtggccttcgacatgctatcggtgtcgttcaatcaactcctccaggcacctgcctctgttccggttctccgctgtttgtttccacctgaaatcgacgacgacgaggaaaacctcatcgagtccgaaaaaccttag

SEQ ID NO: 259703 - DNA, 898 bp, Unknown
  Bacterial polypeptide expressing nucleotide sequence isolated from the Sargasso Sea
aatgaaaatagtttatcttggaacatctgctgctgcaccaacagtggaacgttcactaacatgcatttgtcttgttcgtgaaaatgaggttttaatgtttgatgcaggtgaaggtgcacaagttgcctatttgaaagcaggattgccatggaacaaaaagatgaaaatatttgttacacatcttcatggagatcactgtttaggtattttaggtcttttacaaacaatgtcattacaaaaaagaacagaagctgttgagatttatggtccatctggaattgaagagttcattacagcaaacatcaaagtattaaattttggattaccatttccggttttcattacaattgtagatgagggtaacgttgtaaaagaaaaaaattatcaaataaattgttgtgaagcacaacatggaattcctgcattttcatattgttttgaagaagaagaaagagctggagtattctatccagaaaaagcaaaagagttgggaattccagaaggaaaactatggcaggagttacaaaatggaaattccatcgagattaatggaaaaaatattgattcgtcacaagtaacaggggagaagagacagggtaagaaaattggtatatcaggcgatacacgtccaactcaaaaattaaaagaattttttaaaaatagtgattatttgagttttgattgtacattttcatatgaactaaaggatagagcaattgaaacgaatcattcaacagcaaaagaagctgcagaacttgcaaaagaagcaaatgtaaaaaatctcattttaacacacttttctgcaagatatagtgacgaatcagttttgatagatgaagcaaaacagacccataattcagttatagctgcaaaagatcttcttgaaattgatatttag

SEQ ID NO: 259704 - DNA, 1165 bp, Unknown
  Bacterial polypeptide expressing nucleotide sequence isolated from the Sargasso Sea
tcatttgctattttctactgtttggtagctcttcctatcggaagattggtcgacacaaaatctagaaaaaatatagtcgctgttggcatcacgctgtggagtttcatgacagccatgtgcggcctcgcgcaaaactatgcacaactgttcctcgcgaggattggcgttggtgtcggagaagcaactcttggacctgctgcttattccatgctggcagacacgtttccgccaaaaaaactcggctttgcgatgggtatctttaatatgggcaccgctgtgggtgctggacttgctcttattattggtggatctataatttctttcgttacagcaaacgagtcagggagaacaatactattcggtatcgaattcctcgcaggctggcagtgggtattcatcctagttggactacctggcttactgatcgcagcactttctgcattgatcaaggagccacgtagaattattgcagaaaccgaaaacggtaatggtgagaatccgatcgcgctcaatgaggtaaagcacttttttttgcagcactttgattttcatttcccccaccacgctgcagcaagttttagtaaccttgccctagtcggtataaactcatgggtttcagtatattttataaggatacatggttggtcgctcagtgaagcgggcttaaacattggactttcgctcatctttggtgggctagttggattggtcggaggaggtctactgagcgatcaaatgtcaatcagatttaagggaggtaaggcaatattctgtttatgctgcgctcttgtcgctgtgcccttttcattacttttcgctctcacagagaacgcatccgcatctttaatattctttgccttagcatatggcttcatggtggcgccaatcccgtcagctgcggcaattcttcaagaagtaactccaaacagaatgcggggcaccctttccgctttctatcttttagtaatcagtatcatcggactggcattgggagctacaattgtagctctcatcaatgataattttttcgacggagactcaggtattcgcgaatccctactaattgcaattcctgtctttaatttagtagccgcgggcttctattttaagctaattaagccatatcgagcccgatcggaaaacaaaccgagaagccatgcttaaa

SEQ ID NO: 259705 - DNA, 772 bp, Unknown
  Bacterial polypeptide expressing nucleotide sequence isolated from the Sargasso Sea
aatgataaattcattaagaatattaggatgttactctggttcaggtggttataacaggtatccgtcatcacaattacttatcttaaataataaatcatatttgattgattgtggagagggtacccaatttttattaaaaaaatataaaactaaattaagttcaattgataatatatttatctcacacctacatggagatcattattttggacttcctggtttaatatcatactttaatttaaaaggaagaactaaggatcttaaaatctatgctccaaaaggcttaaaagaaattattacgctaatgatgaagtctgggaaatcatggaccagttataatttaatttttaatgaacttgagcataagagtctccaaattattaataatgatgaaatttcagttcatacattaaaattaaatcacagaattcctagcactggttttttatttaaatcaaaaaaacatcaagatatttcatatgcttattgctcagatacatcgtataatcctcagatttcaagtcttattgagggggttaatattttgtatcatgagtctacttttttatcaaaacatcaagatttagctgataaaacaaaacattctactgcactggaagctggtaaaatagctgtaaaagcaagagtaaacaaactgatcttaggacatttttcatccagatataaaaatttagatgaattcagaattgaagcaacttcattgttttcaaatgcatttattgccgaggaagggaaaatatatactttttaa

SEQ ID NO: 259706 - DNA, 580 bp, Unknown
  Bacterial polypeptide expressing nucleotide sequence isolated from the Sargasso Sea
atgataaattcattaagaatattaggatgttactctggttctggtggttataataggtatccgtcatcacaattacttatcttaaataataaatcatatttgattgattgtggagagggtacacaattcttattaaaaaaatataaaactaaattaagttcaattgataatatatttatctcacacctacatggagatcattattttggacttcctggtttaatatcatactttaatttaaaaggaagaactaaggatcttaaaatttatgctccaaaaggcttaaaagaaattattacgctaatgatgaagtctgggaaatcatggaccagttataatttaatttttaatgtacttgatcataatagtctccaaattattaataatgatgaaatttcagttcatacattaaaattaaatcacagaattcctagcacaggttttttatttaaatcaaaaaaacatcaagatatttcatatgcttattgctcagatacatcttataatcctcagattacaagtcttattgagggagtgaatattttgtatcatgagtctacttttttatcaaaacatcaag

SEQ ID NO: 259707 - DNA, 760 bp, Unknown
  Bacterial polypeptide expressing nucleotide sequence isolated from the Sargasso Sea
cgtgttcggcctgcctggtctgctcgccagcttcgggctcgccggcagcagcgccgcaggggtggatctctacgggccggacccgctggagagttatctcaatggtgtgttgcgcaccagctccacccggatcggctatcccctcgctgtccacagggtccgggatgcagcagagcagggcacgctgctgttcgaggacgacgacttcacggtgcgctgcagcccgctcacccaccgagtgccggcctacgcctatcgcatcgaacagaagcccctggccggtcgcttcgacattgagaaagcacgggaactgaacatcccgcccggccccgtgtacgcccagttgaagcggggtgaaacggtgaccctggaggacggtcgcagcatcgacggcaccagcctctgcggtgaggagcggcccggtgtgagcgtcgtctattgcaccgacaccgtgttctgcgaggcggccgtcgagcttgcccgcggcgcggatctgctgatccatgaatccacctttgcccatggcgaggcggagatggcgttccagaaacagcactccaccagcaccatggctgcccagacggccgccgaagcgggtgtggggcagctggtgctaacccacctcagcccgcgctacgtgccgggcaacccggtcacgccccaagacctgctgaacgaggccaaggcgatcttccccaacacgctgctggccaaggacttcctcagcattgacgtcaaaccacgctgcaacagttcgtga

SEQ ID NO: 259708 - DNA, 676 bp, Unknown
  Bacterial polypeptide expressing nucleotide sequence isolated from the Sargasso Sea
cttgagccttcgtgctgggggcgctccacactcagccacacgcattggttatcccttgcgctttcaccgggtggaagccgcagccgctagccggcagcccctttttgttgatggggccttcagcgtctcctgcgctgcactgaaacaccggattcctgccttcggctatcggattcaacagagcgagcgtcccggccgctttgacattgccaaggccaaagcgatgcggctacctccaggaccggaatttgcgcgcctcaaggcgggagaaacggtcacctttgccgacggacgccgcattgatggacgagagctctgtggaccaagccagccaggctcctcgctcgtttactgcaccgacaccgtgttcagcgagcaagcggtggcgctcgcgaagggagctgatctgctcattcacgaagccaccttttcgcaccgcgatgcagcgatggcctatcagcgtcaacactcgaccagcaccatggccgcacaaacagcggctgaagctggcgtgcagcaactggcgctgacccacctcagccctcgctacgtgcctggagctgccgaaagtcctgatgacctcctgcaagaagccaaggcgatcttccccaacaccgtgctggccaaggacttcctcagccttgaagtgaccgcaccggcctgcaacagtctgtga

SEQ ID NO: 259709 - DNA, 535 bp, Unknown
  Bacterial polypeptide expressing nucleotide sequence isolated from the Sargasso Sea
ttgacgtttctcggcacctcgagcggggcgccgagctttacgcgtaacgtgtcgtcggtggcgttgcgattagataatgaggtgtggctctttgattgcggcgaggcgacgcagcatcagctcatgcggtcgaagttgaagtacgcgaagattacgagaattttcatcacgcacatgcacggggatcacattttcggtttaccgggattaatttgcgccatcagcggcgcgagaacggcgcactcgaggtcgtacgggggtaccgcggtacctttacacatcatcggtccgccaggaatccgacagtacgtctacagcgccatcacgtggtcgcgttccgtgctcgggatgccgctcatcgtcaccgagttgcgacaaccggcgccgcgcgtggcggcgagcgcgtcgcccgcggcgcacacgtccgtggacccgcgcgggaaaatttttatgggtgagtactggcccgacgccctcgattgcgaaccggtgcccaattttaaggatatcgagggatggtctcgactcggagagg

SEQ ID NO: 259710 - DNA, 907 bp, Unknown
  Bacterial polypeptide expressing nucleotide sequence isolated from the Sargasso Sea
tatggagttaataatattgggatgtcattctgcatccccaagacaaaattttcatacatcttctcagttattaaaatttaaaaatcatttatttttaattgattgtggtgaaggtacacagatgagacttagggaagaaaaaataagttttacaagaataaaacatatttttatatctcatcttcatggcgatcacttttatggattaattggactaataaatacattcaagcttttagggagagaaatagacttaaatatatatggacctaaagggataaaggaagtcatattgattcaaatgaagttatcaaaatcatttactaattttaatttaattttctttgagcttgaaaaaaaatatcctgaagtaatttttgaagatgatttagtaaaaatcactacaatacctcttaaacacagggtatatacaaacggatttctattcgaagataagctgaaaacaaaaaaaattaattatgataatgttaatttatataaaattcctagtacattttatgaaaaactcaaggagggatttgattataaggatggtaaaggaaatttagttaaaaacagtatgctaacttttaattctattagtccgttttcatatgcatattgtagtgatacaagttttttcactaaaatagttgatcagattaagaatattgatattctttatcatgaatccacttttttgaatagagatatagatttagctaaaaaaactaaacatagtactgctcaacaagcaggaaaaatagcatctttagcaaatgtaaaccaattaatcttgggacacttttctactagatataatgaaaaatcaagttttgtattggaagctcaaaaagaatttaaaaatgttattttagcagaacaaggaaaaaaatataatttttaa

SEQ ID NO: 259711 - DNA, 238 bp, Unknown
  Bacterial polypeptide expressing nucleotide sequence isolated from the Sargasso Sea
ttgcaagtcacttttctaggaacaagttcaggggtcccaactcttaataggaacgtatcagcgatggtactaaagcctccacaaaggtcagaattgtggttgttcgattgtggtgaaggtacgcagcatcagttcattagaagcaatcttaagttatctcaaatcaaaaaaatatttattacccatatgcatggggatcatatttatggtctaccaggacttctagcaagtatggatt

SEQ ID NO: 259712 - DNA, 667 bp, Unknown
  Bacterial polypeptide expressing nucleotide sequence isolated from the Sargasso Sea
gatcacctgtttggtttaccgggactactgtgcagtcgctcaatggccggcaatgtccagcctctgacgctttacgggccaaaagggttgcgagagtttaccgaaaccgcattacgtctgagcggctcctggaccgattatccgatggaaattgtggaaatcaccgcaggtgagattgtcgatgacggcctgcgtaaagtcacggcgtacccgctggcgcatccgctggagtgctacggttttcgcattcaagagcatgacaaacccggtgcgcttgacgctaacgccctgaaggcggcaggtgttaaagcgggcccgtggtttcaggatttgaaagccgggaaaactatcgtgctggaggatggacgtacgatccacggcgccgacttcctcgccccggccaccaggggaaaatcagtcgctattttcggtgacacaggaccctgcgcgtccgccattgaactggctcgaggtgtagatgtcatggtacacgaaaccacgctggatgcctcaatggaggagaaagcgaacagtcgcgggcacagctcaacccgacaagccgcacagctggcgctggatgccggagtgggacgcctgatcatgacccacgttagctcacgctatgatgaaaaaggctgtcagcgtttgcttgaagagtgcaaagcga

SEQ ID NO: 259713 - DNA, 873 bp, Unknown
  Bacterial polypeptide expressing nucleotide sequence isolated from the Sargasso Sea
caatgtctctgcggtggctctgcgcttaccgcagcgggccgacctctggctgttcgactgcggcgaaggcacccaacatcaatttctgcgcagcgagctgcgtgtctcccagctaaggcgcatcttcatcacccacatgcatggagaccatgtctttggcttgcctggcttgctggccagccttggcatggcaggaacctgtgatggggtggacctctatggccccgaaccgctcgaggcgtttgtgctcagcgccctgcagcactccgccacaaggattggctatcccttgcgctttcacccggtggaggcggcagccagcagcggcgaacccctactcgttgatggcgagttcagcgtgtcctgcacaccgttgaaacaccgggtgcctgcctttggatatcgcattcaacaaagcgagcgccctggccgctttgacattgccaaagccaaagcgatgcggctgccaccaggaccggaatttgcgcggctcaaagcgggggaaaccgtcacctttgctgatggacgccggatcgacggacgcgagctctgtgggcccagccagccgggctgttcggttgtgtactgcaccgacacggtgttcagcgagcgagccgttgccttagcccagggggcagatctgctgatccacgaagccacgttctcccatcgcgatgccgcgatggcctatcagcgccagcactccaccagcaccatggcagcgcagacagcagccgaagccggcgtccagcaactggctctgacacacctcagcccgcgctacgtccctggcgccactgaaagccctgatgacctgctgcaggaagccaaggcaatttttcccaacaccgtgctggccaaggacttcctcag

SEQ ID NO: 259714 - DNA, 646 bp, Unknown
  Bacterial polypeptide expressing nucleotide sequence isolated from the Sargasso Sea
ttgcaggtcacttttctcggtacgagttctggggtgcccacccgggcccgcaacgtctcagcagtggccctgcgcttgccgcagcgctcggagatgtggcttttcgactgcggtgaaggaacgcagcatcagtttttacgcagtgatttgcgcctgtcgcagcttcgcagggtattcatcacccacatgcacggcgaccatattttcggcctgccggggctcctggcgagcctagggcttgccggcagcagcccagcgggagtggatctctacggaccggacccgctcgagagttacctcaacggtgtgctgagaaccagctccacccgcatcggctatcccctggaggtgcatcgggtgaggtcagcggcagagcagggctcgctgctgttcgaggacgacgacttcaccgtgcgctgcaccccactcacccaccgcgtgccggcctacgcctatcgcattgaacagaagcccctggccggtcggttcgatattcagaaagcacgggagctcaacatcccgcccggccccgtctacgccaggctgaagcggggcgaaacggtgaagttggaggacggtcgcaccatcgacggcaccagcctttgcggtgaggaacgaccgggagtaagcgttgtttattgcaccg

SEQ ID NO: 259715 - DNA, 376 bp, Unknown
  Bacterial polypeptide expressing nucleotide sequence isolated from the Sargasso Sea
aatggatattcaatttttaggaacgggggctggtcagccctctaaagcccgcaacgtttcaagtctcgctctgaaacttttggacgagattaacgaagtctggctctttgactgtggagaaggtacgcaaaatcgcattctggaaaccacaattcgaccgcgtaaggttagcaaaatctttatcacccacctgcatggagaccacatttttggcttaccaggtttcctttctagtcgtgcctttcaggccaatgaagagcagacggatttggaaatctatggacctcaagggatcaagtcctttgtcttaaccagccttcgtgtgtcaggttcgcgcctgccttaccgtattcattttcatgagtttgaccaagat

SEQ ID NO: 259716 - DNA, 670 bp, Unknown
  Bacterial polypeptide expressing nucleotide sequence isolated from the Sargasso Sea
gatgaaaattaactatcaaagtttagaaaaaaaaattgatttaaaatttaaaaataaagatctacttacccgagctcttacacataaaagttttaacccaaatgaaaataatgaaaagatagagtttctgggtgatagagttcttggtttagtcatagcaaaaaaacttttagaaatttatccaggagaaaaagaaggtattcttgataaaaaatttgcatcgctagttaataaaaaaacatgtctgaacatagcaaaaaaaatcaatttagctagttatgttaaaacatttaaccccaacaataaaaaaataaaaattgaggataaaattatatctgatagctgtgaagcattaattggtgctatttatcttgataaaggttttacaatagttgaaaaaacaattttaaacttgtggcaagatcatattgaaaaaagtgtagttacagaaatagatgcaaaaacaaagttacaggaattaactttaaaaaattttaaaaaattacctacttataaattaatttcaaatacaggtccaagacacaaacccatatttaaagttggagtaaaattgcccaatacaaaatattttatagcgactggaaaatcaaagaaagaagctgaacaaaatgctgctatagaatgtttaaaaaatacaaataaaaaatga

SEQ ID NO: 259717 - DNA, 560 bp, Unknown
  Bacterial polypeptide expressing nucleotide sequence isolated from the Sargasso Sea
aatgtacaagcagctatatgagaaaattaattattcttttaagaatgagaatattctagatctagtattaactcataaaagttctggagaaaaaaataatgagagattggagttccttggagatgcgattcttggagctgtaatatccgaggaattatataatcgatttacaaacatcaatgaaggagacttaacaagaataagagcagctcttgttaagggctcaactctaataaaaaaaggaaaagagcttgaccttttagctctggcaaggctttcaaaagctgcaaagaatttatcagatttagaggattcatcaattttgggaactatttttgaggcactagttggtggaatttatttagactcatcatggagtgaaaccaaagcagtaattttatctttatatcgaaatgacattgaatcaattgatattcaaaattcatttaaggatcctaagtctgaattacaagaatatcttcaatcacttggcgaggaacctcttgagtatatttgcgaaaaatctcgtaatgattcacaagacatttttgtatgttatg

SEQ ID NO: 259718 - DNA, 633 bp, Unknown
  Bacterial polypeptide expressing nucleotide sequence isolated from the Sargasso Sea
aaaaatctttaactcatcctagttacttaaaagaaaaaaataattctaatataaaaaataatcattttgaaagattggaatttttaggtgatagagttttgggtttatctattgcgtcattattatttgaaaagtataaaaattttgatgaaggtgatttatctaaaaaatattcctatttagttcaaaaaaattttttacataaaatttcaattgatttacaaattgaagatataattaattataattataaaaacaaaaataagaagatgattgtttcaattttgtcagatactgtagaatcactaattggagctatatttatagatggtggttatatgtcctcatatgattttataaataaattttggtcttcacatatagatatagatgttagtaagatattagaccctaaaacatctttacaagaattatctcaacaaaaattaaaaaaactacctgaatataagattttaaaaaaagaaggtccacctcactctcctttatttacagtagttttaagagttttaaatctaaaaaagataaaagcaactggtacttccattagagaagccgaacgaaaggctgctttaatagcactaaatttaatagatgaaaaaaaaattacttaaa

SEQ ID NO: 259719 - DNA, 696 bp, Unknown
  Bacterial polypeptide expressing nucleotide sequence isolated from the Sargasso Sea
aatggcgtggttaattgatatcattagttttttaaaatctcttctttcctctactccctcacaccgttttacagaattaacaaaattaatttcctatcgatttaacaatattgattatcttgagcaagcatttacccatagatcgatatcatcagaacctagaaagaattatgaacgtcttgaatttttaggagatgcagttattgacataataattagtagagaactaatgcgttattatcctgatggcgatgaagggttattaactaaaaaaaggtctgcactggtacaacagtcttttctaactaacatcggaaatatgttaaatattatgaactatttaattgttgaaccaaatgtagatctaaataatgaaaaagtagctaataaacaacaagcaaacttagtagaagcattgataggggctatataccttgatggagggattaaacctgcaaaaaaaatcattatagatacaatttggaaaaataagaatgaagcctggaaaacaattaattataaaggacaattaattgagtattgtcatgccaatggaattaataatccaaagttccatttggtgaatgcttcaggacctgatcatcaaaaaactttcgaaatacacgtaacaattaataaagagaaataccccacaggtattgggagtgataaaaaaactgctgaacaatcagcagc

SEQ ID NO: 259720 - DNA, 511 bp, Unknown
  Bacterial polypeptide expressing nucleotide sequence isolated from the Sargasso Sea
gatgaaggaattattttctaatattggctattcttttaaagattctagccttgtcgaggtagctttaacccataaaagcttctcctcttctaataatgaaagacttgagtttcttggtgatgcgttaataaatctatatatttctgaaaggttgttcaaaacttacgaaggtctggatgagggaaagttaacaagatttaaagccagtatggttagtagagataatcttaatttaatagcgtctaaactgaatatcggaagccttattaaattaggcagaggagaaaaattagaaggtaattccattctaggtaacacttttgaagcccttgtaggagccgtctttcttgattcagattattcaagaactcaaattgttttagataatttattcgatgatgatttcatcagcatcgatgaagtagacgagttgaaggatcctaaatcacagttacaagaaattattcaaaaaaattatcaatctctacccaaatattttgtaaaagaaatt

SEQ ID NO: 259721 - DNA, 389 bp, Unknown
  Bacterial polypeptide expressing nucleotide sequence isolated from the Sargasso Sea
attgattataaataaattttttaaaaatatattttatagatatgatagcgaaattgaaaaaatcttaaaatacaattttaaaaacaaatattatttatctcaagctctaacgcataaatccatttccaacaaccctggtaaaaactatgaaagattagaatttttaggagatgctgtaatagacatcatagttagtgaaaaactcatgaatgaatatccagagtgcgatgaaggaattctaactcaaaaaaggtcagcattagtacaaaaatcattcctttcttatattggaaaattcttgaatattataaattatattaagattgaggacaatgttgatttatctcaagaaaagatcgcagacaaacagtatgcaaatctttttgaag

SEQ ID NO: 259722 - DNA, 261 bp, Unknown
  Bacterial polypeptide expressing nucleotide sequence isolated from the Sargasso Sea
aatgatatctaagaaaaaattaaatcaatttgagattaaaattggatataaatttaaaaataattcgttgttaaaccagtctttaacacatccaagtttttattcagaagataaatctgaaaaaaaaatagataatcaatttgaaagacttgaatttttaggtgatagagttttaggcttaactattgcaacaattttatttaaaaaatataaattctttgatgagggtaacttatctaaaaaacattcatatttagttca

SEQ ID NO: 259723 - DNA, 682 bp, Unknown
  Bacterial polypeptide expressing nucleotide sequence isolated from the Sargasso Sea
aatgactaatatagaaacaatagaaaattcaataaaatatcattttgttaatagagcattattagaagctgcaattactcatacgagttttgtaaataataagaaggattatacttatgagcgtcttgagtttttaggtgatagagttttaggtttagttattgctgatcttatttataaaaatttttcaaatgagtcagagggggatctagcaagaagaatagcatttttagttagtggtaaaactctgtctgaaatagcttttaaacttaagttgcaaaattatgtaagagttagtgaaaacttaaaatttaataatggtgaaaataattctatattatcagatacaatggaagctataattggtgctatatttttagatagtaattattctgaggtaaaaaaagttataaaatatatttggatagaatatataaaaaatgatgttaagcctcctaaggatccaaaatctgcacttcaggaattgtctatggaattaaagtatgaaatgcctgtatattcaaactatataaaagaggggccagaccattctcctgtttttaaagtaaaagtaagtattaaagggttaaataaatcacaaggtataggtgtttccaaaaaatctgcagaaattgatgctgcttctaagttattaagtattattgagagaaatagtaattga

SEQ ID NO: 259724 - DNA, 157 bp, Unknown
  Bacterial polypeptide expressing nucleotide sequence isolated from the Sargasso Sea
ttgaagaagctctacactcattctagttttaaaaataatactaaatcgaatcaagaaagattagaatttttaggtgatagggttctaggacttgttattgttgaatatttatttccaaatttcattagcgatagagagggtcttttaactaccaaat

SEQ ID NO: 259725 - DNA, 610 bp, Unknown
  Bacterial polypeptide expressing nucleotide sequence isolated from the Sargasso Sea
aatgatttcaactaaaaaaattgatcaatttgaaaaccatataggatactcttttaaaaacaaaaaactgattattagcgcattaatccatccaagttttctagttgataaaaaaaaaacaaaatttaaattaccaaatgattttgaaagacttgaatttttaggtgatagagttttgggtttagcaatttcatctattatatataaaaaatttgataacaataatgagggagatttatctaaaaaattatcataccttgttcaaaaaaattttttacataaaatttctataaatttaaaaattaacaatattcttaaatatagttccaaaaaaaatgaaaagatgaatatctctatacttgcagattcaattgaatctctaattggtgcaatttatttagatggaggctttaaaaatgcattaaaatttataaatgaagtttggggcccatatttagatattagtcataacaatatgcaagattctaaaacaaaacttcaagaaatatctcaacaaaaattaaaaaaattaccagaatatagtttattgaagaaagagggaccgtcccactctccaatttttaccgtttctgttaaagtattaaattta

SEQ ID NO: 259726 - DNA, 691 bp, Unknown
  Bacterial polypeptide expressing nucleotide sequence isolated from the Sargasso Sea
ttgaatgatgttcaatctattctacgaagttacggattacctacaacagttaataattttgaatattacaaattagcgttcgtacataaatcatatacaaagaaaaatatagacaatgaaatgattaaatgtataaatagaccaaataattgtatagaattaaaagagaaatctaatgagcggttagaatttttaggagatggaatattagaagcagtaacaaaattttatttatataggagatttccaaatgagaatgaaggatttatgacggaaaaaaaaatagcaatagtaaaaaatgaaagtattggtaaatttgcgtatgaaataaaattaaataaatggttactacttagtaattgtgcagaggaaaaaaagaatagaagtaattataagaagttaggttgtatatttgaagcatttattggagctttatttttagatttgaataacatagatataaaagatgaaaataagtggtttgaaacaatattcagaagtggaccgggatttcaattagtacaaatatttttagaaaatgtatttgaagagcatataaattggaatgaattattacataatgatgataactataagaataaattacaaataattttacaaaaagagtttaaaactacaccgcactacattgaaatagaaaaagatgtggatggctacaatatgggtgtat

SEQ ID NO: 259727 - DNA, 511 bp, Unknown
  Bacterial polypeptide expressing nucleotide sequence isolated from the Sargasso Sea
aatgaaaggtctatttgatgaattgggatatacctttagtaatgatgatctcataaaaaaagctctaacccataagagttcctcctcagacaacaatgaaaggttagaatttcttggagatgcaattctgaacctttatgtatctgaaaaacttatccattcatatcctgaactcagcgaaggaaaacttacacgttttaaagcaagtatagttagcagacaaaacctcaatttagttgcagaaaaacttagactttctgaatttattaaaataggcaaaggtgaaaggttagatggtaattcgattttaggaaacactctcgaggctataatcggagccatatttcttgactctgattatccaaacacaaaagaaatccttcaaaggctatttctcaaagactttttagaaattgaagaggaaagtgaacttaaggatcctaagtcagcacttcaagaatatattcaaaagacctataaatctttacctacttactctattcaaaaaagc

SEQ ID NO: 259728 - DNA, 691 bp, Unknown
  Bacterial polypeptide expressing nucleotide sequence isolated from the Sargasso Sea
ttgaagatctcggcagagttgaaggcctttgagggccgcatcgggtattctttcaaagaacccgcgcttttggtgcgcgccgtgacccacagttcgatgtcgacgccgaaccgggatgacaatcagcggcttgaatttttgggcgatcgcgtgttgggccttgtgatgtgcgaggcgcttttggaagcggacaagcaggcctctgaagggcaacttgcgccacggtttaatgcattggtgcgcaaggaagcttgcgccgatgtggcgcggcagattgaccttggtgcggttttgaaactgggccgctccgagatgatttccggtgggcggcgcaagaatgcgcttttgggcgacgcgatggaggcggtgatcgccgccgtgtaccgcgacggcgggttcgcggcggccaaggatttggttttgcgcctttggggcaaccggatccatgaggttgaagaggatgcacgcgacgccaaaaccgccctgcaagaatgggcgcaggcgcgcaaattaccgccccccgtctaccgcgaggtcgcccgcaaagggccggatcacgcgcctgtttttactatttctgccgaactcaaaaccggcgagagcgaagcggccactgcggcctcgaaacgcgccgccgaacaagccgccgcaaaggcgctttgcaaagatggaacgctaaatgacccgcgcc

SEQ ID NO: 259729 - DNA, 652 bp, Unknown
  Bacterial polypeptide expressing nucleotide sequence isolated from the Sargasso Sea
acacacaagtcttacctgcccacggaatcagagttgaatttaggtaacaacgaaagaattgaatttctaggcgatgcggttctcgaccttgtaatcagcgaaatgctgatgcaggaattcccggagctggacgaaggcggactttctaaattcagggcaagtctggtgagtgaatcaggactatgcaaacaggcacgtgccttagaattaggtgattgcctgctccttggtaaaggagaggaattaaccggaggtcgggaaaaaacttctttgctttctgacacatttgaagcagttatggctgccatatatcttgatagtcgagagaagaatggtctctcggagattgcacgagtaattcgaaaattatttttgcctcagttgcccaaaaatgccgagggctatattactcgggattataaatctgaactgcaggaacaagttcagaaaattatgggcttaccctcaacatacgaacttgttgatgaaacagggccggatcatcaaaaagaatttactatggcggtttttgttaaagatgaggaatacggtcgaggaagtggagcaagtaaaaaaattgccagccagcttgcagctgaaaacgcacttgaaagaataaagcaggatccttcattgctcaaagggagttaaa

SEQ ID NO: 259730 - DNA, 667 bp, Unknown
  Bacterial polypeptide expressing nucleotide sequence isolated from the Sargasso Sea
atgactgatataaataaactaatggaaattatcggatataattttaggaataagtctttaattaaaacagcgcttacacattctagtttttcaaaagaaaataaaattaaaaataatgaacgtttagaatttcttggtgatagagttcttggattaattatttcaagtgagattttcaaaaaaaatttatctagcactgagggtgagttggcgaaacagcaatcttttttagtatgtaaaaccacactaaaaaaggttgctaataatattaaattacgagaatttgtaaattgtactcaaagtttaaaaaaaaattcgctggattcagttattgcaaatacgttagaggctttaattgctgcaatttatttggattcaaatcttaatcaggcatcaaaggttgtcttaaaattgtggaaaagttttttagaaaatataaatttatcgtcttttgaccctaagtctaaactacaagaatggagcttaaaaaataaaaaaaggctacctacttatgaaattatggataaatcaggaccagatcacagcccaacctttacaataaaggtgatattagatgaaaaattttcaagttttgctaaaggaaagagtaaacaagatgctgagattaaagcagctgataaactactaaaaaaaatttgtgaataaa

SEQ ID NO: 259731 - DNA, 315 bp, Unknown
  Bacterial polypeptide expressing nucleotide sequence isolated from the Sargasso Sea
aatgaatcaaaagtggttagatctatgcaatcgtctagattacaagtttgaaaatctggacattcttcgccaggcattgacgcacaagtcttacattccctcggaatcagatgagaatttcggaaacaacgagagaatagagttcctgggtgatgcagtccttgatcttgtgatcagtgaaatgcttatggaggaattccccgagctggatgaaggtggtctttctaagttccgggcaagtctggttagtgaatcaggtctctgcaagcaggcaagtgccttggatttgggcgactgcctgctccttggaagagg

SEQ ID NO: 259732 - DNA, 658 bp, Unknown
  Bacterial polypeptide expressing nucleotide sequence isolated from the Sargasso Sea
aatgattttaactaaggaaattaatagatttgaaaaaaatattaaatttaagtttaaaaataaaaataatttattaattgctctattacatcctagttatattaaagaaaaaaaaacaactaaaaattatttgccgaatgaatttgaaagattggaatttttaggagatagagttttaggattggtaatatcttcattgatttttaataaatttaaatcttatgatgaaggagatttaactaaaaaattttcatatttagttcaaaaaaattttttatataaaatagcattagaattaaatatggataaatttttaaagtattcaataaaaaaatataataaaaaaaataatatatcaatacttgctgattctatggaatcattaattggaagtatatttattgatagtggctatagtgcagttgtaaaatttattaagtatatttggggcccttatctagatttagaagcttcaaatatagcagacgcaaaaacaatgttacaagaaatttctcaaaaaaaatacaaaattcttcctatatacaaattagtaaaaaaagagggaccatctcattcacctgtatttactatttctgtagaagttaaaaatttaaaaatttttaaagccaagggatcatcaaaaagagaagcagaaaaa

SEQ ID NO: 259733 - DNA, 256 bp, Unknown
  Bacterial polypeptide expressing nucleotide sequence isolated from the Sargasso Sea
catggagaagcaatcgatttttcaaggcagttcagtgaaaaaatctgagcctattcgatcttttgagcagagactgggttaccaattttccaatgtaagtttacttattgaagctctaacgcattcttctatagtttcggaatctagaaaagataatcagagattagagtttctaggtgaccgtgttcttgggcttgttatggcagaagctcttttagagattgatcgattagctccggagggaactctcgcacca

SEQ ID NO: 259734 - DNA, 721 bp, Unknown
  Bacterial polypeptide expressing nucleotide sequence isolated from the Sargasso Sea
catggagaagcaatcgatttttcaaggcagttcagtgaaaaaatctgagcctattcgatcttttgagcagagactgggttaccaattttccaatgtaagtttacttattgaagctctaacgcattcttctatagcttcggaatctagaaaagataatcagagattagagtttctaggtgaccgtgttcttgggcttgttatggcagaagctctgttagagattgatcgattagctccggagggaactctcgcaccaagatttaattctttggttcggaaagaagcgtgtgctgaagttgcacgccaaatcgatctaggtagtgtactaaaaatagggcgatctgaaatgctttcaggaggccgaagaaaggatgcattactcggggatggtatggaggcagtgatcgctgcgatttaccaagatggtggttttgaacttgctaagaaaatagtaattgagctttggggtgatcgtattaggaatgtcaaaggtgacgcacgtgatgcaaaaacgatgctccaggaatgggcgcaggctagaggccaacccccccccaaatatgaggtaatttcgcaaagtggtccggatcatgcaccagatttcctcgtacaagtaagattggattcaggagaaactgcagatgctttagctggtagtaaaagacaggcagagcaaatggctgctaaatccttactgcaaaccatgagagaattaatttaa

SEQ ID NO: 259735 - DNA, 368 bp, Unknown
  Bacterial polypeptide expressing nucleotide sequence isolated from the Sargasso Sea
attgaaactttttgtaaaactaaaacaatatttcttagataagtctgattcagtttcaattttagaaaagaagattaattatatatttcataataaagaatatctaaaccaagcatttacacataaatcactcaacacagaacctcgcaagaattatgaacgattagaatttttaggagacgctgtaattgacatcatagtcagtcgagagctcatgcgcgatttccctgagggagatgaaggactcttaacccaaagacgtgcagcactagttcaaaaaccttatcttgccagcataggacacctcttagatttgatggattatcttatgatcgaaaagagtgttaatctagaaattgagaagatcg

SEQ ID NO: 259736 - DNA, 670 bp, Unknown
  Bacterial polypeptide expressing nucleotide sequence isolated from the Sargasso Sea
atgaaaattaactatcagagtttagaaaaaaaaattgatttaaaatttaaaaataaagatctacttattcaagccctaacacataaaagttttaatccaaatgaaaataatgaaaagatagagtttttgggtgatagagtccttggtttagtgattgcaaaaaaacttttagaaatttatccagatgaaaaagaaggtattcttgataaaaaatttgcttcgttagtaaataaaaaaacctgtttggatatagcaaaaaaaataaatttagctagttatgtaaaaacatttaaccctaataataaaaaaataaaaattgaagacaaaatcatttcagatagctgtgaggcattaattggtgctatatatctagataaaggttttacaattgttgaaaaaacaattttaaacttgtggcaaaatcatattgaaaaaagtgtggtgactgaaatagatgcaaaaacaaagttacaagaattaactttaaaaaaatttaaaaaactacctacttataaactaatttcaaatactggtccaagacacaaacccatatttaaagttggagtaaaattacccaatacaaaatattttatagcttctggtaaatcaaagaaagaagcagaacaaaatgcagcaattgaatgtttaaaaattacaaataaaaaatgaa

SEQ ID NO: 259737 - DNA, 448 bp, Unknown
  Bacterial polypeptide expressing nucleotide sequence isolated from the Sargasso Sea
aatgaagactaagaataaaaatattgatcctttagaaaatattttattaaaattaaaatataaatttaaagataaaaatattcttaaacttgcactcacccattcaagttttgttgagaaaaatagtaataaaaattatgaaaggctggagtttctgggagatagagtattaggacttgttattgctgaaatgctttttaaaaaattccctaatgagaaagaaggcgaactatcaaaaagatttgcgtatttggttaataaaaaaacacttattaaagttgcagatttattgggtttaagagacgttattataacagctaaaaattatagattaagagtaaatataactgactcaatggttgcagattcattagaagcattaattggagctattttccttgatagtaactttgaaaatgttaaaaatcttgttgaaagattatgggaa

SEQ ID NO: 259738 - DNA, 499 bp, Unknown
  Bacterial polypeptide expressing nucleotide sequence isolated from the Sargasso Sea
cctgaggctcgagaaggtgatttgtcgcgaatgcggtcacagttggtcaacggtgtggcgttagcggaattgtcgcgggagttgagtttgccagagtggttgcggttaggtgcgggtgagcagcacagtggcgggcgtgagcgcgattccatcttggcggatgcgtttgaggcactgattgcagcggtgtacctggatagcgattacgagacctgtcagaccaatgtgttacgctggtttggttcgcgcttggcaaacgtggagttgcaggcggcggtaacgaaagacgcaaaaacgcgtttgcaggagtgggcgcaagcacgtcaacagccgttgccgagttatcaatcgacagtaacgggtaaagcacatgcgcaaacgttcacagtgacgtgtcgtattgcggggatggaactcatgacaacagcaacggcacgttcgcgtcgcgcggcggaacaagcagcagcaaaacagtatttggaagagataaatgaatgag

SEQ ID NO: 259739 - DNA, 469 bp, Unknown
  Bacterial polypeptide expressing nucleotide sequence isolated from the Sargasso Sea
gatgattacaactaaaaatattaatttttttgaaaataaaataggttatatttttaaaaataaagaaattttaatctcttcattattgcaccccagttatattaaagaaaaaaaaattaaatatagcaaattaaatcagaattttgaaagattagaatttttaggagatagagttttaggtctggtaatagcttctttaattttttcaaaatttaaagatttgaatgaaggagatttatcaaaaaaattatcgtatttagttcagaaaaattttttatataaaatatctaatgaattaacattaattaaagtcatcaaatatagatttaaaaaacaaaatgaaaaaatgaatcagtcagtttttgcagatactgttgaatcgatcattggtgctatttatttagatggtggatatcaggcttctacaaaatttataaaaaaatttttggggtccatatttaaacactaa

SEQ ID NO: 259740 - DNA, 562 bp, Unknown
  Bacterial polypeptide expressing nucleotide sequence isolated from the Sargasso Sea
atgaataagtttagtatatttcaaaaaatagatgaaacacccgatgatgttattgaacatgatttatataataataagaattttttaatcaaccgaaaacaagttcaagacattttagaacaatgtgaaataacagatttaattgataatttagaattatatcaaagagcatttactcataaatcatatattgaaaaagaagattgtgttaaaattgtagaaaatcagattaacgcattagaattacaaaaaaaatcatatgaacgattagaatttttaggcgattctgtattaggtttaattgttgtaagttatttatatagacgtttctttgatcaaaatgaaggaacgatgacaaaatataaagcaaaattagttagtaaaaaagcattatctgaattttcaaaattacttggattttcaaaatattttattatttcaaaacaaattgaacaaaataatggaagagaaaatataaatattttagaggatacatttgaagcatttttaggtgcattatttttagattttaatcatcaatttacaataaaaaaaagtaaga

SEQ ID NO: 259741 - DNA, 322 bp, Unknown
  Bacterial polypeptide expressing nucleotide sequence isolated from the Sargasso Sea
tctggattaccagtttgaaaattctggcattctacgtcaggcattaacacacaagtcttaccagcccttggaatctgagttgaatttaggtaacaatgaaagaattgaatttctgggtgacgctgttctcgaccttgtaatcagtgaaatgctgatgcaggaattcccggatctggacgaaggcgggctttctaaattcagggcaagtctggtgagtgaaacaggactttctaaacaggcacgagccttggaattaggtgattgcctacttcttggtaaaggagaagaattgaccggaggtcgggaaaaaacttctttgctt

SEQ ID NO: 259742 - DNA, 340 bp, Unknown
  Bacterial polypeptide expressing nucleotide sequence isolated from the Sargasso Sea
atggcgtggttaattgatatcattagttttttaaaatctcttctttcccctcctccctcacaccgttttatagaattaacaaaattaatttcctatcgatttgacaatattgattatctagagcaagcatttactcatcgatcgatatcatcagagcctagaaagaattatgagcgtcttgaatttttaggagatgcagttattgatataattatcagtagagaacttatgcgttattatccagatggagatgaaggattgttaacaaaaaaaaggtctgcactggtacaacaatcttttctaactaacatcggaaatatgttaaatcttatgaactatt

SEQ ID NO: 259743 - DNA, 301 bp, Unknown
  Bacterial polypeptide expressing nucleotide sequence isolated from the Sargasso Sea
aatgtacaagaagctatatgagaaaattaattattcttttaagaatgagaatattttagatttagtatttactcataaaagttctggagaaaaaaataatgagagattggagttccttggagatgcgcttcttggagctgtaatatccgaggaattatataatcgattcacaaacatcaatgaaggagacttaacaagaataagagcatctcttgttaaaggctcaactttaataaaaaaaggaaaagagaaagatcttttagatctggcaaagctttcaaaagctgcaaagaatttatca

SEQ ID NO: 259744 - DNA, 670 bp, Unknown
  Bacterial polypeptide expressing nucleotide sequence isolated from the Sargasso Sea
atgaaaattaattatcaaagtttggaaaaaaaaattgatttaaaatttaaaaataaggatcttcttatccaagctcttacacataaaagtttcaacccgaacgaaaacaatgaaaaaatagagtttctgggtgatagagttcttggattagtgattgcaaaaaaacttttagaaatttatccaaaggaaaaagaaggtatacttgataaaaaatttgcttcactagttaataaaaaaacatgcctagatatagcaaaaaaaatcgatttagctagttatgtgaaaacatttaatcctaataataaaaaaataaaaattgaggacaaaattatatctgatagttgtgaagcattaattggtgctatttatcttgataaaggttttacattagttgaaaaaactattttaaacttatggcaagatcatattgaaaaaagtgtagttacagaaatagatgcaaaaacaaagttacaggaattaactttaaaaaactttaaaaaattacctatttataaattaatttcaaatacaggaccaagacacaaacccatatttaaagttggagtaaaattgcccaatacaaaatattttatagctactggaaaatcaaagaaagaagctgaacaaaatgctgctatagaatgtttgaaaaatacaaataaaaaatgaa

SEQ ID NO: 259745 - DNA, 418 bp, Unknown
  Bacterial polypeptide expressing nucleotide sequence isolated from the Sargasso Sea
atggccgagctagagtttgcaataggttacaaattcaaatcgataagtcttctcaccttggcgatgacgcatagaagtttctcaaaagacaataatgaaagactagaatttctcggagatgcaattttgggtgcagtggtctcttccatattgttcgaagcgaacccaaattttcaagaggaccgactttcgctgatgcgagcagagttggtgaagggccaatctctagcgaatataggtcgatctgtcgggatcccggaaatgttgagattgggtgcaggagaagcgaagcaaggtggcgcagaacgggagtccataattgcggatgcttttgaagccctaattggcgcggtgcaactagatgccggtatggagattgtagaaaaaattgtgagacgtattttgcggaccgtctgag

SEQ ID NO: 259746 - DNA, 481 bp, Unknown
  Bacterial polypeptide expressing nucleotide sequence isolated from the Sargasso Sea
atgattacaaaaaaaaatattagtttatttgaaaatttaatcggatataaatttaaaaatacagaaatacttaaatcggcacttattcatcctagttatttcaaagataaaaagatgaaattaaaaaaatctcctgaagaatttgaacgtttagagtttttaggtgatagggttttaggtttagtcatagcttctttgatctttaagagatttcatgatcaaaatgaaggaaaattatcaagaaaattatcatacttagtccaaaagaattttttatataaaatttctatcgaactttcattagacaaaatattgatttttttatttaaaaaacaaaatgaaaaaatgaatatttcagttttgtctgatgcagtagaagcgataataggggcaatatttttagatggaggttaccaatcttcgttcaaatttataaaaaaattttggggaccatatttagatactaaagcatctgatatac

SEQ ID NO: 259747 - DNA, 640 bp, Unknown
  Bacterial polypeptide expressing nucleotide sequence isolated from the Sargasso Sea
atgccggaaaatattaaaattccaaaaaaaattacaaattctaaaaacttcaagcttgccttcattcataaaagttttgataaagatcaaaataatgaaagacttgaatttctcggagatgctgtgattcagcttgcaatctctgaaaagctacatcacgaagagcagcattttaatgaaggcgaattaacaagaattcgtgccaaacttgtaaacacatcttttttatcttcggtttgcaaaaaacatgactttcacaagtatataaaagcgtcaaagggaaccaatagccttagcgaacaccaaaaagataaagtgtatgctggtatgcttgaggcaattattggggcagtttttttagaaacagactatttttatgcttcaaaatttgtctatacattgtttggtgatgagctttatagtcttgatagcacaaaggatgccaaaaccttactgcaagaatattgtcagtctaacaatattgagttgccgcgttattattcaacggaagataacaaaagcaatgagtttgtatgcacgttaaatattaataatatgacggttgaggcaaaacatgttcaaaaaaaaatatctgagcagcttgcagccaaaaaagctcttgcagtgattaccaaatgag

SEQ ID NO: 259748 - DNA, 545 bp, Unknown
  Bacterial polypeptide expressing nucleotide sequence isolated from the Sargasso Sea
agaattcttaggtgatagggttttaggtttagttattgcaaaaaaacttttagaaatttatcctaatgaaaaagaaggtatacttgataaaaaatttgcctcactcgtaaataaaaaaacctgtctagaaatcgcacaaaatttagagttagaaaaatttgttctaacttttaatgttaagaaaaaaaacaacataattgaagataaagttctagctgatagctgtgaagctttaattggttcaatatatttagagaaaggttttttagctgttgagaaatttattctaaatcagtggtctaaacatatcaaagatagtgtgattactaaagttgatgctaaaacaaagcttcaagaattttcattaaaaaaatttaaaaaattgccagtttataaattattctcaaatacagggccaagacataagcctatttttaaagttggtgtaaaattatttaatactaaattttatatttcaaagggtaaatcaaaaaaagaagcagaacaaaatgcagcagttttatgtttggagaatattagttaaa

SEQ ID NO: 259749 - DNA, 657 bp, Unknown
  Bacterial polypeptide expressing nucleotide sequence isolated from the Sargasso Sea
cattaacacacaagtcttatctgccatcgaaaactgggttgaatttaggtaacaacgaaagaattgaatttctgggtgatgcggttctcgaccttgtaattagcgaaatgctgatgcaagaattcccggagttggatgaaggcggactttctaaattcagggcaagtctggtaagtgaatcaggactatgcaaacaggcacgtgccttggaattaggtgattgcctgcttcttggtaaaggagaggaattgaccggaggtcgggaaaaaacctctttactttctgacacatttgaagcagttatggctgccatttatcttgatagtcgagagaagaatggtctcgcggagattgcacgagtaattcgaaaattgtttttgcctcagttgcccaaaaatgcagagggttatattactcgggattataaatctgaactgcaggaacacgttcagaaaattatgggcttaccctccacatacgaacttgtttatgaaacaggtccggatcatcaaaaagaatttaccatggcggtttttattaaagacaaggaatacggtcgaggatgtggagcaagtaaaaaaattgccagccagcttgcagctgaaaacgcacttgtaagaatacagcaggatccttcattgctcaaagggggttaaa

SEQ ID NO: 259750 - DNA, 268 bp, Unknown
  Bacterial polypeptide expressing nucleotide sequence isolated from the Sargasso Sea
catgtctattttttctcgttttatattaaataatgacgaaaagaaagtttctaattttatatctgataagtttttttataagccaaaaaaaatcgaattatttattcaggctttaactcataaatcaaaaacatttaatagtgataaacaatcaaatgaacgattggagtttttaggtgatgcaattttagacgctattgtagcagattttttatgtagagagtttcctaatagtgatgaaggtcaattaaccagaataaaatctaaa

SEQ ID NO: 259751 - DNA, 439 bp, Unknown
  Bacterial polypeptide expressing nucleotide sequence isolated from the Sargasso Sea
atgtacataaataagcttgaaaaaaaaattaattattattttaaaaatgttgatttattggaagaggctattacccattcgagttttcaaaggaataatttaaaaatcaaaaaaaataattatgaaagattagagtttttaggtgacagagtattgggcttagtattatcagaatattttttcaaaacttatccaaatgcaaatgaaggagttttagacaattattttcaaagacatgctaatcaagagaatctttttaattatgcaaagaaaataaatctttcaacttatttgcaaacacaaaaaggagataatttagaaaacaacaaatctattttaagtgatgttgtagaagcaatgattggagcaatttacattgatactggactaaataattgcaaaaagtttatattgaacaatattaaaacaaaaatttaat

SEQ ID NO: 259752 - DNA, 301 bp, Unknown
  Bacterial polypeptide expressing nucleotide sequence isolated from the Sargasso Sea
attgaaaaaaacttttaaagtatcaaagttaatagcagatgctggtatatgttcaagaagaaaagctgaacaattaataaaagatggtaaagtaaaattaaacgataaaattcttacttcagttccagaaagagcttcattaatagattcaattaaagttaataataaaacaataaattctaaacaaaaaacaagactatggaaatataacaaaccagcaggaaaattaactacaaattacgatcctaaagataggaaaaccatttttgatgatttgcctaaaaattacctagaattataa

SEQ ID NO: 259753 - DNA, 599 bp, Unknown
  Bacterial polypeptide expressing nucleotide sequence isolated from the Sargasso Sea
acattcaagttatcaaaaaagtaatttgaaaatcaaaaaaaataattatgaaagattagaatttctgggtgatagagttctaggtttagtattgtcagaatatttttttaaaacttttccaacagccaatgaaggtattttagacaattattttcagaaatatgctaatcaagaaaatttatttaaatatgctaagagtattaatcttaacaattttctaaagacacaaaaaggagataatctagaaaataaaaaatctattttgagtgatgttattgaagcaataattggagcaatttatattgatacaggtttaaaaaattgtaaaaagttcataataaaaaacattattgataaagatttaatttattcacaacctttaaaacatcctaaatcaattcttcaagaatatagtctagaaaaatacaaaaccttacctaaatatagcattttaaataaatttggaaatgaacacgaacctatatatgaagtttctgtatatatcaaaaataataatatagtttctgcaacgggttctaatttaaaaaatgctgaagaagctgcggcaacaaaattattaaatattttaaaaatttaaa

SEQ ID NO: 259754 - DNA, 331 bp, Unknown
  Bacterial polypeptide expressing nucleotide sequence isolated from the Sargasso Sea
aatgtacaagaagctatatgagaaaattaattattcttttaagaatgagaatattttagatctagtatttactcataaaagctctggagaaaaaaataatgagagattggagttccttggagatgcgattcttggagctgtaatatccgaggaattatataatcgatttacaaacatcaatgaaggagacttaacaagaataagagcagctcttgttaaaggctcaactttaataaaaaaaggaaaagagcttgatcttttagctctggcaaagctctcaaaagctgcaaagaatttatcaaatttagaggattcatcaattttgggaact

SEQ ID NO: 259755 - DNA, 670 bp, Unknown
  Bacterial polypeptide expressing nucleotide sequence isolated from the Sargasso Sea
aatgaaaaattcatttaaggagctagaaataatcttagattataatttcaaaaattctgatcttcttaaacaatccttgattcataaaagttttgataatttaaacaataatgagaagttggaatttttaggcgatagagtgctaggactaattatatctaaaaaattaattgaaatatatccaaaagaaaaagaggggataatagataaaaaatttgcaaatcttgtaaataaaaaaacttgttctagcattgcaaataaattaaacataaaaaaatttatgtttttaggagcctcccataaatctttacaaaagtttgctgacaaaattataggtgattgtttagaagcactaattggagctatttatttagatggcggtttaaaatatgcagagaaatttgttttaaaattttggaaaaagaatttagaaaattcatctttacctctaatagactctaaaactaagttgcaagagcatagtttaaaaatatataaagaattacctcgatacacattttataaaaaaacgggaccccagcataagcctatatttaaaactgatgtgcaaataccaaattctaaaaaagttatgggaaccggaacatcaaaaaaaaatgcacaacaaaatgcagcaggcaaactattacgttctcttaaaatcttatga

SEQ ID NO: 259756 - DNA, 675 bp, Unknown
  Bacterial polypeptide expressing nucleotide sequence isolated from the Sargasso Sea
cggacatcctgcgtcaggcattgacacacaagtcctacgtgccactagaatcagaggagaatttcggccacaacgaaagaattgaattcctgggtgatgcagttcttgatctggtaaccagcgaaatgcttatgaaggcattcccggagctggacgaaggtggcctttctaaattccgtgcaagtctggtaagcgaatcaggtctctgcaaacaggcacgtgccctggaattgggtgactgcttgctccttggcagaggagaggaaatgaccggaggtcgggaaaaaacttctttgctttctgacacatttgaagcagttatggctgccatttatcttgacagtcgcgataagcatggtctctcagagattgcacgtgtaattcgaaaattgtttttacctcatttgcccgaaaatgcgcaggggtatattactcgggattataaatctgaactgcaggaacacgtgcagaaacttacggggatgccatccaaatacgaacttgttgatgagaaaggcccggatcatcaaaaagaattcaccatggcggtctttgtcagagataaggaatatggccgaggaagtggagcaagtaaaaaacttgccagccagcttgctgctgagaacgctctggtaagaatacagcgggatccttcacttcttgaaggggggtgaa

SEQ ID NO: 259757 - DNA, 394 bp, Unknown
  Bacterial polypeptide expressing nucleotide sequence isolated from the Sargasso Sea
cttgacgggggcaggccccaaggatgacgcccttgccactctcgaagccgagatcgggcatgttttcactgacaggcagcttcttgtcgaagccctgacccatgcaagccacggcccgtcgggtgcaagctacgaacggctcgaatttctgggcgacagggttcttggcctcgttctcgcggaacacgtcttttcggcttacccgcaggatgacgagggagggctgtcactgcgattccatgcggcggcacggcagtcgacgcttgccgatatcgcgcgtgacctgaatgttgcctcgcatgtcagatcgcagagcggcatggacgtcgcggcgaacgaatccatccttgctgatgttgtcgaaagcctgatggctgccatctatatcgatggg

SEQ ID NO: 259758 - DNA, 471 bp, Unknown
  Bacterial polypeptide expressing nucleotide sequence isolated from the Sargasso Sea
gatgaaagatttgatgacaaaattaggttataactttcaagataaaaccttgcttaacatggcacttactcataaaagcttttctacgcaacacaatgaaaggttggagtttctaggggatgctatattaaatttatatgtcactgaatacttatacaaagaatttgattctttagatgaagggaagctcacacaatttaaagcaacgattgtaagtagagaaaacttaacaaaaatttcacaagatatagggctatcaaagtttatttttactggtaaaggtgaagtattagaaggaaactcaatacttggaaacgctatagaggcgttaataggtgcagtttatctggattctgattactcaaaagcatatgcagttttagacaagattttaaaagaaaatcttttaaatctggaagagggtactgatttaaaagatcctaaatcaaagcttcaagagctactccaaaa

SEQ ID NO: 259759 - DNA, 581 bp, Unknown
  Bacterial polypeptide expressing nucleotide sequence isolated from the Sargasso Sea
aagttataacccagtagagaataacgaaaaattggagtttttaggtgatagagttttaggtttgattatatcacaaaacttactcaaattttttcctaatgacaaagagggtgatttagacaaaaaattagcttctctagtaaataaaaaacaatgtgcagtaatcgctaaagaaataaatcttcaagaatatattttaataaagaattccaatagtaaaactaatatcgaaaataaagttttatctgattgtttagagtcagttattggttgtatttatttggatcaaggtttagacgtagcagaaaaatttataactaaaaattggcgaaaatatttaaataaaagtctaattaccgaaagagattcaaaaacaaaattacaggagtattccttaaaaacttacaaattacttcctatttacaaattattagataataaaggaccaaggcataaaccattaataaaagtatcagtaaatataaaaaattccaaaaatattacagcaactggaaactcaaaaaaagaagcagagcaaagagctgctaaaaaacttttaaaaagtttacaactatcatgat

SEQ ID NO: 259760 - DNA, 437 bp, Unknown
  Bacterial polypeptide expressing nucleotide sequence isolated from the Sargasso Sea
aatggaaaaaaaaattaaagaattagaaaaaatcttaaaatataattttaaaaaaactttgttattagaaaaagctcttacacacaaaagttttgacaacaataataataatgaaaaattagaatttttaggtgatagagttttaggtttggttatttctgaaaaattgttagaaaaatttcctaatgaaaaagagggtataattgataaaaaatttgcaaatttagtaaataagaaaacatgctcaatgattgctaaaaaaattaacctaaagaaatttattttattaggatcctctcataaaaaaattgaaagatctgcagataaaattaacagtgattgtttagaagcaatagttggagcaatatatttagacggtggacttagatcagtagaaaaatttatattaattttttgggaagaatatttattaaaat

SEQ ID NO: 259761 - DNA, 601 bp, Unknown
  Bacterial polypeptide expressing nucleotide sequence isolated from the Sargasso Sea
ttgaatagatataatgtttattataatgtgcaaaattttgaaattttcaaaagagcatttgttcataaatcatatgtaataccttctaaattgaatgatgatgttaaattatcgttaaaacctccaaattgtattgatttgtgttcccgttcaaatgagcggttagaatttttaggagacggtattttagaaaatgttacaaaattttatttatataaaagatttccggaacaagatgaggggtttatgacagaaaaaaaaattgcattggttaaaaatgatcatattggttatttagcatataaaatgggattgaacgattattatttgttatcgaagaatgcagaagaaaaaaaaacgagatttaattataaaaaattaggatgtttatttgaagcatttttaggcgcactttttttagatgcaaataatatgactttatcggataataatggatatttgaataattattttaattgtggtattgggtttcaggtttgtcaaatatttcttgaatctatatttgaacaattagtagattggaacgaaatgctggaaaatgataacaattataaaaatatttttcaggtgatgatacaaa

SEQ ID NO: 259762 - DNA, 349 bp, Unknown
  Bacterial polypeptide expressing nucleotide sequence isolated from the Sargasso Sea
atggacaaccaattcaataagaactgtgagacgctttgctcacaaatcgagtatcaatttcagaacgaggaactgctgcatctggcattgacccataaatccttcaccgaatttaaatcaaaatccggacagaggaacaacgagaaactcgagtttttgggagacgcggttctggacatggccatttccgagcttttgatggaccgttttcctgaattggacgaaggcggtctttcaaaattcagggcaagtcttgtcaacgaagatggtttggcccacattgcccggaagatggacctgggaaaatgcctgaggatgggaaaaggggaggacctttcaggaggtcggg

SEQ ID NO: 259763 - DNA, 430 bp, Unknown
  Bacterial polypeptide expressing nucleotide sequence isolated from the Sargasso Sea
gatggacaaccaattcaaaaagaactgtcagacgctttgctcgcaaatcgagtatcaatttcaggacgatgaactgctgcatctggcactgacccacaaatccttcaccgaatttaaatcaaaatctggacagaagaataacgagaaactcgagtttttgggagacgcggttctggacatggccatttccgagcttttgatggaccgttttcctgaattggacgaaggcggtctttcaaaattcagggcaagtcttgtcaacgaagatggattagcccacattgcccgaaagatggacctgggaaaatgtctgaggatgggaaaaggggaggacctttcaggaggtcgggaaaaatcctcattgctggccgatgcattggaagccgtttttgcggcgatttacctcgatagcaggaaagctggaggcttt

SEQ ID NO: 259764 - DNA, 577 bp, Unknown
  Bacterial polypeptide expressing nucleotide sequence isolated from the Sargasso Sea
taatcgaaatgaaaataatgagaagatagagtttcttggtgatagagttcttggattggtgatagcaaaaaagcttttagaaatttatcctgaggaaaaagagggtattcttgataaaaaatttgcatctttagtgaataaaaaaacttgtttagatatagccaaaaaaattaatctatctagttatgttaaaacatttaatcccaacaataaaaaaataaaaattgaggacaaaattatatctgatagctgtgaagcattaattggtgctatttatcttgataaaggttttactattgtagaaaaaaaaattttagacttatgggaagatcatattgaaaaaagtgtagttacagaaatagatgcaaaaacaaagctacaggaactaactttaaaaaactttaaaaaattgcctacgtataaattgatttcaaatataggtccaagacataaacctatattcaaagttggagtaaaattacctaatacaaaatattttatagctactggaaaatcaaagaaagaagctgaacaaaatgctgcaatagaatgtttgaaaaatacaaataaaaaatga

SEQ ID NO: 259765 - DNA, 244 bp, Unknown
  Bacterial polypeptide expressing nucleotide sequence isolated from the Sargasso Sea
cttgagtgactgtttagttgtggagataaatattactgacaattcaatcaaacttgagcaaatcttaggctacgaatttcaaaacaaagctattttgaatctctcgatagttcactctagcatcgtgaaaaaaagactggaatcaaatgaaagacttgaatttctaggtgatagagttttgggtttaataaaaggggaaatcctatatcaaactttccctaacgaagtagagggccagttaggc

SEQ ID NO: 259766 - DNA, 164 bp, Unknown
  Bacterial polypeptide expressing nucleotide sequence isolated from the Sargasso Sea
gctgcgcgcgctcacccatggcagcttcaacggcacagtttcagcgaagaacgctcaaccggccgccggtgattatcagcgtctggagtttctgggcgaccgggtgctggggcttgccgtcgccagttggctctacagcgccggtgctgcgcccgaaaggcagc

SEQ ID NO: 259767 - DNA, 281 bp, Unknown
  Bacterial polypeptide expressing nucleotide sequence isolated from the Sargasso Sea
aatgaaacgtcttgctttgcttgaagccgctatcggctactccttcaaagacacaggcttgcttgagcaggccttgacccatcgtagccacagcgctcgccataacgagcggctggagttcctgggggattcggtcttgaacttcacggttgcggccttgttgttcgaccgttttcaacgcattgatgaaggcgatctgtcccgcctgcgagcgaatctggtcaaacaggctgctctggcggaaatcgcaacccgtctgggcttgtcggattatttgcgtc

SEQ ID NO: 259768 - DNA, 579 bp, Unknown
  Bacterial polypeptide expressing nucleotide sequence isolated from the Sargasso Sea
gttataatccaattgataataatgaaaaactagagtttttaggtgatagagttctaggtttaatcatatctcaaaacttacttaaattttttcctaatgataaagagggtgatttagataaaaaattagcatcccttgtaaataaaaaccaatgtgcaaaaattgcaaaagatatcaatcttcaagattatatatttattaagaattctaaaaataatactaatattgaaaataaagtcttatctgattgtttagagtcagttattggttgtatatatttagatcagggattagatatagcagaaaaatttataattaaaaactggcgtaaatatttaaacaaaagtcttattactgagagagactcaaagacaagattgcaagaatactccttaaaacattataaattacttcctgtttataaattaatatataacaaaggaccgagacataagcctttaataaaagtatctgtaaaaataaaagactctaaaaatataatagcaattggaaattcaaaaaaagaggccgagcagaaagctgcaaaaaaacttttaacatccttaaaactttcatgat

SEQ ID NO: 259769 - DNA, 558 bp, Unknown
  Bacterial polypeptide expressing nucleotide sequence isolated from the Sargasso Sea
tctggattaccagtttgaaaatttgggcattctacgtcaggcattaacacacaagtcttatctgccctcggaatctggtttgaatttaggaaacaacgaaagaattgaatttctgggtgatgcggttctcgaccttgtaatcagcgaaatgctgatgcaagaattcccggagctagacgaaggcggactttctaaattcagggcaagtctggtgagtgaatcaggactatgcaaacaggcacgtgccttggaattaggtgattgcctgcttcttggtaaaggagaggaattaaccggaggtcgggaaaaaacttctttgctttctgacacatttgaagcagttatggcggccatttatattgatagtagagagaaaaatggtctctcggagattgcacgagtaattcgaaaattgtttttgcctcagttgcccaaaaatgccgagggttatattactcgagattataaatctgaactgcaggaacacgttcagaaaattacgggcttaccctccacatacgaacttgttaatgaaacaggtccggatcatcaaaaagt

SEQ ID NO: 259770 - DNA, 531 bp, Unknown
  Bacterial polypeptide expressing nucleotide sequence isolated from the Sargasso Sea
atagagttttgggattaattatttcaaagaacttatataagttatttccaaaagataaagaaggtgatcttgataagaagttagcatcattagtaaacaagaaaagatgtgttgagatttctaattatttatctctgaaggattatgttttggttggcgacaataaagataatttaaaaatagagaataaaattttagcagatacagtagagtctattgtaggagcattgtatttagatcaaggattagaagtaactgaaaaattcattttgaattactggaaaggatttttaaatgaaaaattaacaatttatagagatccaaaaacaatgcttcaagaatattctcttaaattatataaaactctcccagtttataatgtattagaaaataaagggccaagacataaacctgttataaaagtttcagtcaaaataaaaaattcaaaaaaatatttgggaattggtaattctaaaaaagaagccgaacagaaagctgctttaaaattattggatacttttaaaaaatgaa

SEQ ID NO: 259771 - DNA, 619 bp, Unknown
  Bacterial polypeptide expressing nucleotide sequence isolated from the Sargasso Sea
atgattaataaaaaaaaaattgatcaacttgaagaaatcatctcttatagatttaaaaataagaaattaatacaaagtgctctaattcatccaagttatatctctgaaaataaaaaaaaaataataaaagaaaccagtgattttgaaagattagaatttctaggagatagagttttaggtttagccatatcatcaattatttataaaaagtttaataaaaataacgaaggagatttgtctaaaaaattatcatacttggttcaaaaaaattttctacataaaatttctgtaaatctaaaaatagatcgttttttaaaattttcctctaaaaaaaatgaaaaaatgaatatttcaattttagccgactctatagagtcattaataggagcattgtttttagatggtggatttaaaaatgcaaaaaaatttattgagtctacttgggggccttacttaaatattgaagataaatacatgcaagatccaaaaactaaattacaagaactttcgcaacaaaaattaaaaaaactaccagattacaatttaattaaaaaagaaggaccatctcattcaccaacttttaaaatatctttaaaagttcttaatttaagaaaaatta

SEQ ID NO: 259772 - DNA, 690 bp, Unknown
  Bacterial polypeptide expressing nucleotide sequence isolated from the Sargasso Sea
cttggaggttggatcgatttttaaaggctacctcgtgagaaataaggaaaaacagaatattttatgtgaaacccttcgataccgatttaaggattcaactttgctaatgtcggcacttactcactcatccctaaataagcctaaccaaccagacaatcaaaggcttgaatttctcggtgatagagttctggccttagttatttctgaagaactaataaagactaacccgcatgccagggaaggacagttagctccacaattgaatgccttagtaaggagagagacatgtgcggaggtggcttcatcccttggagttggacctgcgttaatgataggaaaatcagagatgatatcgggtgggcgttcgaaggtagctatattggctgacgcgatggaggcaatagtcgcggcgatttatttagatggggggctggagaaggttcgcaaatttatactacaggcttggcaagaaaaattgttaattgctccaatagcctcctttgaggctaaatcttatcttcaagaatgggctcaggctcgaggaatgtctcctccaacctactcagaggttgaaagatctggtccagatcatgcacctatttttatggttaaagtgatacttgataatggtgagtttgcgtatggacaggcttctgcaaagagacctgcacagcaacaagcggcaaaaaa

SEQ ID NO: 259773 - DNA, 640 bp, Unknown
  Bacterial polypeptide expressing nucleotide sequence isolated from the Sargasso Sea
ttatgatcctaatgtcctaaggcaagctcttactcatgccagtttagagcgttcttcttggaatgtttacgagcgattggagtttcttggcgatagggttttaggtttagtcgtctcagagactctattgaaaaggtttccaaacgaaagagaaggtcagatttctaggcgttatgctaatttagttaagagagattccttggcagttgtcgcgcgtaaaataaaatttggggattatctgctaatttccgctggtgaggaagccgcgggtgctagagagagtttaacaatcctttccgatgcattagaggcagtaattggtgcactctattgggatggtgggcttgaaatcgctagacaatttatactagagcattgggaaccattattggcattggacgaagagcccccggtagattcaaaaacagctttgcaggaatgggcgcaacggcgacaatatgcgctccctgaatatagggttatttcgcaggaagggcccgcacactctcccaaatttctgattgaggtatatttgggaaaatttgagccacaaaaaggttacggaacttcgaaacggcaagcagagcagatggcggctaaatctcttctagctgaagtgttaaagggacaagaatgttag

SEQ ID NO: 259774 - DNA, 685 bp, Unknown
  Bacterial polypeptide expressing nucleotide sequence isolated from the Sargasso Sea
tatgaaaagtaaattaaaatatataaataccttagaacaaaaaattaattataattttaataataaagatttgttagaagaagcattaacccattcaagcttcaaaaataaatctaattcaaatcaagaaagacttgaattcttaggtgacagagttttaggtcttgttattgcggaattcctgtttcaaagttttttaagtgaaagagaaggtgttttgactaataagtttcgttacttaatccaaaataaacaatgcacaaagattgcggaaaaattagatattgctaattatcttcagtttggtaattctgaaaaaaacaaaataactaattcaattttagcagactccatagaggctcttttaggagctatttatttggatgggggatatgatgagtctaaaaaagtaatcttatctttatgggatgaatatttgaataatgatgaaatgcttaatgcaactgtgagttcaaaaaatatcttacaagagtatttgcatgctaatagtttaacagaagccacttatttagttatttctaaagatggagaagatcataatcctaactttctagttgaggtctctgtagataaggttggaaaagcagacgcttttggaaaatctataaaagaggcagaaattaatgctgctaaaaaatttattgatgagtttgaaattggataa

SEQ ID NO: 259775 - DNA, 376 bp, Unknown
  Bacterial polypeptide expressing nucleotide sequence isolated from the Sargasso Sea
aatgcaaaaagtcacctccatttctgactactgctttaatgatgtcgatttgttgctggaagctttaagccatccgtcactcgaccgatcagccagttatcaacgattggaatttctcggtgatcgtgttttgggattggttattgcggaggcgctgttcaaagagtttcctgatgaagcggagggagcgctgaataatcgtttaagcgctctcgtacgacgggaaacggttgcggaagtcgctcttggtcttggcttagatcaactcattatcttgtcagaaggcgctgatcttgaagggacacgtcaaaagcaatcagttttatgtgatgttggcgaagcggtcattggtgccatttttctggatgggggtctt

SEQ ID NO: 259776 - DNA, 679 bp, Unknown
  Bacterial polypeptide expressing nucleotide sequence isolated from the Sargasso Sea
aatgagcgcgagcggtctgctgcggcttgaggaccgtctgggctacagattccagaatccggccttgctgcaacacgcgctaacccacgcaagcaccaccaccgatcggctacaatccaatgaacgcttggagtttcttggcgatcgggtgctcgctttgatcatagcagacatgctgtttgaaacctttcccgatgagccagagggcgatttgggatacaggttcacggccttagtacgacgcgaatcgcttgcacgcgtcgctcaggagattaatttgggcatcagcatcgccatgtccgacggtgagcgggaaaccgggggcgcggacaagaatggtttgttagcgaatgcctgcgaggccgtaatcgcggcgatttaccaagatggtggcctgacagcagcgcaacaattcgtggaacgctattggagcccgcttctggctgagcagcattacccccgcaaggacccaaaaacagctttgcaggaatgggctcaggccaaaggtcatgcgctgccgcgataccagacggtccatcggagcggccccgaccatcagcctatgttccgggtcgaggtacgcatcggcgaaagtgcgccagcgtggggagaggggacgtcaaaacgggccgccgaacaggcagctgcagagcaattgcttttggtaatggacacatga

SEQ ID NO: 259777 - DNA, 739 bp, Unknown
  Bacterial polypeptide expressing nucleotide sequence isolated from the Sargasso Sea
atgtcctcaccggaagtgaacaaagctgacaagctgcgggaatggctggatcaacaggcgctggatgtcatcaacacagaaccgctgcaggaagcgctgacccacacctctgctggtctatccagtaatcacgaagaactggagtttcttggagatgccgtgctgcggctggcggcaacgcaatacttacgtcaacaccagggtgaactcagtgtcggccagaagtccgagctgcgggcatggctggtcagcgatcgctggcttgcgatcttcggtgatcagatcggtttgctggagctgatcgaaatgggtgagaaggggcgtcatgacaccaccgccaccaacacgatcctggcggaaatcaccgaagcgatgatcggcgctgtgttcaccagctcggggatcgataccgtcctcacctggctcactcctcactggaacagctcaagtgcggagatgctgcgccaccctgaacgtttcaacagcaaatcgagccttcaggaatacagccagggtctcgggcacggcctgccggtctatgccactgagcagatcagccaacaccatggcgacccgcagcggtttcggagcatcgtctccgtggccggggaaacgagcgccgaaggattcggaaaatcccgtaaggatgctgagcagcaggccgccaaggaagcactggctctgatccggcatcagagctcagcagcaacatcaacgtcgagcgatgtcccgcaatgat

SEQ ID NO: 259778 - DNA, 727 bp, Unknown
  Bacterial polypeptide expressing nucleotide sequence isolated from the Sargasso Sea
gatggacaaccaattcaataagaactgtgagacgctttgctcacaaatcgagtatcaatttcagaacgaggaactgctgcatctggcactgacccataaatccttcaccgaatttaaatcaaaatccggacagaggaacaacgagaaactcgagtttttgggagacgcggttctggacatggccatttcagagcttttgatggaccgttttcctgaattggacgaaggcggtctttcaaaattcagggcaagtcttgtcaacgaagatggtttggcccacattgcccggaagatggacctgggaaaatgcctgaggatgggaaaaggggaggacctttcaggaggccgggaaaaatcctcattgctggctgatgcattggaagccgtttttgcggcgatttacctcgatagcaggaaagctggaggcttctccaaagtttccaaaatcatcaatgatctctactctgatgaattgccggatcaggttgattccttcatttcaagggattacaaatcagaacttcaggaagtggtgcagaaaagcctgaatcttccagcaaattatgagctgatcaatcagttcggcccggatcatcaaaaagagtttgagatggtggtcaaagtggaagagcgcatcctcggcaggggaagggggtttagcaaaaagcaggcgggacaggccgcagctcaggacgccctggtccgcatgcaaaacgaatctgaatga

SEQ ID NO: 259779 - DNA, 236 bp, Unknown
  Bacterial polypeptide expressing nucleotide sequence isolated from the Sargasso Sea
catgcccctatctccgttggaaagccgtctgcgctacgaatttcgcaatgcggaattgttgcgccaggctttaacgcaccgcagtcatagttccacgcataacgaacggctcgagtttctcggcgactccgtcctgaattgcgcggtggctgcgcttttgttcaacgtttcggcaaactggacgaaggcgatctgtcgcgcgtccgcgccaatctggtcaagcagcagtcgctcta

SEQ ID NO: 259780 - DNA, 670 bp, Unknown
  Bacterial polypeptide expressing nucleotide sequence isolated from the Sargasso Sea
atgaaaattaactatcagagtttagaaaaaaaaattgatataaaatttaaaaataaaggtctacttattcaagctcttacacataaaagttttaacccaaatgaaaataatgaaaagatagagtttctgggtgatagagttcttggcttggtgatagcaaaaaagcttttagaaatttatcctgaggaaaaagaaggtattcttgataaaaaatttgcatcgttagtaaacaaaaaaagttgtttggatatagcaaaaaaaatcaatttagctagttacattaaaacatttaatcccaagaataaaaaaataaaaattgaggacaaaattatatctgatagctgtgaggctttaattggtgctatataccttgataaaggttttacacttgttgaaaaaactattttaaatttgtggcaagatcatattgaaaaaagtgtggtaactgaaatagatgcaaagacaaagttacaggaactaactttaaaaaactttaaaaaattacccacttataaattaatttcaaatactggcccaagacacaaacctatattcaaagttggagtaaaattgcccaatacaaaatattttatagctactggaaaatcgaagaaagaagctgaacaaaatgctgcaatagaatgtttaaaaaatacaaataaaaaatgaa

SEQ ID NO: 259781 - DNA, 556 bp, Unknown
  Bacterial polypeptide expressing nucleotide sequence isolated from the Sargasso Sea
atggataatatttcttccaatctcggctacgtctttacagataaaagattaatcgaattagcccttactcacaaaagtttctctctagagaataatgaacgattagaatttcttggggatgctatattaaatctttatgtttccgaaaagctttatgcttcttatgaagatctcaatgaaggtaagctaactcgatttaaagcaagcattgtaagtagagataatttaaatttagttgcacttaacctagaaattgcagaagaaattaagttaggaaaaggagaaaaattggatggaaactcaatattaggtaacactcttgaagccctaataggagcagtttttcttgactcaaactttaataagacaaaaaaagtattagataatttatttagtaataattttaatgatcttaataaaattgacgaactcaaagatcctaaatcctgtctacaggaactcatacaaaagaaatacaaatcactgccaagatattcttcaaaagagaatacttcattaagttacaaaatagatttgaagctacatgttatgtaga

SEQ ID NO: 259782 - DNA, 670 bp, Unknown
  Bacterial polypeptide expressing nucleotide sequence isolated from the Sargasso Sea
aatgaaaataaactttcagagtttagaaaaaaaaattaattttaaatttaaaaataaagatcttcttatacaatcattaacacataaaagttttgacccaattaataataacgaaaagatagagtttcttggtgatagagttcttggtttagtcatagcaaaaaaacttttagaaatttatccaggagaaaaagagggtattcttgataaaaaatttgcatcgctagttaataaaaaaacatgtctggatatagcaaaaaaaatcaatttagctagttatgttaaaacatttaaccccaacaataaaaaaataaaaattgaggacaaaattatatctgatagctgtgaagcattaattggtgctatttatcttgataaaggttttacaatagttgaaaaaacaattttaaacttgtggcaagatcatattgaaaaaagtgtagttacagaaatagatgcaaaaacaaagttacaggaattaactttaaaaaactttaaaaaattacctacttataaattaatttcaaatacaggtccaagacacaaacccatatttaaagttggagtaaaattgcccaatacaaaatattttatagctactggaaaatcaaagaaagaagctgaacaaaatgctgctatagaatgtttaaaaaatacaaataaaaaatga

SEQ ID NO: 259783 - DNA, 621 bp, Unknown
  Bacterial polypeptide expressing nucleotide sequence isolated from the Sargasso Sea
tgctgattgaggctttaacgcattcatctatagcttcggaatctagaaaagataatcagagattagagtttctaggtgaccgtgttcttgggctcgttatggctgaagctctattggagattgatcgattagctcctgagggaactctcgcaccaagatttaatgctttggttcggaaagaaacgtgtgctgaagtcgctcgccaaatcgatctaggtagtgttctaaaaataggtaggtccgaaatgctttcaggaggccgcagaaaggatgcattactcggggatggtatggaggccgtgattgctgcgatttacaaagatggtggttttgaagttgccaagaaaatagtaattgagctttggggtgatcgtatcaagaatgtaaaaggtgacgctcgtgatgcaaaaacgatgcttcaagagtgggcgcaggccagaggccaaagcccccccaaatatgagataatgtcgcaaagtggtccggatcatgcaccagattttcttgtaaaagtaatattggattcaggagaaactgcacatgctttagctgggagtaaaaggcaggcagagcaaatggctgctaaatccttactgcaaactatgggagaactaatttaat

SEQ ID NO: 259784 - DNA, 577 bp, Unknown
  Bacterial polypeptide expressing nucleotide sequence isolated from the Sargasso Sea
atcagaacctagaaagaattatgaacgtcttgaatttttaggagatgcagttattgacataataattagtagagaactaatgcgttattatcctgatggtgatgaaggattgttaactaaaaaaaggtctgcactggtacaacagtcttttctaactaacatcggaaatatgttaaatattatgaactatttaattgttgaaccaaatgtagatctaaataatgaaaaagtagctaataaacaacaagcaaacttagtagaagcattgataggagctatataccttgatggagggattaaacctgcaaaaaaaatcattatagatacaatttggaaaaataggaatgaagcctggaaaacaattaattataaaggacaattaattgagtattgtcatgctaatggaattaataatccaaagttccatttggtgaatgcttcaggccctgatcatcaaaaaactttcgaaatacatgtaacaattaataaagagaaatacccaacaggtattgggactgataaaaaaactgccgaacaatcagcagcccagaatgctctgatacgacttactaaataa

SEQ ID NO: 259785 - DNA, 670 bp, Unknown
  Bacterial polypeptide expressing nucleotide sequence isolated from the Sargasso Sea
atgaaaattaactatcagagtctagaaaaaaaaattaatttaaaatttaaaaataaagatctacttattcaagccctcacacataaaagctttaatccaaatgaaaataatgaaaagatagagtttctgggtgatagagttcttggtttagtgatagcaaaaaaacttttagaaatctacccaggggaaaaagaaggtattcttgataaaaaattcgcatcgttagttaataaaaagacgtgtctggatatagcaaaaaaaattaatttagctagttatgttaaaacatttaatcccaacaataaaaaaataaaaattgaggacaaaattatatctgatagctgtgaagcattaattggtgctatttatcttgataaaggttttataattgttgaaaaaactattttaaacttatggaaagatcatattgaaaaaagtgtaattacggaaattgatggaaaaacaaagttacaggaactaactttaaaaaactttaaaaaattacctacttataaattgatttcaaatacaggtccaagacacaaacctatatttaaagtcggagtaaaattacccaatacaaaatattttatagccactggaaaatcaaagaaagaagctgaacaaaatgctgctatggaatgtttaaaaaatataaataaaaaatgaa

SEQ ID NO: 259786 - DNA, 694 bp, Unknown
  Bacterial polypeptide expressing nucleotide sequence isolated from the Sargasso Sea
aatgataaggaaaattcaaaatataaataatttagaagataaaattaactataagtttaaagacataaatttacttgaagaagctctaacccattctagttttaaaaataacacaaaatcaaatcaagaaagattagaatttttaggtgatagggttctagggcttgttattgctgaatatttatttcaaaattttattagcgatagagagggtcttttaactaacaaatttagatatttaattcaaaataaacaatgtacaaatattgccaagaaaatagatattattaattacattcagttcggtagttctgaaaaaaacaataaaaagacaataagcgattcaattttagctgactctgttgaggctcttttaggagctatttatatagatggaggattgaataaatcaaaaaaaattattttatcgttatgggatgagcatttaacaaatgaagaaaccctaaacgcaaaagtaagcgttaagaacatattacaagaatatctacatttaaataacttttctcaagcctcatatttggttatttctaaagatggtcaagatcatgaacctaattttttagtagaggtttcagtgcttgaaatcggtaaagcaaaagctcatggaaaatctataaaagatgccgaaattaatgctgctcaaaaatttatagaagagtttaatattgggtaa

SEQ ID NO: 259787 - DNA, 1651 bp, Unknown
  Bacterial polypeptide expressing nucleotide sequence isolated from the Sargasso Sea
tctggaagcaggccacggatattccgtcgcgcaccatggacacgcacgtgtcgatgctgcgcagcaagcttggcttgcgcccggagcacggctaccgtctgacgccgatctatggctatgggtaccggctcgagcggatcgaatccggcacgccgccggcggtggccgaacagccgcgccccgaagcgggggacgcgtgacggtttctttcgaggcggtggcgcccggttgcgcaggcttaccggggcgccgtgccggcgcgctgctggctgcggccggcctgatcgcgctgacgtgctttgcgccgctgtcggcggaagcgcaatcgtcccgcgcgccgaagcaacgcacccgaacgacggcgccggcttacgtgtcctatgtgacccacgagggtgacacactgtatgaaatcgctggccgctatctacgcgacgccggcgattgggccatgttgagtcgtttgaatcatgtgcccgcaccacgccgcatgccggccggaatctcgctgcggctgccggccgaccggctcaaacaggatcccgagtcggcccgcgtgatcgcgacgagcgggccggccgaacgcgcttctggcaatagtccttacacaccgctcgcagctggcacgacgcttggcgagggagaccgcatccgcacgggccacaacggttttgtcacgctggagttgccggacggctcgcacgtcaccatgtcgccggacggcctgctcgatatcgacaagctgcggcgcaccgtgctgaccggctcgggagatcgcgtactcggtctgcggcgcggcgaagtcgccagcgaagtcacgcatgccaccaaaaaggacgaccgcttccagatccgttcgccgtcggttgtagccggcgtgcgcggaacgcgcttcaaggtcgcctatgacggcgacgcgcaaaccaccgcagtggaagtgctggacggcgcggtcggcgtcgatccggccgcggccggcggcaaggcctatgcgccgccacccggtgtgccgctgcaggcgtccgcgcaactggtcaaggcacgctttggcagtgtcacgcgggcaggcagcgcgattggcgcgccggttgaattgctgcccgcgccggcgctcgtcgacccggccaaagtacaggacggcaaaaccgtcgctttcgacctcgtacccgccagccccgccgtggcttatcgcgtgcagattgcgcgcgatgccgatcagctcgatctgatccgcgatctgcgcgtgagtgcgccgcacgcggacttcggcgaactggccgacggcacctatttcgtgcggattgccgcgatcgatgccaacgggctcgaaggcttgccgcaggtatacggtttcgagcggcgtcaactgggtctggctgcgtcggcggccccgcgagccggcagccgcgattacgagttccgctggttcgtcagccgctccacggtcgaaacgcgctttcgcttcgtgctcgccacgagcgccgatctgcgtcatccgctcgtcgaccggaccgatctgagcggcggcgagatcgtggtaagcgatctgtcgggcggtgtctattactggacggtcatcgccgagcagttcgagaacggccgcttctacgagaagagcagttcggtccgctcgtttacgcttgcacgctga

SEQ ID NO: 259788 - DNA, 652 bp, Unknown
  Bacterial polypeptide expressing nucleotide sequence isolated from the Sargasso Sea
aatgtctcttgatgatttaagtaaaaaaataggttatgaattcgcagatatcaaacttcttgaattagctattacgcataaaagtgctgacagcaaatccaataacgaaagacttgaatttttgggtgatgcaattctaagtacagttgtttcagaatatctgtacacaaaattcccttatcaaaaagaaggattgcttaccaggatgagatcacatctagtaaagggcgatacccttacaagaattgcatacaagcttgaactcacaaatttcataaagttatcaaaaggtactgctaatttatcaagtgagagaaaacaatcaattctggagggtgtagtagaggctattattggtgctgttatgcttgatagtaattgggagacatcaaaaaaatttgttttaaaacttcttaaaaaagaactatcaaaaatttcaattgataaagaatttcgtgattctaaaactgaattacaggaacttcttcagtcaaaaaaaattgaccctcctatttatgagaccacagaacttgatgatggctttaaatctagtattaaatatgaagacaaaatattcaaagccaaaggcaattctaaaagagatgcagaaagagaagtggcaaaaaaagctttaaaatttataaaaatataa

SEQ ID NO: 259789 - DNA, 76 bp, Unknown
  Bacterial polypeptide expressing nucleotide sequence isolated from the Sargasso Sea
tcctttcattatgaacgattagaatttttaggagatgcaatattagtgaagtgttatttctgcatttttatataaa

SEQ ID NO: 259790 - DNA, 670 bp, Unknown
  Bacterial polypeptide expressing nucleotide sequence isolated from the Sargasso Sea
atggatgttcaaattaataaacttcaaaaaattttaaatataaaatttaataatacaaatttattaattcaatctatcactcacaaaagttataattctgaaataaattatgagaaattagagtttttaggcgatcgtgttttaggattaattatatcaaataaattattagaactttacccaaatgataaagttggcatattagataaaaaattttcaaatcttgttaataaaaatatttgttatgaaattggtgttaaattaaaattaaatcattttgtattaataggtaattcaaaaaaaaaaattagtaatgtagaaaaaaaaattatttcagatatttgtgagtccataataggagcaatttatctagacaaaggtttaagagcagcaaaagattttattttaaatatgtggagtgaatatttgaagtcttcaaattttacaaaggtagattctaaaacaaagcttcaagaattctctcttaaaaaatataaatctcttcctatttataaaataatttctaatacaggtcccagacacaaaccaaactttaaagttggtgttaaaatcaaaaattcaaaatttacttattcaaatggctcttcaatcaaaaatgccgaacaatctgctgcctcgatacttttaaaaaatctaaacttattatgaa

SEQ ID NO: 259791 - DNA, 667 bp, Unknown
  Bacterial polypeptide expressing nucleotide sequence isolated from the Sargasso Sea
gatgaaaattgattattctaaacttgaaaaaaaaatagattataagtttaaaaatagaaatttacttgttcaaagtcttactcataaaagttttaataaaatgaaaaataatgaaaaaatagaatttttaggagacagagttttgggtttagttatcgcaaaaaaacttttagagatctatccagaggaaaaggaaggaattttagataaaaaatatgcttcattagtaaataaaaagacatgtttggaaattgctaaaagtattaatttgcaaaattatattttaatttttaatcctaaaaatagatcagttacaattgaggataaggtgatatcagatagttgtgaagctttaattggagctatttaccttgataggggatttaatataacagagaaaattatattagaattgtggaaagaaaaaataaaagaaagtgtgattactcaaattgatgcaaaaacaaaacttcaagaattttcattgaaaaagtttaaaagactgcctacttataaaataatctctaataccggcccaagacataggcctattttaagagttgctgtaaaattacaaaatacgaaattttataatggtgagggaaagtctaaaaaagaagcagagcagaaagcagctttactttgtttaaatgataatttgatttaa

SEQ ID NO: 259792 - DNA, 697 bp, Unknown
  Bacterial polypeptide expressing nucleotide sequence isolated from the Sargasso Sea
aatgataagtaaaaaaaaaattaaacaattagaggaaattatttcttataaatttaaagataagaaacttttagaaaatgcattaatacacccaagcttcattactgaaaacaaaaaaaaaattcttaaagaagttagtgattttgaaagattagaatttttaggtgatagagtattaggattggcaatatcttctataatttataaaaaatttaataaaaataatgaaggtgatttatcaaaaaaactttcatatttagtgcaaaaaaactttttgtataaaatctcaactaatcttgaaattgatagatttcttaaattttcatctaaaaaaaataataaaatgaatatttcaatcttatctgactcaatagagtcacttattggtgctttatatttagatggaggttttattagtgccaaaaagttcataaagtctacatgggaaccatatttagatattgaaaataaaaatatacaggacccaaaaactaagttacaagaactttctcagcaaaaactaaaaaaactacctgaatataaattagtaaaaaaagagggaccttctcactcacctacttttacaatttcattgaaagtattaaatttgaaaaaaattataagcagtggatcatcaataagagacgctgaaaaaaatgctgcatctattgctttaaaactaattaatgaaaagtaa

SEQ ID NO: 259793 - DNA, 451 bp, Unknown
  Bacterial polypeptide expressing nucleotide sequence isolated from the Sargasso Sea
atgattagatcctttttttttaaaaaaaaagaaagtttactatcctcaaattatctaaaatttttaaatgaagtccttggtgtttatccaaaagatgagaacctgtataaagaggctattacacatgcatcatttaaaaaaaacaaaaaaaacattaatgataacgaacgtctagagtttttaggtgacgcatttatttcattgataattggagaatatctttttgaaaaattccctaataaaaatgaaggttttttatcccagttaagagctaaaattgtaagtagagaacaactgaactcattgggtaaaaaaatagggcttgaagaacaccttttatttcaaaaaagcacaaacaaatacaaatctttaattggcaatgcctttgaagctctttttggtgctattcttttagatcaaggagttgtaaaagctcgagaaagattttcat

SEQ ID NO: 259794 - DNA, 221 bp, Unknown
  Bacterial polypeptide expressing nucleotide sequence isolated from the Sargasso Sea
gatggacaaccaattcaaaaagaactgtcagacgctttgctcgcaaatcgagtatcaatttcaaaacgaggaactgctgcatctggcactgacccacaaatccttcacggaatttaaatcaaaaaccggacagaggaataacgagaaactcgagtttttaggagacgcagtcttggacatggccatttccgagcttttgatggaccgttttcctgagttgg

SEQ ID NO: 259795 - DNA, 667 bp, Unknown
  Bacterial polypeptide expressing nucleotide sequence isolated from the Sargasso Sea
tttgaaaaaatatatcaaaaaagatttttcatatacattttttgaaaataaatttttaattgaagcatttactcacaagagtataagtaaaaaaaactacgagcggtatgagtttttgggagatgctgtactaagattatctattacgaaaaaactatatcagatgtatccaaaagcaagcgaaggtgaactttcaagagaggtccaaaggttgattagtaaagacacacttgcaggacttacatttacaaaaaaactactaggctttctggaacataaggatctagaattggaaaatttatcatcactgacgaaatcattatctgcagatcttattgagtcattaataggcgcaatttatgttgacagtaattttgaaacaatagataaaataatagtaaaaatttataaaagtttgttagataagaaagatgttatcgggaagaaagacccaaaaacaattctccaggaatatacgcaatccaataatctacctctaccagtatataatacagaaaaattatctggtccgccacattctccaaggtttcgagtttcttgtgtggttaataattcaagcgaaataagcacgctctgctcgacagttcaggagggacagcaacgagtagccgatataattctaaaaaaacttaagatggatgaataa

SEQ ID NO: 259796 - DNA, 661 bp, Unknown
  Bacterial polypeptide expressing nucleotide sequence isolated from the Sargasso Sea
atgaaggatatattttctaatattggatactcctttaaagattctagacttgtcgaggtagctttaactcataaaagcttctcctctactaataatgaaagacttgaatttcttggtgatgcgttaataaatctatatatttctgaaaggttgttcaaaacttacgatggtctggatgagggaaagttaacaagatttaaagccagtatggttagtagagataatcttaatttgatggcgtctaaactgaatatcggaagccttattaaattaggcagaggagaaaaattagaaggtaattccattctaggtaacacttttgaagccctaataggagccgtttttcttgattcagattattcaacaactcaaattgttttagataatttattcgatggtgatttcatcagcattgatgaagtagacgagttgaaggatcctaaatcacagttacaagaaattattcaaaaaaattataaatctctacccaaatattcagtaaaagaaatttccaatggctctattacagctaaatttgaggcaacttgctcagtaaaggaagctaatctaaaaagcaaaggagagggaaaaacaagaaaaagatcggaattagaagctgcggctaaaatgcttcagttattaaaaaataatgaatcctaaa

SEQ ID NO: 259797 - DNA, 273 bp, Unknown
  Bacterial polypeptide expressing nucleotide sequence isolated from the Sargasso Sea
gatggacaaccaattcaaaaaaaactgtgagacgctttgctcgcaaatcgagtatcaatttcaggacgaggaactgctgcatctggcactgacccataaatccttcaccgaatttaaatcaaaatccggacagaggaataacgagaaactcgagtttttgggagatgcggttctggacatggccatttcggagcttttgatggaccgttttcctgaattggacgaaggcggtctttctaaattcagagcaagtctttcaacgaggatggattg

SEQ ID NO: 259798 - DNA, 670 bp, Unknown
  Bacterial polypeptide expressing nucleotide sequence isolated from the Sargasso Sea
atgaaaattaactatcagagtttagaaaaaaaaattgatgtaaaatttaaaaataaagatttacttatccaagctcttacccataaaagttttaacccaaatgaaaataatgaaaagatagagtttctgggtgatagagttcttggtttagtgatagcaaaaaaacttttagaaatttacccaggggaaaaagaaggtattcttgataaaaaatttgcatcgttagtgaacaaaaaaacttgtctggaaatagcaaaaaaagtaaatttagctagttatgttaaaacatttaatcctaacaataaaaaaataaaaattgaggacaaaattatatctgatagttgtgaagcattaattggcgctatatatcttgataaaggttttacaattgtcgaaaaaacaattttaaatttatggcaagatcatattgaaaaaagtgtagttacagaaatagatgcaaaaacaaagttgcaggaactaactttaaaaaattttaaaaaattacctacttataaattaatttcaaatacaggtccaagacataaacctatatttaaagtcggagtaaaattacccaatacaaaatattttatagccactggaaaatcaaagaaagaagctgaacaaaatgctgctatagaatgtctaaaaaatacaaataaaaaatgaa

SEQ ID NO: 259799 - DNA, 361 bp, Unknown
  Bacterial polypeptide expressing nucleotide sequence isolated from the Sargasso Sea
atggtgaaaaaaattaatttttctttaatctattttataaaaaatctatttaaatcatattttttttctgagattgaaaaaaaatgtaattatcttttcaaaaataaaaattatctaatacaagcgttctctcataaatcaatctcaactaaacctagagataactatgaaagacttgagttcctgggtgatgcagtcattgatatagtaataagtagagaattaatgcgtgaattccctgaaggtgatgaagggattttaacccagaaacgttctgctctcgtacaaaaatcctttttagcatcaatgggaaagctattaaatcttctagattttattaatattgaatcgaccagttgat

SEQ ID NO: 259800 - DNA, 679 bp, Unknown
  Bacterial polypeptide expressing nucleotide sequence isolated from the Sargasso Sea
aatgcatatttcagacttagaaaaaaaattggggtattttttttctgattcttctttactaaccctggcgttaacgcataagagcttttcaagcaagaataacgaacgcctagagttcataggcgatgcggttttggggtatgtcatagcgactgatctctatagcagatataaggaacttcatgaggatgcattatcattaatgcgagtcgctttggtgagaggggacatgctgtcagaggtggccttagaatgtggtttgcctgatcatcttcttctaggtcctggagagctgaagagtggtggtcgaacaaggtcttcaatattggcggatgcattagaagcggtaataggcgcagttcacgaagatggcggaatagaggattgtaggaatctaataacaaatatttttggatcccggttgatgaatttggaacctgaaaatttgaaagatcctaaaacgcggctgcaggagatcttacagggcaataatgaggagctacctgtttatgaagttgagtccgtaaccggacaggaccacgaccttagctttaaagtgaagtgcagtttgccctccttgaatattgctcaatttggagaaggtgcatcgcgtcgactatctgaaaaaatcgcagctcaaaggattattgaagagctcgaagcgctaggcctaggataa

SEQ ID NO: 259801 - DNA, 661 bp, Unknown
  Bacterial polypeptide expressing nucleotide sequence isolated from the Sargasso Sea
atggataacatttcttccaatctcggctatgtctttacagataaaagattaatcgaattagcccttactcacaaaagtttctctttagaaaataatgaaaggttggaatttcttggagatgcaatactgaatctttatgtttccgaaaagctttatgcttcttatgaagatctgaatgaaggtaaattaactcgatttaaggcaagcattgtaagtagagacaatttaaatttagttgctctgaacctagaaattggagaaggaattaagttaggaaaaggagaaaaactggaaggaaactcaatcttaggtaacactcttgaggccttgataggagcagtttttctcgactcgaactttaataagacaaagcaagtgctagataatttgtttagtcataattttaaagaacttaacaaaatagacgaactgaaagaccctaaatcctgtctgcaggagcttatacaaaaaaaatacaaatctctaccaagatattcgtccaaagaaaatacggcatcaagtcataaaagcagatttgaagctacatgttatgtagatgaagccaaactcagatcaaatggaacggccaagacaaggaaaggcgctgagctagaggcagctgcaatcatgctaaaaatgatggaagataatgattcctaaa

SEQ ID NO: 259802 - DNA, 640 bp, Unknown
  Bacterial polypeptide expressing nucleotide sequence isolated from the Sargasso Sea
atgtctaaattgggttataactttaaagataaatctctattaaaaaaggctctaactcataaaagcctctcctctcaaaataatgaaagactagagtttctaggagatgccttattaaatttgcatgtgtcagaacatttatacagtaggtttgatagcctagatgagggtaaactcacgcaatttaaagcaaaattagttagcagagaaaacttaactaagattgcagaaaatttagaattatctagatttattagggcaggtaaaggagaaaagcttgtagacaactcgatagttggcaatactcttgaagcattaataggggcagtttatttagattctagtctctcaagagtcaatcaagtactcaataacttgctaaaagagaatttattgatattagaggagaacgcagatctaaaagatcctaaatcaaaactccaagaatacttacaaaaaaggaatctacaattaccaatctattccgttacattgaaaggatcaaaagaaaaaaaagtagattttaaagttttatgtgcagttaaagatttaaacatgaccactacaggcagaggtcaaagtcgaaagaaagcagaacttaattcagcagaaaagattctcgataaattaaaagtgtaat

SEQ ID NO: 259803 - DNA, 250 bp, Unknown
  Bacterial polypeptide expressing nucleotide sequence isolated from the Sargasso Sea
atgtacaagaagctatatgagaaaattaattattcttttaagaatgagaatattttagatcaagtatttactcataaaagttctggagaaaagaataatgagagattggagttccttggagatgcgattcttggagctgtaatatccgaggaattatataatcgattcacaaacatcaatgaaggagacttaacaagaataagagcagcccttgttaagggctcaactctaataaaaaaaggaaaagagc

SEQ ID NO: 259804 - DNA, 741 bp, Unknown
  Bacterial polypeptide expressing nucleotide sequence isolated from the Sargasso Sea
tatgaaaatttcaaatcacagagtagaagaaataattaattttattaaaggtctaaagttagatcaaaaatttcaaaaggagtttactaaagaaaaaataaaaaatattttatatattaatgaatcacttactcatagttccgcaaatagtgaaattaattatgaaaatcttgaatttcttggagacgcagttctaagactcattgcatcagatttcataaaaaataaatatccatatatgcaagtaggagaaagatctgaacttcgttcacatcttgtaagtgatctatggctagaagaagttggtaaaaaaatagaaatcaacagtgtattagtaattgggaataaagcccttagagataaatcagcaaacgcaactattcaagcagaagcaactgaagcattaataggagctttgtatgaaagccttactattgtagaacctataaaagattggcttattccattctgggaagaaaaaagtaaagaagttctagctgatcctcataagaagaattacaaatcagcacttcaagaattgactcaaagtaaaggcttatcaattcccatatataaaacaattgaaattgacaaaaagcatgacaatccaaaacgatttttttgtaatgtttatgtcaaaaaccgatcgatagctgaaggaagtggaaagtcaattaaacaagcagagaaaaatgctgccagtaaagcattgaagtatttcgagaacaatgtaattgatca

SEQ ID NO: 259805 - DNA, 174 bp, Unknown
  Bacterial polypeptide expressing nucleotide sequence isolated from the Sargasso Sea
attgcactataagtttaagaatattaaattacttgaacttgctttaattcataaaagttcaaataattctttaaataatgaaagattagagtttcttggagatgcaattcttaatgcagtcatatcgtcatatctttttaaaaaatttccaaatgaaaaagaaggattacttac

SEQ ID NO: 259806 - DNA, 268 bp, Unknown
  Bacterial polypeptide expressing nucleotide sequence isolated from the Sargasso Sea
aatggcgtggttaattgatatcattagttttttaaaatctcttctttcccctcctccctcacaccgttttatagaattaacaaaattaatttcatatcgatttaacaatattgattatcttgagcaggcatttacccatcgatcgatatcatcagaacctagaaagaattatgaacgtcttgaatttttaggggatgcagttattgacataataattagtagagaactaatgcgttattatcctgatggtgatgaaggattgttaact

SEQ ID NO: 259807 - DNA, 685 bp, Unknown
  Bacterial polypeptide expressing nucleotide sequence isolated from the Sargasso Sea
atgaaaagtaaattaaaatatataaataccttagaacaaaaaattaattataattttaataataaagatttgttagaagaagcattaacccattcaagcttcaaaaataaatctaattcaaatcaagaaagacttgaattcttaggtgacagagttttaggtcttgttattgcggaattcctgtttcaaagttttttaagtgaaagagaaggtgttttgactaataagtttcgttacttaatccaaaataaacaatgcacaaagattgcagaaaaattagatattgctaattatcttcaggttggtaattctgaaaaaaacaaaataactaattcaattttagcagactccatagaggctcttttaggagctatttatttggatgggggatatgatgagtctaaaaaagtaatcttatctttatgggatgaatatttgaataatgatgaaatgcttaatgcaactgtgagttcaaaaaatatcttacaagagtatttgcatgctaatagtttaacagaagccacttatttagttatttctaaagatggagaagatcataatcctaactttctagttgaggtctctgtagataagattggaaaagcagatgcttttggaaaatctataaaagaggcagaaattaatgctgccaaaaaatttattgatgagtttgaaattggataaa

SEQ ID NO: 259808 - DNA, 1228 bp, Unknown
  Bacterial polypeptide expressing nucleotide sequence isolated from the Sargasso Sea
atgccctcatcccagttggaaagccggctgcgctacgaatttcgcaatgcggaattgctgcgccaggctttgacccatcgcagtcacagtgccacgcacaacgaacggctcgagtttctcggcgattccgttctgaattgcgcggtggccgcccttttgttccagcgtttcggcaagctggacgaaggcgatctgtcgcgcgtacgcgccaacctcgtcaaacagcagtcgctgtacgaaatcgctcaggccctgaatatttcggacgggttgcggctgggcgaaggcgagctgcgcagcggcgggttccgccgcccgtcgatcctcgcggacgcgttcgaagccatcatcggggccgtgttcctcgatggcggcttcgaagccgcccaaggggtcatcaagcgcctctatatcccgattctcgatcacatcgatccgcgcacgctcggcaaggacgcgaagacgctgctgcaggaatacctgcaggggcacaagatcgcgctgccgacctacacggtggtcgcgacgcatggtgcggcgcacaaccagcaattcgaagtcgaatgcacggtgccgaagctcgacgtgaaggtgtcgggctccggtgcgagccggcgcgcagccgagcaggctgccgcgaagaaggcgctcgatgaagtgatggcggccgcgccgatgttggccgcaaagccgaagcgctcgaaaaacgcgcgcgggtcgaaacacgtcgaacccgaaatcgtgccgggcgtgaagggcgtgcaggaagcgctcgacctgcgctcgccggagcggaaggaacgcgcggcggcgcgcgaggcgagggcggccggtgcggcgcccgcggccaccgctgcgaccggtgccgagccggcagcggcgccgatggccgcgattcgcgcggcgcatgtcgacgcggcggcggaaaagggcgaacgggcggcgaagccggcggcggacaaggctgtcgacaagccggccgagcgagccgacaaggccgcggagaagcccgtggaagccgtgcccgctgcacgcgcagccgacaagccggctggccaggccgccgatccggcatcgtcgtccgccgacaagtcttccgccggtaccgactccgcttcgcgtgcggctgcgcgcacacgcgacaccgcggcaccggattccgagacgccgccgggcggcgcgagcctcgccgccgctcaggcgcgcgtggccgatgccgaccactgaa

SEQ ID NO: 259809 - DNA, 424 bp, Unknown
  Bacterial polypeptide expressing nucleotide sequence isolated from the Sargasso Sea
ttgatttctaaaaacaaacataaacagctcgaaagtaacatccaatatatatttaatgactcagatatattgactcgagcactgacgcatcgaagtcattctgcaaagaattatgaaagactggaatttctcggtgatgcagttttagatatggttttaagcgaaagactctataaagaattctcacaaatagaagagggcagattgagcagaatgcgagctcatctcgttaatcagagagcccttgctcagatcgctagagaaattgaattagatgattttcttatcctaggcaaaggagagagcacctcaggaaaaaacagagactcaatactctctgattcattggaggctctcattggaggggtgtatattgatggaggattcgagtcagcccaaatagtgattaaatgtcttttgaaaa

SEQ ID NO: 259810 - DNA, 445 bp, Unknown
  Bacterial polypeptide expressing nucleotide sequence isolated from the Sargasso Sea
ttgacttctagaaagaaacataaacggctcgaagataaaatccaatatatatttgatgattctcaaatattgtctcgcgcattaactcatcgcagtcattcgccagagaattatgaaagactggagttccttggtgatgcggtcctcgacatggtgcttagcgaaaagctctacaaccatttctcagaaatagaagagggcagactgagcagaattcgtgctcatcttgtaaatcaaaaagcacttgccgagatcgcaagaagcatcgagttagattctcatcttattttaggcaaaggagagaaaaccacggggaaaaatagagactccatactctctgattcgctggaggctattttagggggcgtatatatcgatggaggattcgaatccgttaagcttgtcattgagaatctctttgacaacgtgattgggcaaattaatc

SEQ ID NO: 259811 - DNA, 403 bp, Unknown
  Bacterial polypeptide expressing nucleotide sequence isolated from the Sargasso Sea
tttgatttctaaaaacaaacataaacagctcgaaagtaacatccaatatatatttaatgactcagatatattgactcgagcactgacgcatcgaagtcattctgcaaagaattatgaaagactggagtttcttggtgacgcagttctagatatggttttaagcgaaagactctataaagaattctcacaaatagaagagggcagattgagcagaatgcgagctcatctcgttaatcagagagcccttgctcagatcgctagagaaattgaattggatacatttcttatcctaggcaaaggagagagcacctcaggaaaaaacagagactcaatactttctgattcattggaggctgtcattggaggggtaaatattgatggaggattcgagtcagcccaaaaa

SEQ ID NO: 259812 - DNA, 355 bp, Unknown
  Bacterial polypeptide expressing nucleotide sequence isolated from the Sargasso Sea
ttgaaattattttataaaataaagaaatatattttaaatagcattttatctgcatcatctattgaaaaaaaaattaattatatttttaaaaataaagaatatctccaacaagcatttacccataaatcactagaaaatagtccgagatataactatgaacgattagagtttttaggtgatgcagtattggatattatagttagtcgtgaattaatgagggaatttcctgatggtgatgaaggactgctcactcaacgtagagcatctcttgttcaaaaaccatatttagcaacaatgggccatcttatagaactcatggattatttaaagattgataataatgttgatttaaata

SEQ ID NO: 259813 - DNA, 448 bp, Unknown
  Bacterial polypeptide expressing nucleotide sequence isolated from the Sargasso Sea
ttgattaaacatattcagagattctttaatcgaattaatatatcttctgaaattaaaaagtttgaaaaaaatttaaactatacctttaataatacatattatcttgaaaaagcactcacgcatagatctgttcagaatcattctaaaggtaattatgaaagactagagtttttaggggatgcaataattgatcaaaccgtctctgtttggctatttaaaaagtaccctgacgccgatgaaggtagtcttacaaaaaaaagatctgcattagtaaatagaattttcctgtcaatactgggtaaaaatcttgatgtaatgaacttcgtaaaaatagaacagagtgttaatacacaagatcctaaagtaatcacaaatatttcttcaaatgtatataaagcaattgtaggagcaatataccttgatggaggttttcaagaagcttcaaaat

SEQ ID NO: 259814 - DNA, 724 bp, Unknown
  Bacterial polypeptide expressing nucleotide sequence isolated from the Sargasso Sea
atgactactgaatcaacatttgaaaatataggtgaattagaatctcggttgggaattaacttccaaaataaagagtatttaaaattagcattaacgcatagttcattcgcgaaaagagatcctaatattgagttgccagataatgagagattagaatttttaggagatgcagttttaaaattagtgtcttcggaattgttttatgaagcttttcctgatcttcttgagggtacattgactaagtataggtcatttattgtttctgataaaacattagcattaattgcacatcattttgatataggagactttttattgttttcctatggagaacaaaagtctggaggtcctaataaagattctaacttagcggattgtgttgaggctattttaggagcgtattatttggatagtggtttagaaaaaagccgagagttatttatgtttttattaacatcagtgtttcctaattggaaaaacatgagttattttcatgattttaaatcaaaattacaagaatggatgcagcatgaagtatcaatggttccgcattatgacattacagatgaaaaagggcctgatcatgataaacttttttttgttgaagtgaaattaacgtataaaagtaagcaatattgtgggaaaggtaaggggaaatctataaaagatgcagaacaagatgcagctaaatcggtattaactcagttaggtgttttagaataga

SEQ ID NO: 259815 - DNA, 679 bp, Unknown
  Bacterial polypeptide expressing nucleotide sequence isolated from the Sargasso Sea
aatgacgaaagaagttgatagactggaacacgctttacattattttttcactgataagagtttaattctgactgctctgacccatcgtagctttggaaaaagcaataacgagcgtcttgaatttttaggagattcgattttaggataccttgtcgcagagaggctattccagcgtttcactgctgcgcctgaaggagcgctaagtcgcatgcgttcatcattagtgaatcaaactactttgtcttctatagctcgagaactagatttgggtggatgcttgcggctgggggatggagagaaaaaaacgggtggtgatcgcgattccattctggctgatgcgcttgaagcgctaatcgcagcaatctatttagattcaggtcttgagaactgtggcagagtggttgagtccttgtttgaatcgcgactacaggatgatattgaaattgttcaacaaaaagatcctaagacgcaactacaggaattttttcaggctcgaggtcataggcttccagaatattcagttgtcaaggtggaaggagaagctcacaaccagattttttatgttcaatgcagtgttgaaggcttcgcgaagaaagaggcatgtgttggcaggagtaaaaggtcggctgagcaagctgcagcaaaagaaatgctgaaatcgatagaagatgccaattga

SEQ ID NO: 259816 - DNA, 412 bp, Unknown
  Bacterial polypeptide expressing nucleotide sequence isolated from the Sargasso Sea
tgaactacttaacttagggcccggtgagctcaaaagcggtggtcatcgcagaagttcgattttagccgatgcagttgaagctattttaggggctatttacctcgattccggtatggacgaggtacgaggcgttatagaccgtttatgggaaacccgcattaacaaactagaccctaatgcccaccctaaagacagcaaaactcgtcttcaggagtttttacaaggtcgtaaacaagcgctaccaacctatgaagtgctgtctatttcagggaaagatcatgctcagacttttgaagttagctgtcaggtagaaagtctaccagaagcggtagtggcgtctggcaatagccgtcgaaaagcagaacaagaagctgctcgtttaacattggagaagcttgatgacaacgcatga

SEQ ID NO: 259817 - DNA, 643 bp, Unknown
  Bacterial polypeptide expressing nucleotide sequence isolated from the Sargasso Sea
aaaatgtggctatcgcttcaaagatagatcctatttagatcaagcattttcacatagatccatttcaacaaaacctcgagagaactatgaacggttggagtttttaggggatgcagttattgatattgttgtcagtcgtgagctaatgcgagaatttccagaaggcgatgagggtatcttaactcaaaaacgctccgctttagttcaaaagtcttttctttcatcaatgggccaattactcaacttattagattatattaaaatcgaatctaatgttgacctagcacaagaaaagattgctttaaaacaggcagctaatctctacgaggcacttgtgggagcgatatatcttgatggtggcttagaaaacgcaaaaaaagttataataaatacaatatgggctcacagggaacatgcttgggaatccgttaattttaaagggaagctgattgaactatgtcatatcaaacaaatggagaacccaaaatttcttgtatcgaatgtttcgggtcccgaacataagaaactttttgaagtgacagtgaaaattggaaatgatatttatcccagtggcattggatcaaataaaaaaacagcagaacaacaagctgctcaactagctattgactcaattagtagctaa

SEQ ID NO: 259818 - DNA, 439 bp, Unknown
  Bacterial polypeptide expressing nucleotide sequence isolated from the Sargasso Sea
tttgatttctaaaaacaaacataaacagctcgaaagtaacatccaatatatatttaatgactcagatatattgactcgagcactgacgcatcgaagtcattctgcaaagaattatgaaagactggagtttcttggtgacgcagttctagatatggttttaagcgaaagactctataaagaattctcacaaatagaagagggcagattgagcagaattcgagctcatctcgttaatcagagagcccttgctcagatcgctagagaaattgaattggatacatttcttatcctaggcaaaggagagagcacctcaggaaaaaacagagactcaatactctctgattcattggaggctgtcattggaggggtgtatattgatggaggattcgagtcagcccaaaaagtgattaagaatctttttgataagacgattcgtcaa

SEQ ID NO: 259819 - DNA, 458 bp, Unknown
  Bacterial polypeptide expressing nucleotide sequence isolated from the Sargasso Sea
attgcctctctttaaacaagctttcgtccacaagagctcttcaccaaatcaaaataatgagcgcttagagtttttaggagacgctgttcttgaaatttttatatcggagtatttgttcaatcgttttagtgatttggatgaaggtagattaactcaaatgagagcttccttggtcaatacccaatcccttgctgagatttttttaagactggattgcagaggtttattgagcacctcaaaaggaacaaaaaacttagatgaaactcataaatactcaatttatgcaggcactttggaggcatgtataggagcagtttttatagaattgggttttgaagagagtaaaaagtttattttcaatctttttaaaagcaacttttcttatcttgatgaatccattgatttgaaggatgcgaaatcaaaattgcaagaggttctgcaagcatcagggagggaac

SEQ ID NO: 259820 - DNA, 227 bp, Unknown
  Bacterial polypeptide expressing nucleotide sequence isolated from the Sargasso Sea
actgcaatacaagttccaagatgttgaacttttacaagtcgccttaacgcatagttcatggtgcgctgaaaacgatggaagtccatcaaatgagcgccttgaattccttggagatgctgttttgggtatggcggtaacccgctatatcttcaatcaataccccgagttatcagaaggaaaacttagccagctccgtgcgctcgtggtgagttcatccagtctttccc

SEQ ID NO: 259821 - DNA, 304 bp, Unknown
  Bacterial polypeptide expressing nucleotide sequence isolated from the Sargasso Sea
ctggataccaatcttgagacggtacggacgctgctgctgggctggtacgccagccgcctggatgagatcaagccgggcatagagcagaaggatcccaagacccgtctgcaagaaattctgcagggaagccgcaaatccctgccgacctacacagtgaccaacgtcaagggcgaagcccacaaccaggagttcaccgtccagtgtgacgtggaaggcctggatggtccgctggtcggggtcggcaccagccgtcgcaaggccgaacaggccgctgcgcagcaagcattggaaaaactgtcatgac

SEQ ID NO: 259822 - DNA, 706 bp, Unknown
  Bacterial polypeptide expressing nucleotide sequence isolated from the Sargasso Sea
gttggttttttttagcgataaagactataaacagttatctcagaaattagattataaatttaaggatagaaatctgctagaattagcgttgactcataaaagtgttttggacccaaagggtagttatattgagtctaatgagaggctggagtttcttggtgatcgtgtattagggttatctatcgcagatatgcttattaagagatttccagaggaaaatgaaggccagattgcacgtcgtttttcctatttagtctcacaggagatgttgtttgcggttgcgaaaaggcttgatcttggaagatttattattttttcaaccagcgaaaagaaggcaggtggtgaaggtaaaaagtcagtattggctgatacctgtgaggcaattattgctgctatataccttgatggtggcttagtagttgctatggaatttattgatgacaattggcagtcaaagttaaatgatcaagaagacccgccagtcgacccaaaaacagagcttcaagagtgggctttgcaaaacggtctaccgcttccaaaatatagtgacataaggcaagaaggggctgatcatgacccaaaatttactgttggattggatatattgaattttggcactattacaggggtgggttcaacaaagaggatagcacaacggcaagccgcaataggtatgattaaaagaataaaggatactaatggataa

SEQ ID NO: 259823 - DNA, 655 bp, Unknown
  Bacterial polypeptide expressing nucleotide sequence isolated from the Sargasso Sea
aatgaaaaaaaatactctagctattaagaagtcctaccttcaattacctcttttcaaacaagcattcattcataaaagctcttcacctgaccaaaacaatgagcgactagagtttttgggagatgcggttcttgaaatttttatatcggaatatttgttcaatcgttttagtgatttggatgaaggtagattaactcaaatgagagctttcttggttaatacccaatcacttgctgagatttttttaagactggattgtagagatttattgattacttcaaaaggaacaaaaaacttagatgaaactcataaatactcaatatttgcaggtactttggaggcatgtataggcgcagtttttatagaactgggttttgaagagagtaaaaattttattttcaatctttttaaaagcaaattttcttatcttgatgaatccattgatttgaaggatgcgaaatcaaaattgcaagagtttctgcaagcatccggcagggaacttccagaatattccgttgttgctaataaagaaggcaataaatttaattgtactgtgatttttaatggtgaaacttttcaagcttcagcaggactaaaaaaagaatctgagcagaaggtctcggagttaattctagaaagagtcaatgaattatga

SEQ ID NO: 259824 - DNA, 664 bp, Unknown
  Bacterial polypeptide expressing nucleotide sequence isolated from the Sargasso Sea
aatgaaaaaaaatataagttcttttgaaaaaataataggtattaaatttaaaaatcaaaatctcctattacaaagcctaacacataaaagtaataatccacttaataacaatgaaaaattagaatttttaggtgatagagtattaggattaattatatcaaagaatttatataaattatttccaaatgataaagaaggagatcttgataaaaaattggcatcattagttaataggaaaagatgtgttgaaatttctaattatttatctttaaaggattatgttttagtaggagacaacaaagaaaattcaaaaatagaaaacaaaattttagcagatacagttgagtcaattgtgggtgccttgtatttagatcaaggattggaagtaactgaaaaattcattttaaattactggaaaagttttttaaatgaaaaattaacaatttacagagatccaaaaacaatgcttcaagaatattctcttaaattgtataaaaccctcccaatttataatgtaatagaaaacaaaggcccaagacataaacctgttataaaagtttcagtcaaaataaaaaattcaaaaaaatatttgggaattggtaattctaaaaaagaagctgaacagaaagctgctttaaaattattggatacttttaaaaaatga

SEQ ID NO: 259825 - DNA, 688 bp, Unknown
  Bacterial polypeptide expressing nucleotide sequence isolated from the Sargasso Sea
tttgacttctagaaaaaaacataaacggctcgaagataaaatccaatatatatttgatgattctcaaatattgtctcgcgcattaactcatcgcagtcattcgccagagaattatgaaagactggagttccttggtgatgcggtcctcgacatggtgctaagcgaaaagctctacaaccatttcacagaaatagaagagggcagacttagcagaattcgtgctcatcttgtaaatcaaaaagcacttgccgagatcgcaagaagcatcgagttagattctcatcttattttaggcaaaggagagaaaaccatggggaagaatagagactcaatactctctgattcgctggaggctattttagggggcgtatatatcgatggagggttcgaatccgttaagcttgtcattgagaatctctttgacaacgtgattgggcaaattaattccgacgatctttttaaagactctaaaagcgcacttcaagaagcattgcaaaaaaataacatagaacttcctcattataatcttataaaaaccaagggagaacaacacgaacaaatttttgaggttgaatgcattgtttcatcattgaagttagtgaccaatggaaccggtaaaagtcttaagatagcggaacaacatgctgctgaaaaagccctagaaatattcttgaagaatgatgcctga

SEQ ID NO: 259826 - DNA, 688 bp, Unknown
  Bacterial polypeptide expressing nucleotide sequence isolated from the Sargasso Sea
ttgacttctagaaagaaacataaacggctcgaagataaaatccaatatatatttgatgattctcaaatattgtctcgcgcattaactcatcgcagtcattcgccagagaattatgaaagactggagttccttggtgatgcggtcctcgacatggtgcttagcgaaaagctctacagccatttctcagaaatagaagagggcagactgagcagaattcgtgctcatcttgtaaatcaaaaagcacttgccgagatcgcaagaagcatcgagttagattctcaccttattttaggcaaaggagagaaaaccacggggaagaatagagactccatactctctgattcgctggaggctattttaggaggtgtatatatcgatggaggattcgaatccgttaagcttgtcattgagaatctctttgacaacgtgattgggcaaattaattccgacgatctttttaaagactctaaaagcgcacttcaagaagcattgcaaaaaaataacatagaacttcctcgttataaccttataaaaacaaagggagaacagcacgatcaaagttttgaggttgaatgcattgtttcttcattgaaattagtgaccaatggaaccggtaaaagtcttaagatagcggaacaacaagctgctgaaaaagccctagaaatattcttgaagaatgatgcctgag

SEQ ID NO: 259827 - DNA, 712 bp, Unknown
  Bacterial polypeptide expressing nucleotide sequence isolated from the Sargasso Sea
attgttcataaaactaaaacagtatttcttagatcaaaccgaatcagtatcaaatcttgaaaaaaagataaactacatttttcataataaagaatatcttaatcaagcatttacacataaatcattaaatactgagcctagaaagaactatgaaagattagaatttttaggtgatgcagttttagatattattgtaagcagagaattgatgcgagaattcccagcaggtgatgaagggctactaactcaaaaacgtgcatctttagttcaaaaaccatatctggcaaacattggtcaattactcgacctaatggattatctaaaaatagaacaaagtgttaatctaagtattgaaaaaatagctgagaaacaacaagcaaatctttttgaagcactaattggcgccgtttacctcgatggcggcattgatccatgtagaaaacttattttagatacagtgtgggcctataaagaggaagcttggaagtctaccaattataagggaaagttaattgaatattgccattctcacgatatacaaaatccaacatttgaattaaaagatatttctgggcctgaccatcaaagaacatttgagatacaagttaaaataggttcaaaaaaatatgattctggattgggaacaaataagaaaactgcagagcaaattgctgcaaaacttgcattagaagaactcggtgcttctttttaa

SEQ ID NO: 259828 - DNA, 608 bp, Unknown
  Bacterial polypeptide expressing nucleotide sequence isolated from the Sargasso Sea
attgacttatctctcctctcttcaacttgcgattgactataaatttgaagacgaagatcttttggttgaggcagtgactcatccgagcgcttctaacgagtatccggatcgtttttcaactaacaatcagaggcttgaatttctaggtgatgctgtacttgatatgtccatcgctagcgaattattctcgatgttcccagaccatcgagaaggggacctcaccaagtggcgaacgaatcttgtgagagggaaaacccttgcgatgatcgcacggagtattcagctaggctcatacctgatactaggtgcgggagaagaaaagagtagtggtaacgataaagatagcaatctttcggatgcattcgaagcactgattggtgctgtattcctggactcaggtattgaggctgtgaataaaatgacagagagattatttcatcatgaatttgcaaaattgttttcacctgattcaaaaaacccgaaaggtgacctacaagaattagcggcatctttgggtcatcgacctaagtacgcgctagttgaagagtcaggacctgagcacgctctggaatatagagtttcggtggcgctatgtatcgagactaaag

SEQ ID NO: 259829 - DNA, 688 bp, Unknown
  Bacterial polypeptide expressing nucleotide sequence isolated from the Sargasso Sea
tttgatttctaaaaacaaacataaacagctcgaaagtaacatccaatatatatttaatgactcagatatattgactcgagcactgacgcatcgaagtcattctgcaaagaattatgaaagactggaatttctcggtgatgcagttttagatatggttttaagcgaaagactctataaagaattctcacaaatagaagagggcagattgagcagaatgcgagctcatctcgttaatcagagagcccttgctcagatcgctagagaaattgaattagatgattttcttatcctaggcaaaggagagagcacctcaggaaaaaacagagactcaatactctctgattcattggaggctctcattggaggggtgtatattgatggaggattcgagtcagcccaaacagtgattaaaagtctttttgaaaagatgattcgtcaaataaatcctgaggatctatttaaagattctaagagtgcccttcaggaagtattacagaaaaataacatgaaactccctgaatataagcttataaaaacagaaggcgatcaacatgatcagatctttgaggtggagtgcatcatcacagcaatgaatctgattaccaatggtacagggaagaatctaaaaacagcagaacagcaggctgctgaaaaagccctcaatgttgtcctgaacgatcatgactga

SEQ ID NO: 259830 - DNA, 655 bp, Unknown
  Bacterial polypeptide expressing nucleotide sequence isolated from the Sargasso Sea
atgaaaaaaaatactctagctattaagaagtcgtatctccaattacctctttttaaacaagcattcgtccataaaagttcttcaccggaccaaaacaatgaacgtctagagtttttaggagatgcggttcttgaaatttttatttcagagtatttgttcaatcgttttagtgatatggatgaaggtagattaactcaaatgagagcttctttggtcaataccaaatcccttgctgagatttttttaagactggattgcagagatttattgagtatttcaaaaggaacaaaaaacttagatgaaactcataaatactcaatatatgcaggtactttggaggcatgtataggtgcagtttttatagaactgggttttgaggagagtaaaaattttattttcaatctttttaaaagtaacttttcaaatcttgatgaattcattgatttcaaggacgcgaaatcaaaattgcaagaggttctgcaatcatcaggtagggaacttccagaatattcggttgttgctaacaaagaaggcaatcaatttaattgcacagtgatttttaatggtgaaacttttcaagcttctgcaggattaaaaaaagaatcagagcagaaggtctcggagttaattttagatagagtcaatgaattatgac

SEQ ID NO: 259831 - DNA, 718 bp, Unknown
  Bacterial polypeptide expressing nucleotide sequence isolated from the Sargasso Sea
ttgaagttatttataaaactaaaacagtattttatagataaaaccgaatctatctcaaatcttgaaaaaaaaattaactacatttttcataacaaagaatatcttgaccaggcattcacacataaatcattaaatactgtacctcgtaaaaattatgaaagattagaatttttaggtgatgcagttctggatatcattgttagtagagaattaatgcgtgagtttcctgaaggtgatgagggattattaacacaaaaacgtgcatcattagttcaaaaaccatatctggcaaatattggtcaactattagatctaatggattatcttaaaatagaacaaagtgttaatctaaacattgaaaaaatagctgaaaaacaacaagcaaatctttttgaagcattaatcggtgccatttatcttgatggtggtattaatccctgtagaagtctcatactagatacagtctgggcatatagaaaagaggcttggaaatcaactaattataaagggaaactaattgagtattgtcattctcatgacattaatagccctacatttgtattaaaagatatttcaggtcctgaccatcaacgaacttttgaaatccaagttaaaattggttcgataaattattcatctgggttgggtacaaacaagaagaccgcagagcaaattgctgcaaagcatgctctagaagaattaggagcttctttttaag

SEQ ID NO: 259832 - DNA, 688 bp, Unknown
  Bacterial polypeptide expressing nucleotide sequence isolated from the Sargasso Sea
tttgacttctagaaacaaacataaacggctcgaagataaaatccaatatatatttgatgattctcaaatattgtctcgcgcattaactcatcgcagtcattcgccagagaattatgaaagactggagttccttggtgatgcggtcctcgacatggtgctaagcgaaaagctctacaaccatttcacagaaatagaagagggcagacttagcagaattcgtgctcatcttgtaaatcaaaaagcacttgccgagatcgcaagaagcatcgagttagattctcatcttattttaggcaaaggagagaaaaccatggggaagaatagagactcaatactctctgattcgctggaggctattttagggggcgtatatatcgatggaggattcgaatccgttaagcttgtcattgagaatctctttgacagcgtgattgggcaaattaattccgacgatctttttaaagactctaaaagcgcacttcaagaagcattgcaaaaaaataacatagaacttcctcgttataatcttaaaaaaatcaagggagaacaacacgaacaaacttttgaggttgaatgcattgtttcttcattgaagttagcgaccaatggaaccggtaaaagtcttaagatagcggaacaacaagctgctgaaaaagccctagaaatattcttgaagaatgaagcctga

SEQ ID NO: 259833 - DNA, 688 bp, Unknown
  Bacterial polypeptide expressing nucleotide sequence isolated from the Sargasso Sea
tttgatttctaaaaacaaacataaacagctcgaaagtaacatccaatatatatttaatgactcagatatattgactcgagcactgacgcatcgaagtcattctgcaaagaattatgaaagactggagtttcttggtgacgcagttctagatatggttttaagcgaaagactctataaagaattctcacaaatagaagagggcagattgagcagaattcgagctcatctcgttaatcagagagcccttgctcagatcgctagagaaattgaattggatacatttcttatcctaggcaaaggagagagcacctcaggaaaaaacagagactcaatactctctgattcattggaggctgtcattggaggggtgtatattgatggaggattcgagtcagcccaaaaagtgattaagaatctttttgataagatgattcgtcaaataaatcctgaggatctatttaaagattctaagagtgcccttcaggaagtattacaaaaaaataacatgaaactccctgaatataagcttataaaaacagaaggcgatcaacatgatcagatctttgaggtggagtgcatcattacagcaatgaatctgattaccaatggtacagggaagaatctaaaaacagcagaacagcaggctgctgaaaaagccctcaatgttgtcctgaacgatcatgactga

SEQ ID NO: 259834 - DNA, 670 bp, Unknown
  Bacterial polypeptide expressing nucleotide sequence isolated from the Sargasso Sea
atgaataaaattaataaactcaatgaaatactctctgaaaaaactctcaattctgatttatttataaattcgttgacgcataggagtgcaagctcaaataacaatgagaggcttgaatttttaggcgatgctgttttgggcttagtaatagcgaatcatctttatagctcttttaaaaacgatcaagagggaatattaagtagaaagagatcacatttggttaaaaaagatacattattcaggatagcaaaaaaactttcacttagtgatcttattaacattggggaaggtgaaaaaaaatcaggtggtaaaaatagctcatctattttatcagatgcactcgaggctattataggagtagtttttttaatagatgggtacgatgccgcaaaagaatttatacttaaggtttatcaggaagaattagaaaatattccagacgatgaggaattaaaggattcaaaaactaaattacaggaattcttacagggcaaaggcttcaatttaccaaagtatgaaactaaagaagtcttaattgaaaaggatttacatttcgaaactacttgccatgtaaaagaattaaaaattgaagaaaaaggagtgggaaaaaataaaagattatctcagcaaactgctgccagtaaagttttaaataatattaataaataat

SEQ ID NO: 259835 - DNA, 660 bp, Unknown
  Bacterial polypeptide expressing nucleotide sequence isolated from the Sargasso Sea
gcggcctgatgaaaaagctgggttaccagtttcagcaggtcgctttactcgaacaagccctgactcaccgcagttgcaaaggtgagcataatgagcggctggaatttttaggtgacgccctgctcagcatggtgattgccgaagcactctacaaacatttcccgaaagcccgcgaaggcgatttaacccgcatgcgttcttctttggtcaaaggcattactctggcagaaatagccaaagagctggagctggctgaatacctgcggctaggccctggtgagatgaaaagtggtggcctgcgccgtgaatctattcaggctgacgccgtagaggctattttaggtgctatctttttagattctggtattgatgcttgcaaagagcggattttaagctggtttggcagccgtctaactggcatccaacccggtgtgcaaaaagacagtaaaacccagctgcaggaatacctgcaaggtcggcgtttagctttgcctttgtacgaagtcattgatacccagggtgaagaccatgatcaggtgtttaccgtgcgttgtactgtgcagggcagagcccctgtgatcgcgtctggcaattccagacgtaaagctgaacaggattcagcacgaatgttgttggaacagataaaaaatgaccactgag

SEQ ID NO: 259836 - DNA, 772 bp, Unknown
  Bacterial polypeptide expressing nucleotide sequence isolated from the Sargasso Sea
catgagtctggatgcactacagcaacgtcttggctaccgcttcagcaaaccggagttgctgcagcaggcgctcacccatcgcagccacagcgcgatgcataacgagcgcctggaatttcttggtgattcgattctgaattgcgccgtcgccgacatgctctacggcatgttcggcaagctggatgagggcgatctgtcgcgcgtgcgggccaatctggtcaagcaacaggcgctgtacgagatcgcgcagatgctgcagttgcccgatgccctgcgtttgggcgaaggcgaattgaaaagcggcggtttccgccgcccatctatcctggccgatgcgctggaagcgattttcggggcggtgtttctcgacggtggcttcgatgcagcccgcacgctgattcgcaagctgtacatccccatcctcgagcaggtggacccgcgcacgctcggcaaggacgccaagacgctgttgcaggagtacctccaaggtcacaagattgcgttgccgctgtacacggtggtggccacccacggcgcggcgcataatcagcaattcgaggtcgagtgctcgattcccaagctggagattcgcgtctccggcagcggggcatcgcggcgcgcggccgaacaatcggcggccaagctggccctggatgaagcgcatcgcctggtgccgcagctcgtcaagcgcagccgcgccgagcgcaccggcaagacgcgcaagcaggccacgccgcccgatccgcagttgtctctcaggttgaaggaataa

SEQ ID NO: 259837 - DNA, 679 bp, Unknown
  Bacterial polypeptide expressing nucleotide sequence isolated from the Sargasso Sea
aatgaaaaaaaatgtaacagagttatacaacaaaatcggctacgagttttctgatcaaggtttacttgaacaggcaatgacgcaccgcagtcacaaaggtcagcataacgagcgcttggagtttttaggcgactcaattttgagctttgttattgctaatgcactttatgccaaattcccaaaagcacgtgaaggcgacttaagccgcatgcgttcaacactggtacgtggtcaaacacttgctgagtttggcgttgaatttggtttaggtgattacttacgtttaggcccaggtgagcttaaaagtggtggattccgccgcgaatcaacacttgccgatgcagtagaagccattattggtgccgcgtttttagattcaggtatcgagcgttgcagcgagcttattttatcgtggtacgaatcacggttagatgctatttcaccagggcttaaccaaaaagatccgaagaccctgctgcaagagcatctacaaggtcgcaaacttcctttaccaggctacactgtggttgatacaaagggccaagcgcacaatcaaacattcacggttgaatgtattgttgatggaatggatagcataatttctgttggtagctcacgccgtaaggccgaacaaaaagctgctgaaaaagcattgaagataattaaaaatgaatcttga

SEQ ID NO: 259838 - DNA, 688 bp, Unknown
  Bacterial polypeptide expressing nucleotide sequence isolated from the Sargasso Sea
aatgcagggaattgataaatatcgtcgtctgtacaaggcgataggctacacatttaccaatgaagctctattggaacaagcacttactcatcgcagtgcggctaaacagcacaatgagcgactagaatttctgggtgacgctattttaggcatgattgttggggaaacgctgtttaagcgattcccaactgtgccagaaggcaaactcacacgaatgcgctctactttggttaaaggagacacactggcagaacttgcaaaggaagccagtgtgggtgaactacttaacttagggcccggtgagctcaaaagcggtggtcatcgcagaagttcgattttagccgatgcagttgaagctattttaggggctatttacctcgattccggtatggacgaggttcgaggcgttatagaccgtttatgggaaacccgcataaacaaactagaccctaatgcccaccctaaagacagcaaaactcgtcttcaagagtttttacaaggtcgtaaacaagcgctgccaacctatgaagtgctatctatttcagggaaagatcatgctcagacttttgaagttagctgtcaggtagaaagtctaccagaagcggtagtggcgtctggcaatagtcgtcgaaaagcagaacaagaagctgctcgtttaacattggagaagcttgatgacaacgcatga

SEQ ID NO: 259839 - DNA, 673 bp, Unknown
  Bacterial polypeptide expressing nucleotide sequence isolated from the Sargasso Sea
aatgaatatcaagatgaacagactgcagtcccgtctcgggcatgtctttcaggatcaagaactgctgacccgggcgctgactcaccgcagcgccggttcccgtcacaacgagcgactggaattcctgggtgactccattttgagtctggtgattgccgatgatctcttccaccgcttcccgcaggcggcggaaggggatctcagccgcatgcgcgccaccctggtgcgcgagaagaccctggccgaactgggccgggagttcgacctcggggatcacctgatcctcgggccgggcgagctgaaaagcggcggttttcgccgtgaatccattctggccgacacggtcgaggcggtgatcggtgccgtctatctggataccaatcttgagacggtacggacgctgctgctgggctggtacgccagccgcctggacgagatcaagccgggcatagagcagaaggatcccaagacccgtctgcaagaaattctgcagggaagccgcaaatccctgccgacctacacagtgaccaacgtcaagggcgaagcccacaaccaggagttcaccgtccagtgtgacgtggaaggcctggatggtccgctggtcggggtcggcaccagccgtcgcaaggccgaacaggccgcagcgcagcaagcattggaaaaactgtcatga

SEQ ID NO: 259840 - DNA, 682 bp, Unknown
  Bacterial polypeptide expressing nucleotide sequence isolated from the Sargasso Sea
tatggaaccgattaaaaatttgccacgtttgtgtcgtacattgggctatgagtttaagaatattgaccttctaacccaagcgttgacccatagaagcgcggcaaataagcacaatgagcgtttagagtttttaggtgattcgattttatcgatagtcatttcggatgccttatatcatcagtttcctaaggcgactgaaggtgatttaagccggatgcgcgccactttagtgcgtggcgatacgctgaccttgattgctcaagcctttaaacttggggattatttattcctcggtcctggcgaattaaagagtggcggttttcgacgcgagtcgattctggccgatgcggttgaggcgattattggtgcgatttacttagattcggacctcgaagtgtgccgtgagctgttgcttaaatggtatgccgagcgtttatctgagattcaaccaggtgtgaatcaaaaagacgctaaaaccttactgcaagaatatttacaagggttaaagaagccgctacccgattaccaagtaatcaacatagaaggcgatgcccacgatcaaacattcaccgttgaatgtcgtatagatgacttgagtgaaagcgtgattggcgttgcgagctcacgccgcaaagccgagcagattgccgcggctcaagtattggagttacttaagaaatga

SEQ ID NO: 259841 - DNA, 682 bp, Unknown
  Bacterial polypeptide expressing nucleotide sequence isolated from the Sargasso Sea
atggaaccgattaaaaatttgccacgtttgtgtcgtactttgggttatgagttcaagaatcttgagcttctcacccaagcattgacccacagaagtgcggcaaataagcacaatgagcggttagagtttttaggcgattcgattttatcgattgtgatttctgatgccttataccatcagtttcctaaggcgactgagggtgacttgagccggatgcgtgccaccttagtgcgtggtgatacgctcaccttgattgctaaggcctttaagcttggggattatttatttttaggccccggtgagttaaagagcggtggttttagacgtgagtccatcttggccgatgcggtcgaggcgattatcggcgcaatctacttagattccgacctcgaagtgtgccgtaagttattactgcattggtacgctgagcgtttggccgggatccaacctggtgtgaatcaaaaagacgcgaaaaccttactgcaagaatatttacaagggttaaagaagccgctacccgattaccaagtaatcaacatagaaggcgatgcccacgatcaaacattcacagttgaatgtcgtatagatgacttgagcgaaagcgtgattggcgtagcgagttcgcgccgcaaagccgagcagattgccgcggctcaagtattggagttactgaagaaatgac

SEQ ID NO: 259842 - DNA, 433 bp, Unknown
  Bacterial polypeptide expressing nucleotide sequence isolated from the Sargasso Sea
aatgaaaacagtaaatatatatacagacggtgcatgcagaggaaatccaggagatggaggatggggtgctttagttgagtatcaagattttagtaaagagtattttggtggccagaaaaatactactaataatcaaatggaattaaaagctgcaattgagggtcttaaagcattgaaagaaacatgcaatgttaatttaaccactgattcgaaatatgttatggatggcattacatcttggatagataattggaaaaaaaataattggaaaagttcatcaaaaaaggatgtaaaaaataaagatctatggatagagttggataaatacaggtctatgcataatgtaaaatggatttgggttaaaggtcactcagggcatgagaaaaatgaaatcgctgatatgttggcaaacaagggtatagatagcatttaa

SEQ ID NO: 259843 - DNA, 255 bp, Unknown
  Bacterial polypeptide expressing nucleotide sequence isolated from the Sargasso Sea
ctccagaattagaaaattataatttaaaatcttttattaaaggagataaaaaagttccctctatttcggcagcttctataatcgcaaaagtatcaagggataagtttattaccgctttatcaaaaaaaaataaaggttacgattgggataaaaactttgggtacggaacaagacagcacttaaaagctttgaaaaaattaggtattacaaaacatcatagaaaaactttttcaccaatatctaaaataaattaat

SEQ ID NO: 259844 - DNA, 436 bp, Unknown
  Bacterial polypeptide expressing nucleotide sequence isolated from the Sargasso Sea
aaaagcagaataaagattgcagaatacataaaagaaaactcatggtacgctattggttctgcttcagtttatgaaatagataaatataatatttttaatgccacattgttatcgatggaaagagcagcaaaaaaattaaaaaaaaaacctaatatttttttaattgatggaacacatgcacctaaaaaattaaataattctaaaactataatcaagggcgatcaaaaaattaagtgtatttctgcagcttctattgtagctaaagtttatagagatctttatatgattaggttaggaaaaaaatttcctcaatataaatgggacaaaaattttggatatggaacttggcaacatttaggtgcgcttagaaaattcggagttacaaactatcacagaaaaagttatagaccagtacacaacatcttgtccaaatagg

SEQ ID NO: 259845 - DNA, 257 bp, Unknown
  Bacterial polypeptide expressing nucleotide sequence isolated from the Sargasso Sea
catgattcaagtatatactgatggagcatgttcaggaaatccaggtgttggagggtggggtgtggtaatattattaaacaaaaatgaacctatcttattaaacggaggcgaattgcaaacaactaataatagaatggaattaactgctgcaattaaagctttaaattattttaatgaattaaaatcaatacaaatatttacagatagtaaatatgttaaagatggtattgaaaagtggataataaattggaaaaaaa

SEQ ID NO: 259846 - DNA, 427 bp, Unknown
  Bacterial polypeptide expressing nucleotide sequence isolated from the Sargasso Sea
aatgattgagatatatactgatggctcttgtttacaaaatcctggaaacggtggttgggctgcaattataaattatgaaggtaatatcaaaaaaataagtggtagcgaaaaaaatactacgaataatagaatggaattattagctccaataaatgctttaaaacaaatagaacataataaggaaattcagatttatactgactcacaatacgtaaaactcggaataactgagtggataaatacttgggtaaaaaataattggcaaacctctaaaaaagaggatgttaaaaataaagatttatggattgaactttatgatcttaataattcatttaatattaaatggaattggataaaagctcattcaggaaatgccttaaatgaagaggtagatttactagcaaaaaaagctgctttgctagattag

SEQ ID NO: 259847 - DNA, 157 bp, Unknown
  Bacterial polypeptide expressing nucleotide sequence isolated from the Sargasso Sea
atgttaaaagcatttaatgatgacctttttgtttgtggtgttgatgaagcaggtagaggatgcctagctggtcctgtaactgcagctgcagtcattctcccaaaaaattataagaataagcttattcaggattcaaaaaaacttaataagcagaata

SEQ ID NO: 259848 - DNA, 559 bp, Unknown
  Bacterial polypeptide expressing nucleotide sequence isolated from the Sargasso Sea
aatgaaaatagctggagtagatgaggctggaagagggccgatagcaggtccagtttatgctgctgcggttatactaaatccagaaaaagcaatccctgatttagccgactcaaaaaaactcaacaaaaataagatagctttacttgcagaagaaataaagaagcattcattaagctggtcagtaagctctgcatctgttgaggagatagagaaatttaatatcttaaacgcttcattattagcaatgaaaagagctgtcatatctttagatataaaaccttcagaattaataatcgatggaaattttactcttgatatggatatagagatgagagctattattaaggctgatgataaatttaaagaggtgatggctgcatcaatactagctaaatatcacagagataattatatgattaatctagataagaaatttcctgaatattctttcaaaaatcataaaggttaccctaccaaacaacacctagaggctatagaattaaaaggtatctgtgtgcatcatagaaaaacatttaaacctattttgaagtatttataa

SEQ ID NO: 259849 - DNA, 319 bp, Unknown
  Bacterial polypeptide expressing nucleotide sequence isolated from the Sargasso Sea
gaaagagctgcaaaaaaattaaagaagaaacctcatctttttttagttgatggaacccacgccccaaaaaaattaaaaaactcaaaaacagtaattcagggagataaaaaaattaagtgtatttctgcagcttctattatagcaaaggtttacagagatctttatatgataaaattaggaaataaattcccaaaatacaagtggcacaaaaattttgggtatggaacatcgcagcatatgaatgctttaaaaaaatttggtgttaccaattatcatagaagaagctataaaccagtacacaacatcttgtccaaataag

SEQ ID NO: 259850 - DNA, 355 bp, Unknown
  Bacterial polypeptide expressing nucleotide sequence isolated from the Sargasso Sea
cttggacaataattctaatcaatcttttatttccggtagtgaaaataatactacaaataacaggatggagttaatagcaccaataatggcactaaaaaaaattaaaaaaaaatctgagattacaatttatacagattcaaagtatgtaaaagatggtattactgaatggataaaaaaatggaaattaaacaattggaaaagctcaaataaaaaaccagttaaaaataaagatctttgggttaaattagataactcatgtcaaaagcataaagtaatttggaaatgggttaaagctcatgcgggaaataaatacaataacatggtagataaattagcagtatcgcagactaaatag

SEQ ID NO: 259851 - DNA, 601 bp, Unknown
  Bacterial polypeptide expressing nucleotide sequence isolated from the Sargasso Sea
atgaccgcgcaggagtccctcccccttgggagggacgtggctggtgtggatgaagtcggtcgcggttgccttttcggtcctgtgtttgcggctgctgttgtgctcgagagagcagcggctcaagagctgttgaaggcagggctgaccgatagcaaaaaactgtcagccaagcgtcgagctgctttggttcctgtgatccagtcgatgtgtgtggcatccggtttgggccaagcgtcagcgcgcgaaattgacacctgcggcatccgcgttgccacggaacgcgccatgttgcgggcgctgcagagattgccgcagcgccctgggctcgtgctggtggatggcaaccttccacttcggctgtggcagggcccgcagcgcacggtgatcgcaggggacagccgatcggtggccattgctgcggcgagtgttctggccaaggaggccagggatgcacttatccggcgcttgtcggctcgcttccctggttatggcctcgagcgccatgcgggctacggcacggcgcaacatcgtcagagcttgatggcctcaggtcccacgcccctgcatcggcacacgttcttgaggcgtctgctcggttgag

SEQ ID NO: 259852 - DNA, 268 bp, Unknown
  Bacterial polypeptide expressing nucleotide sequence isolated from the Sargasso Sea
aaattgccaaaaattgataattacaaactaaaaaatataattaaaggagatgaaaaaattcctgaaatttcagcagcttcaataattgctaaagtttcgagagatcgtttagtgtctaggctttcaaaaaaatttaaaaattattactgggaaaaaaattctggttatggaactaaaaaccatattagagctataagaaagtttggagtaactaaacatcacagaaaaacatttcaaccaatctacaatatattgagtctgaagtaat

SEQ ID NO: 259853 - DNA, 226 bp, Unknown
  Bacterial polypeptide expressing nucleotide sequence isolated from the Sargasso Sea
atgcccacctccaccctcgcctccgcctccatcaccgccgtgtcctctgccaccacctccatcgccgccgcctccatatccaccgcctccatctccgccaccaccatccccgccgttgccatctccaccaccgccttctccgccaccaccatcaccgcccccgccgtctccgcctccaccgtcgccgccccctccatctccaccaccgccacgcctcccaccaccc

SEQ ID NO: 259854 - DNA, 427 bp, Unknown
  Bacterial polypeptide expressing nucleotide sequence isolated from the Sargasso Sea
aatgataaagatttatacagacggttcatgtttagaaaatccaggtaacgggggttgggctgctataattattatcaataaagaaaaaaaaattatttctggaaatcagaaaaatacaaccaataacaggatggaactattagcaccaattgaagctttaaaaactcttgaaattaattcagagatagaaatcattacagattcaaaatacgttaaattgggaattacagaatggataaataattggaaaaaaaatggttggaaaactgcaaacaagaaagaagtcaaaaatatagaactatggaaagaattagatagtttagttgaaaattttaacattaaatggtcctgggttaagggtcactcatcagatcaattaaataatgaagtcgatttaattgctaaaaaagcagcaaacctaaattaa

SEQ ID NO: 259855 - DNA, 484 bp, Unknown
  Bacterial polypeptide expressing nucleotide sequence isolated from the Sargasso Sea
tgcgagttgtgtaattcttcctgaacaaataaatgaaatatttaaagattctaaaagcacttcagaatctttaagatctaaacaatttcaatttctgagaagaaatgcttatgcatctataggtctttgcactcctcaagaaattgatgaaatgaatattcttaatgctacgcatcttgctatgaaaagggcaattaataatatccagataaaaccggaaaaattactaattgatggtaaatatgttccaagtggactattaaatgctgaagcttttattggtggcgataaagtccatcaacaaataagtgcggcgtcaatttacgcgaaatattttagagataatttgatgggccaatacgcacagatattccctaaatattattttgaaaaaaataaaggatatcctactcaaatgcataaagaggcaataattgaatttggcctatcaaagattcatagaaaaagttttaaaatgaaataa

SEQ ID NO: 259856 - DNA, 391 bp, Unknown
  Bacterial polypeptide expressing nucleotide sequence isolated from the Sargasso Sea
attgagagaattaaccacagcaggagttgatgaagttggtagaggatgtcttgctggtccagtggtttctgctgctgtaatacttaaaaaaggtataaatttaagtctgctaaaagactcaaagaaaataacatttaaaaagagagaagagatttcaaaacatattaaaagtaattcttattttgcaattgggattgcctctgtggaggaaatcttaaatctaaatattttgcaggcatctttactttctatgaaaagagcacttgaaaaacttgctgtaaaaccaggtttaaccttaatagatggaaactttgcgcccaaaggtttaaaaaattataaaacaataattaatggagatgaaaaaattaaagtcataagcgctgcttctata

SEQ ID NO: 259857 - DNA, 565 bp, Unknown
  Bacterial polypeptide expressing nucleotide sequence isolated from the Sargasso Sea
attgaaaaataataaaataattgtaggagtagatgaagttgggcgtggttgccttgctggtccagtggtttctgcggccgttattttaaaaaatggtattagtctaaaaaatattaaagattctaaaaaaattaattttaaaaatagattaaaattagcaaattatataaaagaaaattcttattattctattggcttagcttctgttgatgaaatatttaaatttaatatcctaaaagcttcattgttatctatgaaaagagctatagaaaaattatcaaaaaaacctgatttaattttaatagacggaacttttgctcctgaaggtattaaaaattctaaaacaataattaatggagatgaaaaaattaagtgtattagtgcagcatcaatagtagctaaggcttatagagatttacttatgattaaattatcagaaaaattttcaaattatgcttgggatagtaattttggatacggaactaaagctcacttagatggtttaaaaaaatttggtattacagctcaccacagaaaaggctttaagccagtacacaagatattg

SEQ ID NO: 259858 - DNA, 274 bp, Unknown
  Bacterial polypeptide expressing nucleotide sequence isolated from the Sargasso Sea
gatgataaaaatttatacagatggttcttgcatgtcaaatcctggaaatggtggatgggctgcaataattaatataaatggagaaattaaaaaaattagtggtaatgaaaaaaatacgacaaataacagaatggaacttatggctccaattaatgccttaaaaaatataaactcaaaagattcaatagagatatttacagattcacagtatgtaaaaaatggaataactgagtggattaatacttggatattaaataactggaaaacatcaaaa

SEQ ID NO: 259859 - DNA, 114 bp, Unknown
  Bacterial polypeptide expressing nucleotide sequence isolated from the Sargasso Sea
ttcaaaccaattcaggttatggaacaaaagagcacctttcagctctaaaaaactatggaattaccccaatacatcggaaatcttttaaaccagtacacaatatattaaattaag

SEQ ID NO: 259860 - DNA, 331 bp, Unknown
  Bacterial polypeptide expressing nucleotide sequence isolated from the Sargasso Sea
gatgcctttacccgattttgatgttgagactggattgattaaaaaaggctataaagcgatagcaggtgttgatgaagtgggaagaggctgcattgcagggcccgtgacggccgctgcagtcatattaaacccgcaaaaaattccaagtggattaaatgactctaagaaagtgagttttaaaagtcgtgaaaaaatttttcagtcaattcaagacacatgtacattttgcgtagcgcattcatctgtcgaagagatagaccaaatcaacattttacaggcaagcttgctatcaatgaaaagagctatttttggtttaaatattaagccagat

SEQ ID NO: 259861 - DNA, 144 bp, Unknown
  Bacterial polypeptide expressing nucleotide sequence isolated from the Sargasso Sea
tatctattaaattccaagatttcggttgggaaaaaaatgctgggtacggcacaaagatgcatattcagaatatttatcgtttaggtccaacgatccatcatagaaaaacttttgaaccaattaagtcacttatccatagctaaa

SEQ ID NO: 259862 - DNA, 322 bp, Unknown
  Bacterial polypeptide expressing nucleotide sequence isolated from the Sargasso Sea
atgaaattaaaaatttatactgatggtgcatgctccggaaatcctgggaaaggaggttgggcagcaatcatattagatgactctgatcaatcaagtatttctggaagtgaaagtaatacaactaataataggatggaattaatggctccaattatggcattaaaaaaaataaaaaagaaatctgagattacaatttttactgactcaaaatatgtgaaagacggaataactgattggataaaaaagtggaaagttaataattggaaaagttcaaacgagaaaccagtcaaaaacaaagatctttggattaaattggacaatg

SEQ ID NO: 259863 - DNA, 421 bp, Unknown
  Bacterial polypeptide expressing nucleotide sequence isolated from the Sargasso Sea
tttatttttacatcatcaataaatccctcaattgcagcagcatcaataaagagtattgagttaagtaaagaatctgaaaccttgagattaagaattagaagaaattcaaaatttattagagaaggcttaaaatcaattcaagtaccattcattgataatgatagtcatattgttccaattcttgtcaaaggccctctagagtgtaaacaaatatcaaaattacttttagataaatttgggatttatattcaacctgttttctatccaactgttcctaaaggcgatgaaagattaagggtaacaataacaccaaaacattctaaaaaagatattgaaagctttgttaattctattgatgaagcatggaatattcttggttttgatagggttgaagaacaaataatccataatcaaatataat

SEQ ID NO: 259864 - DNA, 427 bp, Unknown
  Bacterial polypeptide expressing nucleotide sequence isolated from the Sargasso Sea
aatgaaattaaaagtttatactgatggtgcttgctcaggaaatccaggcaaaggtgggtgggctgcaattatattagatggtaactcaaattactccagtatctcaggaaaagaaattaatacgaccaacaatagaatggaattgatggcaccaattatggcgctaaaaaaaataaagaaaaaatctgagattataatttttacggactcaaaatatgtaaaagatgggattactgtttggataaaaaaatggaaattaaataattggaaaagttctaataaaagacccgtaaaaaataaggatctttggattaaattggataattcatgtcttaagcataaaattacttggaaatgggttaaagcacatgctgggaataaatataataatctagttgatcaattagcagtttcagaaactaaatag

SEQ ID NO: 259865 - DNA, 427 bp, Unknown
  Bacterial polypeptide expressing nucleotide sequence isolated from the Sargasso Sea
aatgatcacaatttatactgacggttcctgtttaacaaaccctggaaatggcggctgggcagcaatcattagtcaagacggtaagataaaaaaaattactggatgtgagaaaaatacaacaaataatagaatggaacttttagcaccaattaatgctttgaaacaaattgatactaaatctaaaatagaaattttcactgactctcaatatgtaaagttaggtataactgaatggataaataaatgggtaaacaacaattggcaaactgcaaaaaaagaggatgtgaaaaataaagatttgtgggtagagctttacaatttaaatcaatctttaaatgtaaagtggaattgggttaaagcacatgcaggcgaccctatgaatgaagaagtagatattttggctaaagaagcagctaatttaaattga

SEQ ID NO: 259866 - DNA, 275 bp, Unknown
  Bacterial polypeptide expressing nucleotide sequence isolated from the Sargasso Sea
tatgattaaaatttatacagatggtgcctgttctggcaatcctggaattggtggctggggtgtagttattttagaaagcaataaaaaccatatatttttaaatggtggagataaaaatacaacaaataacaggatggaattaagagctgcaattgaggcgctaaaatattttaaagaaaaaaaagatattacactagttacagatagcaaatatgtaaaagatggtattcagtcttggataaaaaactggaaaaaaaatggatggaaaactgctg

SEQ ID NO: 259867 - DNA, 258 bp, Unknown
  Bacterial polypeptide expressing nucleotide sequence isolated from the Sargasso Sea
agccgtctttaaaacttataagaatctttacagattctgtttacgtaaaggaaggaattactgtttggattaataattgggaaaaaaataattggaaaactactgataaaaaaaacgtaaaaaacgttgacctttggaagagacttaaagaattagtaaaatctaatcaagttgagtggaattgggtaaaagggcactcagaagatcctatgaatgacttggctgataaactagcaaaaaaagcaactcctatttaat

SEQ ID NO: 259868 - DNA, 166 bp, Unknown
  Bacterial polypeptide expressing nucleotide sequence isolated from the Sargasso Sea
ttggaaaactgcatctaaaaaacccgtaaaaaataaagacctatggaaaaaattgaaagatttgtcatcaaaacattctattaagtggatttgggttaaagggcatgctcataataaatataataatattgttgatgaactagcgcaaggagctataagaagataa

SEQ ID NO: 259869 - DNA, 370 bp, Unknown
  Bacterial polypeptide expressing nucleotide sequence isolated from the Sargasso Sea
gcaattattataattaatgaaaaaattataaatgagatatctggtagtgagaaaaatactactaataataaaatggaattgttagcaccaattaaggctatcgaaaaatttaaaaaaaaatcaaaaatttctatttttacagactctacttatgtaaaggatggcatcacaacgtggataaaaaaatgggaaaaaaatggttggaaaacagcatctaaaaaaccagttaaaaataaagaattatggaaaaaattaaaaagtttgtccattaaacattctatagaatggatttgggttaaaggacatgcacaaaataaatacaataatcttgttgacgaacttgctcaagacgctataaaaaacaaatgat

SEQ ID NO: 259870 - DNA, 433 bp, Unknown
  Bacterial polypeptide expressing nucleotide sequence isolated from the Sargasso Sea
aatgaaggaaatagaagtctttactgatggtgcctgtagaggaaatccaggggttggaggctggggtgttctatttataatagacggtgaagaaactacattatatggaggagaggaaaatacgactaataatcgaatggaactaaaagctgccataaaagccctagagcattttgatgataaagtttcagtttcaataactactgattccaactacgtaaaagacggtattactaaatggctggataattggaagactaaaaattgggttactgcttctaagaaacctgttaagaataaggatttatgggagcaattggatattttaaattcatttcataaagtgtcgtggagatgggtgaaagctcacgcaggacatagagaaaatgagatagctgatatgcttgctaataagggaatagacgaactttaa

SEQ ID NO: 259871 - DNA, 427 bp, Unknown
  Bacterial polypeptide expressing nucleotide sequence isolated from the Sargasso Sea
aatgattacaatttatacagacggttcttgtttaacaaatccaggaagtggcggatgggctgcaattataaatgatggaaaagaaataaaaaaaattagtggtaacgaaaaaaatacaacaaataatagaatggagttgttggccccaattaatgcattgaaagatatgaagcctggtgttgaaataacaatatatactgactctcaatatgtaaaaaatggaataactgaatggattaatacttggctagctaataattggaaaacctcaaaaaaagaagatgttaaaaataaagatttatggattaatctatataatttaaataaatcgcttaatattcaatggaattgggttaaagctcatgatggaaaccctttaaatgaagaggtggacttactagctaaaaaagcagcaaatttagattaa

SEQ ID NO: 259872 - DNA, 183 bp, Unknown
  Bacterial polypeptide expressing nucleotide sequence isolated from the Sargasso Sea
aatgaaattaaaaatttatactgatggtgcttgttctggaaatcctgggaaaggaggttgggcggcaatcattttagatgacactaataaatcaagtatttctggaagtgaaagtagtacaactaataataggatggaattaatggcttccattatggcattaaaaaaaataaaaaaaaaatc

SEQ ID NO: 259873 - DNA, 379 bp, Unknown
  Bacterial polypeptide expressing nucleotide sequence isolated from the Sargasso Sea
gatacttgtcgacaatgaaaaaaaggaattatttggtggagaaaaattaacaacaaacaacagaatggaattaaccgctgctatagaagctttagaatattgtgataaagaagagggaaaacaattaagtttgaatcaaattagaatatacacagattcaaattatcttaaggaaggaattacaagttggattaatacttgggagaaaaataattggaaaactgcagacaaaaaaaatgttaaaaatgttgatctttggaaaaaacttaaagagcttgttaaatcaaaacaaatcgaatggttttgggtaaaatcccattcagaaaatccaatgaacaacttagcagatactcttgcaaaaaaagcaacgcctatttga

SEQ ID NO: 259874 - DNA, 619 bp, Unknown
  Bacterial polypeptide expressing nucleotide sequence isolated from the Sargasso Sea
atgcaagaaaaaaaagaagaagatcttcagcaagtattgaataaagtatccgaagttggaatagatgaagttggcagaggatcaatttttggtccagtttttgcagcagctgtagtattaaccgaaaaaaataaacttattttaaaacaatttggagtaacggatagtaaaaaacttactagcaaaaaaagaaaattacttttaccaaaaattttattactctcttcagattatggaattgggcaatcttcagccagagaaatagataagttaggtatcagggttgcgacagaactttcaatgataagagctataaaaaaattaaaagaaaagccatctgaattaataattgatggtcccttattattaaggccatggaacggaattcagaaaaacatagtatcaggagactcaaagtttatctcgatagcttcagcaagcatagttgcgaaagtttctcgcgataatctaatggagaggttagaaaaaaaatactcaggatacttgatatttaaaaataaagggtatggaaccagagagcatctttcattgatccaaaaaaatggaataactaaacttcataggaaaagttttttaaaaaaatcaaatctcatttaat

SEQ ID NO: 259875 - DNA, 244 bp, Unknown
  Bacterial polypeptide expressing nucleotide sequence isolated from the Sargasso Sea
aatggactttaattttgatcttcaatttgataagtatgtaataggtgttgatgaagttggtagaggttcatgggcaggaccagtaatggctgctgctgctttgctaaattataaaatgccaatcgataaaagatttaatgattctaaaaaacttacccataaaattcgcaaggaaatattagataatttgactgaaaatagtctttttgggattggagaagtttcaaacgacaaaattgatgaa

SEQ ID NO: 259876 - DNA, 853 bp, Unknown
  Bacterial polypeptide expressing nucleotide sequence isolated from the Sargasso Sea
atggtagcgaatgcgtacccttgcgtagattcttttttcgtcttgagtggattcattgtgacatatgtcctgttgacaaaaataaaaaggcatgggatgttcacttctatgcagtgggtgatattctatctacacagatacgttcgactgactgctccatacctggtgatgatacttgtggatggattcttgtatcgacagatagtgtatggaccactctcactggacatgaaccgtgcatcaagtcataaaatgtgtaaagaatactggtacacctacctcctatacatcaacaaccttgtgccctggataccaaaagagaatacatcctgcttcggtggtagctggtacatagctaacgcgatgcagttcttcattattactcccatttttgtcgtgattctgtataagaaacctctagcaggtgttgtgatcattctaggggtggtcacatcgtcttccatcgcagcagcttccattacagcttacctcaatctggggccaacaatgctgctggggaacgcaggcaattatctactgctgtatagagttccttggataagggtagtcgcctttttggtcggtgtattggctggttggttttattgggtatttggagatatgatggcagaaaatatcagaacactgaaaacttggaagaaattcttattggctgctccagtatggttctgcacggctttaacacagtatttcgtggtctttggcctctaccatgaagtagtcaatgctacacatattggagatgacctctctgggagggtggcaagtgaagcagttagtgtgtcctaccaattactgtcaagagttggctggtctctagccttgacaactc

SEQ ID NO: 259877 - DNA, 407 bp, Unknown
  Bacterial polypeptide expressing nucleotide sequence isolated from the Sargasso Sea
aatgattacaatttacacagatggttcttgtttaacaaatccaggtaatggtggatgggctgcaattataaaggatggaaaagaaacgagaaaaattagtggtaacgaaaaaaatacaacaaataatagaatggagttactagctccgattaatgctttgaaagatttgaaacctggtattgaaataaaaatatatacagactctcaatatgtaaaaaatggaataactgaatggattaatacttggttgggtaataactggaaaacttcaaaaaaagaagatgttaaaaataaagatttatggattgatctatataatttaaataaatcacttaatatccaatggaattgggttaaagctcatgacggaaaccccttaaatgaagaggtggatttactagctaaaa

SEQ ID NO: 259878 - DNA, 433 bp, Unknown
  Bacterial polypeptide expressing nucleotide sequence isolated from the Sargasso Sea
tatgaaaacagtaaatatttatactgatggcgcttgcagaggtaacccaggtgatggaggttggggagttttaattgaatacgaagatataaaaaaagaactttttggtggtgaaaaaaatactaccaataataaaatggagctaaaagcagcaatcgaaggtttacgttcattaaaagagtcatgtgatgttcacataactacagattctaaatatgtgatggatggcattacgtcatggattaaaaactggaaaaaaaataattggaaaaattcttcaaagaaagatgttaaaaataaagatttatggatagaacttgatcaactaacctctaaacacaatgtaaaatggacctgggtaaaaggacactcaggacatgataaaaacgaaattgctgatagtcttgcaaataaaggaattgataatctctaa

SEQ ID NO: 259879 - DNA, 344 bp, Unknown
  Bacterial polypeptide expressing nucleotide sequence isolated from the Sargasso Sea
atctattcaatctaatgtttctggcggtgaaaatagcacaacaaataatagaatggaattaatggctccaattatggctttaaataaaataaaaaaaagttcagaaattataatctatactgattcaaagtatgtcaaagatggtattactgaatggattaaaaaatggaaattaaacaattggaaaagtgcaaataagaagccagtgaaaaataaagatctttggattaaattagataattcatgtcaaaaacataaagttacttggaaatgggttaaagcacatgcgggaaataaatttaataatcttgttgatgagttggctgtattagaaactaaatagt

SEQ ID NO: 259880 - DNA, 541 bp, Unknown
  Bacterial polypeptide expressing nucleotide sequence isolated from the Sargasso Sea
tatgataggagttgatgaagctggaagaggttcatgggctggtccattagtatcgaccgcatgttggtttgattttatcaaatataaatctttgcattcagagattaatgatagcaagaaattaaaatcgtctaagcgaagagaaataataatatcattagataattttgttaaatattcttcatctattgctagcgtaattgaaattgataagtatggccttacatatgcaaatgcaattgctatgaagaggtctatcttttcattaactcaagaattaaaaaaacactcacatatatatagaaataaaaatttttgtatttatgttgatggtaaatttaaaccagattttgaaaatttggataattttttacaacttaacaagttacatttagataactattcaattgaatcacttgttaagggtgatagtatttgcaaaacaattgctttagcaagcattatttctaaagaaacaagagatactgtgatgaggcaatggtcaaaaaaatatccgtcttacttatttgatagtaatttg

SEQ ID NO: 259881 - DNA, 361 bp, Unknown
  Bacterial polypeptide expressing nucleotide sequence isolated from the Sargasso Sea
atgattacaatttatacagacggctcttgtttaacaaatccaggaaatggtggatgggccgcaattataaaagatgaaaaagaaataagaaaaattagtggtaatgaaaaaaacacaacaaataatagaatggagctgcttgctccaattaacgcactgaaagatatgaaacctggtgttgaaataaaaatatatactgactctcaatatgtaaaaaatggaataactgaatggattaatacttggttatctaataattggaaaacctcaaaaaaagaagatgttaaaaataaagatttgtggattgaattatataatttgaataaatcaaataatgttcaatggaattgggtaaaggctc

SEQ ID NO: 259882 - DNA, 385 bp, Unknown
  Bacterial polypeptide expressing nucleotide sequence isolated from the Sargasso Sea
tggcccaggaggttgggcagcactaattctaatagatgataaaattaaagaagaaatttcaggaagtgaaaaaaatactacaaataataaaatggaactgttagcgccaattaaagctattcaaaaatttaaaaaaaaatcagaaatttctatttatacagattcgacttatgtcaaagatggaataacaacttggattaaaaaatgggagaaaaatggatggaaaaccgcatcaaaaaaacctgttaaaaatagggaattgtggaaaaagttgaataatttatcatcaaaacactctattcaatggatctgggtcaaaggccacgctcagaataagtataataatattgttgatgaactcgcacaaggagctataaaaagataa

SEQ ID NO: 259883 - DNA, 148 bp, Unknown
  Bacterial polypeptide expressing nucleotide sequence isolated from the Sargasso Sea
atgacatccgctgatctctttgaaggtacagcgggtcacctcgtggcgggtgtcgatgaggtgggtcgagggccactggctggcgatgttgtggcggcagctgtgattctggcggaatcacaccccgatggcgtcacagactccaaaa

SEQ ID NO: 259884 - DNA, 199 bp, Unknown
  Bacterial polypeptide expressing nucleotide sequence isolated from the Sargasso Sea
gctgatcaaaacagctgtcccagagaacattccggccggtcccggtgttgccggcgtggatgaagttggccggggcagtttgtttggccctgtgtttgccgcggctgtagtgcttgaccattcctcggcagggcgtttgctcaaggcaagtctgaatgacagcaagaagctcagcgccaagcggcgcgagcagttgctt

SEQ ID NO: 259885 - DNA, 457 bp, Unknown
  Bacterial polypeptide expressing nucleotide sequence isolated from the Sargasso Sea
aatgcttgatatagaagcttacactgacggcgcttgctcaggtaacccaggtattggaggatggggagtggtgcttttagcgaaaaagaatggggtagtaatcaatcggcgggaaattgctggtggggtgctgaattcgacaaataatcaaatggagttgagggcagctattgaggccctgaaagctcttaaaagacgcacagaaatcaccctaataactgacagtgtttatgtaaaaaaaggtatttccgaatggttgtcaaaatggaaaaaaaataactggaaaacgagttctagaaaacctgtcaaaaatagagacttgtggcaggaattggataccttggcctctgcaaatatcgtcacttggaagtgggttaagggacatgcagggacgccagagaatgaacgagcagatacactagccacaaatgaggtgaaaaagattaagaaaaactaa

SEQ ID NO: 259886 - DNA, 181 bp, Unknown
  Bacterial polypeptide expressing nucleotide sequence isolated from the Sargasso Sea
aaaaaaaataatttggaaaaatgcttctaaaaaagatgtaaaaaataaagatttatggatagagcttgataaatatgtgtctaaacataatgtaaaatggcattgggtaaaaggacatgctggtcatgaaaaaaacgaaatagcagatactcttgcaaataaaggaatagataacttataa

SEQ ID NO: 259887 - DNA, 412 bp, Unknown
  Bacterial polypeptide expressing nucleotide sequence isolated from the Sargasso Sea
actgacggttcctgtttgacaaaccctggaaatggtggttgggcagcaattattaatcaagacggtaagattaaaaaaattactggaagtgagaaaaatacaacaaacaatagaatggaacttttagcaccaattaacgctttgaaacaaattgataataaaacaaaaataaaaatttttaccgattctcaatatgtaaagcttggcataactgaatggataaataaatgggttaacaacaactggcaaactgcaaaaaaagagaatgtaaaaaataaagatttgtgggtagaattgtataatttaaatcaatctcttgatattagttggaattgggtaaaagcccatgctggcaatcctctgaatgaggaagtagatttattagcaaaaaaagcagctaatctaaaatagc

SEQ ID NO: 259888 - DNA, 427 bp, Unknown
  Bacterial polypeptide expressing nucleotide sequence isolated from the Sargasso Sea
aatgattataatttatacagacggttcttgtttaacaaatccaggtaatggtggatgggctgcaattataaatgatggaaaagaaataaaaaaaattagtggtaatgaaaaaaatacaacaaataatagaatggagttgttagccccaattaatgcattgaaagatatgaagcctggtgttgaaataaaaatatatactgactctcaatatgtaaaaaatggaataactgaatggattaatacttggatagctaatagttggaaaacatcaaaaaaagaagatgttaaaaataaagatttatggatagatctatataatttaaataaatcgcttaatattcaatggaattgggttaaagctcatgatggaaaccctttaaatgaagaggtggacttactagctaaaaaagcagcaaatttagattaa

SEQ ID NO: 259889 - DNA, 804 bp, Unknown
  Bacterial polypeptide expressing nucleotide sequence isolated from the Sargasso Sea
attgctttgggacctgcatatataaagtttgggcaattgctatctacgaggcccgacatagtaggggctgacttggctaatgaactcaaggttctacaagattctttagaccctttcccaaccgcagaggcaaaaaaaattgtaaatgaggaacttggaagccctgttgagagcattttttcttcattttcagattcgattgccgctgcatctatagctcaggtacataaagcaaccgttaaggaaacaaaggaattggtagcagtgaaaatattaagaccagatgtcgagaaggttttccttaaggatttagctgctttattatttttagcaaaattcatagaatttattataccgagcttcaggcgacttaagcctatagaagttattaaccattttgaaagattggtgcgtgaggagctagatttaagaatggagatatcagctgcagctgaatttgcagaaaacacaaaaagtgatcgtaatttttatgttcctaaagtcatttggtctctttctggtagacgagttgtaacaacggagtgggtagatggaatgtcggttggagatatagagaatataaagaagagcggagtagatatcgaacgctttgcaaaaagaattattaagacttttttgacacaagctctacgagatggtttttttcatggggatatgcatcaaggtaatctaaaatgtagaagtgatggtacccttatagtgatggatttcggcataatgggaagaatagacgagtatacaagaaagacttatgcagaaatccttataggattcttaaggcgt

SEQ ID NO: 259890 - DNA, 228 bp, Unknown
  Bacterial polypeptide expressing nucleotide sequence isolated from the Sargasso Sea
aatgattataatttatacagacggttcttgtttaacaaatccaggtaatggtggatgggctgcaattataaatgatggaaaagaaataaaaaaaattagtggtaatgaaaaaaatacaacaaataatagaatggagttgttagccccaattaatgcattgaaagatatgaagcctggtgttgaaataaaaatatatactgactctcaatatgtaaaaaatggaataac

SEQ ID NO: 259891 - DNA, 497 bp, Unknown
  Bacterial polypeptide expressing nucleotide sequence isolated from the Sargasso Sea
tatgattggtttagatgaagctgggcgtggttcctgggcaggtccaattgttgcaactgcatgctggatccgatttcaaaatcataaattattacattctgatataaatgatagcaaaaaattaacatctaaaaaaagaaaagaaataattttatcattagacaactcagtaaaatattcgacatcaatttctaatgaaaaagaaattgatttttatggtcttacacttgctaatacaatggctatgaataggtcaacattttgtttgattaaaaaattaagtaaaattattgatttagaaaattatgaaattcacttatatgttgatggaaaatataagccaaacttttcagactttgatatatcattaaaaaataaactaaaacttaaaggcatatctgtaatacctttagttagaggtgatagtaaatccaaaactatttctttagcgagtataatagctaaggaaacaagggattcaataatgaaaaactatg

SEQ ID NO: 259892 - DNA, 294 bp, Unknown
  Bacterial polypeptide expressing nucleotide sequence isolated from the Sargasso Sea
aatgattaaaatatatacagatggtgcatgctcaggtaatcctggaattggtggatggggatgtgtaataataaaaaatgatgaaaaaccaatttttttaaatggtggtgaaaactataccacaaataaccgtatggaacttattgcagctataaaaggattaaattatttcagggaagaaaataatattactattgtaacagacagtaaatatttaaaagatggaattgaatcttggatagaaaattggaaaaaaaatggatggaagacagcttcaaaaaagccagtaaaaaa

SEQ ID NO: 259893 - DNA, 319 bp, Unknown
  Bacterial polypeptide expressing nucleotide sequence isolated from the Sargasso Sea
gaaaaaaatacaacaaataacaaaatggaattattagcgccaattagggccatacaaaagtttaaaaaaaaatctgaaattatgatttacactgactctacgtatgtaaaggacgggataacaacatggataaaaaaatgggaaaagaatggttggaaaactgcttcaaagaaaccagttaaaaatatcgaattatggaaaaaattaaaaaatttaacattaaaacattctataaagtggacatgggtaaaaggtcatgctcaaaataagtacaataatcttgttgatgaaattgctcaggaagctataaaaagataaa

SEQ ID NO: 259894 - DNA, 430 bp, Unknown
  Bacterial polypeptide expressing nucleotide sequence isolated from the Sargasso Sea
aatgattaatatttatacagatggtgcatgttctgggaatcctggtataggtggatggggtgtcgtgatattagataatgataaagaaattttgttaaatggtggtgatcaacacacaactaataataaaatggaacttacagctgcaataaaagcactggaatattttgaaataaaaaaagaattaatcatttataccgatagcaaatatgtaaaggatggtattgaattatggattacaaattggaaaaaaaatggatggaaaacttcaacaaaaaaaatagtgaaaaataaagaattatgggtgcaattagataatctaattaataaacattatgtaacatggaaatgggttaaaggacacgctggtttcgaatttaatgagaaagctgatgaactagcaaggaaatatattgaaagtaatatttaa

SEQ ID NO: 259895 - DNA, 345 bp, Unknown
  Bacterial polypeptide expressing nucleotide sequence isolated from the Sargasso Sea
atgagattgattctatcaatattcaccacgcaactcttctaagtatgaaaagagcagtttataatttaaacattgaaccagatcttgtgttggtcgacgggttatatcaacctgaagtcggaatagactgtgaatctattgttcagggagacagcaaagttgaacaaatctctgctgcttcaataatcgcaaaagttgctagagattatgaaatgaattttctacatgataaatttgagatgtataactttaaaaagaataatggttatggaacaagacaacacttggaggctattcaatctctaggaaaaacgatttatcatagagagtcctttgttaaatagt

SEQ ID NO: 259896 - DNA, 382 bp, Unknown
  Bacterial polypeptide expressing nucleotide sequence isolated from the Sargasso Sea
atgagtagagccgagcggccactgtcgccgcacttacaggtataccgtcctcagatcaccagcgtgttgtctgtgttacatcgcgggactgggattattttatctatgggtgttcttgtgctcctgtattggttgatatcaattgcaagcggtgaggaagcatatacaaatgcttatgtgttactagcaagcttgccattaaagattttttattttggtttgtgcttttgttttttttaccattttgctaatggaattcgtcatttgatttgggatataggtattgggctagatagagatgcttaccgtaagagtggttggtgtgtggttgttttttcaatagctgcggcatctatctattcaataatttttattatttagg

SEQ ID NO: 259897 - DNA, 284 bp, Unknown
  Bacterial polypeptide expressing nucleotide sequence isolated from the Sargasso Sea
aatgaaattaaaaatttataccgatggtgcttgttcaggtaatcctgggaaaggaggttgggctgccatcatattagataacaattccaatcaatcaagtatctcgggaagtgaaaaaaatacaactaataataggatggaattgttggctccaattatggcattaaaaaaaataaaaaggaaatcagagattacaatttttacggactcaaaatacgttaaggatggaataactgattggattaaaaagtggaaagttaataattggaaaaattcaaataaga

SEQ ID NO: 259898 - DNA, 427 bp, Unknown
  Bacterial polypeptide expressing nucleotide sequence isolated from the Sargasso Sea
atgataaaaatttatactgatggctcttgtttagaaaatcctggaaatggtggttgggctgcaatcataaatgataacggaaatattaaaaaaattagtggaggtgaaaaaaatactacaaacaataggatggaattaatggcaacaattaatgctttgaaaaatattgatactaataatggaatcgaaatttataccgattcacaatatgtgaagcttggaataacagaatggataaatacttgggtaaaaaataattggcaaacctcaaaaaaagaaaatgtaaaaaataaagatttatggcttgaactatataatcttaataaatcattaaatattaaatggatttggatcaaagctcatgcgggtaacccgttaaatgaagaggtcgattcacttgctaaaaaagcagctattttagattaat

SEQ ID NO: 259899 - DNA, 493 bp, Unknown
  Bacterial polypeptide expressing nucleotide sequence isolated from the Sargasso Sea
tattttaaaaaagaatataaaaaaaaaaattttaaaagactcaaaagagatatcatttaaggatagaattaaaattgcaaaatatataaaaaaaaattcatggtatgctattggtgctgcatctgtagacgaaattgataaatataatatttttaatgcaactcttctatcaatggaaagagcagtgaaaaaattaaaaaaaaaaccccacatttttttagttgacggaacccatgcaccaaaaaatttaaaaaactctaaaactgttattaaaggagatcaaaaaattaagtgtatttctgctgcctctattattgctaaagtttacagagatctttatatgataaaattaggaaatagattcccaagatataaatggcacaaaaattttggctacggtactttacaacatttgaatgctttgaaaaaatttggagttacaatttatcacagaaaaagctacaaaccggtatacaacatcttgtctaaataa

SEQ ID NO: 259900 - DNA, 268 bp, Unknown
  Bacterial polypeptide expressing nucleotide sequence isolated from the Sargasso Sea
ttaaaagaaccttgcaaagtaaaactatatacagattctaagtatgttatggatggaattaatagttggattgcaaattggaaaaaaaataattggaagactgcaagtaaaaaagatgtaaaaaataaagacctatggattgagttagatgctgaaacatgtaaacatgaaatcgagtggatatgggttaaagggcattcaggaaatattggaaatgaaaaagctgatgcattggcaaacatgggtatagacaatctagatgtctaaa

SEQ ID NO: 259901 - DNA, 353 bp, Unknown
  Bacterial polypeptide expressing nucleotide sequence isolated from the Sargasso Sea
aatgcaagaaaaaaaagaagaagatcttcagcaagcattgaataaattaacagaagttggagtagatgaagtaggaaggggagcaatttttggtccagtttttgcagcagctattgtattaacagaaaaaaataaatttacgttaaaacaatttggagtaacagatagtaaaaaactaactcccaaaaaaagagaattacttttaccaaaaattttattgctctcttcagattatggaattgggcaatcttcggccagagaaatagataagttaggtatcagggttgcgacggaactttcaatgattagagctctaaagaaattaaaagaaaagccatctgaattaataattg

SEQ ID NO: 259902 - DNA, 396 bp, Unknown
  Bacterial polypeptide expressing nucleotide sequence isolated from the Sargasso Sea
aatgcaagaaaaaaaagaagaagatcttctgcaagcattgaataaagtatctgaagttggaatagatgaagttggaagaggagcaatttttggtccagttttttcagcagttgtagtattaactgagaaaaataaattcaccttaaaacaattaggagtaacagatagtaaaaaattaactccaaaaaaaagaaaattacttttgccaaaaatcttattactctctttagattacggaattggacaatcttctgccagagagatcgataagttaggtatcagagtcgcgacagaactttcaatgataagagctttaaataagttaaaagaaaagccctctgaattaataattgatggccctctattattaaggccatggaacggaactcagaaaaa

SEQ ID NO: 259903 - DNA, 526 bp, Unknown
  Bacterial polypeptide expressing nucleotide sequence isolated from the Sargasso Sea
catggaagatataaaatctcttatcgctggagttgatgaagtgggaaaaggttgtttatttggacctgttttcgcggcagcggttgttttaagcaaagagaatgaaatagagctcttaaatcaaggtttgaaagacagtaaaaaattaagtcatcgacaaagacataacttagttcctttgataaaaacaaactcaatagcttggacaattggccaagcttcagcaagagaaatagacgttattggcatccgagatgctactgagaaagccatgctaagagcattagaaaaattttcatctccaccagacttaattcttgtagacggaattttacccattcgcttgtggccagggaaacaaaagacacaagttcaaggtgaaagtcattttgcttcaattgctgctgcaagtgtattagcgaaagaaaccagggatgaattaattaaacgactagctctcaaatacaattgttatggactagaaaaaaacaaggggtatggaactgagatccatagaacaaactta

SEQ ID NO: 259904 - DNA, 402 bp, Unknown
  Bacterial polypeptide expressing nucleotide sequence isolated from the Sargasso Sea
aatgattacaatttatacagatggttcttgcataacaaatccaggtaacggtggatgggctgcaattataaatgatggaaaagaaataaaaaaaattagtggtaacgaaaaaaatacaacaaataatagaatggagttgttggccccaattaatgctttgaaagatatgaagcctggtgttctaataaaaatatatacagactctcaatatgtaaaaaatggaataaccgaatggattaatacttggctgggtaataactggaagacttcaaaaaaagaagatgttaaaaataaagatttgtggattgatctgtataatttaaataaatcacttaatattcaatggaattgggttaaagctcatgatggaaatcctttaaatgaagaggtggacttacttgc

SEQ ID NO: 259905 - DNA, 427 bp, Unknown
  Bacterial polypeptide expressing nucleotide sequence isolated from the Sargasso Sea
atgattaaaatctatactgatggttcttgtttacaaaatcctggaaacggtggttgggctgcaattataaattatgagggcaatattaaaaaaataagtggtagtgaaaaaaatactacaaataatagaatggaactattagctccaataaatgctttaaaaaaagtagaacataataaagaaattcagatttatactgactctcaatacgtaaagcttggaataactgagtggataaatacttggataaaaaataattggcaaacctctaaaaaggaggatgtgaaaaataaagatttatggattgagctttatgatcttaataattcattaaatattaagtggaattggataaaagctcattcaggaaatgccttaaatgaagaggtagatttattggcaaaaaaggcagctttactagattagt

SEQ ID NO: 259906 - DNA, 420 bp, Unknown
  Bacterial polypeptide expressing nucleotide sequence isolated from the Sargasso Sea
aagaacgtttatcaattgcggctgcatcaattgctgttatagaaacggtattggaatacaccattcaatactgccatgaacgtaaagcctttggtcaaaaaattggaagttttcaaaattcaaaattcaaattagcagaaatgaaaactgaagctgaaattggtagaactttttatgatcaatgtgtctttgaattaaatgataaaaaactaacacctgaaaaagctgcaatggcaaaatggtggcttaccgatgtagagcatcgtgtggtggatcaatgcttacagctgcatggtggttatggatatatccttgaatatcctgttgctaaagcgtatcttgattctcgtgtacaaactatctatggtggtaccaatgaaattatgaaagaaatcattggtagatcgttaggattttaat

SEQ ID NO: 259907 - DNA, 277 bp, Unknown
  Bacterial polypeptide expressing nucleotide sequence isolated from the Sargasso Sea
atgattacaatttatactgatggctcttgtttaataaatccaggtaatggtggatgggctgcaattataaatgatgaaaaagaaataagaaaaattagtggtagtgaaaaaaatactactaacaatagaatggaactactagctcctataaatgcactaaaaaatatgaaacctggtactgaaataaagatatacactgactctcaatatgtaaaaaatggaataactgaatggattaatacttggttagctaataatggaaaacctcaaaaaaaga

SEQ ID NO: 259908 - DNA, 461 bp, Unknown
  Bacterial polypeptide expressing nucleotide sequence isolated from the Sargasso Sea
aaaagactcgaagaaaattaaattcaatatgcgagaagagatttcagaacatattaaagattactcatattattcaattggtattgcatcagtaaacgaaattttaaatcttaatattttacaagcatccttactttcaatgaaaagagcgattgaacggttaacggtaaaacctggtttgactttaattgatggaaactttgcgccaaaaggtttgaaaaattataaaactattattaatggtgatgaaaaaattaaagtaataggcgctgcttctattattgcaaaagtttatagggataggctaatgataaatctttcaaaaaagttttctaattatgcttgggaaaaaaattttgggtatggcactaaagctcatttagaaggcttaaaaaaatttggtataacttcccaccatagaaaaagtttcaaaccagtgcacaagatattgtctagataga

SEQ ID NO: 259909 - DNA, 574 bp, Unknown
  Bacterial polypeptide expressing nucleotide sequence isolated from the Sargasso Sea
attgaaaaataattttataatagctggagtagatgaggttggacgtggttgtctagccggtccagttgtttccgcagctgtaatattcaaaaagaatattagcttaaaaaaaataaaagactcaaaaaaaattaatttttcagataggcttgaaattgcagattacataaaaaaaaactcttactattctgtaggtgttgctagtgtaaacgagatatttaagtataatattttaaaagcttcattaatatcaatgagaagagcaattaaaaaattgtccttaaaacctagcttaatattaatagatggcccttttgctcctgaagggattaaaaattataaaacaattattagaggtgacagcaaagtaaagtgtataagcgctgcatcaataatcgccaaaacttatagagatcttcttatgataaaattgtcagaaaaattttctaattatgcttgggaaagaaattttggttatggcactcgagatcatttaaaaggtttgagaaaattcggtatcacatctcatcatagaaaaggtttcaaaccgatatacaagatgttgtctaaataa

SEQ ID NO: 259910 - DNA, 571 bp, Unknown
  Bacterial polypeptide expressing nucleotide sequence isolated from the Sargasso Sea
aatggcaaataaaattctagcaggcgtagatgaggttggaagaggttgtttagctggtcctgttatttcatgtgcacttattttaagaaaaaatatcaacaaaaaacttttaaaagattcaaaaactataccttttagggatagaataaagattgccgatcatattaaaaaaaattcctggtatgctattggttcagcatcagtcaacgagatagataaatataatatttttaatgccaccctactgtcgatggaaagagctgtaaaaaaattaaaaaagaaacctcatctttttcttattgatggaactcatgcaccaaaaaaattgaaaaattctaaaactattataaaaggggatcaaaaaattaaatgtatttctgcagcttccattgtagccaaagcttatagagatctttacatgataaaattaggaaataaatttccacaatacaattggcacaaaaactttggttacggcacttggcaacatctgagcgccttaaaaaaatttggagtcacaaatttccatagaaaaagttataggcctgtacacaacatgttgtctaaataa

SEQ ID NO: 259911 - DNA, 447 bp, Unknown
  Bacterial polypeptide expressing nucleotide sequence isolated from the Sargasso Sea
gggaaaatctttatgatgtcattcaaagtgaatgtttaggttcttcaattcaaagcattgataatcatgtcattgatgaaaaaaacattctagttgctactctagaatcgatgaaagaagcaatagatgcgatcgaaatagccgtagatgagatagttattgatggccctcataagccagtaatgcataatgatagagatttaatcacgagtggtgtcattggaggagataaactatttcattgcatctcagcagcatctataattgctaaggtctacagagatagatttatgattaaattacatcaaaagtttccagaatataatttccagaaaaacaaaggataccctacaaaagatcatatcgaggtcatcaaaacattagggccaagcccatatcatagactgacatttaagccggaactatatgatgagaggcttctatgag

SEQ ID NO: 259912 - DNA, 181 bp, Unknown
  Bacterial polypeptide expressing nucleotide sequence isolated from the Sargasso Sea
catgcgcattgcaaaagttactcgtgatagaatgataactattttaggaaaaaaatttaagggttattactggcataaaaattatggctatggaactaaacagcatttacaagctataaaaactttaggaataacatcacatcataggaaaactttttcaccaattaataaaataaaatag

SEQ ID NO: 259913 - DNA, 373 bp, Unknown
  Bacterial polypeptide expressing nucleotide sequence isolated from the Sargasso Sea
catgtccgtcgcttacgactatgcagccggcctgctgcgcaggctgttcgaccgccatatcgacggcggcgcggtgctcgacccggccgcgtttcccgacgcagggcgtttcgtccgcgcatggaccgacatccaggctgaagcgttcgccgtggcgcgcgacatgccgcgcattccgcgctttcacgagatcatgcgcattgcaaaagttactcgtgatagaatgataactattttaggaaaaaaatttaagggttattactggcataaaaattatggctatggaactaaacagcatttacaagctataaaaactttaggaataacatcacatcataggaaaactttttcaccaattaataaaataaaatag

SEQ ID NO: 259914 - DNA, 508 bp, Unknown
  Bacterial polypeptide expressing nucleotide sequence isolated from the Sargasso Sea
ctgaaaacagaacccgaaaccggaaaacactcacggggcaagaagcgtatatcgacaaacgattacacactttttcagtttctcaaacgagtacgtaaacgggctcggcgatggattctcatcgaggcgatttcacttattggtttatctatagcggtgtggttctggggcacactccttctcgactggctcattgagcctccgccagcagtacggctcctcgctacgggattactctgcctttggattggtacgattatcctaaaaagactcatcatccggctgcgtgcgccattgcgagatgagcaactcgctttactggttgaacggacacacccagagttacaagacagtctttcgacagcagtagaactcggcctcggagaaaaacactcagcttcatctacaattgaccccagccttcttgatcgcacaacgtcgattgctgctgcatctattaagcgaattacgatggggcgtctcttcaggcgagctcatcttctgcgga

SEQ ID NO: 259915 - DNA, 275 bp, Unknown
  Bacterial polypeptide expressing nucleotide sequence isolated from the Sargasso Sea
aaaagcgatgcaaaaattcaagaaaaaatcagaaatttcaatttatacagactcgacttatctaaaagaagggataacaacctggataaaaaaatgggaaaaaaatgggtggaaaactgcaacaaaaaaacctgttaaaaatatagagttatggaaaaagttaagagatttatcgtcaagacattctattaagtggatttgggtaaaagggcatgctcaaaatgaatataataatattgttgatgaactcgcaaaaggagctataaaaagataaa

SEQ ID NO: 259916 - DNA, 445 bp, Unknown
  Bacterial polypeptide expressing nucleotide sequence isolated from the Sargasso Sea
tttgctttcaaaatacattaaaaaaaattcaatttatgctattggaaaagcgaatgtagaagaaataaataaaatgaatattttaaacgcaactcttttatcaatgaaaagagctttaaataagcttaaacaaaaaccctctattgcctatatagacggtacatttgctccaaaaaacttaaaaataaaatgtagaacttttgtaaaaggagatgagaggtttctatgcatttccgcggcatctattattgcaaaagttgctagagatttattcatgattaaactttcaaaaaaatttcccgaatacgagtggaataaaaattttggttatggaacctatgatcatttaaatagtattaaaaaatacggaattactaagtatcatagaaaaaaatttagaccgatacacaacatcttgttctcaaacaaacgtgaaacacaatag

SEQ ID NO: 259917 - DNA, 436 bp, Unknown
  Bacterial polypeptide expressing nucleotide sequence isolated from the Sargasso Sea
atgtctattgaaatttataccgatggagcttgttcaggaaatcctggacttgggggttggggtgctattatcttaataaataaaaatgaaccaatctatattaatggtggttctttaaaaacaactaacaatcaaatggaattaatagcggcaatagaagcattaaaatatttatcaaaatcagcgtacttaaatttattcactgatagtaagtatgtaaaagatggtattgaatcatggattcaaaattggaaaaaaaatggatggaaaacatctgctaaaaaagaagtaaaaaacaaagatttatggattgagttagacaaacaaatactacgtcataaaatacaatggttttgggtaaaaggtcatgcgggtaataaatataatgaaaaagctgatttattagcgagaaaatttattattgataatcaatgat

SEQ ID NO: 259918 - DNA, 427 bp, Unknown
  Bacterial polypeptide expressing nucleotide sequence isolated from the Sargasso Sea
aaaatttataaaaaaaaattctacttgggcaataggatctgcctcagttaaggaaatagaaaaactaaatattttaagtgctagtctattagccatgaagagagctataaaaaaactaaaagttaaacctaatttagtacttattgacgggaataaatcaccagaattaagtaattatcttattaaaacaataattaaaggagaccaaaaaattaaagaaatatcagcagcatcaataattgcaaaagtttcaagggataaactgatgctcaaaatttcagaaagttttaaaaaatataaatgggatttaaatgctggttatggaactagagatcacattgatgctattagaaaatatggagtaactagatttcatcgaaaaacattcaatcctatacacaacatattgagtcacagaaaaaaatag

SEQ ID NO: 259919 - DNA, 340 bp, Unknown
  Bacterial polypeptide expressing nucleotide sequence isolated from the Sargasso Sea
tatgaaaagggcagtagaaggattaaaaactaaaccttccaatgcagttattgatggatggagatgggaatctatgaatgaatacttaaatcttccagtaacatcagaagtaaaaggtgatgcaaaattttattctattgcagcagcttcaattatcgctaaagaatttcatgatgaatatattagagaaatttgtaatgaagatccttctttaaatacaaattatgacttgcttaaaaatatgggttatggaactaaaaaacacttgaaaggaattgaagataatggaatttctgttcatcatcgtaaaactttcaaaccttgtagtaattacgtataa

SEQ ID NO: 259920 - DNA, 286 bp, Unknown
  Bacterial polypeptide expressing nucleotide sequence isolated from the Sargasso Sea
atggttgttacgatgtacacagatggtgcttgttcagggaatcctggaaagggtggatatggaacactgctcctggcaggaagtcatcgaaaagagatctcagaaggttatagattaacaaccaataatagaatggaattattggctgtcattattggacttgaagcgattaaaacagatggtactgaaatccatgtttacactgattctaagtatgtttgtgatgcagttgagaaagggtggctcagaaactggcaagtaaaaggctttaaaggaaagaaaaatg

SEQ ID NO: 259921 - DNA, 304 bp, Unknown
  Bacterial polypeptide expressing nucleotide sequence isolated from the Sargasso Sea
aataaattaaaaactaatattgatattattctaattgactccataaacttagatataaaggaaaagaatattggttttaataaagctgattcaatatctgtttctgtggcggctgcatcaattcttgcaaaagttgccagagatcaaatgatgactaagatttataataatttgtaccctggttatttttttaaaagcaataaaggttacggatctaaagcacatattgaatctcttaattctataggggttagcaaaatacatagaaaatcatttaagcctataagtaatctgctgatatgaa

SEQ ID NO: 259922 - DNA, 409 bp, Unknown
  Bacterial polypeptide expressing nucleotide sequence isolated from the Sargasso Sea
atggattttgatttcgactttcaatttaaaaaacaggtaattgggattgatgaggtgggtagaggttcttgggcaggacctgtagtcgcttctgctgcattaataaacaacaacaaaaaaattgatagaaggttaaacgattcaaaaaaactttctcctaaaattagaaaggatgtatttcaaaacttgactaaatatagtttttttggtgtcggtaaaatatctaatgatgagattgataagattggaattgttaatgcaacatttaaagcaatgcagttggcgttaaataacttattaaaaaaacattataaagttgaaaaaccaattattttaatagatggaattttgatgccagatttcatacaaagcttcaatgctgaacttaaattaattaaaagagggtgat

SEQ ID NO: 259923 - DNA, 430 bp, Unknown
  Bacterial polypeptide expressing nucleotide sequence isolated from the Sargasso Sea
atgattactatttatacagatggagcatgttctggcaacccaggtataggtggttggggtgcagttattttagaaaataaaaaagatgatattttgttaaatggaggaaatgataatactacaaataataaaatggaattaacagcagctattgagtcattaaagtttttcaaagaaaaacaggaaattagattagttactgatagcaaatatgtaaaagatggtattcaatcttggatacataattggaaaaaaaatggatggaaaacaagttcaaaaaaaccagttaaaaataaagaattatggatagaacttgatgaattaatagcaaggcataaaataacttgggaatggaccaaaggccatgcaggaaataaatataatgaaaaagcagattacttggcaagaagatatattgaagaaatctagt

SEQ ID NO: 259924 - DNA, 559 bp, Unknown
  Bacterial polypeptide expressing nucleotide sequence isolated from the Sargasso Sea
gcagaagagttaggattgagtgatcagatagatattattaatggcacattatcaaaatcctttggtcaattaggtggttatgtagctgctaacgcaaatatcatcgattatatcagaagtttcgcatcaggttttatttttacatcatcaataaatccctcaattgcagcagcatcaataaaaagtattgagctaagtaaagaatctgaaaccttgagattaagaattagaagaaattcaaaatttattagagaaggcttaaaatcaattcaagttccattcattgataatgatagtcatattgttccaattcttgtcaaaggtcctctagagtgtaaacaaatatcaaaattacttttagataaatttgggatttatattcaacctgttttctatccaactgttcctaaaggcgatgaaagattaagggtaacaataacaataacaccaaaacattctaagaaagatattgaaagctttgttaattctattgatgaagcatggaatattcttggttttgatagggttgaagaacaaataatccataatcaaatataat

SEQ ID NO: 259925 - DNA, 208 bp, Unknown
  Bacterial polypeptide expressing nucleotide sequence isolated from the Sargasso Sea
gatggaattacaacttgggataaaaaaatgggaaaaaaatgggtggaaaactgcttcaaaaaaaccagttaaaaatatcgaattgtggaaaaaattaaaaaatttatcatcaaaacattctataaaatggatatgggtgaagggtcacgctcaaaataagtataataatcttgttgatgaaattgcacagggagctataaaaagataa

SEQ ID NO: 259926 - DNA, 379 bp, Unknown
  Bacterial polypeptide expressing nucleotide sequence isolated from the Sargasso Sea
ggtggttgggcggcaatcatcaaaatgaatggaaacataaaaaaaatcagtggtaatgaaaaaaacaccacaaataacaggatggaattaatggctccaatcaacgctttaaagaatattaattctggtgaagaaattaatatctacacagattctcagtatgtaaaacttggaataactgaatggataaaaacttgggttaaaaataattggaaaacttccaaaaaagaagaggtaaaaaataaagatctttggactgaactttataatctaaataaaactcttaatattaaatggatttggataaaagctcatgcaggaaatccactaaatgaggaagttgatttgttggcaaaaaaggcagctggactagactaat

SEQ ID NO: 259927 - DNA, 199 bp, Unknown
  Bacterial polypeptide expressing nucleotide sequence isolated from the Sargasso Sea
cattagtgcggcatctattattgcgaaagtctatagagacaatttaatgataaaattatctgaaaaattttccaattatgcttgggaaagtaattttggctatggcacaaaagcacatttaaatggtttaagaaaatttggtataacttctcatcacagaaaaggtttcagaccagtacacaagatattgtcaaattag

SEQ ID NO: 259928 - DNA, 278 bp, Unknown
  Bacterial polypeptide expressing nucleotide sequence isolated from the Sargasso Sea
cccaataatggctttgaaaaaaataaaaaaaaaatctgatataacattttacacagactcacaatacgtcaaaactggaattacagaatggataaaaaaatggaaaattaataactggagaaattcaaacaaaaaaccagtgaaaaataaggatctatggattaaacttgataattcatgtcagagacataaagttaattggaaatgggtaaaagctcacgcaggaaataagttaaatgaattagttgatgaaatagctgtattaaaaactaaatagt

SEQ ID NO: 259929 - DNA, 307 bp, Unknown
  Bacterial polypeptide expressing nucleotide sequence isolated from the Sargasso Sea
tgcaataaactcattaagtgttaagccagataaagttctagttgatggctttgcattagatattaaaattgaaaacaagggtatcataaacggtgatcaaaaatatcagcaaattatggctgcttcaattatagcaaaagtaacaagagatgaaataatgcgatcatttcattatatttatccacaatatgattttatatcaaatagcggatatggaacaaaaaaacacttgaaagcattagacaaatactcatacactcgaatacacagactaacctttaagccaatatcaaataatattaaataa

SEQ ID NO: 259930 - DNA, 493 bp, Unknown
  Bacterial polypeptide expressing nucleotide sequence isolated from the Sargasso Sea
attgaatatcaaaattgcggccaaaaataaaaatcaaagaattatcggcgctgacgaagttggtcgtggttcgttagctgggcctattgttggagctgccgttaagcttgaatttcaacatttagatttgttaagtgatgtaaaagattctaaaaaattatctccgaaaaaaagagaagaaatttatgaaagggtaaaagaaaatagaatcgaatattttatttcagaatgttcaaatttacatattgaccaaaatggcatatctgtctcaaacaaagtagtgttgtttaattccatcaataagttgtatcagaaatcagacaaggtctatgttgatcatttcaaaatagacaaatttggttccatatctctggttaggggagaagataatagttactccattgcactggcaagtattattgcaaaggtctacagagataatttaatggttgattttggaacaaaatatcctaaatatttatttgaaaaaaat

SEQ ID NO: 259931 - DNA, 427 bp, Unknown
  Bacterial polypeptide expressing nucleotide sequence isolated from the Sargasso Sea
aatgattacaatttatacagacggttcttgtttaacaaatccaggtaatggtggatgggctgcaattataaacgatggaaaagaaataaaaaaaattagtggtaacgaaaaaaatacaacaaataatagaatggaattgttagccccaattaatgcattgaaagatatgaagcctggtgttgaaataaatatatatactgactctcaatatgtaaaaaatggaattactgaatggattaatacttggttatctaataattggaaaacctcaaaaaaagaagatgttaaaaataaagatttatggattgatctatataatttaaataaatcgcttaatattaagtggaattgggttaaagctcatgatggaaaccctttaaatgaagaggtggacttactagctaaaaaagcagcgaatttagattaa

SEQ ID NO: 259932 - DNA, 790 bp, Unknown
  Bacterial polypeptide expressing nucleotide sequence isolated from the Sargasso Sea
ggaagcgctgtgatcgcttcaaacacctctagcttgcctgaggtcgtggggttaccagaggcattgtttgatccgatggacttagaagacatagcccggttgatagagaaagcgctaaaagatgagaaattcagactccgtttgattgagcatgctccagttcaggcggctaaattctcatggaagaacaccgcctccaaagcactcgaattcttcgagcagcttatcgaaactgaatgtccatcggctgttgcggagttatccgaaaaaaaaaggaatgctgagtggcagtcagggtatgcggatcgtcttagcgggcttgtttcgcttttatcaaagagtctggcggaagaggcaaatgtaaaaaatcgccaaacactaatgagtcaagttgcgatcgcgatcgaacagaatgaatctgaattgctgcggtaccgaagacgtgtttctgaagaggtaagcccctggcgtatcgaaggcccttttgacaccagctattccctggcactggtaaaccgagaactggctagggggctagtgactctgggagtcgatgtttcacttcattctaccgatggcccaggagattttgaacccgatcaaaaatttctgcaggaacatccggatcttgccaatctcgagaggaaatcgagagaggagtcgagccaaccagcggcggtcacaagccgaaatttgtaccctcctcgggtaagtgacttgccacgtggattcaatatgctgagcgcgtttgcctgggaggagggggagctacctgcggactgggttgccg

SEQ ID NO: 259933 - DNA, 427 bp, Unknown
  Bacterial polypeptide expressing nucleotide sequence isolated from the Sargasso Sea
atgattacaatttatacagacggttcttgtttaacaaatccaggtaatggtgggtgggctgcaattataaatgatggaaaagaaataaaaaaaattagtggtaacgaaaaaaatacaacaaataatagaatggagttgttagctccaattaatgcattgaaagatatgaagcctggtgttgaaataaaaatatatactgactctcaatatgtaaaaaatggaataactgaatggattaataattggttagataataattggaaaacctcaaaaaaagaagatgttaaaaataaagatttatggattgatctatataatttaaataaatctcttaatattcaatggaattggattaaagctcatgatggaaaccctttaaatgaagaagtggacttactagctaaaaaagcagcaaatttagattaat

SEQ ID NO: 259934 - DNA, 421 bp, Unknown
  Bacterial polypeptide expressing nucleotide sequence isolated from the Sargasso Sea
tttatttttacatcatcaataaatccctcaattgcagcagcatcaataaaaagtattgagctaagtaaagaatctgaaaccttgagattaagaattagaagaaattcaaaatttattagagaaggcttaaaatcaattcaagtcccattcattgataatgatagtcatattgttccaattcttgtcaaaggtcctctagagtgtaaacaaatatcaaaattacttttagataaatttgggatttatattcaacctgttttctatccaactgttcctaaaggcgatgaaagattaagggtaacaataacaccaaaacattctaagaaagatattgaaagctttgttaattctattgatgaagcatggaatattcttggttttgatagggttgaagaacaaataatccataatcaaatataat

SEQ ID NO: 259935 - DNA, 280 bp, Unknown
  Bacterial polypeptide expressing nucleotide sequence isolated from the Sargasso Sea
accttaatagacgggaatttcgctccaaagggtctaaaaaattataaaacaattataaatggagatgaaaaaattaaagtcataagtgcagcttcaattattgcaaaagtttacagagataaattaatgataagattatctaaaaaattttctaattatgcctgggatagaaattttggatatggcactaaagctcattttgaaggtttaaaaaaatttggtgtaacctcacaccatagaaaaggttttaaaccgatacacaagatattgtcgagttaag

SEQ ID NO: 259936 - DNA, 404 bp, Unknown
  Bacterial polypeptide expressing nucleotide sequence isolated from the Sargasso Sea
tttaattttaaaaaaatctttttttgcttatggagtagtgtccaataataagattgataaaattaatattctgaatgcttctttattggcaatgaaaagagctatacttaagttacctgttaggccttctatggttttagttgatggtacttttaaacctgatttagatattccaatgagggcaattataggtggcgattcatctgagaatgcaataagcgcagcatcaataattgctaaagtgtatagagataatttaatgattaaatatgattctatttttcctgtttatgatctaaagggtaataaagggtatggaacaaaaaaacatttggaagctttaaagaattatggacattgcgaaatccataggacaacatttaatggcgtaattattaaatgag

SEQ ID NO: 259937 - DNA, 349 bp, Unknown
  Bacterial polypeptide expressing nucleotide sequence isolated from the Sargasso Sea
aataatgaaattacactttttggtggagaaaaaaataccacaaacaatcaaatggaaatgacagctgctatagagggactgagttactttgaagaaagaacaaatatagaaatttttactgactctaactatttgaaggacggaatagaatcttggattcactcttggaaaaaaaatggatggaaaaccgcctcaaaaaaacctgttaaaaatcaagaattatggatgaaagttgatgaattaaatcaatttcataatgtatcttggagttgggttaaaggacatagtggaaatagggaaaacgatattgctgatatgcttgctaataaaggtatagacgaaatataaa

SEQ ID NO: 259938 - DNA, 88 bp, Unknown
  Bacterial polypeptide expressing nucleotide sequence isolated from the Sargasso Sea
gatgatctcactcagtaaacataaaatcaattggtactgggttaaggggcatgcggggcacgaattcaatgagagagctgatttactt

SEQ ID NO: 259939 - DNA, 166 bp, Unknown
  Bacterial polypeptide expressing nucleotide sequence isolated from the Sargasso Sea
tcacagagataaattgatgttaaattattcgaagatttatcctgattatagatttgaaaaaaactctggatatggaacaaaagagcaccttttagcaattcaaaagtacgggattacccctatacatcgaaaatcattcagtccaatacacaagatattgaattaa

SEQ ID NO: 259940 - DNA, 532 bp, Unknown
  Bacterial polypeptide expressing nucleotide sequence isolated from the Sargasso Sea
ttggtccagttttatgcggcagcggttatatttaatcttaaaataaataaaaaagaaattaaagactctaaaaaactgaaaaaaattgagagagaaaaattatctaagtatataaaaaaaaattctatttgggctattggatcagcatcaattagagaaatagaaaggcttaatatattaaatgcaagtctattagctatgaagagagcaataaaaaaactaaaagttaaaccaaatttagtacttgttgatggaaataaatccccagatttgaataattacattacaaaaacagtaatcaaaggagatcaaaaaataaaagagatatccgcagcatcaattgttgcaaaagtatcaagagataaactgatactcaaaatgtcagaaagttacaaaaaatacaaatgggactcaaatgcaggttatggaaccaaagatcatactaacgctattagaaaatatggaataactaggtttcatcgcaaaacattcagtccaatacacaacatattgagtcttaaaaaaaaatagc

SEQ ID NO: 259941 - DNA, 169 bp, Unknown
  Bacterial polypeptide expressing nucleotide sequence isolated from the Sargasso Sea
tttgaataaagtatgcgaagtaggaatagatgaagttggaaggggagcagtttttggccccgtattctcagcagttgttgtacttactgaagaaaacaaatgtatcttaaaaaaatttggtgttgtggatagtaaaaaattgactccaaaaaaaagaaaattacttttg

SEQ ID NO: 259942 - DNA, 460 bp, Unknown
  Bacterial polypeptide expressing nucleotide sequence isolated from the Sargasso Sea
attagaagttttgcaccagggttcatatttacttcttcagcaaacccaagcattgctgcagcatcaattcaggcaatcaaaatagctaaaaaagctgatatcttgagagccaatataagagcgaattccgatttaataagagagggtcttacagaatacgagataccctttcttgcaaacgatagccacataattcctatccatctatatgaacctgaattatgtaaacaggccgctaatgttctaattgaagagcatggaatttatattcaaccaatattctatccgaccgttcctaaaggcgatgaaagatttagggtcacaattacaccaaagcactcagcttcagatgtacagagctttgttcaatctttagacaaggtctggagtggtttaaatctaaaaagacttccaaaaacatccgataaagtagaaactaaagtttctaaaatttattaat

SEQ ID NO: 259943 - DNA, 289 bp, Unknown
  Bacterial polypeptide expressing nucleotide sequence isolated from the Sargasso Sea
aagaaaagagaagttttatatagcgagactttagaaaatgctacttcagttgcagtcggaattaaatggaacgattatattgataagcataacattaaaattgcatcagaagacgccatgaaagatgcaataagctcattaaatgttacgccagataaaattctagttgatggattttcattagatattcatattgaaaacgaaggtatcataaaaggtgatcaaaaatatcagcaaattatggctgcttcaattatagcaaaagtaacaagagatgaaataatgcgat

SEQ ID NO: 259944 - DNA, 433 bp, Unknown
  Bacterial polypeptide expressing nucleotide sequence isolated from the Sargasso Sea
atgaaaacagtaaatatttatacagatggtgcatgcagaggaaaccctggtgatgggggatggggagtgcttatcgaatatgaaaatatttcaaaagagtatttcggtggtgaaaaaaatacaactaataataaaatggagttaaaggctgctatttatgggttaagcgttttaaaagaatcctgcgaagtgaatattactactgattcaaaatatgttatggatggaattacttcctggatagaaaattggaaaaaaaataactggaaaaatgcatcaaaaaaagatgttaaaaataaagatctttggattgaattagataaattaacaaccaagcacgatgtaaaatggaattgggtaaaaggtcattctggtcatgaaaaaaacgaaattgcagacgcacttgcaaataaaggaatagataatttataaa

SEQ ID NO: 259945 - DNA, 439 bp, Unknown
  Bacterial polypeptide expressing nucleotide sequence isolated from the Sargasso Sea
ttcaaaaaaacttagtctaaaaaataggataaaattatctaatattattattactgattcgctatgtgtttcgattggggtggcaacaagggatgaaatagatgatattaacatccatcatgcgacgcttttgtccatgaaaagagctgtagataatcttactataacacctgataaaatatactttgatgggctctatgttcctgacttaaatatagagtcccatgctatagtgaaaggtgacagcaaaataagagaaatatcagctgcatcaattatagcgaaagttgcaagagataatgaaatggctcatctcaataagatatttagaacctatgactttattaaaaataagggttatggtacgccgcatcatttacgggcgatatcattctttggaaaaacaatttatcatagggagtcttttctcaaattgtaa

SEQ ID NO: 259946 - DNA, 310 bp, Unknown
  Bacterial polypeptide expressing nucleotide sequence isolated from the Sargasso Sea
aatgaaaagagctatactaaacttaccaataaaacctactatggttttagtcgatggcatatataaacctgatttaaatatttcaatgaagactattattggcggggattcaattgaagatgagataagtgcagcatcaattatagccaaagtatatagagataatttaatgattaattatgataaaaagtattcaagcttcagctttaaacaaaataaaggatatggtaccaaaaagcattttgaggctttagaacactttggttgtaccgaaattcatagaaaaacttttaaaggagttatcaaataa

SEQ ID NO: 259947 - DNA, 532 bp, Unknown
  Bacterial polypeptide expressing nucleotide sequence isolated from the Sargasso Sea
aagtttaataggacctgtgtatgcagcagctgtggttttaaatcactcgataaacaaaaaactattaaaagactctaagaagttatcgaaaaaaaggagagaaattttagctcagtatatcaaaaaaaattctacatgggccatagcaaaagcatcgatctgtgagattgaaaaaaaaaatattttacaggctagtttgatggcaatgaaaagagcaatccttaaattgaaaaaaaaaccctcaatgattttaatcgatggaaataaattaccaaaaatagaaaactacaaacttaaatctgtaatcaagggagatcaaaaaataccatcaatttctgctgcatcaattattgcaaaagtagctcgtgataattttatttcaaagttaggtattagatataaaggttactcatgggatgaaaattatgggtatggtaccaaaaaacatttaagagctatcaaaaagtttggggccacagttcatcacagaaagactttttcacctttaaataaattaaatacctcaaattaa

SEQ ID NO: 259948 - DNA, 256 bp, Unknown
  Bacterial polypeptide expressing nucleotide sequence isolated from the Sargasso Sea
aactccagaattaaaaaattataatttaaaatcagttataaaaggagataaaaaagtcccctctatttcagcagcctctataattgcaaaagtatcaagagataagtttgtgatcgccttatcaaaaaaaaataaaggttacgattgggataaaaactttgggtacggaacaaaaaagcacttaaaagctttgaaaaagttaggtattaccaaacatcatagaaaaactttttcaccaatatctaaaataaattaa

SEQ ID NO: 259949 - DNA, 278 bp, Unknown
  Bacterial polypeptide expressing nucleotide sequence isolated from the Sargasso Sea
aatgaagtatgtaatttatactgatggtgcatgttcaggtaacccaggtaaaggtggttgggctgctataattctagacaaaaattataatcaattaaatatttctggtagcgtaaataatactacaaataacagaatggaattaatggctacaattatggctttaaaaaaaataaaaaagaagtctgaaatagaaatctatacagactcaaaatatgtaaaagatggtattactgaatggattaaaaaatggaaattaaataattggaaaagttcaa

SEQ ID NO: 259950 - DNA, 292 bp, Unknown
  Bacterial polypeptide expressing nucleotide sequence isolated from the Sargasso Sea
cttggataattttttaaaagataaaaaattaaaattaaaagattattcggtgaaatctctaataaaaggtgataccttatccaaaactattgcgttagctagtattatttctaaggaaacaagagatactataatgaggcaattgtcaaaaaaatacccatcttacttgtttgatagtcattttggatatgggacaaaaaatcatataaatgctattttaaaaaatggtgttttagatttacacagaaaatcatttaaacctattgctactatatatagtaaaacaatctaa

SEQ ID NO: 259951 - DNA, 541 bp, Unknown
  Bacterial polypeptide expressing nucleotide sequence isolated from the Sargasso Sea
ggagaggttcttatttggtcagtaatatcatgttgtgttattgcaaatgaaaagtttaataatttaaatctatcaaagataaaggattcaaagaaattatctgaaaaaattagaaataaatttgtccgagaatttattgatgaaggatgtgattttggactaggatactcaaacaataaatacatagacgagtttaatataagtgaagctacactattctctatgcaagattcaatcaataatctgaatattaaaccaaaggctattttaatagatggtatacataagattcctaatattgattgttaccaattagcaataccaaaaggtgatagtaaatgtaaaactattggtgccgcatctattttggcaaaatttgttagagattttattatcagaaaatatcataatgcagtaccatattatgatcttataaaaaatgtaggatatggcaccagcattcacataaagaatattaatacatatggtaaaagctttggtcacagaaaatcttttaaaatcaaatcaattgacagataaa

SEQ ID NO: 259952 - DNA, 547 bp, Unknown
  Bacterial polypeptide expressing nucleotide sequence isolated from the Sargasso Sea
gagaaaaaaaatatacctaaacttcgtaaactcggtgttcgtgattcaaaaaaacttagtcctaaaaagcgtgaattattgtataaagaaattgtaaaacttgttgacgattaccatgtaattcgaattcctccacgaaccattgacaagtacgttttcgaacataacttgaatcatttagaagcaaaaaaaatggccgaagtgatatctaatcttaatcctgatctatcatatgttgattcttgtgatgtaaatgctgctagatttggtcgtgagatttctgacttatctaaaaaatccaaggtaaaatcatatcattacgctgattctagatttgttgtcgtctctgccgcatcaataattgccaaagtttcaagggatcgttctatcatgcgtttaaacaagactacaaatcttggaagcggatatccttcagataaaaaaagcgtaaactatgtaaagaaagtcgtctcatcaaaaaaatctcttcctacttcaattcgcaaaagttggaaacctgttcaaaaaatacttggtttaatttagt

SEQ ID NO: 259953 - DNA, 337 bp, Unknown
  Bacterial polypeptide expressing nucleotide sequence isolated from the Sargasso Sea
ttggaagatataaaaaatcaaataattggaattgatgaagttggaagaggagctttctgtggtcctgtagtttcatgttcaattcttttgtcaaaagaaattcttaaatatgatctagttcatgaaattaatgattcaaaaaaattaaatgaaaagaaaagactgaacttatcaaatttcataaaaaaaaattcactttactcaatcggagtggcaaatagcaaagaaattgataaatttaatattcttgaagcaacaaatctatcaatgaaaagatcttatataaaatttaaatcatttgaaaactttgttaaaatagatggtaatagaacttttt

SEQ ID NO: 259954 - DNA, 360 bp, Unknown
  Bacterial polypeptide expressing nucleotide sequence isolated from the Sargasso Sea
attgaataaagtatctgaagttggaatagatgaagttggaagaggagcaatttttggtccagttttttcagcagttgtagtattaactgagaaaaataaattcaccttaaaacaattaggagtaacagatagtaaaaaattaactccaaaaaaaagaaaattacttttgccaaaaatcttattactctctttagattacggaattggacaatcttctgccagagagatcgataagttaggtatcagagtcgcgacagaactttcaatgataagagctttaaataagttaaaagaaaagccctctgaattaataattgatggccctctattattaaggccatggaacggaactcagaaaaa

SEQ ID NO: 259955 - DNA, 526 bp, Unknown
  Bacterial polypeptide expressing nucleotide sequence isolated from the Sargasso Sea
ttctgcgattacttctccaggccggttacacgaacggattacacactgatgaaatacatctcagcggcttcaattttatcattggtgattgtaatttcatactgtgcatacttcgctgcaggaattgttctcaacaatgaaggctgggctttcctattggatacaacgacctacttcatcggtggattggtggcggcgatcatgctggttgttacctttaccagcataggtttggccctctcaagtctcagcacaggtcgtttcttccctgctgcttctttcctcggtgtcattttcggaagccgaattttggctttcctcatccagctcttgtttgatcgagatacgatgtacttgctcagtccttacgacaacttggctcatacaggacagtggatgatgggcctgaacccaacctatgatttcccagttgcatggtcatttgtcgccttactcgtgatgaatggcgtctctatgtacattctaatcagtcgtgtcaattctttggaggtgactcgtgaatgat

SEQ ID NO: 259956 - DNA, 433 bp, Unknown
  Bacterial polypeptide expressing nucleotide sequence isolated from the Sargasso Sea
atgaaaacagtaaatatttatacagatggagcatgcagaggcaatcccggtgatggtggatggggagtgttaattgaatacgaaaatttttcaaaagaatattttggtgctgaaaaaaatacaacgaacaataagatggagctcaaagcagcaattgaaggattaaaagtattaaaagaaacatgtgaggttcatataactactgattcaaaatatgtgatggatgggattacgtcatggattcagaattggaaaaaaaataattggatgaattcatcaaaaaaagaagttaaaaataaagatttatggattgaacttgatgaattaacatcaaggcataatataaaatggaattgggtcaaaggtcattcaggtcacaaaaaaaacgagatagctgactctcttgctaataaaggaatagataatctttaat

SEQ ID NO: 259957 - DNA, 430 bp, Unknown
  Bacterial polypeptide expressing nucleotide sequence isolated from the Sargasso Sea
atgattaatatttatacagatggcgcatgttctgggaatcctggtataggtggatggggtgtcgtgatattagataataataaagaaattttattaaatggtggtgatcaacacacaactaataataaaatggaacttacagcagcaataaaagcactggaatattttgagataaaaaaagaattaatcatttttaccgatagcaaatatgtaaaggatggtattgaatcatggattacaaattggaaaaaaaatggatggaaaacttcaacaaaaaaaatagtgaaaaataaagaattatggatgcaattagataatctaattaataaacataatgtaacatggaaatgggtcaaaggacacgctggtttagaatttaatgagaaagctgatgaactagcaaggaaatatattgaaagttatatttagt

SEQ ID NO: 259958 - DNA, 385 bp, Unknown
  Bacterial polypeptide expressing nucleotide sequence isolated from the Sargasso Sea
cataggtatagctactgtcagtgaaatagataagcataatattttaaacgcttcaatgctttcgatggaaagagcagtaaataagttgaaaaaaaaaccagatttatacctaatcgatggtgtacacgcccctaaaaaaatgaagaattttaaaacaataattaaaggtgatcaaaaaattaaatgtatatctgcagcatcgattgtcgcaaaagtttatagagacctttatatgataaaattgagtagaagatttccaaattataaatggcataaaaattttggctatggaaccttccaacatttaaacgcattaaagaaatttggtgttactagctatcatcgaagaagctataaaccagtacacaacatcttgtctaaataa

SEQ ID NO: 259959 - DNA, 340 bp, Unknown
  Bacterial polypeptide expressing nucleotide sequence isolated from the Sargasso Sea
taaagaaatttctggttcagagaaaaatacaacaaataatagaatggaaatgatggctgtaatagaagctttaaaatatgtagatacggaatcgaaaattaatttatatactgatagtaaatatgttaaagagggaattaccaactggattacaggctggaaaacaaataattggaaaaatagcaaaaagaacgatgtaaaaaataaggacctatgggttgaactagatatattatctgaaaaacataatatctcttggaactgggtcaaaggacactctggtaatattgaaaatgatattgctgataaacttgctacagaggcaattaaagatctttaa

SEQ ID NO: 259960 - DNA, 595 bp, Unknown
  Bacterial polypeptide expressing nucleotide sequence isolated from the Sargasso Sea
ttgagtcaggaaggtgcaaatatttttataggtgtagatgaagctgggagaggttgtctagcaggcccagtagtaagcgcatccgttgcaatctatgaggaccaagtcattgaaggtgtgaatgactcaaagttgttatcaccaaaaaaaagagatgatctttatgatgtcattcagaatgaatgtctaagcttctctgtagcgagtatagataatcatgtcattgatcaaaaaaacattctcgttgcgactctccaatcaatgaaagattcgattgatgccattggtgttaatgcggatgagatcatcatcgatggccctcataaaccagtcatgcatgatcagagagacttaattactaggggtgttattggaggcgataaactatttcattgcgtttcagcagcatctataattgctaaggtttatagagataagtttatgattgaattgcaccacaagtatccaaaatataatttccaaaaaaataaaggatacccaacaaaagatcatatccaagccatcagagaattaggacccagcccttatcacagactgagttttaagccagaactctatgaaaacgagagttgaa

SEQ ID NO: 259961 - DNA, 427 bp, Unknown
  Bacterial polypeptide expressing nucleotide sequence isolated from the Sargasso Sea
aatgattacgatttttacagatggttcttgtttaacaaatccaggtaacggtggatgggctgcaattataaatgatggaaaagaaataaaaaaaattagtggtaacgaaaaaaatacgacaaataatagaatggagttgttagccccaattaatgcattgaaagatatgaagcctggtgttgaaataaaaatatatacagactctcaatacgtaaaaaatggaataactgaatggattaatacttggctgggtaataactggaaaacgtcaaaaaaagaagatgttaaaaataaagacttatggattgatctatataatttaaataaatcacttagtattcaatggaattgggttaaagctcatgacggagaccgtttaaatgaagaggtggacttactagctaaaaaagcagcaaatttagattag

SEQ ID NO: 259962 - DNA, 541 bp, Unknown
  Bacterial polypeptide expressing nucleotide sequence isolated from the Sargasso Sea
atgattattgcaggcgttgatgaggtaggagttggttgccttgctgggccagttgttgcgagttgtgtaattcttcctgaacaaataaatgaaatatttaaagattctaaaagtacttcagaatctttaagatctaaacaatttcaatttctcagaagaaatgcttatgcatctataggtctttgcactcctcaagaaattgatgaaatgaatattcttaatgctacgcatcttgccatgaaaagagcaattaataatattcagataaaaccggaaaaaatacttattgatggtaagtatgttccaagaggactaataaatgctgaagcatttattggtggcgataaagcccatcaacaaataagtgcggcgtcaatttacgctaaatattttagagataatttgatgggtcagtacgcaaagatattccctaaatattattttgaaaaaaataaaggatatcccactcaaatgcataaagaggcaataattgaatttggtctatcaaagatccatagaaaaagttttaaaatgaaataat

SEQ ID NO: 259963 - DNA, 316 bp, Unknown
  Bacterial polypeptide expressing nucleotide sequence isolated from the Sargasso Sea
atgattacaatatatacagatggctcttgtttaacaaatccaggtaatggtggatgggctgcaattataaatgatgaaaaagaaataagaaaaattagtggtagtgaaaaaaatactacaaataatagaatggaactactagctccgattaaagcacttaaagatatgaaacatggtactgaaataaagatatacactgactctcaatatgtaaaaaatggaataactgaatggattaatacttggttagctaataattggaaaacttcaaaaaaagaagatgttaaaaataaagatttgtggattgaattatata

SEQ ID NO: 259964 - DNA, 433 bp, Unknown
  Bacterial polypeptide expressing nucleotide sequence isolated from the Sargasso Sea
gtaatcagaattcctccacgaaccattgacaagtatgtttttgaacataacttgaatcatttagaagcaaaaaaaatggctgaagtgatatctaatctaaatcctgacatatcatatgttgattcttgtgatgtaaatgctgctagatttggtcgtgagatttctgatttgtctaacaagtctaaggtaaaatcatatcattatgctgattctagatttgttgttgtttctgccgcatcaataattgccaaagtttcaagagatcgttctattatgcgcttaaacaaaacctccaatcttgggagtggatatccctcagataaaaaaagtgtaaactatgtaaagaaaatcgtttcatcaaaaaaacctcttccaacttcagttcgtaaaagttggaaacctgtccaaaaaattcttggcttaatcaattgat

SEQ ID NO: 259965 - DNA, 172 bp, Unknown
  Bacterial polypeptide expressing nucleotide sequence isolated from the Sargasso Sea
atgattaaaatttatactgatggtgcatgctctggcaatcctggaattggtggatggggggtggtcattttagaaaatagcaaagatgatatttttttgaatggcggagataataacacgactaataatagaatggaacttcaagcagctatcgaagcactaaagtacttta

SEQ ID NO: 259966 - DNA, 296 bp, Unknown
  Bacterial polypeptide expressing nucleotide sequence isolated from the Sargasso Sea
aatgataaatatttatactgatggagcatgttctggtaatcccggtaaaggtggatggggagttgtaattttagataatgatgaagaaattgagttaaatggaggtgaacaaaacacaacaaataacaaaatggagttaaccgcagcaattaaagctttagagtattttgaacgaagaaaagatttaattatccatacagatagtaaatatgtaaaagatggaattgaaacatggataataaattggaaaaaaaatggatggaaaacttctgcaaagaaaccagtcaaaaataaag

SEQ ID NO: 259967 - DNA, 424 bp, Unknown
  Bacterial polypeptide expressing nucleotide sequence isolated from the Sargasso Sea
aatgaaattaaaaatttatactgacggtgcatgctctggaaatcctgggaaaggaggttgggccgcaatcatattggatgactctaatcaatcaagtatttctggaagtgcaagtaatacaactaataataggatggaattgatggctccaattatggcattaaaaaaaataaaaaagaaatcagagattacaatttttactgactcaaaatatgtgaaagacggaataactgattggattaaaaagtggaaagttaacaattggaagaattcaaataagaaaatagttaaaaataaagatctttggattaaattggataatgcttgtctaaaacataaagttagttggaaatgggttaaggcacacgctggcaacaaatataataatcttgttgatgagttggcagtttcgaaaactaaatag

SEQ ID NO: 259968 - DNA, 312 bp, Unknown
  Bacterial polypeptide expressing nucleotide sequence isolated from the Sargasso Sea
aaaaagctgtggccggtctaaaacacttgccaagagaaataattgtagatggaagggattctttaaactcaaaacatcctgtaagcactttagtgaaagctgataatttagtagctgaagtcatggctgcttcaataattgcaaaggttttccgagatgaattaatgctacttttagacagtaagtatcctaaatatttttttggctctcataagggttatgcaactaaaaaacatatagacgctataaattcatatggaataataaaagaacatagaaaaagtttcggaattgtaaaaaaatataaatgaa

SEQ ID NO: 259969 - DNA, 433 bp, Unknown
  Bacterial polypeptide expressing nucleotide sequence isolated from the Sargasso Sea
atgaaaacagtaaatatatatacagacggtgcatgtagaggaaatccgggagatggtggatggggtgctttagtagagtatcaaaattttagtaaagagtattttggcggccagaaaaatactactaataaccaaatggaattaaaagctgcaattgagggtcttaaagcattaaaagaaacatgcaatgtcaatttaaccactgattcaaaatatgttatggatggaattacttcttggatagataattggaaaaaaaataattggaaaagttcatcaaaaaaggatgttaaaaataaagatctatggatagagttggataaatataggtctatgcataatgtaaaatggatttgggttaaaggccactcagggcatgagaaaaatgaaatcgctgatatgttggcaaacaagggtatagatagcatttaaa

SEQ ID NO: 259970 - DNA, 433 bp, Unknown
  Bacterial polypeptide expressing nucleotide sequence isolated from the Sargasso Sea
atgaaaacagtaaatatttatacagatggtgcgtgcagaggaaatcctggagatgggggatggggagtgcttattgaatatgaaaatatttcaaaagaatatttcggtggtgaaaaaaatacaactaataataaaatggagttaaaggctgctattcatggtttaagtgtcttaaaagaatcttgcgatgtaaatattactactgattctaaatatgtaatggatggaattacttcctggatagaaaattggaaaaaaaataactggaaaaatgcatcaaaaaaagatgttaaaaataaagatctttggattgaattggataaattaacaaccaaacacaatgtaaaatggaattgggtaaaaggtcattccggtcatgaaaaaaacgaaatagcagacgcacttgctaataaaggaatcgataatttataaa

SEQ ID NO: 259971 - DNA, 604 bp, Unknown
  Bacterial polypeptide expressing nucleotide sequence isolated from the Sargasso Sea
atgattgaagatcaaaattgggctaaaaataaaaatcaaagaattatcggcgctgacgaagttggtcgtggttcgttagctgggcctattgttggagctgccgtaaagcttgaatttcaacatttagatttgttaaaggatgtaaaagattctaaaaaattatctccgaaaaaaagagaagaaatttatgaaagggtaaaagctaataagatcgaatattctatttcagaatgttcaaatttacatattgaccaaaatggcatatccgtctcaaataaagaagtgttgtttaattccatcaataagttatataaaaaattagacaaagtctatgttgatcatttcaaaatagataaatttggttcaatatctctggttaggggagaagaaaatagttactccattgcactggcaagtattatcgcaaaggtctatagagataatttaatggtagattttggatcaaaatatcctcaatatttatttgaaaaaaataaaggttacggaacaagagaacatttaaatatgattcaaaaatatggagtttgtgatatccatagactttcttttaatttagggcccacgcaacaaccgcaagggtgat

SEQ ID NO: 259972 - DNA, 469 bp, Unknown
  Bacterial polypeptide expressing nucleotide sequence isolated from the Sargasso Sea
catgaccgattcattgctccagcatgttgtcatctacaccgacggagcctgctccccgaaccccgggacgggaggctggggtgcagttctgatttcccaaaaacaccagcaacgtaaagagctttccggagcagaagctgatacgaccaacaaccgcatggaattgactgccgcagtggaggccctttccgccctgaagcaaccatgccgggttgaactgtataccgattccagctatctccgcaacgccttcgagcaaaagtggcttcaaaactggcagttgaaaaactggcggaccagtggcggtaaagcggtgctcaaccgcgacctctgggaaaaactgctccgactggatcaactgcaccaggtcagctggcattgggtcaaagcccatgcgggagaccctgaaaatgaacgtgccgacgccctagcagtagccgcccgaaaagaactggcggccgaatcctga

SEQ ID NO: 259973 - DNA, 721 bp, Unknown
  Bacterial polypeptide expressing nucleotide sequence isolated from the Sargasso Sea
ttggtgattacagagagcacatactctcaagaaaatcaaatgcctagaaatgaatctgagaaaggactgattgactttgcaaacgaggtaatagacagaaaaggtacactgtttattccatcattttcagttgaacgttcacaagaagttgccagtgttctaatcaactcaggatttaagcataaaataatcatggatggaatggcattgaaggtaaatgaggtacttttaagatatccagaatatcttcgaaatccagaaattttcaaaaatgtcatggacaaggttgtagcagtaagagatcataacgagagaaagaaagcgttgaaagaaccttgtgtagttatttcacctgcaggaatgttggtcggtggaaatgcggtttattatttacaggaattgtcatttagtgacaaaaatggaattgctttagtatcataccaaggagaaggaactcctggaaaaaaattattggatacaggtaaagttcaaacccgcggaaaagatcttaatgtaaaagccgaagtgaaacaattccagttttcaggtcatgcagatagagacagtctatttgaaatgattaaaaatctcaaaggaaatccaagaattatgacggttcacggagatgatgaatcatgtacacgatttgccgaagagattcatgaaaaatttgggtttgaagcacatgctgcaaaattagatgaaaaaataattatctaaa

SEQ ID NO: 259974 - DNA, 436 bp, Unknown
  Bacterial polypeptide expressing nucleotide sequence isolated from the Sargasso Sea
atgaataaaattaaaatctacactgatggtgcatgtaaaggtaatcctggaaatggtggatggggtgctgtcattatatgtaatgatgaggtcaaagaaattaaaggatattctaaaaatactactaataataaaatggaacttcttgcatctataatggctttgagaactgtcgatggtgaaggggatatagaaatttatactgattcaatgtatttaaagaacggaattactaactggatccataattggaaaaaaaataattggttaaattcgtcaaagaaaattattaaaaataaagaattgtgggaagaaattgataaattcaataatatatataatatatcatggagatgggtaaaagcgcacaatggtgacttttataatgagagagcagatgaacttgctaatattgcaataaaggaaatgaattgaa

SEQ ID NO: 259975 - DNA, 314 bp, Unknown
  Bacterial polypeptide expressing nucleotide sequence isolated from the Sargasso Sea
aacacaacaaataacaaaatggagttattggcacccaattagggcgatacaaaaatttaaaaaaaaatctgaaattttaatttacacagactctacatacgtaaaagatggaattacaacttggataaaaaaatgggaaaaaaatggctggaaaactgcttcaaaaaaaccagttaaaaatatcgaattatggaaaaaattaaaaaatttatcatcaaaacattctataaaatggatatgggtgaagggtcacgctcaaaataagtataataatctagttgatgaaattgcacagggagctataaaaagataaa

SEQ ID NO: 259976 - DNA, 154 bp, Unknown
  Bacterial polypeptide expressing nucleotide sequence isolated from the Sargasso Sea
gatgaaaaaattgtctctcaaatttcaagattttggttgggaaaaaaatgcaggatacggcacaaagatgcacattgagaatatttatcgattgggtccaacaatccatcatagaaaaacttttgaaccaattaaatcacttatccataactaa

SEQ ID NO: 259977 - DNA, 433 bp, Unknown
  Bacterial polypeptide expressing nucleotide sequence isolated from the Sargasso Sea
atgaaaacggtaaacatttatacagatggtgcatgcagaggaaatcctggtgatggaggatggggagtgcttattgaatatgaaaatatttcaaaagaatatttcggtggtgaaaaaaatacaactaataataaaatggagttaaaggctgctattcatggtttaagtgttttaaaagaatcttgcgatgtgaatattacaactgattcaaaatatgtaatggatggaattacctcctggatagaaaattggaaaaaaaataactggaaaaatgcttcaaaaaaagatgttaaaaataaagatctttggattgaattggataaattaacaaccaaacacaacgtaaaatggaattgggtaaaaggtcattctggtcatgaaaaaaacgaaatagcagacgcgcttgcaaataaaggaatagataatttataaa

SEQ ID NO: 259978 - DNA, 433 bp, Unknown
  Bacterial polypeptide expressing nucleotide sequence isolated from the Sargasso Sea
aatgaaggaaatagaagtctttactgatggtgcctgcagaggaaatccaggggttggaggctggggtgttctatttataatagacggtgaagaaactatattatatggaggagaggaaaacacgactaataatagaatggaattaaaagctgctataaaagccctagagcattttgataataaagtttcagtttcaataactactgattctaattatgtaaaagatggtattactaaatggctggataattggaagactaaaaattgggttactgcttctaagaaacctgttaagaataaggatttatgggagcaattggatattttaaattcatttcatagagtgtcgtggaaatgggtaaaagctcatgcaggacatagagaaaatgagatagcagatatgcttgctaataagggaatagacgaactttaa

SEQ ID NO: 259979 - DNA, 335 bp, Unknown
  Bacterial polypeptide expressing nucleotide sequence isolated from the Sargasso Sea
atctcagatttctggtagtgaaaaaaatacgaccaataatagaatggaattaatggcgcctataatggctttaaaaaaaattagaagagagtctgagataacaatatatactgactctaagtacgtcaaagatggaattacagaatggataaaaaaatggaaattaaataattggaaaaactcaaataaaaagccagtaaaaaataaagatctttggatcaaattagataactcatgccaaaaacataaagtcaaatggaaatgggttaaagctcatgctggaaacaaacttaataatctagtagacaaactagcagtttcagaaactagataga

SEQ ID NO: 259980 - DNA, 244 bp, Unknown
  Bacterial polypeptide expressing nucleotide sequence isolated from the Sargasso Sea
agcgagtacgtgcgcaagggcatcaccgagtggatccatggctggaaggccaagggctggcgcaccgcctccaagcagcccgtcaagaacgtggagctgtggcagcggctggatgcgctggtcagcaccggcggtcaccgcattgagtggcgctgggtgaaggggcactcgggcgacccgggcaacgagcgggccgatgcattggccaaccggggcgtagaccaagccctgggccgcaggtagc

SEQ ID NO: 259981 - DNA, 619 bp, Unknown
  Bacterial polypeptide expressing nucleotide sequence isolated from the Sargasso Sea
aatgcaagaaaaaaaagaagaagatcttcagcaagcattgaataaattatccgaagttggaatagatgaagttggaaagggagcaatttttggtccagttttttctgcagttgtagtattaactgaaaaaaataaattcatcttaaaaaaatttggagtaaaagatagtaaaaaactatctcccaaaaaaagaaaattactttttccaaaaattttattactctcttcagattatggaattgggcaatcttcggctagagaaatagatgagttaggtatcagagttgcaacagaactttcaatgataagagctttaaaaaaattaaaagaaaagccatctgaattaataattgatggtcccttattatttagaccatggaacggaattcaaaaaaacatagtatctggagactcaaagtttatctcgatagcttcagcaagcatagttgccaaagtttctcgcgacaatctaatggagagattagaaaaaaaatactcaggatatttgatattcaaaaataaaggttatggtaccagagaacatctttatttaatcaaaaaaaatggaattactaaacttcatagaaaaagttttttaaaaaaatcaaatcttatttaa

SEQ ID NO: 259982 - DNA, 604 bp, Unknown
  Bacterial polypeptide expressing nucleotide sequence isolated from the Sargasso Sea
atgattgaagatcaaaattgggccaaaaataaaaatcaaagaattatcggtgctgacgaagttggtcgtggttcgttagctgggcctattgttggagctgctgtaaagcttgaatttcaacatttagatttgttaaaggatgtaaaagattctaaaaaattatctccgaaaaaaagagaagaaatttatgaaagggtaaaagataataagatagaattttctatttcagaatgttcaaatttacatattgaccaaaatggaatatccgtttcaaacaaagaagtgttgtttaattctatcaaaaagttgtatcagaaatcagacaaagtctatgttgatcatttcaaaattgataaatttggttctatatcactggttcggggagaagataatagttactccattgccctggcaagtatcattgcaaaggtctatagagataatttaatggtagattttggatcaaaatatcctcaatatttatttgaaaaaaataaaggttacggaacaagagaacatttaaatatgattcaaaaatatggagtttgtgatatccatagactttcttttaaaatagggcccacacaacaaccgcaagcgtgat

SEQ ID NO: 259983 - DNA, 279 bp, Unknown
  Bacterial polypeptide expressing nucleotide sequence isolated from the Sargasso Sea
ttgaggcattaaaggttttcaatgatccatgcgaagtaaatttaacaacagattcaaagtatgtaatgcaaggaataacatcttggattaaaaactggaaaaaaaataattggaagaattcatcaaaaaaagatgtaaaaaataaagatctttggattgagcttgataattatgtctcaaaacataatgtaaaatggaattgggtaaaagggcattctggtcatgaaaaaaacgaaatcgcagacttattagcaaataaaggtatagataatatttaat

SEQ ID NO: 259984 - DNA, 418 bp, Unknown
  Bacterial polypeptide expressing nucleotide sequence isolated from the Sargasso Sea
tatgaatccttcgatagctgccgcttcaataactagtatcaaaattgcaatggaatctgaacatctaagggacaatattagacttaattcagaccgaataagattgggcttgagagatcttgaaattccttttcttgaaaatgatagtcacattatcccaatacatttatatgatcctaggttatgtaaaggtgcggctaatcttttaattgaaaaacacggaatatacattcaacctgttttccatcctaccgttccaaaaggtgatgaaaggtttagagtcactatcacgcctcgacacgaagctagtgatatagaccattttttgaatgctttagatgatgtatggaaatctatggatttaaaaagggcagagcctacagaagcagaaaaaacagcagtttcaagaatctactag

SEQ ID NO: 259985 - DNA, 346 bp, Unknown
  Bacterial polypeptide expressing nucleotide sequence isolated from the Sargasso Sea
tcaagcaaacagctttatggaggagatatttctactaccaataataagatggagctgacagcagccattatggctttaaaagaaattaaagaaccttgtgaaatcattctttatacagactcaaaatatgttcttcagggcatagaagagtggatacataactggaaaaaaagaggttggagaggtgcaaataagaaaccagtaaaaaatattgatctttggaaagaattagatgaacttagagatgaacataatataaaatggaactgggttaagggtcattctggtgatccaggcaatgaaaccgcagatatgctcgcaaatagaggtatagacgaactttaaa

SEQ ID NO: 259986 - DNA, 335 bp, Unknown
  Bacterial polypeptide expressing nucleotide sequence isolated from the Sargasso Sea
ttcattgttatcgatgaaaagagctttagaacaattaactattaaaccagatttaaccttaatagatggaaactttgcgccaagtggcttaaaaaattataaaacgataattaacggtgacgaaaaagttaaagtaattagtgcagcttcaattattgcaaaagtatatagagacaacttaatgattaaactctctgaaaagttctcaaattattcttgggaaagtaattttggttacggtactaaagctcacttagatggattaaagaaatttggtgtaacctcacatcatagaaaaggtttcaaacccatacacaagatattgtcaaactaag

SEQ ID NO: 259987 - DNA, 91 bp, Unknown
  Bacterial polypeptide expressing nucleotide sequence isolated from the Sargasso Sea
atggctgaaggacggggccgggtggtggctgctgccaccgatggagcctgcagtggtaatccgggcccagggggctggggaggcctgctgc

SEQ ID NO: 259988 - DNA, 124 bp, Unknown
  Bacterial polypeptide expressing nucleotide sequence isolated from the Sargasso Sea
tttggttgggaaaagaatgctggatatggaacaaaaatgcatattgagaatatctatcgtttgggtccaacaatacatcatagaaaaacttttgaacctattaagtcacttatccatagttaaa

SEQ ID NO: 259989 - DNA, 179 bp, Unknown
  Bacterial polypeptide expressing nucleotide sequence isolated from the Sargasso Sea
catgaccgattcatcgcttcagcatgttgtcatctacaccgacggtgcctgctccccgaaccccgggacgggaggctggggtgcagtcctgatttcccaaaaacaccagcaacgcaaggagctttccggagcagaagctgatacgaccaacaaccgcatggaattgactgccgcggtgg

SEQ ID NO: 259990 - DNA, 442 bp, Unknown
  Bacterial polypeptide expressing nucleotide sequence isolated from the Sargasso Sea
agagagaaaattagcaaaatttataaaaaaaaattctacttgggcaataggatctgcttcagttaaggaaatagaaaaactaaatattttaagtgctagtttattagccatgaagagagctataaaaaaactaaaagttaaacctaatttagtacttattgacgggaataaatcaccagaattaagtaattatcttattaaaacaataattaaaggagaccaaaaaattaaagaaatatcagcagcatcaataattgcaaaagtttcaagggataaactgatgctcaaaatgtcagaaagttttaaaaaatataaatgggatttaaatgctggttatggaactagagatcacattaatgctattagaaaatatggagtaactagatttcatcgaaaaacattcaatccaatacacaacatattgagtcacagaaaaaaatag

SEQ ID NO: 259991 - DNA, 259 bp, Unknown
  Bacterial polypeptide expressing nucleotide sequence isolated from the Sargasso Sea
aatgattacaatttatacagacggctcttgtttaacaaatccaggaaatggtggatgggctgcaattataaaagatgaaaaagaaataagaaaaattagtggtaatgaaaaaaacactacaaataatagaatggagctacttgctccgattaacgcactgaaggatatgaagcctggtgttgaaataaaaatatatactgactctcaatatgtaaaaaatggaataactgaatggattaatacttggttagctaataat

SEQ ID NO: 259992 - DNA, 493 bp, Unknown
  Bacterial polypeptide expressing nucleotide sequence isolated from the Sargasso Sea
cggatacgtagctgcaaattctgacatcattgactatattagaagctttgctccaggtttcatatttacctcatcaatgaatccctctatagcagccgcgtcaataactagtataaatattgctaaatcttcagaggatttaagagacaatattagaaataactcaaatttaatcagaaaagggttatcagatcttgaaataccatttttagaaaatgatagtcatataattccaatacatttatatgatccgattctttgcaaacaagcagccaatctcttaattgaaaaacatggcatctacatacagcccgttttttatccaacagttccaaagggcgatgaaagatttagagtaaccatcacgccaagacatgaagctaatgatatttacaattttttaaatgctttagaggatgtttggaaagagatggatttacgaagagctgatacggaaactgaagaaaaatcagcaatttctagaatatattaa

SEQ ID NO: 259993 - DNA, 397 bp, Unknown
  Bacterial polypeptide expressing nucleotide sequence isolated from the Sargasso Sea
gggggttgggcgtttttaataattaataaaaatgatatttcttatagagctggatttgaaagaaatgcaacaaataatcaaatggagctaatggcagcaatcaaagcgttagaatttcttgatcagcataatgatataaatcttaataccgatagtaattatgttaagcaaggcatcacaaattggatatttaattggaaaaaaaataattggcaaacctcatctaaaaagcctgtaaaaaataaagagctttgggaacgattagacgaattaaatcttagtaaaaatattaattggatttgggtaagggcacataatgtcgatgaatttaataaccaagttgatattcttgctagaaaagcggcagaaaatttaactgagtcttcgtttaactagt

SEQ ID NO: 259994 - DNA, 319 bp, Unknown
  Bacterial polypeptide expressing nucleotide sequence isolated from the Sargasso Sea
aaaaatacaacaaataatagaatggagttgttagccccaattaatgcgttgaaagatatggagcctggtgctgaaataaaaatatttactgactctcaatatgtaaaaaatggaataaccgaatggattaatacttggttagctaataattggaaaacttcaaaaaaagaagatgttaaaaataaagatttatggattgatctatataatttaaataaatctcttaatattcaatggaattgggttaaagctcatgatggaaaccctttaaatgaagaggtggacttactagctaaaaaagcagcaaatttagattagt

SEQ ID NO: 259995 - DNA, 430 bp, Unknown
  Bacterial polypeptide expressing nucleotide sequence isolated from the Sargasso Sea
aatgattaaaatctatactgatggatcttgtttgggtaatcctgggaatggaggatgggctgctataatcatagaaaatgaaaagagaatacaaataaaaggaagtaaaaaagatactacaaataaccgaatggagttacttgctccaattgaagcacttaaaaatattcccaaaggtactaaagttcaaatttttacagactccaaatatgttaagtctggaattacagagtggatacataattggaaaaaaaatgattggaaaactacaaataaacaacctgtcaaaaataaagatctatggaatgaattagatcttatgaataacgaatttgatataaaatggacttgggtaaaaggtcattcaagtgataaattaaacaatgaagtagatttgattgcgagagaagccgcattgataaatatctaa

SEQ ID NO: 259996 - DNA, 544 bp, Unknown
  Bacterial polypeptide expressing nucleotide sequence isolated from the Sargasso Sea
atgaggatcacaggagtagatgaggttggggttggctgtttagctggaccagttatttccgctgctgtatgttttggtaatcaaaaaccctccattatttttagagattcaaaaaaaattagccatactaggagagaaaagctatataaatacataaaacataattttcatgtatctattggcatagcaacaccacctgaggtagataagcttaatatattaaaagcaacacatcttgctatgaaaagagctattaataatttacctgttatacctgaaacaatactaatagatggactttatgtgcctgatggcattgataatgcccaatcaatagtaaagggagatgagattcaacaggaaattgcagctgcatcaatatatgcaaaatacttcagagacgagctaatgaagctttatggtattaaatatcctcaatatttattagaaaagcataaaggttaccctactaaagagcataaaaaggcaattaatgagcatggcctatcaaatattcatcgaaaaagttttaaaattaaatgat

SEQ ID NO: 259997 - DNA, 188 bp, Unknown
  Bacterial polypeptide expressing nucleotide sequence isolated from the Sargasso Sea
aatgaaatacaaaatttatacagacggtgcatgttcgggaaacccaggtcctggtggttgggcagccataatattagtagatgataaaattaaaaatgagatctcaggaagtgaaaatagcacaacgaacaataaaatggagcttttagcgccaaataaaagcaattcaaaaattaaaaagaaatcag

SEQ ID NO: 259998 - DNA, 417 bp, Unknown
  Bacterial polypeptide expressing nucleotide sequence isolated from the Sargasso Sea
tttgaaaagatataaaattattgctggagtagatgaagttggaagaggatgcctggcagggccggttgtttctgctgcagtaattttaaaaaaaaatttccaaataaaaaacttaaaagattcaaaaaaactcacttttgaacaaagaatagaaatatcaaaagatattaaaaataattcttttttttcaattggagtagcttctgtaaaagaaattgaaaaattaaatattttgcaagcatcattattatctatgaaaagatctattttaagcttaccgaaaaaaccagatttggtcttagtagatggtatttttgctcctaaaattttaatcaaatgtaagactgtgattaaaggcgatgaaaaaataaaatgtattagcgcagcttctatacttgctaaggtttatagagataa

SEQ ID NO: 259999 - DNA, 721 bp, Unknown
  Bacterial polypeptide expressing nucleotide sequence isolated from the Sargasso Sea
tatgaatagtgatagtattgcgattgaggccgcaactgatggagcctgcagtggtaatccaggcccaggtggttggggtggtttaataatttttgaagattacagcgaattagaaataggtggttccgagcaaaatactactaataatagaatggaactcactgcggctataaaaactcttgagaaattaaaaacctaccaattaaaagagaactttaaactaagaactgatagtaaatatgtcatagagggttatacaaaatggattattaattggaagagaaatggatggaaaacaagttcaggaaaaccagttcaaaatcttgatctatggcaaaaaattgatcaattaaggattaatggcctagtaatggaatatgttaaaggtcatagcggggataaacaaaatgatagagttgataaaattgcaactaattacagcaaaggtatttttatagaaagtaacttaaaaaaagcagaatcctctgttgatttttttgaaaaaattgcacctgcagaaattcaggaattattttcccgcaatgaattaattaaaaaatttgcagaaaaaaaataccttttaagttcacctgaactagacaccttattaggtgaagaataccacttaaaggtaaaacaatatgcactttttgaatggcgtaattggagattgattcctaaagataaaaaatattggataatagaaaaaaaagaagcctaa

SEQ ID NO: 260000 - DNA, 430 bp, Unknown
  Bacterial polypeptide expressing nucleotide sequence isolated from the Sargasso Sea
tatgaataaagttcttatatttaccgatggggcttgtagtggaaacccgggcccaggaggatggggagctatactgcgttacaatcagcatgaaaaagaactttctggtggagaagcttcaaccaccaacaatcggatggaaatgatagcagctatctccgcactggaagctctgactaaacctgttcaggtcgttttgtacactgacagtgtttacttgaaagacggcatcacaaagtggatacatgtctggaaatctcgcgaatggaaaactgctgggaaaaaactagtaaaaaataaagatttatggctacgtctcgaagccgccatgaaaatgcataaaatcgaatggtgctggataaagggtcacgctgggcacattgaaaacgaaagagcggaccaattagctagagatgctattcctagttaa

SEQ ID NO: 260001 - DNA, 517 bp, Unknown
  Bacterial polypeptide expressing nucleotide sequence isolated from the Sargasso Sea
attgggccagtttatgcagcagctgtaattttaaataaatctataaacataaaattattaaaagactcaaaaagtctttcaaaaaacaaaagagaaacattggcaaaatatataaaaaaaaactctttatggggaattgggaaagcctcggttaaagaaattgagaaaaaaaatattcttaatgcaagtttattagctatggaaagagccataaaaaaactaaaaaaaaaacccaaacttattttaattgatggcaataaagtgccaaaaatgaaaaattataaattaaaatcagtaatcaagggtgatcaaaaaatacctgcaatttctgcagcatcaattatcgctaaagttgatcgtgataaaatgataactaatttaggaaaaaaatttaaaagttattactggagccaaaattttggatatggaactaaacaacatttaaaagctattaaaaattttggaataacgcctcatcataggaaaactttttcacctattaataaaattagataag

SEQ ID NO: 260002 - DNA, 364 bp, Unknown
  Bacterial polypeptide expressing nucleotide sequence isolated from the Sargasso Sea
atgttagtagcgggagttgatgaagtaggcaggggaacacttgctggaggtgtatttgcctctgctgtgatacttaatattagcaagcccattagcggattaaaagattctaagaagttatctgagaagcagcgggaaaagttacgacaagagattgaagacaaagccttaagcttttctgtagctgaggcaagcgttgaagagatagattctctcaatattcttcaagcaagccttttggctatgaagcgagcagttgatagtttgagtattaaaccagaatttgtgctggttgatggaactcacataccaacatggaattactcagctgaagctatcatccgtggcgattcgaaaatagcgg

SEQ ID NO: 260003 - DNA, 505 bp, Unknown
  Bacterial polypeptide expressing nucleotide sequence isolated from the Sargasso Sea
gatgaagataattgctggggttgatgaagttggtagaggaagtttaattgggcctgtttatgcttcagcagtaattttaaaaaaatcaattaattcaaagttgttaaaagattcaaaatcattaagtaaaaaagagagagagtatctgtgtacatatataaagaaaaattctacttggtccataggcaaagcttctgtcaaagaaatagaaaagctaaatatacttcaagcaagtttgctggctatgaaaagagccatcaaaaaacttaagagaaaaccaacacacgttctgatagatggaaataaaactccagagttagaaaattataatttaaaatcagttattaaaggagataaaaaaatcccctctatttcggcagcttctataattgcaaaagtatcaagagataaatttataaccaccttgtcaaaaaaaaataaaggttataattgggataaaaactttgggtacggaacaaaacatcacttaaaagctttgaaaaaa

SEQ ID NO: 260004 - DNA, 493 bp, Unknown
  Bacterial polypeptide expressing nucleotide sequence isolated from the Sargasso Sea
atgaaaaatttcattgaaatcttcaccgatggctcatgctctggaaatcccggcccaggtggttgggctgcagttattttaataaataatgatgaatatatatttagtggttttgaaaaagaaactacaaacaatagaatggaactattagcctctataaattctctaaaaaaaataaaagaggattacaaaattaaattatacactgattctaattatttaaagaatggaatcacattgtggattcaaaattggaaaaagaatagctggttgaactctcaaaaaaaaccagtagccaaccaagatttatggttacaattagataatataaacaaaggattaaatgtcgagtggaattgggttaaaggtcatgaaaataatttatataataatctagcagataaatacgctgttgacgcaatgaaaaatcaacagggacgatcattaaaaaacaaccaaattatagatgctttaaaaggttttcagcactaga

SEQ ID NO: 260005 - DNA, 484 bp, Unknown
  Bacterial polypeptide expressing nucleotide sequence isolated from the Sargasso Sea
atgttagaaaaaataacaattttttctgatggatcatcacttggtaatcctggtccgggaggatatggggtaattatgagatggaaagaccaggaaataaaaatttctgaaggattcagaaaaacaactaacaatagaatggaacttctaggcccaataactgctctgaaaaaattaaaaaaacctcaaaatgtcctaatcacaactgactcaagatatgttattgatggtattgaaaaagggtgggcaaaaaaatggaagcaaaataactggatgagagataaaaaaaataaagcattaaattctgatctttgggaactactaatagatcaatgcgattatcatcttagtgtaaagtttaagtgggtaaaagggcacaagggccatgctgaaaatgaggaatgcgatttgttagctaaagaagcagcaatgtctagtgatcttaaaattgatgaaatttttgagttgaaggaattagaataat

SEQ ID NO: 260006 - DNA, 571 bp, Unknown
  Bacterial polypeptide expressing nucleotide sequence isolated from the Sargasso Sea
attatagcaggagttgatgaagttggtagagggagtttaattggtccagtatatgctgcagctgttattcttaaaaaaaatattaaaaagaaaaagatcaaagattctaagaacttaactaagattgatagagaaaaattagcaaaatatataaaaaaaaattctacttgggcaataggatctgcctcagttaaggaaatagaaaaacttaatattttaaatgctagtttattagccatgaagagagctataaaaaaactaaaagtcaaaccaaatttagtacttattgatggaaataaatcaccagagttaaaaaattatcttgttaaaacaataattaaaggagaccaaaaaattaaagaaatatcagcagcatcaataattgcaaaagtttcaagagataaactgatgtttaaaatgtcagaaagttttaaaaaatacaaatgggatttaaatgcgggttatggaactagagatcacattaatgctattagaaaatatggagtaactagatttcatcgaaaaacattcaatcctatacacaacatattgagtcaaaaaaaaaaatagt

SEQ ID NO: 260007 - DNA, 319 bp, Unknown
  Bacterial polypeptide expressing nucleotide sequence isolated from the Sargasso Sea
catgattagagcagttaaaaagttaaaacatattccatctgaactattaattgacggcccattaccattaagactttgggagggtaatcaaagaaatattatttcaggtgattctaaatttatttcaatagctactgcaagcataattgctaaagtaatgcgtgactctttgatggaaagattagaaagcaaatatcctggatatttcatatttaaaaataagggatatggtaccaaacaacatttttcaagtcttaaagaaaatggactaactaatctccatagaaaaagtttcttgaataagttaaatctgatttaa

SEQ ID NO: 260008 - DNA, 577 bp, Unknown
  Bacterial polypeptide expressing nucleotide sequence isolated from the Sargasso Sea
atgaacttaaaatcaatatttaaaggtattcaaaatattgcgggcgtggatgaagtgggtagaggtagtttaataggacccgtttacgcatctgcagttatattaaaaaaaaactgcgatgttaaaaaattgaaagactcaaaaaaattaacaaaaaaagagcgtgaagttttaaacaaatatataaaaaaaaattcgtattggtctatcgggtctgcatcaaaagaagagatagagaaactaaacattctaaatgcatctttgttagctatgaaaagagctataaaaaaattaaaaaagaaacctcgtttggtattagttgatggtaacagaattccagtaatgaaaaattataatctaaaatatgtaattaagggtgatcgaaaaatacctcaaatctcagcggcctcaattgtcgctaaggtttctagggacagtttgatggaaaaaatatcaaagaatttttcaaaatatcaatggaacaaaaattgtggatatggaacaaaagtacatattcaagcaattcgaaaatttggtataacaaagcatcatagaagaactttaaacctatacacaa

SEQ ID NO: 260009 - DNA, 586 bp, Unknown
  Bacterial polypeptide expressing nucleotide sequence isolated from the Sargasso Sea
ttggaatataaatctcaaaaaagtatagctggggtagatgaggtcggtagaggtagtcttattgggcctgtatatgcagcggcagtagtttttaaaaaaggttttgataaaaagagagtaaaagactcaaaaaaattatctcctaaggagagagaatttttggaaaattacataaaaaaaaattcttattgggctattgggactgcttcaaagaaagaaattgaaaaaattaatattttaaatgcatctcttttggcgatgaaaagatcaattttaaaattaaaattcaaaccacaaatagtaaaagttgatggaaataaaaaacctaatattaataacttaaatataaaatcagttgttagaggtgaccagaaaattcctgaaatttctgcagcgtctattttagcaaaagtctcaagagaccgattgattagaaagatgtcaaaaaaatttaaagcttatttgtgggataaaaatgttggctatgggactagagatcatctttcagcaattaaaaaatttggaattacaaaacatcatagaaaaacattcaaaccaatacacaatatattgagtcccaaataat

SEQ ID NO: 260010 - DNA, 295 bp, Unknown
  Bacterial polypeptide expressing nucleotide sequence isolated from the Sargasso Sea
ttgataatagcgggagttgatgaagcaggaaggggccctttagccggtccagtagtatcagctgcagttatacttaactctcaggctaatttaataggtttaaatgattctaagaagctttctgcagacaaaaggcagtctctgtctaatgaaattaagattcactcagtaagttggtcaattggagtagctactgtccaagaaattgatgatatcaatatcttaagagcttccttactgtctatggcaagggcaataaaaaacttatcagaagttccagaaaaagttatagttg

SEQ ID NO: 260011 - DNA, 226 bp, Unknown
  Bacterial polypeptide expressing nucleotide sequence isolated from the Sargasso Sea
tatgaatattgatagtattgcaattgaagctgcaactgatggagcctgcagtggtaatccaggtccaggtggttggggtggactaataatttttgacgacaagagtgaattagaaatagggggttcagagcaaaatactaccaataatagaatggaactcactgcggctataaaaactcttgagaaattaaaaacctttaaattaaaggagaactttaaattaaga

SEQ ID NO: 260012 - DNA, 451 bp, Unknown
  Bacterial polypeptide expressing nucleotide sequence isolated from the Sargasso Sea
atgaaaattacaaaagtttatactgatggagcatgtagcggaaacccaggttctggaggatggggcgttgttatacttacagataaacttaaaacatataatggaagcgagaaagaaacaacaaataaccgcatggaattaaaagctgctattatgggtattaagaattcagatgtgacttcacagattactatctacacggattcaaaatatgtaaaagatggtatcaccaactggataactaattggaaaaaaaataattggattacggcttctaaaaaacctgtaaaaaatcaagatttatggaaggagttagataatatgaataatcagtttaatgtgaaatgggagtgggtcaaagctcatcaagataatgattcagatgacagtaaatataacaatatggctgatgaactagcacgaaaaggagctatggaatggacagattaat

SEQ ID NO: 260013 - DNA, 280 bp, Unknown
  Bacterial polypeptide expressing nucleotide sequence isolated from the Sargasso Sea
atgaatagtgaaaaaaatattgcaattgaagctgcaaccgatggagcttgcagtggaaacccaggaccaggtggttggggggggttaatagtttttagtgataatagtgaaatagaaataggtggttcagaacaaaataccactaacaatagaatggaacttactgcagctataaaaactctcgaaaagttgaaaaattttcaattaaaagaaaactttaaattaagaacagatagtaaatatgttattgaaggctatacaaaatggatcattaattgaa

SEQ ID NO: 260014 - DNA, 559 bp, Unknown
  Bacterial polypeptide expressing nucleotide sequence isolated from the Sargasso Sea
aattacagccggagttgatgaagttggaagaggttgtattgcagggcctgtggtttcagcggcagtgatattaaaaaaaagtattaatttaaaacttttaaaagactcaaagaaaatatcatttaaacaaagggaaaaaatttctgaacatattaaaaataactcatattacgcaataggagtttcctcggtagaagagattttcaaacttaatattcttcaagcctcattactctcaatgaatagagcaatcaaaaaactaaagataacaccagggttaactttaatagatggaaactttgcgccgactggtttaaaaaattataaaacaattattaatggagacgaaaaaattaaagtcataagtgctgcttcaataattgcaaaagtttatcgagacaaatttatgataaagttgtcaaaaaaattttctaattattcatgggaaaaaaattttggttacggtactaaagcacatcttgatggtctaaagaaatttggtatcactatatttcacagaaaaggattcaaaccagtacacaagatgttgtcaaattag

SEQ ID NO: 260015 - DNA, 289 bp, Unknown
  Bacterial polypeptide expressing nucleotide sequence isolated from the Sargasso Sea
attgataatagcaggagtagatgaagcaggaaggggccctttagccggtccagtagtatcagctgcagttataattaagtctcagactaatttaataggtttaaatgattctaaaaagctttctgcagataaaaggcagtctctatctaatgaaattaagattcactcagcaagttggtcaattggaatagctactgtccaagaaattgatgatatgaatatcttaagagcttccctattgtctatggcaagagcaataaaaaacttatcagaagttccagaaaaagtt

SEQ ID NO: 260016 - DNA, 426 bp, Unknown
  Bacterial polypeptide expressing nucleotide sequence isolated from the Sargasso Sea
aaaaaaaaagaatcgaactctcaaatgaaataaaaaaaaactcttactttgctattggctcagcatctcataatgaaatagatgaaattaatattcataatgcttctttgctagcaatgaaaagggctatacttaatctaccaattaaacccaatatgatcttggtcgatggtaaatttaaacctaatttaaagactcaaatgaaggctataattggtggggattcaaaacattctgaaattagtgcggcatctataatcgcaaaagtttacagggataatttaatgattgaatatagtaaaaaatatatgaagtttaatctcgataaaaataaaggctatggaacaagagatcacttagaggctttaaagaataataagtattcagttatacatagaaaatcttttaatggagtcttaaattgag

SEQ ID NO: 260017 - DNA, 463 bp, Unknown
  Bacterial polypeptide expressing nucleotide sequence isolated from the Sargasso Sea
aatgtctaaaacaaaagtagagatttacaccgacggagcctgttcacctaatccgggagttggaggatggggggctattttgatatccaacaaacacaaaattcgtacagaaatttcaggggctgaaggtgattccactaataaccgtatggagatgactgctgcaataaaggctctggaagcactaaagaagccatgtattgtggagctctacacagactcaagttatctgaaaaatgcctttgaacaaaagtggctggataactggaagaacaaagggtggagaacaaagggaggggacactgttgcgaacaaggatctctggcttcgtctccttgaagttagccaaaaccatgaaatttcatggtactgggttaaaggtcattcaggaaatccggaaaatgaacgttgtgacgaacttgctgttaaggccagaaaggaatggtcaaaatcagcaaaataa

SEQ ID NO: 260018 - DNA, 322 bp, Unknown
  Bacterial polypeptide expressing nucleotide sequence isolated from the Sargasso Sea
gttgtcagaagtaagtattgttgctggcgttgatgaggttggaagaggtcccttagctggccctgtagttgcaggcgcagttgtcttgcctaagaatcatgatattgaaggccttagggactcaaaaaagcttactaaaaagaaaagagaaaacctttaccctattatttcggataaagcattaggaactggtattggaatagtgagcgttcaaaaaatagatgaaataaatataagagaggccacattcttggcaatggaaagagctcttgatgatctgccaaaaatacctcatagcgcacttatagatggtgagtcacta

SEQ ID NO: 260019 - DNA, 209 bp, Unknown
  Bacterial polypeptide expressing nucleotide sequence isolated from the Sargasso Sea
tatggaggttaaaatttatacagatggttcttgtataggcaatccaggtccaggaggttgggcagctataataatatctgagaatggtaaagaagaaatatttggtggagaaaagttaacaactaataaccgaatggaattaactgctgctattagagcgctggaattttttgaaaaaaaagaaataaaacaattatcttttaaacaaa

SEQ ID NO: 260020 - DNA, 579 bp, Unknown
  Bacterial polypeptide expressing nucleotide sequence isolated from the Sargasso Sea
taaaattgataaaaaaaattattattgctggagttgatgaagttggtagaggatgtttagctggtccagtggtttcagcagccgtagtactaaaagagggtgtaaatcttgatcttcttaaagactccaaaaaaataagcttcaaaaaaagattagaaatctcagatcatattaaatctcattcatattatgcttttggtatggcgtccgtaaaggaaattttagatttaaatattttacaagcatcattgctttcgatgaaaagagctttagatcagctaactgtaaaaccagatttgacactggtagatggaaattttgctcctagtgggttaaaaaattataaaactataataaatggagatgaaaaaataaaagtcattagcgcagcttccattattgcaaaagtatttagagacaaacttatgatcaagctttcagaggaattttctaactatgcttgggaaagtaactttggttatggaaccaaggctcatttagaaggtctaaaaaaatttgggattacctctcatcacagaaaaggttttaaacctgtacacaagatattgtctaactaag

SEQ ID NO: 260021 - DNA, 472 bp, Unknown
  Bacterial polypeptide expressing nucleotide sequence isolated from the Sargasso Sea
tatgactaatccagatataatcatatacactgatggttcatcaagaggaaatcctggtccaggcggatatggtatagttatgcaaaaatatggcacaaattacattaaagaattttctgaaggatttagaaaaacaactaacaaccgtatggaattactggctgtaatcgttgctttagaaaaattaaaaaagtcaaaccaaaaagttcatgtttataccgattcaaaatatgtaagcgaatcagtagaaaaaaaatgggttaatagatgggaaaaaaaaggtttcaaaagcaaaaaaaatcctgatctttggatacgttttttaaaaatatttaggaaacatgaggtgcattttttttggatcaaaggacataataacaatctaggaaacgaaaggtgtgatgagcttgcttttaatgcaagcttaaaacagaaacttttaattgatgctgaatatgagtcaaaaaaataa

SEQ ID NO: 260022 - DNA, 571 bp, Unknown
  Bacterial polypeptide expressing nucleotide sequence isolated from the Sargasso Sea
tatgaataataaaatccttgcaggtttagatgaggttggcagaggttgtttagctggtcctgtaatctcttgcgctttaattttaaaaaaaaatattaaaaaagattttattaaagactcaaaaactataccgttcaaagatagaataaagattgcggagcatattaagaaaaattcatggtacggtattggatcagcatcggtaaaggaaatagataaatataatatttttaatgctacacttctatcaatggaaagagctgcaaaaaaattaagaaaaaaacctcatctctttttgattgatggaactcatgctccaaaaaaattaaaaaattctaaaactataattaaaggagatcaaaaaattaagtgcatttctgcagcttcaattgtggctaaagtttacagagatctttatatgataaagctaggaaataaatttccaaaatacaaatggaacaaaaattttggttatggaacatcgcaacatttgagtgctttaaaaaaatttggtgttactagttatcatagaagaagctataaaccagtgcacaacatattgttaaaataa

SEQ ID NO: 260023 - DNA, 562 bp, Unknown
  Bacterial polypeptide expressing nucleotide sequence isolated from the Sargasso Sea
aatgattgctggtgtagatgaagttggcagaggaagtttggttggtcctgtttatgctgctgctgttattttaaataaaaatattaataaaaaggaacttaaagactcaaaaaagttaaataaaattaaaagagaatttttagcaaaatatataaaaaaaaattctacatgggctattggctctgcttctttaaaggaagttgaaaaaattaatattttaaatgcaagtttacttgcaatgaaaagagctattataaaacttaaaaaaaagccaaagacagttctcatagatggaaacaaatctcctaaaataaaaaattattttattaaggctgtaattaaaggagatcaaaaaataccagaaatatctgcagcatccataattgcaaaagtttctagggataaattaatgaataggatgtcaaaaaaatttaagaaatacaaatgggatttaaatgctggctatggaacaacagatcatatcaaggcgattaggaaatatggagtaactaaatttcatcgaaaaacatttaaacctatacacaagatattgagtctctaa

SEQ ID NO: 260024 - DNA, 505 bp, Unknown
  Bacterial polypeptide expressing nucleotide sequence isolated from the Sargasso Sea
atgattgaagataaaatttggaaatcaaatcctgacaagtatattatcggcagtgatgaagttggaagaggttcttttgctggcccaatcggagcagcttctgtcagagtaaattatcatcatataagtttgctggcagatgtaaaagactcaaaaaaattgtctccaaaaaaaaggaattctatttttgaattagttcagaaaaatgaaattgaattctcctacatggaacgtgataacaaatttatagatctttatggaataaaattggcaaatgaaaaagttttagaggattctatttcttcaatattccatcatggagatattgtatatgttgatcattttaagatatcaaaatttaatgctgtttcacttattagaggtgaagataattgtaggcctatcgctcttgcaagtattattgcaaaagttcttagagacaaatttatggttgagatatcaaataagtataacaaatatgcattcgaaaaaaacaaaggttagg

SEQ ID NO: 260025 - DNA, 508 bp, Unknown
  Bacterial polypeptide expressing nucleotide sequence isolated from the Sargasso Sea
tatagtattgactgaaaaaaataaatttatcttaaaacaacatggcgtaacagatagtaaaaaactaactcccaaaaaaagaaaattacttttaccaaaaattttatttctctcttcagattatggaattgggcaatcttcagccagagaaatagataagttaggtatcagagttgcgacagaactttcaatgataagggctttaaaaaaattaaaagaaaagccatctgaattaataattgatggtcccttattattaaggccatggaacggaattcagaaaaacatagtatctggggactcaaagtttatctctatagcttcagcaagcataattgctaaagtttctcgtgacaatctaatggagaggttggaaaaaaaatactcaggatacttgatatttaaaaataaaggttatgggaccagagagcatctttcattaataaaaaaaaatggaataactaaactccatagaaaaagttttttaaaaaaatcaaatcttatttaa

SEQ ID NO: 260026 - DNA, 148 bp, Unknown
  Bacterial polypeptide expressing nucleotide sequence isolated from the Sargasso Sea
tatggaaattaaaatttacacagatggtgcttgtataggtaatccaggtcctggtggatgggccgctataattttgttagaaaatgaaaagaaagaactatttggtggagaaaaattaacaactaataatcgaatggaattaaccgct

SEQ ID NO: 260027 - DNA, 448 bp, Unknown
  Bacterial polypeptide expressing nucleotide sequence isolated from the Sargasso Sea
aatgcataaaaatcacgaaattataatttatactgatggagcttgtagcggaaatccaggtcctggtggatggggagccgttatttactcaaaagagaataaaactgaaatatctgggtatgaattagatacaaccaataacagaatggaaattctagcagctataaaagctcttgaaagcttagaaactaaaagtacagtgttgctttacacagatagtaattatcttaaattaggtattactagttggataaaggtttggaaaaaaaataactggaaaaatagaagtaagaaattaattaaaaatttagatttatggaaaagactggatgaactcaattctgttcatttagtaaattggagttgggttaaagctcactctggaaactcagataatgaaagagcggataatttggctactggtgctataaaagatttattaaggtaa

SEQ ID NO: 260028 - DNA, 453 bp, Unknown
  Bacterial polypeptide expressing nucleotide sequence isolated from the Sargasso Sea
taagcccccgtcaaagaattaatctgtactttgagatattagaaactttttcagtaggggtctctttctcttcagttaagatgattgatagctttaatattttgagtaattctttatatgtaatgcaaatggccgttaagaaagttgctaagacaaaagatagtttatactttgatggaaatatattaccggagtcatatagatctgcttcaagagcctacagcatcattaaaggggataaaaaaatagcgagcattgcggctgcttccattgttgcaaaagtgtcacgcgattttcatatgaaatcattaaatatacgctttccaggttatggctgggacaagaatgtaggatatggagtagagcaacataaagccgctatctataggttgggcataaacactgagcatagaagatcttttaggcccatatacaacatgttgtgttcgtaaa

SEQ ID NO: 260029 - DNA, 424 bp, Unknown
  Bacterial polypeptide expressing nucleotide sequence isolated from the Sargasso Sea
atgaaattaaaaatttatactgatggtgcttgttctggaaatcctgggaaaggaggttgggcagcaatcatattagatgattcaaatcaatcaagcatttctggaagtgaaagtaatacaactaataataggatggaattaatagctccaattatggcattaaaaaaaataaaaaaaaaatcaaatattacaatttttactgactcaaaatatgtgaaagatggaataactgattggattaaaaagtggaaagttaataattggaagagttcaaacaagaagccagttaaaaataaagatctttggattaaattggataatgcttgtctaaaacataaagttacttggaaatgggttaaggcacacgctggtaacaaatataacaatcttgttgatgagttggcagtttcgaaaactaaataga

SEQ ID NO: 260030 - DNA, 424 bp, Unknown
  Bacterial polypeptide expressing nucleotide sequence isolated from the Sargasso Sea
aatgaaattaaaaatttatactgatggtgcttgttctggaaatcctgggaaaggaggttgggcggcaatcatattagatgattctaatcaatcaaatatttctggaagtgaaagtaatacaactaataataggatggaattaatggctccaattatggcattaaaaaaaataaaaaagaaatcagagattacaatttttactgactcaaaatatgtgaaagatggaataactgattggattaagaagtggaaagttaataattggaagagttcaaacaagaaaccagttaaaaacaaagatctttggattaaattggataatgcttgtttaaaacataaagtaacttggaaatgggttaaagcacacgctgggaacaaatataataatcttgttgataagttggcagtttcgaaaactaaatag

SEQ ID NO: 260031 - DNA, 577 bp, Unknown
  Bacterial polypeptide expressing nucleotide sequence isolated from the Sargasso Sea
attgaaaaaaaaattaattaccgctggagttgatgaagttggcagaggatgcctcgctggtccggtagtttcagcagccgtgatactaaaagaaggtgttaatttgaaacttttaaaagattcaaaaaaaattagttttaaacgtagaattgaaatttcaaattatattaaatcgtgttccatttatgctattggtttagcgtcagtagatgaaattttagatttaaatattcttcaagcatcgttgctatcaatgaaaagagctgttgaaaaattacctgtaaaacctaatcttactttaatagatggaaattttactcctagtggattaaaaaattgtaaaactattattaacggtgatgaaaaagtaaaagtgattagtgcggcctccattgttgctaaagtttatagggataatctcatgataaaactcgctaaggaattttctgattatgcttgggaaagtaactttggttatggaactaaagctcatttagaaggtttaaaaaaatttggtgttacctcacatcatagaaaaggttttaaacccgtgcacaagatattgtctaattattaa

SEQ ID NO: 260032 - DNA, 697 bp, Unknown
  Bacterial polypeptide expressing nucleotide sequence isolated from the Sargasso Sea
aatgataagttttgatatcgaaagagatttatataaaaaagatataattatgataggtgttgatgaagctggaaggggctcatgggctggtccattagtatcaactgcgtgttggtttgattttactaaatataaatctttgcactcagagattaatgatagtaaaaaattaaaatcgtctaagcgaagagaaataatattatcattagaaaattttgttaaatattcttcttctattgcaagtgtaaaggaaattgataagtatggtctttcatatgcaaataatattgctatgaaaagatcaatattttcacttactattgaattgaaaaaaaactcagaaatttatagaaaaaaaaatttttgtatttatatagatggtaaatataaaccagattttgaaaatgtagataattttttacaatttaaaaagttacatttatataattattcaattgaggctctagttaagggtgatagtcttagcaaaactattgctttagcaagtattatttccaaggaaacgagagattatatgatgaggcaattgtcaaaaaaacacccatcttacttttttgacagtcattatggatatggaactaaaaatcataaaaatgctattttaaaaaatggtgttttagatttacatagaaaatcatttaaacctattgctaccatatatagtaaaaaaatctaa

SEQ ID NO: 260033 - DNA, 554 bp, Unknown
  Bacterial polypeptide expressing nucleotide sequence isolated from the Sargasso Sea
ggggcccttggctggaccggttgttgtttcagcagtgattcttggaagaaactggaacgaaaatcaccgactggatgattcaaaggcgttaaaagtgaaggaacgtgaagaactttatgagattatctgtcaagaagcacttgctgtcagtactgtctcaatgagtgccgagttggtagaccgcctcaatgttcttcaggccagtttaaaggggatgaaaaaggctgtagaaagacttaaccctaaagctgattatgcgctgatcgatggaaaccgttatcctgaaatgaagcttccaggtgaggcgctggtcaagggtgactcgcgatcagccagtattgctgctgcatcgatcgttgggaaagtggttcgagaccgcgtcatgcagggcatggaatgtctttatccaggatggggatttgaacgacacaaggggtatccgactcaagaacatcgtgaaatccttcagaagaggaaaccgtccatgattcaccgccattcatttcagtatttgggtaactctgaagatttgattcagccgtccctgttttgag

SEQ ID NO: 260034 - DNA, 102 bp, Unknown
  Bacterial polypeptide expressing nucleotide sequence isolated from the Sargasso Sea
catgcataatttatttgcttacacagacggagcttgctcaggaaatcctggcccaggaggatggggcgttctattgattgctaaaaaacaagacacaattat

SEQ ID NO: 260035 - DNA, 148 bp, Unknown
  Bacterial polypeptide expressing nucleotide sequence isolated from the Sargasso Sea
gatgagagtaaaagcttatactgatggggcatgtagcgggaacccaggtcctgggggatggggtgtttatttagtcgctgaaaataatgtaggtgaaatcgtaaaagaagaggccctttatggaaaaaacaaagaaacaactaatcaa

SEQ ID NO: 260036 - DNA, 220 bp, Unknown
  Bacterial polypeptide expressing nucleotide sequence isolated from the Sargasso Sea
aatgcgcgtcctgcagaagatactcagaccgacacttgagtttgaaaacgcggcttataatcgcggattcagcaagattgcaggaatagatgaagcaggaagaggtccacttgcaggcccagtcttcgttgctgcagttattttaggaaaaagttggaatccaaagttagaaatcaatgattcaaagcaacttccagctaaaaaaagagaggaactcttt

SEQ ID NO: 260037 - DNA, 227 bp, Unknown
  Bacterial polypeptide expressing nucleotide sequence isolated from the Sargasso Sea
tacttctattgcagccgcatccattctagccaaagtatcaagagacgaatatatagaaaaattatgcgatagtcaccctgatttagacgataaatattgcattcttaaaaataaaggatatggcacaaaagcccatcatgatggaatatacgaacacggaatatcagaattccacagaaagactttcggaatatgtcgcaattataataaaattgaaaacgcttaag

SEQ ID NO: 260038 - DNA, 325 bp, Unknown
  Bacterial polypeptide expressing nucleotide sequence isolated from the Sargasso Sea
attgtctaaaagagtaaatatatatacagatggttcatcaattggcaatccaggcccagggggatatgggttgattatggaatgggttggaaagaatctaattaaggagttttctaaaggatttattgaaaccacaaataatagaatggaattattggctgtaattataggtttagaattactaaaaaaagatggatttgatgtagttgttttttctgactcaaaatatgtagtagatgcagttaaaaaaaagtggctttttgagtgggaaaaaaataattttaaaaaaaagaaaaatattgacctttggaaaaggtttttgatt

SEQ ID NO: 260039 - DNA, 211 bp, Unknown
  Bacterial polypeptide expressing nucleotide sequence isolated from the Sargasso Sea
tgtgggaggagataatttgataccatcaattagtgcagcttccatagtagcaaaagtatatagagataagttaatgatggcatatagtgaagaatttcctgattacggattccataaacacaaaggatatccaacaaaatttcacaaagaaatgcttaaaagatatggtttaacaagaatccatagaaaaacttttaaaggtgtgaattga

SEQ ID NO: 260040 - DNA, 256 bp, Unknown
  Bacterial polypeptide expressing nucleotide sequence isolated from the Sargasso Sea
aattatattactaaaacagtaattaaaggagaccaaaaaataaaagaaatatctgcagcatcaataattgcaaaagtttcgagagataaactgatgttaaatatttcagaaaattttaaaaaatataaatggaatttaaatgctggttatggaactaaagaacatatttatgctttaagaaaatatggaataactcgatttcatcgaaaaaaattcaaccctatacacaacatattgagtcttaaaaaaaaatagc

SEQ ID NO: 260041 - DNA, 598 bp, Unknown
  Bacterial polypeptide expressing nucleotide sequence isolated from the Sargasso Sea
ctgaaggttaatattattattaaaaaaaaaataatttcaggagttgatgaagcaggaagaggatcatgggctggtccagtagtatctgcggctgtaattctaaaaaattatacaaatactaaagaattgaaagattcaaaaattcttaataaaaacgacagaaatgaaattttcaataagctaaaaaaaaattcaattataggagtaggtttttcttctgtcgaagaaatagagaaatttaatattttacaggcaacatttctttctatgagtagggcaataaattccctagctataactcctgatttattactaattgatggaaatagggttcccccaaaactaacaatagaagcttatccaataattaagggggacaagtttatttcagagatatccgcagcttcgatagtggctaaggtaataagagatactcatatgaatatattagataaaaaatatcctggttatggtttcacaaataatgctggatatggtgtgaaactacatttggatgcacttaaaactcttggagtcactcccatacatagacaaacatttaaaccaatacacaatatattgtatgaagaaaattaaa

SEQ ID NO: 260042 - DNA, 538 bp, Unknown
  Bacterial polypeptide expressing nucleotide sequence isolated from the Sargasso Sea
aatgattgctggtgttgatgaggttggtaggggctgtattgctggaccagtagtagctgcgtctgtaatgcttaagaggccaatcaaaggccttatggactcaaagaaactttcttcaaaaaaaagggagcatctaagtcaggtaataatagaaaattccatatttgctataggagctgcagacaataaagagattgatcaaattaatatcttacaagcttccttgttagcaatgcagagatctttagaaaagctagatgtaaaaccaaaaaaagtattagttgatggcgctcatatttttaaaactccaattgaaatagagtctattgtgggaggagataatttgataccatcaatcagtgcagcttctatagtagcaaaggtatatagagataggttaatgatgacgtatagtaaagaatttccaaattatgggtttgataaacacaaaggatatccaacaaaacttcataaagaaatgcttaaaagatatggattaacaagaattcatagaagaacttttaaaggtgtaaattaa

SEQ ID NO: 260043 - DNA, 601 bp, Unknown
  Bacterial polypeptide expressing nucleotide sequence isolated from the Sargasso Sea
aatgaaaaaaataattgctggtgtggatgaggtcggtagaggtagtttaattggtcccgtatatgctgctgctgtaatacttaataataatatagaaataaaaaaattaatagactcaaaaaaattaactaagtttaaaagagaaaatttagacatatatattaaaaataattcgagatggtcaatagggacagcatctattaaagaaattgaaaaatataatattctaaaagcaagtttattagcaatgagaagagcaattaagaaattaaaaaaaaaaccaaccttagtattaattgatggtaacaaaactccaatcttaaaaggttataaattaaaatttataattaaaggtgaccagaaaattcctgaaatctcagcagcatctataattgcaaaggtagcaagagataaattaataaaaaagatatctaaaaagtacaaaggctacttttgggatcagaatgcgggttatggcactagtaaacatttaaaagctataagaaaattaggaattacaaaatttcaccgtaaaaaatttaagccggtatacaacatgttgagagtggtgaaatcacacacacaaatcaaatataaataa

SEQ ID NO: 260044 - DNA, 508 bp, Unknown
  Bacterial polypeptide expressing nucleotide sequence isolated from the Sargasso Sea
aatgtctagaaagttacctaatattaatattgagagatcatatcaaaaccatattaatggttatatttgtggtattgatgaagtgggaagaggatgtttagcaggtccagtagttgcggcggctatcattttaaactttgattcaatacctattggaataaacgactcaaaaaaattatctaagaaaaaaagacaaaacatatataaggatattaaaaaagaagcattagatattgcaataggacaagctagcaatatagagattgatcaaatgaatatattaaatgcaagtttattagctatgaagagagcatataaaaatttaaagacacccacagaacttgctctaatagatgggaattatgctcctaaaattaattgtaaaactataaatataattaaaggagactctaaaagtttatcaatagctgcagcatcaatagttgcaaaaacatatagagataaattaatggaagaaataggtaataaatatccaaaatataatttt

SEQ ID NO: 260045 - DNA, 514 bp, Unknown
  Bacterial polypeptide expressing nucleotide sequence isolated from the Sargasso Sea
tatgctgcagcagttatttttgaaaaaaaatttaaataaaaaaaaacttaaagattctaaaaaattaacaaaaaaaaatcgtgaaattttagaaaaatatataaaaaaaaattcttattggtctgtcggatctgcatcattgcatgagatagaaaaattgaatattttaaatgcaagtttacttgctatgaaaagagcaataaaaaaattaaataaaaaaccttcccatatattgattgatggaaatagagttccaaaaatgaaaaattataatttaaaatatgttgtcaaaggagatgaaaaaatacctgaaatatctgctgcttcaataattgctaaggttgctagagataaacttattacaaaaatgtcaaaaaaatttaataggtactcttgggataaaaatgcaggttatggaactaaactgcatttaattgcaattaagaaatttggtgtaactaagcatcatcgaaaaacttttagccctatacacaacatattgagtcctaattaa

SEQ ID NO: 260046 - DNA, 574 bp, Unknown
  Bacterial polypeptide expressing nucleotide sequence isolated from the Sargasso Sea
attgaaaaaaaataaagtgatcgcaggtgttgatgaggtcggcagggggtgcttggctggacctgttgtatccgctgctgtaattttaaaaaaaagcataaatttaaataaactaaaagactcaaaaaaattaacttttattcaaagaaaaaatatttctatacatattaaagaaaattcttttttttcaatcggcatttctactgtaaaagaaattgaaaaacttaatatttttcaagcatctttattgtctatgaaaagggcaattctcaatttatcaaaaaaaccagatctagtgtttgttgatggcaatttttcaccagatatcaattttaaatgtaagtgttacgtgaaaggtgatgaaaaaattaaaagtataagcgctgcatcaataatagcgaaggtatatagagatgaactgatgataagaatatcaaaaaaatacaataaatatttctgggaaaaaaattttggatatggaactaagcaacatttaagaggattgaaaaactatggtttaaccccaatgcatagaagaaactttaaaccgatacacaatatgttgttgaaataa

SEQ ID NO: 260047 - DNA, 343 bp, Unknown
  Bacterial polypeptide expressing nucleotide sequence isolated from the Sargasso Sea
atgaagtttaaaatttatactgatggcgcgtgttcaggaaatcctggaaaagggggttgggccgctgttattttagacggaaaaaatcagtctagtatttctggtagtgaaaataaaactactaataatagaatggaattaatggcgcctataatggccttaaaaaaaattaaaacgaagtcagaaattacaatttatactgactctagatatgtcaaagatggaattactggatggataaaaaaatggaaattaaatgattggaaaagttcaaataaaaaaccagtaaaaaataaggatttgtgggttaagttagataattgctgccagaagcataattaag

SEQ ID NO: 260048 - DNA, 562 bp, Unknown
  Bacterial polypeptide expressing nucleotide sequence isolated from the Sargasso Sea
atgattaccgcaggtgttgatgaagttggcagaggatgtttagcgggacccgtagtttcagcggctgtaattttaaaagattcgattaatcttaaactgttaaaagactcaaagaaaattacttttaagaaaagaattgaaatagctaagcatattaggcttaattcaacttatgccgtgggaatatcttcagttgaagaaatattaaatttaaacatcttacaagcagccttactctcaatgagaagagcgatagataaattagtaattaaaccagaattaatcctaattgatggaaattttgcaccaaagggcttagaaaattataaaactataattaacggagatgaaaagattaaatcaataagcgctgcttcaattgtagctaaagtttttagagatcaactgatgataaaattatctgaagaatttaataaatatgcttgggaaagaaattttggctacggcaccaaggctcacatgcatgctttaaaaaaatttggaataacttcacatcacagaaaaggttttaaacccatacacaagatgttgtcgagttaag

SEQ ID NO: 260049 - DNA, 233 bp, Unknown
  Bacterial polypeptide expressing nucleotide sequence isolated from the Sargasso Sea
tataataaaaggcgatagcaaaattccagaaatttcggctgcttcgataattgcaaaagtacacagagatttttatatgatcaatttatctaaaaaaaatccaggatacggttgggagaaaaattatggctatggaacaaaacaacatatgctggctttaaaaaaaattggtattacaaaatttcacaggaaaactttttatcctgtatacaagatgttgtctaaaaaataac

SEQ ID NO: 260050 - DNA, 220 bp, Unknown
  Bacterial polypeptide expressing nucleotide sequence isolated from the Sargasso Sea
gctatcgattgccgcggcctcgatcgttgcgaaggtggtgcgtgaccgcgccatggcgcgccttgccgtgcgctatcccttctttggctgggagggcaatgctggctatggcgttaaaaaacacatggctggcttgggcgaggttggcccgactgcccatcaccgtaaaagcttcaagccgattgccgacttgtttgatgcgatgatggctggtcgctga

SEQ ID NO: 260051 - DNA, 562 bp, Unknown
  Bacterial polypeptide expressing nucleotide sequence isolated from the Sargasso Sea
tttgattatagctggagtcgatgaagttggaagaggatgtcttgcgggaccggtggtctctgcagctgtgatacttaaaaagggtatagatttaaaacttttaaaggactcaaaaaaaatttcattcaaaaaaagattagatatttctgaacatatcaaaagtaactcttgttacgcaattggcgttgcttcagttgaggaaatttttaatctcaatattttgcaagcatcattactctctatgaatagagcaataaaatcgctttctattaaacctggtttgactttaatagatggtaattttgcgccagaaggattaaaaaaattcaagacgattattaatggtgacgaaaaagttaaagtaatcagtgcagcctccatagttgcaaaggtttacagagataaattaatgataaaattatctgaacaattctctaattatgcatgggaaagaaattttggttatggaaccaaagctcacttagaaggtttgagaagatttggtataaccgctcaccacagaaaaagttttaagccaatacaccagatattgtcaaattga

SEQ ID NO: 260052 - DNA, 329 bp, Unknown
  Bacterial polypeptide expressing nucleotide sequence isolated from the Sargasso Sea
tatgaaaataatttgtggaattgatgaagttggtagaggtccgctagcagggcccgtagttagcgctgctgttattttaccaataggtcatggaattataggcttaatggattcaaagaaaatttcaccaaaaattcgtgaagaattattcgagcaaattattaaaatttctgatgtaggtattggcgtagtttctagcaggcaaattgataagattaatattttacaggctacatacaaatcgatggaaaaagcattatacaatttaaaaaaacagccagatagaataatggtggatggctttgatctctcattaaaagggattaaat

SEQ ID NO: 260053 - DNA, 514 bp, Unknown
  Bacterial polypeptide expressing nucleotide sequence isolated from the Sargasso Sea
tttgctgcggctgtaatattcaaaaaaaatattaataaaaagaaaataaaagactcaaaacagctttcaaaagaaaaaagggaggagctagaaaggtatattaaaaaaaactctatatggagcattggttcagcctctttaaaggagattgaaaaaataaatattttaaacgcaagtttattggctatgaaaagatctgtaaaaaaactaaaactaaaacccacagtaacattgatcgatggaaataaattacccaaaatgaatggtttcaaactaagatctattattaaaggtgatcaaaaagtttctgaaatatctgcggcatctataattgccaaggttgctagagatagattaattacaaaaatttcaaaaaaatttaaaaaatatgcttgggataaaaatgcaggctatggaactaaaaatcatataaaagcaattaagaaatttggtataactaagcatcatcgaaaaacctttgctccaatacacaacatgttgagtccaagataat

SEQ ID NO: 260054 - DNA, 427 bp, Unknown
  Bacterial polypeptide expressing nucleotide sequence isolated from the Sargasso Sea
atgaaatttaaaatttacactgatggagcttgttcaggaaatcctggcaaaggaggttgggccgcaatcatattagatgacttaaatctatcaagtatctctggaagtgaaagtaatacaactaacaataggatggaattaatggcacctataatggccttaaaaaaaattaaaaagaaatcagatattacaatttttacggactcgaaatacgtaaaagatggaattactgattggattaaaaaatggaaacaaaataattggaaaagttcaaataaaaaaccagttaaaaataaagatctttggattaaattggatagttcttgtcaaaaacataagattacttggaaatgggttaaagcgcatgcaggaaacaaatataatgaccttgccgataagttagcagttatagagaccaaaaaatgaa

SEQ ID NO: 260055 - DNA, 217 bp, Unknown
  Bacterial polypeptide expressing nucleotide sequence isolated from the Sargasso Sea
tgtctttccaaaagtattgccgcggcttcaatacttgcgaaagtgaaacgcgacaggaagatggctgaatttggggaaaagtatcctcaatggggatttgagcgtcacaagggatatcccactaaggagcacagggcagcaattgctaagtacggactgtctccaatacacagacgttctttcaacccaaaaacattacagacaagtttgctatgac

SEQ ID NO: 260056 - DNA, 580 bp, Unknown
  Bacterial polypeptide expressing nucleotide sequence isolated from the Sargasso Sea
aatgaaaaagattattgctggtgtagatgaagttggtaggggaagtttaattggacccgtttatgctgcagcagttattcttaacagtaatataaataaaaaagaacttaaagattcaaaaaagttaaataaaataaaaagagaaattttagcaaaatatataaaaaaaaattctacatgggctattggttctgcttctttaaaagaaattgaaacaattaacattttaaatgcaagtttgcttgcaatgaaaagggctataataaaacttaaaaaaaaaccaaaaatagttcttattgatggaaataaatctcccaaaataaaaaattattttattaagactataattaaaggtgatcaaaaaataccagaaatatctgcagcttctataatcgcaaaagtttcaagggataaattgataactggtatttctaaaaattttaaaagttataaatggcatttaaatgctggctatggaacaaaagaacacctaatagccattaagaaatttggagtaactaaatttcatcgaaaaacattcaaaccaatacacaacatattgagtctcaaaaaaaattga

SEQ ID NO: 260057 - DNA, 433 bp, Unknown
  Bacterial polypeptide expressing nucleotide sequence isolated from the Sargasso Sea
tatgaagaaactaacaatttatactgatggcgcttgttccggaaatcctggtaaaggaggctgggccgctatcttaatagttggggataataaaaaaaatttgagtggagcagaatataagactacaaataacagaatggaacttactgctgtaattcaaagcttacaatctctagatgattataatgattttgaaatcgagataaatactgactctaaatatgttaaagatggaatagagatttggataaacaaatggaaagaaaatggatggaaaaccgcaaataaaaaagaggtaaaaaatcaggatttatggaaaaatttagataatataattcaaggaaaaaaaataaaatggaattgggtcaaaggtcactcaaataatgaacttaataatgaagtagataaactagcaagagaatctattctctaa

SEQ ID NO: 260058 - DNA, 518 bp, Unknown
  Bacterial polypeptide expressing nucleotide sequence isolated from the Sargasso Sea
tggccctgttgtgtcggctgcagtaattttaaaaacaggctttaaaattaaaaatttaaaggactctaaaaaacttaattttaaacaaagagcagaagttgcagaagatataaaaaataactcttttttttcttttggaatagcgtctgttaaagaaatagaaaaattaaatattttaaaagcttcattgttatccatgaaaagagctataatgaaattaacaaaaaaacccgacttagttcttgtagatggtatttttgcccctcaagtcaaaaataaatgtaaaactattattaggggtgatgaaaaaattaaatgtataagtgcagcttctatattagcaaaggtttatagagacaaaataatgatcaagatgtcaaaaaaatttaaaaattatcattgggataaaaattttggttatggcacaaaacaacatattattgggctaaaaaaatatggtctaacaacaattcatagaaaaaatttcaaaccgatacacaagatgttgttaaaataat

SEQ ID NO: 260059 - DNA, 562 bp, Unknown
  Bacterial polypeptide expressing nucleotide sequence isolated from the Sargasso Sea
gatgaagataattgctggggttgatgaggttggaagaggaagtttaattgggcctgtttatgcttcagcagtaattttaaaaaaatcaattaatcaaaaattattaaaagattcaaaatcattaagtaaaaaagagagagagtatctttgtacatatataaaaaaaaattctatttggtccataggcaaagcttctgtcaaagaaatagaaaagctgaatatactacaggcaagtttgctggctatgaaaagagctattaaaaaacttaagaaaaaaccaacacacgttctgatagatggaaacaaaactccagaattagaaaattataatttaaaatcagttattaaaggagataaaaaaatcccctctatttcggcagcttctataattgcaaaagtatcaagggataagtttattaccaccttgtcaaaaaaaaatacaggttatgactgggataaaaactttgggtacggaacaaaacagcacttaaaagctttgaaaaaattaggtattaccaaacatcatagaaaaactttttcaccaatatctaaaataaattaa

SEQ ID NO: 260060 - DNA, 526 bp, Unknown
  Bacterial polypeptide expressing nucleotide sequence isolated from the Sargasso Sea
tggcagaggaagtctaattggtccagtctacgctgcagccgtaatcttaaacaaatctataaatttaaaacttttgaaagactctaaatgtttaacaaaaaagaaaagagaaactttatcaaaatatattaaaaaaaattctatttgggcaattggaaaagcatctaataaagaaatagacaaaattaatattttgcaagctagtttgcttgcaatgaaaagagcaattaaaaaattgaaaaaaaaaccctcttatattctaattgatggaaataaactcccagatttaaaaaattttaaaatgaaagctatagttaaaggagatcaaaaaattccggttatttcagcagcttcgattattgcaaaggtttctagagataaatttattattacacttgcaaaaaaaaattctggatatttttggcaccaaaattatgggtatggtacgaaaaagcatttaaatgcaataaaaaaacttggagtcagtattcaccacagaaaaagttttgctcctattaaaaaatag

SEQ ID NO: 260061 - DNA, 424 bp, Unknown
  Bacterial polypeptide expressing nucleotide sequence isolated from the Sargasso Sea
atgaaattaaaaatttatactgatggtgcttgctctgggaatcctggcaaaggaggttgggcagcaatcatattagatgatactaatcaatcaagtatttctggaagtgaaagtaatacaactaataataggatggaattaatggctccaattatggcattaaaaaaaataaaaaagaaatccgagattacaatttttactgactcgaaatatgtaaaagatggaataactgattggattaaaaagtggaaagttaataattggaaaagttcaaacaagaaaccagttaaaaataaagatctttggattaaattagataatgtttgtctaaaacataaagttaaatggaaatgggttaaggcgcacgctggcaacaaatataataatcttgttgatgaattagcagtttcaaaaactaaataga

SEQ ID NO: 260062 - DNA, 359 bp, Unknown
  Bacterial polypeptide expressing nucleotide sequence isolated from the Sargasso Sea
tttgaatgctagtttattagctatgaaaagagcaatcaaaaagttaaataaaaaaccttcgagtgttttaattgatggaaataaaaccccaaaaatagaaaattataatttaaaatctgtggtaaaaggtgatgagaagatacctgaaatttcagctgcatctatacttgctaaggtagcgagagatagattaattagaaaattatcgaaaaaatttactaaatataattgggataaaaatgcaggttacggcactaagcatcatttaagagcaataaagaaatttggtgttaccatatatcatcgcaaaacttttggtcctatacacaatatattgagtcctaataaaataatataac

SEQ ID NO: 260063 - DNA, 562 bp, Unknown
  Bacterial polypeptide expressing nucleotide sequence isolated from the Sargasso Sea
catggccgaagtatcgccgccgacgatgaaacaagagcagtactgctggacccaaggcgaatcggtggtggttggtatcgatgaggttggcaagggagcgtgggcaggcccactaacggtaggagcggttgttcttccgcgctcaggaagagtaaagggtattagagactccaagatgcttacatccggcagaagagaaaagctctacgacaaaattggggaatgggctgaagattggtctgttggtcatgcttctgctcgagaatgcgacgagttgggcatgtctgatgcgcaacggcttgctactcgccgagcacttgaaatgctgacccttgaacccgacagagttttagttgatggaaattgggactacgtcgactgggtgccgagcaccacgatcacaaaaggggaccagagctgtctctcgatagcagcagcatcgatcatggccaaagtcacccgagacaggctcatggctgccgccgcagcagatttcccggcttacatgttcgaaaacaacaaggggtatcccgccccgcagcacctcactgccttagccggg

SEQ ID NO: 260064 - DNA, 139 bp, Unknown
  Bacterial polypeptide expressing nucleotide sequence isolated from the Sargasso Sea
tatgatttgtggaattgatgaagttggtagagggccactagcagggcccgtagttagtgctgctgttattttaccaataagtcatgggattgcaggcttaaaggatttcaaagaaatttcacgaaaattcgtgagaaat

SEQ ID NO: 260065 - DNA, 422 bp, Unknown
  Bacterial polypeptide expressing nucleotide sequence isolated from the Sargasso Sea
aatgaaaagcattgtggccggagttgacgaggtgggaagagggagtctagttggcccagtgtatgcggcggcagtaattttaaaaaaaaaagtagataaaaaaaaaataaaagattctaaaacgctaacaaaaaaaaatcgcgaaatattagaaaaatatataaaaaaaaattcttattggtctattggatcagcatcattaaaagaaatagaaaaattaaatattttgaatgcaagtttgcttgcaatgaaaagagctataaaaaaattaaagaaaaaacctgtacaagtattaattgatggaaataaggttccaaaaattaaaaattataatttaaaatatgtaatcaagggagacaaaaaaatacctgaaatatctgctgcatctataattgctaaagtttcgagagatcgtttaatta

SEQ ID NO: 260066 - DNA, 574 bp, Unknown
  Bacterial polypeptide expressing nucleotide sequence isolated from the Sargasso Sea
atgaaaagtattatagctggagttgatgaagtgggcagaggaagtttagttggtccagtatatgccgcagcagtaattttaaaaaaaaaaataaataaaaaaatactaaaagattcaaagaaattaacaaaaataaatcgagaaatgttagaaaaatatataaaaaaaaattcttattggtctatcggctctgcttcattaaaagaaatagaaaaattaaatattttaaatgcaagcttgctggctatgaaaagagcaataaaaaaattaaacaaaaaaccttcgcgtgtattgattgatggaaataaaattcctaaaataaaaaattataatttaaaatttgtgataaaaggtgacgaaaaaatacctgagatatctgctgcatcaataattgcaaaagtatcaagagatcgtttgattgcaaaaatgtcaaaaaaatatattaaatattcatgggataaaaatgctggatatggaacaaaaaatcacttatcagcaattaaaaaatttggaataaccaaataccatcgtaaaacatttaagccaatacacaatatattgagtctgaaataaa

SEQ ID NO: 260067 - DNA, 343 bp, Unknown
  Bacterial polypeptide expressing nucleotide sequence isolated from the Sargasso Sea
tttacttgcgatgaaaagggcaataaaaaaactcaaaatcaaaccttatttagttttaattgatggaaataaatctcctaaaataaaaaactatttaattaaggagataataaagggagatcaaaaaataaaagaaatttcagcagcttctataatcgcaaaagtttcgagagacaaattaatgaaaaaattatcaaatcaatataaaaaatataaatgggataaaaatgctggctatggaactaaagatcatatcgaagctattaaaaaatatggaatcacagaatttcaccgtaaaactttcaagccgatacacaacatattgagtcataaaaaaaaatag

SEQ ID NO: 260068 - DNA, 430 bp, Unknown
  Bacterial polypeptide expressing nucleotide sequence isolated from the Sargasso Sea
tatgattactatttacacagatggtgcatgttctgggaatccaggtataggtggttggggtgctgttatattagaaaataaaaatgatgaaattttgttaaatggaggagataataatactacaaataacagaatggaattaactgcagcaattaaagcattaaaacattttcaaagcagaaaagatattacgttaataactgatagcaaatacgtaaaagatggaattcaattatggataaaaaactggaaaaaaaatggttggaaaacggtatctaaaaaaccagttaaaaataaagaattatggatagaacttgatgctttaattactaagcataatatagtttgggaatgggttaaaggtcatactggaaataaatataatgaaaaagctgattacttggctaggcaatatatcgaaaatatttaa

SEQ ID NO: 260069 - DNA, 616 bp, Unknown
  Bacterial polypeptide expressing nucleotide sequence isolated from the Sargasso Sea
aatgaatttcgatatagaaaaaaagtttggagaaattattgttggaatcgatgaagttgggagaggaactcttgctgggcctgtagtagctgttgccgtatatataaaaagatctttatggaaaaattttttagaaaaatacccagatataataaaaattaatgactcaaaaaaaatctcaaaaaaagttagagaaaaattatataaaatcctaataaaaattattaattttggaattggtgcggcaagtgttaaagaaattgaagaaaagaatattctacaagcatctttaatagctatggaaagagcatattcttctttaaaaattgatgctgattttgtattagttgatggtatttacaagccaaaaataaaagcaaaagtcgaagctataaaaaatggtgataataaatctatatctatagcatctgcttcaataattgctaaagttgtaagagataatttaatgaaaaaattatcttacaaatacccaaattttttttggcataaaaattcaggttacggaacaaaaatacatataaacaaaattaaattattagggataacccctcatcatagaaaatcttttaaaccaataataaaaatgataagataa

SEQ ID NO: 260070 - DNA, 429 bp, Unknown
  Bacterial polypeptide expressing nucleotide sequence isolated from the Sargasso Sea
tatgactaatccagatataattatatatactgatggttcatcaagaggaaatcctggaccaggtggatacggaatagttatgcaaaaacatgatacaaattacattaaagagttttctgaggggtacagaaaaaccactaataaccgtatggagctgcttgcagtaatagttgctttagaaaaactaaaaaagttaaaccagaaagttcacgtttatacggattctaaatatgtaagcgaatcagtagaaaaaaaatgggttaataattgggaaaaaaaagcatttaaaaacaaaaaaaaccctgatctttggattcgttttttaaaaatatttaggaaacatgatgttcgttttttttggataaagggacacaataataatccaacaaacgaaagatgtgacgagcttgcttttaatgcaagtttaaa

SEQ ID NO: 260071 - DNA, 427 bp, Unknown
  Bacterial polypeptide expressing nucleotide sequence isolated from the Sargasso Sea
atgaagtataaaatctatacagatggagcgtgctcaggaaacccaggtaaggggggttgggctgcgataattttaaatgaaaaatcattcactacttgtatttctgggaaggaaaatattacaactaacaatagaatggaattaaccgcacctataatggcgctaaacaaaataaaaaaaaaatctgatgttataatttatacagattcaaaatatgtaaaagatgggattactgattggataaaaaagtggaaactaaatgattggaaaggttcaaataaaaaaccagttaaaaacaaagatctttggattaaattggataattcttgtctaaaacacaaagttacttggaaatgggttaaagcacacgcaggaaataaatataataatcttgttgatgagttggcagtttcaaaaactaaataga

SEQ ID NO: 260072 - DNA, 414 bp, Unknown
  Bacterial polypeptide expressing nucleotide sequence isolated from the Sargasso Sea
tttatgccataggttcagcaagtgtcaaggaaattgaaaaattaaatatattaaatgcctcattgttgtctatgaaaagagctttgaaaaaattaaaaattaaaccttcgttagcttatatcgacggatcttttgttcctccaaatttaaaagtaaagtgcaaagcatttattaaaggcgatgaaagaatcaagtcaattgctgcagcctctattatagctaaagttaagagggatttttttatgatcaagcttgcaaaaaaattttcccgatacaaatggaataaaaattttggttatggaacagcagaacatttaaaaattattaagaaatatggagttactaagcaccatagaaaaaaatttaaaccggtacacaacatcttgatgcgcaaaacacgtgaaacactataag

SEQ ID NO: 260073 - DNA, 466 bp, Unknown
  Bacterial polypeptide expressing nucleotide sequence isolated from the Sargasso Sea
ttgccagattttgaaattgaaaaatcgttaaagggtacggttattggggtagatgaagtaggaagaggacctttagctggacctgtcgtaagttgtgcttgtacttataaaaactatgaaatagataaaaaatttatagacaaaattgatgactcaaaaaaaatttcttataaaaacagaataaaaatatttaaaataattcaaaatttaaaggacaataaagaaattaattactcgcttggttttgcaacagtagaagaaattgattctcataatatattagaagcaactaaactatcaatgataagagcaatcaataaattaaattttaagaaaggaaatattatatttgatggacaaatgaaattgaatataaaaaattttattagtaaagatatagtgcaaggagataataaatctatttcaatagctacttcctctataattgcaaaaatcatagagacag

SEQ ID NO: 260074 - DNA, 427 bp, Unknown
  Bacterial polypeptide expressing nucleotide sequence isolated from the Sargasso Sea
gaagatcttatcagaacaaattaagatccattcagttagctggtcaattggtattgcaacccctcaagagatagatgaattaaatatcttaagagcgtcattattatccatggaaagggcaataaaaaacttatcagaagttccagaaaaagttatagttgatggacaatatacacctgaaataactatgccttgtgaagcgataataagaggagacactaaagaagctagtatcatggctgcatcaatcatagctaaagttgaaagagataagatgatgttagagctagacaaagactatccaaattatggatttcatcaacataaaggttatcctacgaagcttcatttgcaggcattaagagcatttggcccctgtattgaacatagacaaacatttaatcctgtcaaaaaatttctaacttaa

SEQ ID NO: 260075 - DNA, 343 bp, Unknown
  Bacterial polypeptide expressing nucleotide sequence isolated from the Sargasso Sea
aggttctgaaaattatactacgaataacaggatggaaataatagcagtgataaaagccctgaatactattaaattaaaacaggctacattaattactgactctcagtatgtaaaaaatgggatagaagtttggatacataaatggaaagacaatggctggatgacagcagaaaaaaaaccagtaaaaaataaagatttatggactaagctggataaaattcaaaaaacaaaaaaaattaagtgggaatgggtcaagggccattcgtctgacaagcttaataatgaggttgatagaattgcccgcgaacgagcagagtctattggttatagtgaaaagatttaa

SEQ ID NO: 260076 - DNA, 517 bp, Unknown
  Bacterial polypeptide expressing nucleotide sequence isolated from the Sargasso Sea
ctggatgattccaagaaaatgacagcggccagccgcgttgcctttcacggcattctgacagagctgccgcatcatcacgtggtgctgtcggtcccggtcgaggtgatcgaccgcgacggcattctgagagcgacgcttgccggcatggccagggcggccgaactgcttgccaagcgcctggccgaggccggcatcggcgaagctgcccagattctgatcgacgggaaccagatgcccccattgtcgcgccccgcccagacggtggtgaagggggattcgcgcagcctcagcatcgccgccgcctcagtcatcgccaagcatgagcgcgaccggatcatggtgggtcttgcgggtgaaaatcccggctatggatggcagcgcaatatgggttacggcacggccgcccatcgtgaggcgctgaaccgtcttggtgtcacacggcaccaccgcaggagcttcgcgcccatccggcggcttttgtgcgacggggccgaaacaccttccagcaaaggttaat

SEQ ID NO: 260077 - DNA, 202 bp, Unknown
  Bacterial polypeptide expressing nucleotide sequence isolated from the Sargasso Sea
ttgaattttgaaaaagaatttaatagccccattgctggtgttgatgaggtaggacgaggtcctttagctggaccagttgtggcagcagctgtaattttagataaaaacaatcttcctgaaggaattagagactcaaaaaaaatatcaaaaaatagaagagaagtaattgcagagaaaataaaattaaatagtcattatgcgt

SEQ ID NO: 260078 - DNA, 244 bp, Unknown
  Bacterial polypeptide expressing nucleotide sequence isolated from the Sargasso Sea
aattaaaggagacaatacttacaaaagcattgctgctgcaagtatcttggctaaaacataccgggataattatatattaaaattagtggaagactatccggaattgaaaaaatacgatattcataataataaaggttatggaacaaaaaaacacatggaagcgattgaaacatatggaattacacaatggcatcgtaagtcctttgccccctgtaaggataaaacgttaacattaatcaaatga

SEQ ID NO: 260079 - DNA, 529 bp, Unknown
  Bacterial polypeptide expressing nucleotide sequence isolated from the Sargasso Sea
caggggtagcttaattggacctgtttatgcagcagccgtaatattgaacaagaccatcaataagaagttattgaaagactcaaaaaatttgaaaaaaaataaacgagaatttttagctaaatacataaaaaaaaactctatttgggctacaggtaaagcttctgtctcagaaattgaaaaaataaatattcttcatgcaagcctattagctatggaaagagcgattaaaaaactcaaaaaaaaaccaaaactgattttagtcgatggaaataaaacaccaaatttaaaaaattataaacttcaatcagtcattaaaggtgatcaaaaaataccatcaatttctgcagcatcaatcatagcaaaagttacacgtgataaaatgatctctaggttaggtaagaaatttaaaaattattactggagtaaaaattatggatatggaactaaacaacatcttaaagctataaaaaaatttgggattacttctcaccatagaaaaactttttcaccgatcagcaagttaaaatag

SEQ ID NO: 260080 - DNA, 469 bp, Unknown
  Bacterial polypeptide expressing nucleotide sequence isolated from the Sargasso Sea
gaaaatatttctggactaaaagattcaaaaaaattatcacacaaaacgaggtctgctttagctaaattaatattagaaaattcttattttggcttcggcattgttaacaatattcaaatagataaaattaatattcttaaagcttctttacttgcaatgaaaagagctatactaaacttaccaataaaacctgctttggttttagttgatggtatacataaaccagatctaaatgtcccaatgaggacaattattggtggcgatgcttccgaggctgagattagtgcagcctctataatagctaaagtttacagagataatttaatgatccaatacaactcaaaatttccgaattatgactttataaataataaaggttatggcactgctgagcacttaagactgctaaaaattaatggttactgtgaaatccatcgaaaaagttttaaaggcgtcattgacaaatgag

SEQ ID NO: 260081 - DNA, 438 bp, Unknown
  Bacterial polypeptide expressing nucleotide sequence isolated from the Sargasso Sea
aatgaaatatattacagctggagttgatgaagtgggcagaggaagtttaattggacctgtatttgctgcagctgttatttttaaaaataatatagataaaaaaaaaataaaagactctaaaaaattaacaaaaaaaaaccgtaaaatattggaaaagtatataaaaaaaaattcttattggtctattgggtctgcatcactaaaagaaattgaaaaattaaatattttgaatgctagtttgctagccatgaagagagcaatcaaaaaattaaataaaaagccttcccgtgttttaattgatggaaataaagctccaaaaatagaaaattataatttaaaatatgtaataaaaggtgatgagaaaatacctgagatatcagctgcatccataattgctaaagtagcaagagatagactaattggaaaaatgtcaaaaaa

SEQ ID NO: 260082 - DNA, 583 bp, Unknown
  Bacterial polypeptide expressing nucleotide sequence isolated from the Sargasso Sea
tatgaatagtgatagtattgcgattgaagccgcaacggatggagcctgcagtggtaatccagggccaggtggttggggcggtttaataatttttgacgataacagcgaattagaaataggtggttccgagcaaaatactactaataatagaatggaactcactgcggctataaaaactcttgagaaattaaaaacctacaaattaaaagagaactttaaactaagaactgatagtaaatatgtcatagagggttatacaaaatggattattaattggaagaaaaatggatggaaaacaagttcgggaaaaccagttcaaaatcttgatctatggcaaaaaattgatctattaagaattaatggcctaaaaatggaatatgttaaaggtcatagcggggataaacaaaatgatagggttgataaaattgcaactaattacagcaaaggtatatctatagaaagtaacttaaaaaaagtagaatcctcagttgatttttttgaaaaaaatgcacctgcagaaattcagaaattattttcccgcaatgaattaattcaaaaatttgcagaaaaaagtacctgttaa

SEQ ID NO: 260083 - DNA, 463 bp, Unknown
  Bacterial polypeptide expressing nucleotide sequence isolated from the Sargasso Sea
ttgaaagatgtgattacagcaggtgttgatgaagttggaagaggctgccttgcaggtcctgttgtttcagctgcagtgatcttaaaaaaagggatagacttaaaacttttaaaagattcaaagaaaatttcatttaaaaaaagagaggaaatttcagaacacattaaaaaaaattcttattatgcgataggtattgcgtctgtagaagaaatcttaaatttaaatattttacaagcttcgttactatctatgagtagagcaatagaaaaacttaaaatcaaaccaggtttaactttaatagatggaaattttgcgccagcaggtttaaaaaattatcaaacaatcataaatggagatgaaaaaattaaagttataagtgcagcttcgattattgcaaaagtttatagagatagatttatgataaaattgtctgaaaaatattctaattatgctgggaaagaaa

SEQ ID NO: 260084 - DNA, 525 bp, Unknown
  Bacterial polypeptide expressing nucleotide sequence isolated from the Sargasso Sea
gacctgtttatgcagcagccgttattttgaataaatcaattaatcgaaaaattttaaaagattcaaaaagtttgacgcaagaaaaaaggaaatcattgtctgattacataaaaaaaaattctatttgggcaataggaaaagcgtccgctgaagaaatagaaaaaataaatatcttacaggcaagtttacttgcaatgaaaagagcaataaaaaatcttaaaaaaaaaccatcttatgttctaattgatggaaataaaattccagatttaaataattataatttaaaagctatcgttaaaggtgatcagaaaattccttcaatctctgctgcttctatagttgctaaagtttcaagagatcaattcattataactttatcatccaaaaataaagattatcattgggatcaaaattttggttacggaactaaacaacatttgaaggctataaaaaaatttggaattacaaaacatcatcgaaaaaacttttctcctatatctaaaatcgtgatgcaccatatctagt

SEQ ID NO: 260085 - DNA, 178 bp, Unknown
  Bacterial polypeptide expressing nucleotide sequence isolated from the Sargasso Sea
ttagctaaaacttatcgcgataattatgtgaaaggattagttaaagaagatcctaatctgtcaaaatatggtattgaaaaaaataaaggatatggtactaaacaacatatggaagcaattaaagaacatggtattacatcgtggcatagaaagtcctttgccccctgtaaaagctaat

SEQ ID NO: 260086 - DNA, 119 bp, Unknown
  Bacterial polypeptide expressing nucleotide sequence isolated from the Sargasso Sea
aatgagtttcgaagcaggtgttgatgaagttggaagaggtcctttagcaggaccagtttatgctgcagcagttattcttgatccaaaaatcaaaataaaaggacttaatgactcaaaaa

SEQ ID NO: 260087 - DNA, 559 bp, Unknown
  Bacterial polypeptide expressing nucleotide sequence isolated from the Sargasso Sea
atggacgaggaaaaatgtttccagtccctaggttacaaagcaataacaggcattgatgaagttggcaggggtccattagcaggaccagttattgctggagcggcaatactacctatcgagatggaggataaatggctgaagatcattagagattcaaaacagttgacatcacgaaaaaggattcttgctttagatgaattaagccagtttgctattattgcaacaggaaaatcttctccagaagaaattgatagatatgggattgtaaatgcgattaatttagcaataaaaagagcgttacacaaccttgatgccaaatcagattttttgcttttggacgcgttcaagcttccagaaaccactttgcctcaaaaagctattatccgaggagatgcttcatgcatatctataggcgcagcttcgatagtagctaaagttgaacgagatgctttaatgaatgaactacatgaaagtttccctgcctatgggtttaattctaataagggatatgggactaaacaccacatcgatgcaataaacgcaattggcccgtgtgata

SEQ ID NO: 260088 - DNA, 509 bp, Unknown
  Bacterial polypeptide expressing nucleotide sequence isolated from the Sargasso Sea
attggaatataaatctcaaaaaaatgtagccggagtagatgaggttggtagaggtagtcttattgggcctgtatatgccgcagcagtaatttttaaaaaaagttttgataaaaagaaagtaaaagactcaaaaaaattatctcgtaagaaaagagaatttttggaaaactatataaaaaaaaattcttattgggctattggaactgcttcaaagaaagaaattgagaaaattaatattttaaatgcatctcttttggcaatgaaaagatcaattttaaaattaaaattcaaacctaaaatagtaaaagttgatggaaataaaaaacctaatattaataacctcaatataaaatcagttgttagaggtgatcagaaaattccagaaatttctgcagcatctattttagcaaaggtctcaagagaccgattgattaaaagatgtcaaaaaaatttaaagcttatttgtgggataaaaatattggctatggaactagagatcatctttcagc

SEQ ID NO: 260089 - DNA, 623 bp, Unknown
  Bacterial polypeptide expressing nucleotide sequence isolated from the Sargasso Sea
catgatgcccgccaaggtcgctcccatccttggcgtgggcgattcgaagacgatcaccgatgaggcggtgagagaggagctctacgagaagatcgtctcgacgccgggcgttgtttggtcggcgcgcgtcatcagcgccaagcgcatcgacgacataaacattttaatggcttcgctcgaggcgatgcgtctgagcattgtcgacgtgctcggcaagaagccgccaaaacaggcgctcgcgctcatcgacggccccttctctccgtggaaggagggcgagaagtatgtcgacttccaggagccgccgccgccgaaaggctgtgatttaaccgtcgagccaatcaagggcggcgacggtaaggtgtattgcatcgccgccgcgtcgatcatcgcaaaggtgacgcgcgaccgtctgatgcacgcgtacgacaaggagtggccaatgtacggcctcgcgagccataagggctacccgaccgcggcacacgtctccgcgattgcaaagcacggagcggtcgcgatccatcgaaggacgtttgccccgttgaagcagcgcgagttggcgccgccgacggcaaaggaattgaagcgcgtggaggagattgcgaagaaggttaagtagt

SEQ ID NO: 260090 - DNA, 370 bp, Unknown
  Bacterial polypeptide expressing nucleotide sequence isolated from the Sargasso Sea
gatgtcgaattccatttctatttttacagatggtgcttgtaggggcaatcctggaccaggtggatggggcgttcttattttactggaaggagaagagatcactctctatggaggagaagatagtacaaccaataatcagatggaaatgatggctgctataaaagccttagaatattttcgagagaaaaaatctatagaattagtgacagattctaattatttaaaggacggcattgaaaaatggattcacggttggaagaaaaatggatggaaaacttctgcaaagaagccagttaagaaccaagagttatggatgaagatagatgcactgaatcactttcatgaagtccaatggaagtgggttaagggt

SEQ ID NO: 260091 - DNA, 562 bp, Unknown
  Bacterial polypeptide expressing nucleotide sequence isolated from the Sargasso Sea
gatgaaaattattgcaggagttgatgaagttggtcgaggaagtctagtaggaccagtttatgctgctgctgtaattcttaaaaaatcaattaaaagggaattcttaaaagactcgaaaagtttatcaaaagttaaaagagaaattttagcaaaatatataaaaaaaaattcaatatggtctgttggtaaagcatcaacaattgaaattgaaaaactcaatattttaaacgctagcttattggctatgaaaagagccattaaaaaactcaaaaaaaaaccaagtatcactttaattgatggaaataaattacctaaaattaaaaattacaaacttaaatctataattaaaggagatgaaaaaataccttcaatctctgctgcctcaattattgccaaagttacacgtgataaaataataaacaatctaggaaaaaaatttaaaggatattattgggagaaaaactttggttatggaactagacagcatttaaaggcaattaagacgcttggcattacaatccatcatagaaagacgttttcaccaataaataaaattaaatag

SEQ ID NO: 260092 - DNA, 428 bp, Unknown
  Bacterial polypeptide expressing nucleotide sequence isolated from the Sargasso Sea
aatgaaaattcttacagctggagtagatgaagtaggcagagggagtttaattgggccagtatatgctgcagcagttattttaaaaaaaaatttagataaaaaaaaacttaaagattctaaaaaattaacaaaaaaaaatagagaaatattagaaaaatatataaaaaaaaattcttattggtctattggatctgcatcattaaaagaaatagaaaaattaaatattttaaatgcaagtttactagcaatgaaaagagcaataaaaaaattaaatataaaaccttctcgtgtattgattgatggcaataaaatcccaaagataaaaaattataatttaaaatacgttattaaaggagatgaaaaaatacccgaaatatctgctgcatcaataatcgctaaagttgctagagataggcttattacaaaaa

SEQ ID NO: 260093 - DNA, 427 bp, Unknown
  Bacterial polypeptide expressing nucleotide sequence isolated from the Sargasso Sea
atgaaattaaaaatttatactgatggtgcttgctcgggtaatcctgggaaaggaggttgggcagccatcattttggataaaaattttaatcaatcaagtatctcgggaagtgaaaataatacaactaataacaggatggaattattggctccaattatggcgttaaaaaaaataaaaagaaaatcagaggttacaatttttacagactcaaaatacgtgaaagatggaataactgattggattaaaaaatggaaagttaataattggaaaaattcaaacaaaaaaccagttaaaaataaagatctttggattaaattggataatgcttgtctaaaacataaagttacttggaaatgggttaaggcacacgctggtaacaaatataataatcttgttgatgaactagcagtctcgaaaactaaataga

SEQ ID NO: 260094 - DNA, 483 bp, Unknown
  Bacterial polypeptide expressing nucleotide sequence isolated from the Sargasso Sea
catcctcagtaatactagattatgagatattaggtttagatgattctaaaaagctctcaaaaacgaaaagagaagcactttatgagatcataacgaaaaattgtaccttcgcaattggtagcgcatcaaatgaggagattgactcaatgaatatacataatgctagcttgcttgcaatgaagagatctgttaaaaatctcagcaaacagccatcttttgtatttgttgatggcaaatttaatttagatatcgatattgataataaagcagtaataaatggagactcacttatcgattcaatatcagcagcatcaattattgctaaagtatatagagataattacatgagggagatgcatgattattttccaaattatgacttcatcaacaataagggctatcctacaaaaaatcataaaatagcattaaaaaagcatggcccctcagaaatccaccgtctttcctttagaggcgtattttgag

SEQ ID NO: 260095 - DNA, 517 bp, Unknown
  Bacterial polypeptide expressing nucleotide sequence isolated from the Sargasso Sea
gtcttcgcggcagctgtaatatttaaaacaaatatagataaaaagaaaattaaagactcaaaaaaactttctaaaaaaaaaagaaatattctagaaaagtatatcaaaaaaaactctatttggagtattggttcagcttctttaaaggaaatagaaaaattaaatattttaaatgcaagtttattggccatgaagagatcaattaaaaaacttaaactaaagccatcaataacattgatcgatggaaataaattgccagagttaaatggttacaaagtaaagtatgtaattaaaggagatcaaaaaatatctgaaatttcagcagcatcaataattgcaaaagttgcaagagacagacttataacaaaattatcaaaaaaatttaaaaaatatggttgggataaaaattcaggatatggaactaaagaacatataaaggccattaagaaatttggtataacccagtatcatcgaaaaacctttggacctatacacaatatattgagtccgaagtaaa

SEQ ID NO: 260096 - DNA, 560 bp, Unknown
  Bacterial polypeptide expressing nucleotide sequence isolated from the Sargasso Sea
aatgaaaatagtaattgcaggtgtagatgaggttggcagaggaagtttagttggtccagtttatgcagctgcggttatattaaataaaaatttggataaaaaaaaactaaaggactcaaaaaaattgtcgaaaaattgtcgaaaaatattagaaaaatatataaaaaaacattcatactggtctattggttctgcatcgcttaaagaaatagaaaaatttaatattttagaagcaactttgcttgcaatgaaaagagcaataaaaaaactaaaaataaaaccaaaaaaagtattaattgatggaaacaaactaccaaagatgaaaaattatagtttaaaatacgttattaaaggtgaccaaaaaatacctgaaatatccgcagcgtctataattgccaaagtttcgagagatcgcttaatttcaaaaatgggaaaaaaatacgttaaatactcttggaataaaaacgcaggttacggaactaaaggccacttgcttgcaataaaaaaatttggaataacaaaacatcatagaaaaacttttcagccaatacacaatatat

SEQ ID NO: 260097 - DNA, 239 bp, Unknown
  Bacterial polypeptide expressing nucleotide sequence isolated from the Sargasso Sea
tatgaaatataaaatttatactgacggtgcatgttctggaaatccaggaccaggtggttgggcggcgattattctaagtaacgataaaattacagacgaaatatatggtagcgaaaaaaatacaacgaataacaagatggaattattagcgccgattagggcaatacaaaggtttaaaaaaaaatcagaaattatgatttacactgactctacttatgtcaaagaaggaataacgagtt

SEQ ID NO: 260098 - DNA, 235 bp, Unknown
  Bacterial polypeptide expressing nucleotide sequence isolated from the Sargasso Sea
atgaatattgatagtattgcaattgaagctgcaaccgatggagcctgcagtggtaatccaggtccaggaggttggggtggtctaataatttttgatgacaaaagtgaattagaaataggtggttccgagcaaaatactactaataatagaatggaactcactgcggctataaaaacacttgagaaattaaaaacctataaattaaaagaaaactttaaattaagaactgatagta

SEQ ID NO: 260099 - DNA, 475 bp, Unknown
  Bacterial polypeptide expressing nucleotide sequence isolated from the Sargasso Sea
atgaaaaagttagttgctggtgtagacgaagtaggaagaggaagtttgattggtcctgtctatgctgcagcagttattttaaataaaaatataaataaaaaagattttaaagactcgaaaaaattaaataaaactaaaagagaatttttagcaaaatatattaaaagaaattctacttgggccattggttctgcttcactaaaagaaatagaaaaaactaatattttaaatgctagtttgctggcgatgaaaagagcaattataaaacttaaaaaaaaacctaatttagttctaatagatggaaataaatcaccaaaaataaaaaattatttaaccagaaatataattaaaggagaccaaaaaattgctgagatttctgcagcatctataattgcaaaagtttttagggatagactgatgaaaaatatttcaaataaatacaaaaaatataaatgggataaaaatgcaggttagg

SEQ ID NO: 260100 - DNA, 364 bp, Unknown
  Bacterial polypeptide expressing nucleotide sequence isolated from the Sargasso Sea
atgaaattaaaaatttatactgatggtgcttgctctggaaatcctgggaaaggaggttgggccgcaatcatattggatgattctaatcaatcaagtatttctggaagtgaaagtaatacaactaataataggatggaattaatggctgcaattatggcattaaaaaaaataaaaaagaaatcagagattacaatttttactgactcaaaatatgtgaaagacggaataactgattggattaaaaagtggaaagttaacaattggaagagttcaaataaaaaaacagttaaaaacaaagatctttggattaaattggataatgcttgtctaaaacataaagttacttggaaatgggttaaagctc

SEQ ID NO: 260101 - DNA, 410 bp, Unknown
  Bacterial polypeptide expressing nucleotide sequence isolated from the Sargasso Sea
agagatttttctcgatgcatgtgacgtgattgcagagagttccggcaggatggtggccaagactcttggagatggttggcatgattgcaagatttattcagagcataagatggattccagagatgaagtcgttgcagctgcaagcatcattgccaaagtaagtagggactcagtaatggaagagctgtcacaggaattgaatattgatctaggttctggatatccctcggaccccaagaccagggaggccctagagatattgtgtgaggaagaagttcttgcggattgtatcagaagaaaatgggcgaatgtaaagagaatctggagcaggagccaccatcgtcccattcaatcaagagcgaatgaacgaaacggggtgtttcaatcggctctagatgaatgggaataat

SEQ ID NO: 260102 - DNA, 545 bp, Unknown
  Bacterial polypeptide expressing nucleotide sequence isolated from the Sargasso Sea
gatgaacttaaaatcaatatttaaaggtaatcaaaacattgccggtgtagatgaagtaggcagaggtagtttaataggtcccgtttatgcatctgcggttatattaaaaaagaactgtgatattaaaaaattgaaagattcaaaaaaattaacaaaaaaagagcgtgaagttttaaacaaatatataaaaaaaaactcgtattggtctatcggatctgcatcaaaaaaagagatagagaaactaaacattctaaatgcctctttgttagctatgaaaagagctataaaaaaattaaaaaaaaaaccctgcttggtgttaattgatggtaacagaattccagtaatgaaaaattataatctaaaatatgtaatcaagggcgatcgaaaaatacctcaaatctcagctgcctcaattgtcgctaaagtttctagggacagtttgatgaaaaaaatatcaaagaatttttcaaaatatcaatggaataaaaattgtggatatggaacaaaagttcatattcaagcaattctaaaattcggtatcacaa

SEQ ID NO: 260103 - DNA, 307 bp, Unknown
  Bacterial polypeptide expressing nucleotide sequence isolated from the Sargasso Sea
tatgaaaaataatgtagttatatatactgatggtgcatgtaaggggaatccgggtgaaggaggttggggcgctattttagaatttaccgacgaaacaaataaaatatatggttatcaagaaaacacaacaaataatagaatggaaatagttgctgctattgaggcaatcaagctagttaaagaagaatcagatataattatttatacagactcaaaatacttaatgaatggaattaatacttggatacattcttggaaaaaaaataattggaaaacttctggaaataaaaatgttaagaatgttgat

SEQ ID NO: 260104 - DNA, 282 bp, Unknown
  Bacterial polypeptide expressing nucleotide sequence isolated from the Sargasso Sea
tatgaaatacaaaatttatactgacggtgcatgctcaggaaatccaggtcctggtggatgggctgcgataatactagtagatgataaaatcaaaaacgagatctcaggtaatgaagaaaacacaacaaataacaaaatggagttattagcaccaattagagcgatacaaaaatttaaaaaaaaatctgaaattttaatttacacagactctacttacgtaaaagatggtattacaacttggataaaaaaatgggaaaaaaacgggtggaaaactgcttcaaa

SEQ ID NO: 260105 - DNA, 331 bp, Unknown
  Bacterial polypeptide expressing nucleotide sequence isolated from the Sargasso Sea
ggctgtagaaagacttaaccctaaagctgattatgcactaatcgatggaaaccgttatcctgaaatgagactaccaggtgaggcactggtcaagggtgactcgcgatcagccagtattgctgctgcatctatcgttgggaaagtggttcgagaccgcgtcatgcagggcatggaatgtctttatcccggttgggggtttgagcgtcacaaggggtatccgactcaagaacaccgtgaaaatcttcaaaagaggaagccgtccatgattcatcgccattcatttcagtatgtcggtaaccctgaggatttaattcagccgtccctcttttga

SEQ ID NO: 260106 - DNA, 489 bp, Unknown
  Bacterial polypeptide expressing nucleotide sequence isolated from the Sargasso Sea
tatgaaaatttttgctggtgtagatgaggttggcagagggagtttaataggtccagtttatgcagccgcagtaattttaaataaatcaataaacaaaaaattactaaaagattctaaaactatttcaaaaaatgaaagagagttattatctaagtatataaaaaaaaattctatttgggctgtgggaaaagcgtcagtaaaagaaatagaaaaaattaatatcttgcaagcgagcttacttgcaatgaaaagagcaattaaaaagttaaaaaaaaaaccatcatgtgttttaattgatggaaataatcttccaagaattaataattataaacttaagtcagtggttaaaggtgatcagaaaagtccctctatttctgctgcctcaattattgcaaaggttgctcgcgataggatgatagctaatttgggaaaaaagtttaaaggatataattgggatcaaaattttggatatggaaccaagcagcattt

SEQ ID NO: 260107 - DNA, 478 bp, Unknown
  Bacterial polypeptide expressing nucleotide sequence isolated from the Sargasso Sea
atgacaaaaaaaattaatatatatacagatggatcatcaattggcaatcctggacctggagggtatggcataattatgatttcagataatggtgaatacaaaaaagagtttagtaaaggatttaaactaactacaaataatagaatggaactactagcagttattgttgcacttgaaagtataaaaattaaaaactgtaatgctgaagtgtttactgattcaaaatacgtatcagatgccgttgataaaaaatgggtttttgaatgggaaaaaataaattttaagaagaaaaaaaatcctgatttgtggaaaagattcttgatgatatatagaaaacatagtgtaacttttacatggattaaaggacataataatcaccctgaaaatgaaagatgtgattatatggctaataattcagcaaaaagctctaatcttattagtgatacatattatgaaaaaaacataaaaggtgtataat

SEQ ID NO: 260108 - DNA, 205 bp, Unknown
  Bacterial polypeptide expressing nucleotide sequence isolated from the Sargasso Sea
tttatcgattgcatctgcatctattattgcacaagttcaccgtgatcgactgatgagtatacttgatagtaagtttacattttatgattggaaaaaaaatgcaggttacggaactaaaaaacatattgatgcaatacacaaacacggtgtaactcaatttcaccgaaaatcatttgagccaatcaaatcccttttaaaaaaataa

SEQ ID NO: 260109 - DNA, 539 bp, Unknown
  Bacterial polypeptide expressing nucleotide sequence isolated from the Sargasso Sea
aatgaaaagtaatattgctggtgttgatgaagtgggcagaggaagtttagtcggaccagtatatgctgcggccgtaattttaaaaaaaaaagtagataaaaaaaaactaaaagattcaaagaaattaactaaaataaatcgtcaaatattagaaaagtatataaaaaaaaactcttattggtcaattggctctgcttcattaaaagaaatagaaaagctaaatattttaaatgcgagtctacttgcaatgaaaagagcaataattaagttaaaaaaaaaacctggtcaaatattgatagatggaaataaaattccaaaaattaaaaactacaatttaaaatatgtgatcaagggagatgaaaaaatacctgaaatatccgctgcttccataattgcaaaggtatcaagagatcgtttaattacaaaaatgtcaaaaaaatacattaaatattattggaacaaaaatgctggatacggaactaaagatcacttatcagcaattaaaaaatttgggataaccaagtaccatcgtaaaacat

SEQ ID NO: 260110 - DNA, 567 bp, Unknown
  Bacterial polypeptide expressing nucleotide sequence isolated from the Sargasso Sea
aatgaaagtttttatagctggagttgatgaagtaggaagaggaagtttaattggtccagtatatgctgcggcagttattttaaaaagaaaattagataaaaaaaaacttaaagattcaaaaaaattaacaagaaaaaatcgtgaaattttagaaaaatacataaaaaaaaattcttattggtctattggatctgcatcattaaaagaaatagaaaaatttaatattttaaatgcaagtttattagcaatgaaaagagcaataaaaaaattgactaaaaaaccttctcaagtactaattgatggaaataaaattccaaaaattaaaaattataatttaatatgtgttattaaaggagatgaaaaaatacctgagatatctgctgcatcaataatcgctaaggttgctagggatagattgattacacaaatgtcaaaaaaatttagaaaatatgcatgggataaaaatgcgggttatggaactaagtcacatataaaagcaattaaaaagtttggtgtaaccaaacatcacagaagaacttttaatccaatacacaatatattgagtcc

SEQ ID NO: 260111 - DNA, 455 bp, Unknown
  Bacterial polypeptide expressing nucleotide sequence isolated from the Sargasso Sea
attgttattagatgatattaaaaatcaagtaatcgggatcgatgaggtaggtcgaggtgctttttgtggaccagtagtgtcttgttcggttcttctagaacaaaaaattttaaataataatttggtttttcagattacagattcaaaaaaattgaatcataaaaaaagaataatattatcaaagttcatcaaagaatattcttcttactctattggagttgctaataatattgaaatagatgaaatgaatattcttcgagctaccaatctttcaatgataagatcttatgataaatttaaaaaaactgataatttaatcaagatagacggattaaaaactttttcattaaatgaaaaaaccacttttataaaaaacggtgatcaaaaatctatcagcatcgcagctgcatcaataatagcaaaaacttggagagacagattaatgactctttatt

SEQ ID NO: 260112 - DNA, 119 bp, Unknown
  Bacterial polypeptide expressing nucleotide sequence isolated from the Sargasso Sea
tatggatgtaaaaatttatacagatggtgcttgtgttggtaacccaggaccaggggggtgggctgctgtaattcttgatggaaaaataagaaaagaattatttggtggagaaaaatcaa

SEQ ID NO: 260113 - DNA, 439 bp, Unknown
  Bacterial polypeptide expressing nucleotide sequence isolated from the Sargasso Sea
atgatcaaaatatacactgatggcgcatgtagtggaaatcctggccccggtggttggggctacgtagttgtagaaaatggtaaattacactccagcaacggcagcgagagtcaaacaactaataatagaatggagctcacggccgcgataaaagccctcgagagcgctagaaaagacgaaagtttgtatttatacacagactctacttatcttcaaaagggtattactgagtggatagtaaattggaaaaagaataattggattaccagctcgaagaaaccagtatctaataaggatctgtggataaaaatagatcaattaaatcatgaacttgatatagaatggaaatgggtcaaagcacatcagtcagataattcagatgacacgttctataacaatatggctgatgaactagcaactggagctatacataaatgag

SEQ ID NO: 260114 - DNA, 718 bp, Unknown
  Bacterial polypeptide expressing nucleotide sequence isolated from the Sargasso Sea
atgaatattgatagtattgcgattgaagccgcaacagatggagcctgtagtggtaatcctggtccaggtggttggggcggtttaataatttttgacgatagcagcgaattagaaataggtggttccgagcaaaataccactaataatagaatggaactgactgcagctataaaaactctcgagaaattaaaatcctttaaattaaaagagaactttaaattaagaactgatagtaaatatgtcatagaaggatatacaaaatggattattaattggaagagaaatggatggaaaacaagctcaggtaaatcagttcaaaatcttgatttatggcaaaaaattgatcaattaagaattaatggcctaatcatggaatatgttaagggtcatagcggggataaacaaaatgatagggttgataaaatcgcaactaattacagcaaaggtatatccatagtgagcaacttaatagaagaagaatcagttgacttttttgaaaaaaatgcacctgcagaaattcaggaattattttcaagaaatgaattaattcaaaaattttcagaaaaagagtacttgttaaactcattagaactcagtaacttattgggtgaagaaaaccacttaaaaataaaaaaatatttactttttgaatggcgtaattggagattgattcccaaagataaaaaatattggataatagaaaaaaagggatcttaat

SEQ ID NO: 260115 - DNA, 632 bp, Unknown
  Bacterial polypeptide expressing nucleotide sequence isolated from the Sargasso Sea
gatgcccgacctgtctatcgagtcaggttttgacggtccggtcatcggcgttgacgagtccggccgcggcccctgggccggtccagtcaccatcgccgccgcctggctcgagcaggacgccttggctgcgtttccgctgggcctggatgattccaagaaaatgacagcggccagccgcgccgcctttcacggcatcctgacacagctgccgcatcatcatgtagtgctgtcggtcccggtcgaggtgatcgaccgcgacggcattttgaaagcgacgcttgccggcatggccagggcggccgaactgcttgccaagcgcctgtccgaggccggtatcggcgaggctgcccagatcctgatcgacggcaaccagatgccacccctggcacgacccgcccagacggtggtgaaaggggattcgcgcagcctcagcatcgccgccgcttcggtaattgccaagcatgagcgcgaccggatcatgcagggccttgccggtgaaaaccccggctatggatgggagggcaatatgggttacggcacggccgcccatcgcgaggcgctggaccgtcttggcgtcacgcggcaccaccgcaggagcttcgcgcccatccggcggcttctgtgcgacgggg

SEQ ID NO: 260116 - DNA, 346 bp, Unknown
  Bacterial polypeptide expressing nucleotide sequence isolated from the Sargasso Sea
atgaataagccaattactatttacacagatggttcgtcgatcgggaaccctggacctggtggttatggaatagttatgttggtagaaggggaagattataaaaaagaatttagtcaggggttcaaattaacaactaacaatagaatggagcttttagcagtaataattgctcttgaaaaaatcaagattaaaaattctaatgttactatatttactgactcaaaatatgtttcagatgcagtagaaaaaggatgggtgtttgattgggagaaaaaaaattttaagaacaaaaaaaatcctgatttatggatgcgatttttaaatatttataatgagcataaaatta

SEQ ID NO: 260117 - DNA, 241 bp, Unknown
  Bacterial polypeptide expressing nucleotide sequence isolated from the Sargasso Sea
atggcggaaggacggggacgggtcgtggctgcagcgacggatggtgcctgcagcggcaacccaggtccgggaggttggggcgccttattgcgttttgaagacggcagcattgaggaattcggtggccatgcacccgacaccaccaacaaccgcatggaactgcaggcggcgttggaggtgttgcaacggcttgaacatctgccccgtcatccggatctcaccctgcgcaccgacagcaaat

SEQ ID NO: 260118 - DNA, 571 bp, Unknown
  Bacterial polypeptide expressing nucleotide sequence isolated from the Sargasso Sea
aatgaaaaaatttattacagctggagttgatgaagttggaagaggttgtttggctggaccagttgtttcagcagcagtaatacttaaaacaggtattaatttaaaacttttaaaggactcaaaaaaaatctcctttaataaaagagaagagatatcggaacatattaaaaataattcatattatgcatttgggatagctacagtgaaagaaattttaagtctgaatattttgcaagcttcattgctatctatgaaaagagctattgaaaaactttcagttaaacctgatttaactttaatagatggttcctttgccccggaaggattaaaaagttataaaacaattataaatggagatgaaaaaatcaaagtaatcagtgcagcttctattatagcaaaagtttttagagatagattaatgattaaactgtcagaaaaattttctaattatgcatgggaaagaaactatgggtacgggacaaaagcacatttaaacggtttgaaaaaatttggtattactgctcaccatagaaaagcttttaaaccagtacacaagatattgtcgagataa

SEQ ID NO: 260119 - DNA, 445 bp, Unknown
  Bacterial polypeptide expressing nucleotide sequence isolated from the Sargasso Sea
gaaacaaaaagagagtcaattgctcaagaaattaaagaaaaagccattgcatggtcaatagggataagttcttccgaagaaattgatgaggtaaatattttaaaagcaactttaatagctatgaaaagagctattgaaggtttaaagatatttcctgatatcgcacttattgatgggcaacatgcacctcaaactgagtgcaaagtacgaacaatagtgaaaggagaccaatcaaaaaaaaatattatggctgcatcaattcttgctaaggtaagcagagacaactatatgaaagaaattgatgataaataccctgaatatggttttaaacaacacaaaggttatcctacaaagatgcatctagaagcattaaaattatacggcgttacaagtgaacatagattaagctttaaacctgtaaagataataaatgaaccaagatgaa

SEQ ID NO: 260120 - DNA, 397 bp, Unknown
  Bacterial polypeptide expressing nucleotide sequence isolated from the Sargasso Sea
aatggttagacagagtaaaagaatattatttccggtacgtaatggattttgctgcggtgtggatgaagtaggacgaggtgccatagcgggtccagtggtttcagctgcggtaattttaccaagggggtattatcccgtaggtttagatgattctaaaaaactgtcaaaatctaaacgggaagatctttatgcatccatgaaggaaaaggtacagtttggtatagggttagctacttcaaaagaggtggatagagtaaatgtacaccatgcctctctcttggcaatgagaagggcactggtaaatttaaaaataagcccagaaattgttttgatagatggaaagtatgttccaaaaaacattgatgcttttactcaatcagttgtttctggggattcc

SEQ ID NO: 260121 - DNA, 460 bp, Unknown
  Bacterial polypeptide expressing nucleotide sequence isolated from the Sargasso Sea
atattgcaagcaacatatgtttctatgaaaaaagcttacgatcaactcaaaatagtaccggaaaaaatattagtagatggttttgcaataccctcaaaacgcatcaaatcagaaggcatagtaaagggcgatgaaaaagttcaagaaattagcgcagcctcaattgtagcaaaagttattagagataaatttatgattctcgtagatccagtttttccaaattttgaattttataaaaataaaggctatggcacgaagcttcatatagaagcattgaaaaggtatagacctactttaatacataggatatcatttgctccagtaaaaaataatttacctgatttatcagttgtaagtagtgttaaatataaagatatgttgatcaaacaaaaaaaaacattaaaaaatatcaataatgatataaaaaattggttaagtcttaagaatcttatttactaaa

SEQ ID NO: 260122 - DNA, 193 bp, Unknown
  Bacterial polypeptide expressing nucleotide sequence isolated from the Sargasso Sea
gaacaaagggtggaaaacaaagggaggggaccccgttgcgaacaaggacctctggcttcgtctgcttgaagttagccaaaaccatgacgtttcatggtactgggttaaaggccactcaggacatccagaaaatgaacgctgtgacgaacttgctgttaacgcaagaaaggaatgttctaaatccagaaaataa

SEQ ID NO: 260123 - DNA, 499 bp, Unknown
  Bacterial polypeptide expressing nucleotide sequence isolated from the Sargasso Sea
tctgagtcacgagctaaaggcctggcgtgaaggatttagaaatattgccggggtcgatgaaaccggaagggggcccttggcgggaccggttgttgtttcagcagtgattctaggaagaaactggaacgaaaatcaccgactggatgattcaaaggcgttaaaagtgaaggaacgtgaagaactttatgagattatctgtcaagaagcacttgctgtcagtacggtctcaatgagtgccgagttggtggaccgcctcaatgttcttcaggccagtttacaggggatgaaaaaggctgtagaaagacttaaccctaaagctgattatgcgctgatcgatggaaaccgttatcctgaaatgaagcttccgggtgaggcactggtcaagggggattcgcgatcagccagtattgctgctgcatcgatcgttgggaaagtggttcgagaccgcgtcatgcagggcatggaatgtctttatcccggatgggggtttgagcgtcac

SEQ ID NO: 260124 - DNA, 730 bp, Unknown
  Bacterial polypeptide expressing nucleotide sequence isolated from the Sargasso Sea
atgaatagtgatagtattgcgattgaagccgcaacagatggagcctgcagtggtaatccaggcccaggtggttggggcggtttaataatttttgaagataacagcgaattagaaataggtggttccgagcaaaatactactaataatagaatggaactcactgcggctataaaaactcttgagaaattaaaaacctacaaattaaaagagaactttaaactaagaactgatagtaaatatgtaatagagggttatacaaaatggattattaattggaagaagaatggatggaaaacaagttcagggaaaccggttcaaaatcttgatctatggcaaaaaattgatcaattaagaattaatggcctaataatggaatatgttaaaggtcatagcggggataaacaaaatgatagggttgataaaattgcaactaattacagcaaaggtatatctttagaaagtaacttaaaaaaaatagaatcctcagttgattttattgaaaaaaatgcacctgtagaaattcaggaattattttcccgcaatgaattaattcaaaaatttgcagaaaaaaagtacctgttaagttcacctgaactagaaaacttattaggtgatgaaaaccacttaaagataaaacaatattcactttttgaatggcgtaattggagattgattcctaaagataaaaaatattggataatagaaaaaaggaagcctaattttttatgaa

SEQ ID NO: 260125 - DNA, 230 bp, Unknown
  Bacterial polypeptide expressing nucleotide sequence isolated from the Sargasso Sea
aatgagatataaaatttatacagacggtgcgtgttcgggaaacccaggtcctggtggttgggcagccgtaatattagtagatgataaaattaaaaatgaaatctcaggaagtgaaaatagtacaacaaataataaaatggaacttttggcaccaatcaaagcaattcaaaaatttaaaaagaaatcagaaatttcaatttatacagactcgacatatgtgcgagatggga

SEQ ID NO: 260126 - DNA, 457 bp, Unknown
  Bacterial polypeptide expressing nucleotide sequence isolated from the Sargasso Sea
tatgggatctatgataaataaggtgataatttatacagacggtgcatgctcaggtaatcctggatatggcgggtggggagcttatctgttatatgaagataataaaaaaaagatttcagggtacgaattaaacacaacaaataatagaatggaacttagagcagcaattgaaggtttgaatgctctaaaaagaccatgcaaagttatgctttatactgactcagtgtatttaaaagatggcattacaaagtggattataaactgggagaaaaataattggaaaaatgctaataaaaaggaagtaaaaaataaagatctatggattaaattacttcaagcgggaaagatgcatcagattgaatggaactgggtgaaaggtcacgagggaaatgaaggaaacgaaatagctgataaattggcaacacaagctatattacatgccaagattaatcaataa

SEQ ID NO: 260127 - DNA, 153 bp, Unknown
  Bacterial polypeptide expressing nucleotide sequence isolated from the Sargasso Sea
gatgcctaccaaagcttcgcctgctgttgatgcacccgttgtcgtcgctgccgcctgtgatggcgcctgccgcggcaatcctgggccaggaggttggggcgctttgctgcgctttagtgacggccgtgtggaagagctcggaggctcggaggc

SEQ ID NO: 260128 - DNA, 414 bp, Unknown
  Bacterial polypeptide expressing nucleotide sequence isolated from the Sargasso Sea
tatgaaaattaatatatatactgacggcgcatgtgtaggtaatccaggtccaggaggatgggccgctgttattatcaaagaaagtaaaaaaaaagaattatttggtggagaaaaacttacaacaaataacagaatggaattaacagcagcgatcaaaggtttagaacattgcctttctgaagagggggcgcaaccttctttgaaagaaattaaaatttacacagattctgtttacttaaaagagggaataactgtttggattgaaaaatgggaaaaaaataattggaagacctctgataaaaaaaatgtaaagaatattgatctttggaaaaagcttaaagaacttacaaaatctaatcagatagaatggtgctggataaaaggtcattctggtgacccaatgaacgagctagc

SEQ ID NO: 260129 - DNA, 481 bp, Unknown
  Bacterial polypeptide expressing nucleotide sequence isolated from the Sargasso Sea
gataaaaaaaaactaaaagattcaaaaaaattaacaaaaaaaaatcttgaaattttagaaaaatatataaaaaaaaattcttattgggctattggatcagcgtctttaaaagaaatagaaaaatttaatattttaaatgcaagtttattggctatgaaaagagcaataaaaaaattaaataaaaaaccttctcaagtattaattgatggaaacaaaattccaaaaattaaaaattataatttaaaatgtgttattaaaggtgatgaaaaaatacctgagatatcagccgcatcaataatcgctaaagttgccagggatagactaattacaaaaatgtcaaaaaaatttgctgaatacgcttgggataaaaatgcaggttatggtactaaactgcatttaatagcaattaagaaatttggtgcaactaaacatcatagaaaaacttttgatcccatacacaatatattgagtcttaattaaa

SEQ ID NO: 260130 - DNA, 124 bp, Unknown
  Bacterial polypeptide expressing nucleotide sequence isolated from the Sargasso Sea
tctgggatatttcatattcaaaaataaaggatatggaactaaagaacattttttaagtcttaaagcaaatggaataacaaatctacatagaaaaagtttcttaaataaattaaaccttgtttaa

SEQ ID NO: 260131 - DNA, 529 bp, Unknown
  Bacterial polypeptide expressing nucleotide sequence isolated from the Sargasso Sea
tatgttaaaacaattttacgaaaaagataagattgaaatcggcattgatgaagcgggaagaggttgtttatttggtcctgtatttgtagccggcgtcatttggttagataaagacccagatgaaagtaaggaatatatccttaaagattcaaaaaaatgttctgagaaaaaaagaattcttttaaaggactatattaaagataattcaatagcttattcggttgttcaaatttcagaagaagaaatagataaaacagatattctgaaagcaacaatgaaaggaatgcatcaatgtatcgacgaaataagagaaaaattagaaatagatatgatcctcgttgatggaaataattttgatatctatactgataaagaattgaatccaattgatcatgaatgcataatcaatggagataatacttataaaagtattgcagcggcatccattttagcgaaaacatatcgcgatgaatacatactcaatttagtcaaagaaaatccccaattaagtatgtatgcgattcaaaat

SEQ ID NO: 260132 - DNA, 504 bp, Unknown
  Bacterial polypeptide expressing nucleotide sequence isolated from the Sargasso Sea
aatgaaaaaaattattgctggtgtagatgaagttggaagaggtagtttaattggtcctgtgtatgctgctgcagtaattttaaataaaaaaattaacaaaaaaaaattaaaagactcaaaaaaattatccaaaaaaaaaagggaaattttatataattatataaaaaaaaattgtatatttgcaattggctcagcttctaagaaggaaattgaaaaaataaatatattgaatgcaagcctattagcaatgaaaagggctgtcaaaaaactaaaaaaaaaaccaaatcttgttttaattgatggaaacaacatcccaaaaattaattattacaaaatcaaaaatataattaaaggtgaccaaaaaatacctgaaatttctgctgcttcaataattgctaaagtatccagagatcgactgattactaaattatcaaaaaaatttaatagatattattgggatagaaatgctggctatggcactaaaaatcatttatctgctattaa

SEQ ID NO: 260133 - DNA, 354 bp, Unknown
  Bacterial polypeptide expressing nucleotide sequence isolated from the Sargasso Sea
tatgaataagccaattactatttatacagatggttcgtcgattggaaaccctggacctggtggttatggaatagttatgttggtagaaggggaagattataaaaaagaatttagtcagggattcaaattaacaactaacaatagaatggagcttttagcagtaataattgctcttgaaaaaatcaagattaaaaattctaatgttactatatttactgactcaaaatatgtttcagatgcagtagaaaaaggatgggtgtttgattgggagaaaaaaaaatttaagaacaaaaaaaatcctgatttatggatgcgatttttaaatatttacaatgagcataaaattaaatttca

SEQ ID NO: 260134 - DNA, 343 bp, Unknown
  Bacterial polypeptide expressing nucleotide sequence isolated from the Sargasso Sea
acgtgaattaaacggatctgaacctaacacaaccaacaaccgtatggaattgatggccgcaattatggggctagatgctttaacacgtcccatgacagtcgatcttcacactgatagccggtatgtcatgaatggcattcaagactggatgccccgctggaaggccaatggatggaaaacggcagccaaaaagcctgtggccaatcaagatttatggcagcaacttgatgccgctgttgagcgccataccgtgaactggcattgggtcaaaggccatgctggcaacccgttaaacgagcgctgcgatgttttagcccgatcagcagccgagtctattgcttag

SEQ ID NO: 260135 - DNA, 427 bp, Unknown
  Bacterial polypeptide expressing nucleotide sequence isolated from the Sargasso Sea
atgaaattaaaaatttatactgatggtgcttgctctggaaatcccggtaaaggaggctgggcagccatcatattagataatgatttaaatcaatcaagtatctctgggggtgaaagtaatacaactaacaataggatggaattaatggcaacgataatggcattaaaaaaaattaaaaagaaatcagagattacaatttttacagactcaaaatacgtaaaagatgggattactgattggattaaaaagtggaaactaaataattggaaaagttcaaataagaaaccagtcaagaataaagatctctggattaaattggatgattcttgtcaaaaacataaggttacttggaggtgggtaaaagcacacgccggaaataaatataataatcttgctgatgagttagcagtttcaaaaactaaataga

SEQ ID NO: 260136 - DNA, 563 bp, Unknown
  Bacterial polypeptide expressing nucleotide sequence isolated from the Sargasso Sea
tatagctggggttgacgaagtaggtagaggaagtttagtcgggccagtatatgctgctgcggtaatattaaaaaaaaatttagacaagaaaaaactaaaagattccaaaaaattgacaaaaaaaaatcgtgaaattttagaaaagtatattaaaaaaaactcttattggtctattggatcagcatcattaaaagaaatagaagaattaaatattttaaatgcaagtttgctggctatgaaaagagcaataaaaaaattaaataaaaaaccttctcatatacttattgatggaaataaaattccaaaaataaaaaattataatttaaaatatgttgttaaaggagatgaaaagatacctgaaatatctgctgcatcaataatcgctaaggttgccagagatagacttattacaaaaatgtcaaaaaaatttactaaatatgattgggataaaaatgcaggctatggaactaaacttcatttaatagcaattaagaaatttggcgtaaccaagcatcatcgaaaaacttttggtcctatacacaatatattgagtcctaattaaa

SEQ ID NO: 260137 - DNA, 571 bp, Unknown
  Bacterial polypeptide expressing nucleotide sequence isolated from the Sargasso Sea
atgacaaataaattattcgcaggtgtggatgaggttggaagaggttgtttagcaggacctgttgtttcttgtgcggtgattttaaagaagaatattaaaaaaaaattattaaaagactcaaagatgattcctttcaaagatcgtttatatattgcagatcacattaaaaaaaattcttggttttctataggtattgcatctgtgagtgaaatagataaatataatatatttaatgcttcactactttcaatggaaagagcaattaaaaaattgaaaaaaaaacctgatctttatttaatagatggcacgcatggtccaaaaaaaataaagaattttaaaacagtgattaaaggtgaccagaaaataaaatgtatttctgcggcatcaatagtagcaaaagtttttagggatctttatatgatcaaattgggaaataaatttcctcaatatagttggcaaaaaaattttgggtacgggaccttgcaacatttaaatgcattaaaaagatttggaatttctaattaccatcgtaaaagttatagacctgtacacaatatctgtcaaaataaga

SEQ ID NO: 260138 - DNA, 433 bp, Unknown
  Bacterial polypeptide expressing nucleotide sequence isolated from the Sargasso Sea
aatgattgctggtgttgatgaggttggtaggggctgtcttgctgggccagttgtagctgcgtctgtaatactaaagagaccaatcaaaggccttatggattcaaagaaactttcttcaaaaaaaagggagcatctaagtaaggtaataatagaaaattccatatttgctataggagctgcagacaacaaagagattgatcaaattaatatcttacaagcttccttgttagcaatgcagagatcattagataagctggatgtaaaaccaaaaaaagtattagttgatggcactaatatttttgaaactccaattgaaatagagtctattgtgggaggagataatttgataccatcaatcagtgcagcttctatagtagcaaaggtatatagagatgggttaatgatggcatatagtaaagaattcccaaattat

SEQ ID NO: 260139 - DNA, 562 bp, Unknown
  Bacterial polypeptide expressing nucleotide sequence isolated from the Sargasso Sea
gatgaagataattgctggtgttgatgaggttggtagaggaagtttaatcgggcctgtttatgcttcagcagtgattttaaaaaaatcaattaatcccaaattattaaaagactcaaaatcattaagtaaaaaagaaagagagtatctatatagctatataaaaaaaaattctacttggtctataggaaaagcttctgtcaaagagatagaaaagttgaatatactacaagcaagtttactagctatgaaaagagccatcaaaaaacttaaaaaaaaaccaacacacgttctgatagatggaaacaaaactccagatttagaaaattataatttaaaatcagtcattaaaggagataaaaaagttccctctatttcggcagcttctataattgcaaaagtatcaagggataagtttataaccgccttatcaaaaaaaaataaaggttacaattgggataaaaactttgggtacggaacaaaacagcacttaaaagctttaaaaaaattaggtattactaaacatcatagaaaaactttttcaccaatatctaaaaaaaattaa

SEQ ID NO: 260140 - DNA, 502 bp, Unknown
  Bacterial polypeptide expressing nucleotide sequence isolated from the Sargasso Sea
aatgaaaaaaatcatagcaggagttgatgaagttggcagaggaagtttaattggtccagtttttgctgctgctgtaatattgcataataaagtagataaaaaaaagcttaaagattcaaaacaactatcacgaaagaaaagggaagttttagaaaaatatattaagaaaaattctttatgggctattggatatgcttcgaaaaatgaaatagaaaaattaaatattttaaatgctagtttattagctatgaaacgagcaattaaaaaacttaaaaaaaaaccaaaattagtcctaattgatggaaacaaagttccaaacatggataattataaaataaaaaatgtaataaagggtgatcaaataatacctgagatttcagcggcctcaataattgcaaaagtatcaagagatcgattaattaaaaaaatatctgaaaaatataaaaaatttaattgggacaagaatgctggatacggaacatttgaacatttaaaggctata

SEQ ID NO: 260141 - DNA, 583 bp, Unknown
  Bacterial polypeptide expressing nucleotide sequence isolated from the Sargasso Sea
atgaagaaaatcattgctggtgtggacgaagtagggagaggaagtttaattggtcctgtttatgctgcagcagtaattttaaataatagtattaacaaagaaaaaataaaagattcaaaaaaattatcaaaaactagtcgagaaaatttagaaaaatatatcaaaaaaaattcatgttgggcaattggatctgcatctctaattgagatagagaaacttaatattttaaatgcaagtttacttgcaatgaaaagggctattataaaattaaaaaaaaaacctactttagttttgattgatggaaataaacttcctgaaataaaaaattataaactaaaatccataatcaaaggagatcaaaaaatttctgaaatttctgcagcctcaataattgcaaaagtttcgagagatcgactaatttcaaatctttcaaaaaaatttaaaaattacagttggtcaaaaaatgctggttatggaacaagagatcatatgattgctatcaaaaaatatggattgaccaaatttcatagaaaaacttttaaacctatacacaatatattgagtctcaaaaaattagtataac

SEQ ID NO: 260142 - DNA, 376 bp, Unknown
  Bacterial polypeptide expressing nucleotide sequence isolated from the Sargasso Sea
ggaccgcctcaatgttcttaaggccagtttacagggcatgaaaaaggctgtagaaagacttaaccctaaagctgattatgcactgattgatggaaaccgttatcctgaaatgaagcttccaggtgaggcactggtcaagggggattcgcgatcagccagtattgctgctgcatctatcgttgggaaagtggttcgagaccgcgtcatgcagggcatggaatgtctttatcccggatggggatttgagcgtcacaaggggtatccgactcaagaacaccgtgaaatccttcagaagaggaagccgtccatgattcaccgccattcatttcagtatgtcggtaaccctgaggatttaattcagccgtccctgttttga

SEQ ID NO: 260143 - DNA, 469 bp, Unknown
  Bacterial polypeptide expressing nucleotide sequence isolated from the Sargasso Sea
atgaaagtaaaagcttacactgatggggcatgtagtggaaaccccggtccagggggatggggtgtttatttagttgctgaaaataatgtaggtgaaatcgtaaaggaagaggtcctttacggaaaaaacaaagaaacaaccaatcaaataatggaactaacagccgccatacaagctttaggaagcttgaaaagaaaaaacgtcgacattaccattttcaccgacagtaagtatgtcatagagggaataacaaaatggatttttggatggctcaaaaataactggagcacagcctctaaaaaacctgttgcaaatcgtttattatgggaaaaactttttaatttgacaaaaaatcaaaatgtagagtgggtatgggtaaaaggtcatgctggagtacacggaaatgagaaagccgactcactcgctgtaagagggcgtgaagaagcatctaatgagttgattggttaac

SEQ ID NO: 260144 - DNA, 446 bp, Unknown
  Bacterial polypeptide expressing nucleotide sequence isolated from the Sargasso Sea
aatgaaaaggatcattgcaggtgtagacgaagtaggaagaggaagtttaattggacctgtttatgctgctgcagttattttaaaaaatagtatcgataaaaaaaaacttaaagactcaaaaaaattgtcgaaagctaaacgtgaaaatttagaaaaatatattaaaaaaaattcttattgggcaatagcatctgcatctctaattgaaatagagaagcttaatattttaaatgcaagtttacttgcaatgaaaagggctattcaaaaattaaaaaaaaaacctactttagtattaattgatggaaacaagcttcctgagatgaaaaattatcaacttaaaagtataattaaaggagatcaaaaaatttctgaaatttctgcagcctcaataattgcaaaagtttcaagggatcgcttaattacaaatctatcaaaaaaatttaata

SEQ ID NO: 260145 - DNA, 424 bp, Unknown
  Bacterial polypeptide expressing nucleotide sequence isolated from the Sargasso Sea
atgaagttaaaaatctacactgacggagcttgttcaggaaatcctggaaagggaggctgggccgctattattatagacggaaaaaatcaatcaattatttctggtagtgaaaataaaactacgaataatagaatggagttaatggcacctatcatggccttaaaaaaaattaaaaccaaatcagaaattacgatttatacagactcaaaatatgttaaagatggaataaccgaatggataaaaaaatggaaactaaataattggctaagttcaaataaaaaacctgttaaaaataaagatctttggataaaattggataattgttgccaaaaacactatgtaagttggaaatgggttaaagctcacgcagaaaataagctaaataatttagcagacgaattagctgtttcaaaagctaaataga

SEQ ID NO: 260146 - DNA, 548 bp, Unknown
  Bacterial polypeptide expressing nucleotide sequence isolated from the Sargasso Sea
attgagcaaattatttacagctggtgtggatgaagttgggagaggctgtttagcaggcccagtagtatctgcagctgtaattttaaaaagtggtataaaattaaatcttctaagagactcaaaaaaaatatcatttaaaagaagagaagaaatttcggatcatattaaaagtaactccttcttttcaattggaatagcatctgttgatgaaattttaaaatttaatattttaggtgcctcactactttctatgaaaagagcaatcgaaaatcttgaaataaaaccaaacttaacattgatagatggaaattttgcacccaaaggcttaacaaattataaaaccatagttaatggggatgagaaaataaaagttattagtgcagcttcaattatcgcaaaagtttatcgagacagatttatgataaaattatctgaaaaattttcaaactatgcatgggaaagaaattttggatatggtactaaagctcatcttgagggtttaaaaaaatttggtgtaacctcacaccatagaaaaagttttaaaccga

SEQ ID NO: 260147 - DNA, 465 bp, Unknown
  Bacterial polypeptide expressing nucleotide sequence isolated from the Sargasso Sea
tctgagtcacgaacaaaaggcctggtgtgaaggatttagaaatattgccggggtggatgaaaccggaagggggcccttggctggaccggttgttgtttcagcagtgattctgggaagaaactggaacgaaaatcaccgactggatgattcaaaggccttaaaagtgaaggaacgtgaagaactttatgagattatctgtcaagaagcacttgctgtcagtactgtctcaatgagtgccgagttggtggaccgccttaatgttcttcaggccagtttgcagggcatgaaaaaagctgtagaaagactcaaccctaaagctgattatgcactgatcgatggaaaccgttatcctgaaatgaagcttccaggtgaggcactggtcaagggagactcgcgatcagccagtattgctgctgcatcgatcgttgggaaagtggttagagaccgcgtcatgcagggcatgga

SEQ ID NO: 260148 - DNA, 225 bp, Unknown
  Bacterial polypeptide expressing nucleotide sequence isolated from the Sargasso Sea
gatgcagctgggcctcgattttaccctggtcgaagaactggtggccggtgtcgacgaagtcggccgtggccccctctgcggggccgtggtcacggctgcggtgatcctcgatccggcgcggccgattctcggcctgaacgactcgaagaaactctccgaggcgcgccgtgaagtgctgttcgacgagattcgcgagaaggctctggcctggtgcatcgcccgcgc

SEQ ID NO: 260149 - DNA, 421 bp, Unknown
  Bacterial polypeptide expressing nucleotide sequence isolated from the Sargasso Sea
atttgaacaaatattgaaaaattcccatgttggtattggagttgcttatgttgaatgcgtcgataccattaacgtattaaacgcaacaaaacatgcaatgaacacagcatataaaaaattaaaaaaaagacctgatatattgctcattgatggaaattttaagattaatactgaaattgtgaatatacctatcataaagggtgatcaaaaatcaatctcaatagcagcggcctcaatcattgcaaaggttgtacgcgatagaattatggataaattttcttttgtatttaataaatacacattcaacaagcataagggttacccaacaaaaaatcatattagggaaattgaaaaatatggagtattggctattcacagaaaaacatttagtccagtaaatgaaataattaaaaaaaattaa

SEQ ID NO: 260150 - DNA, 396 bp, Unknown
  Bacterial polypeptide expressing nucleotide sequence isolated from the Sargasso Sea
tatgattaagatttacactgatggagcttgctcagtaaaccccggtattggcggatggggagcaataataatttttgattctggtgaagaaaaagaaataagcgggtcagaacttgagacaactaataatagaatggaaattactgcagtaataaaaagtcttgagctcaaagaattaaatatcgaagataaggtaaaaatttactctgatagcacttatgtaataaacacaataactaagaattggaaaagaaatgcaaataatgatctatgggacaaactcgataatttattagaaaaaagaatagttgaatgggagtgggtaaaaggtcattcaggaaataaatataacgatatagcagataaattagctgtaaatgccataaacgatttaaa

SEQ ID NO: 260151 - DNA, 568 bp, Unknown
  Bacterial polypeptide expressing nucleotide sequence isolated from the Sargasso Sea
aatgaaaaaaattgttgctggtgttgacgaagtgggtagaggtagtttgattggtccagtttatgcggcagcagtaatatttaatcctaaaataaataaaaaagaaattaaagactccaaaaaattgaaaaaaattgagagagaaaaattatttaagtacataaaaaaaaattctatttgggctattggatcagcatcaattagagaaatagaaagacttaatatattaaatgcaagtctattagctatgaagagagcaataaaaaaactaaaagttaaaccaaatttagtacttgttgatggaaataaatcgccagatttgaataattacattacaaaaacagtaatcaaaggagatcaaaaaataaaagaaatatctgcagcatcaattgttgcaaaagtatcaagagataaactgatactcaaaatgtcagaaagtaacaaaaaatacaaatgggatgtaaatgcaggttatggaaccaaagatcatattaacgctataagaaaatatgggataactagatttcatcgcaaaacattcaatccaatacacaacatgttgagtctt

SEQ ID NO: 260152 - DNA, 517 bp, Unknown
  Bacterial polypeptide expressing nucleotide sequence isolated from the Sargasso Sea
attggcccagtttatgctgccgcagtaattttaaataaatcaattgataaaaaattattaaaagattctaagactattgctaaggaaaaaagaaagatattatctaattatataaaaaaaaactctatttgggctattggtactgcatcggtcaaagaaatagagaaaattaatatcttgcaggcaagtttacttgcaatgaaaagagctataaagaaacttaaaaaaaaaccaacccacgtattagttgatggaaatatacttcccgatttaaaaaggtatagtttgaaagcagttataaaaggagatcaaaaaattccttctatctcagcggcatctattattgctaaagtcacaagagataaattcataactaaattagcaaaaataaataaaggctattactgggatcaaaattttggttatgggactaaacaacatttaaaagctattaaaaatttaggaattactagtcaacatagaaaaactttttcaccaattaataaatttaaatagg

SEQ ID NO: 260153 - DNA, 574 bp, Unknown
  Bacterial polypeptide expressing nucleotide sequence isolated from the Sargasso Sea
aatgaaagttattatagctggagtagatgaggtaggtagaggaagtttaattggaccagtatatgctgcagcagttattttaaaaaaaaaattagataaaaaaaaactaaaagattctaaaaaattaacaaaaaaaaatcgtgagatattagaaaaatacataaaaaaaaattcctattggtctattggatcagcatctataaaagaaatagaaaaattcaatattttaaatgcaagtttaatggctatggaaagagcaataaaaaaattgaacaaaaaaccttctattgtattaattgatggaaataaaattccaaaaataaaaaattataatataaaatatgtgattaaaggagatcaaaaaatacccgaaatatctgctgcatcgataattgctaaagttgctagagatagacttgttaagcaaatgtcaaaaaaatttactaaatatgcgtgggataaaaatgcagggtatggaactaaaatacatcttttagcaattaagaaatttggtgtaacaaagcatcatcggaaaacattcgcccctatacacaacatattgagtctcaattaa

SEQ ID NO: 260154 - DNA, 580 bp, Unknown
  Bacterial polypeptide expressing nucleotide sequence isolated from the Sargasso Sea
aatgagaaaaattatagctggagttgatgaagttggtagaggaagtttaataggtccagtatatgctgcagctgttattctaaaaaaaaatattaacaagaaagagataaaagattcaaaaaagttaaataagattgatagagaaaaattagcaaaatatataaaaaaaaattctatttggactataggatctgcctcagttaaggaaatagaaaaactaaatattttaaatgctagtttattagccatgaagagagctataaaaaaactaaaagttaaaccaaatttagttcttattgatggaaataaatcacctgaattaagaaattatcttgttaaaacaataattaaaggagaccaaaaaattaaagaaatatcagcagcgtcaataattgcaaaagtttcaagagataaactgatgttcaaaatgtcagaaagttttaaaaaatacaaatgggatttaaatgcgggttatgggactagagatcacattaatgctattagaaaatatggagtaactagatttcatcgaaaaacattcaatcctatacacaacatattgagtctgagaaagaaatag

SEQ ID NO: 260155 - DNA, 674 bp, Unknown
  Bacterial polypeptide expressing nucleotide sequence isolated from the Sargasso Sea
tcaaagcaaagcgccccacttggctaacgaacaccgatattggaatcaaggtgcctcggtagtggcgggtgtagatgaagtaggcaaaggcgcatgggccggaccgctaacaataggcgctgttgtgcttccacgggaggggttggtggaaggtatccgcgactcgaagatgctcacaccgtcgaagcgccagcaactttctgctcaaattcgaagctgggctcaagactgggcagttggtcatgctagtgcccgcgagtgtgatgagttgggaatgtctgaagctcaacgagtagctacgcgtcgagctcttgaccgactcaaatccgtgcctgatcgagttcttttggatggaaagtggaattacatcgattggctgcccagcacggcaattattaaaggcgaccaggagtcactgtcgatagctgcggcatcgattatcgccaaggttgagcgggatcgacttatggctagcgctgcagaagactttcctgcgtatatgttccaaaacaataaagggtatccagcgccccagcaccgaatggcgctgtcgggctacggtccatgtgttatccaccgcaaaagttggtcttttatggatgacttgctttggaccggcatacgccgcactaatcgaaatgaaatagatcaagagaaattatttgtgacatgac

SEQ ID NO: 260156 - DNA, 439 bp, Unknown
  Bacterial polypeptide expressing nucleotide sequence isolated from the Sargasso Sea
aatgaaaaaaataattgctggagttgatgaagtcggtagaggaagtttaattggaccagtatatgctgcggctgttattttaaatagcaatattgataaaacaaagcttaaagattcaaaaaaaatatcgagattaaaacgtaaaattttggaaaaatatattaaaaaaaactcagtatgggccataggctctgcatctttatcagagattgaaaaatttaatattttaaatgctagtctacttgctatgaaaagagctattaaaaaacttaaaaaaaagcctcaattagttttaattgatggaaataaaatcccgaaactgaaaaattataagttaagaaatataatcaaaggggatcaaaagattcctgaaatctctgcagcatcaattgttgctaaagtatctagagacaaattaattactaaaatgtcaaaaaaa

SEQ ID NO: 260157 - DNA, 589 bp, Unknown
  Bacterial polypeptide expressing nucleotide sequence isolated from the Sargasso Sea
atgattgaagataaagtttggtcagaaaatccaagtaaatacattataggagcagatgaagttggtagaggttcctttgctggcccaatatgtgctgcagcagtgaaaattaattattcacatttagaactgttagctaatgtaaaagactcaaaaaaacttagtgcaaaaaaaagagaaaaaatattttcaattgttcaagaaaataacattgagtattcatttaaggaatcatcaaacaactttatagatcaatttggaatcaaaaacgctaatgaaaaagtattaactgattcaatctcagatatctacactggcaatgaaatagtatatgttgatcattttaaaattaataatttcaaatctatctctgtggttcgaggagaagataattgcagagcaatagctttagcaagtattgtagcaaaagtgcttagagataatttaatgattaaattttcagaaaaatatcctgaatattcctttgaaaagaataaaggttatggaacaaaagatcacagagaggctatttcaaaatatggtttatctaatattcacagaaaatcttttagcttaaagcccatataac

SEQ ID NO: 260158 - DNA, 569 bp, Unknown
  Bacterial polypeptide expressing nucleotide sequence isolated from the Sargasso Sea
attgaaagaattaattacagccggagttgatgaagttggaagaggatgccttgcaggtcctgttgtgtcagcagctgtaatctttaaaaaaggcattaatctgaaacttttgaaggactcaaagaaaatttcatttaaaaaaagaaaggtaatttctgatcatattaaaaataactcttattttgcaataggtattgcttcagtagaagaaatttttaatttaaatattttacaagcttcattactttcaatgagaagagctatagagcaacttgctgtaaaaccagatttaacacttatagatggaaatttcgctccaactggattaaaaaattataaaactataattaacggtgatgaaaaaattaaagtcataagtgcggcttctattatcgctaaagtttatagagataaactcatgattaatctttctgaagaattttctaactactcttgggaaaaaaattttggttatggaactaaagctcatttagaaggtttaaaaaaatttggtattacctcccatcacagaaaaaggtttaaacccgtacacaagatattgcttaact

SEQ ID NO: 260159 - DNA, 574 bp, Unknown
  Bacterial polypeptide expressing nucleotide sequence isolated from the Sargasso Sea
tatgaaaaaaattattgctggtgttgatgaagttggtagaggcagtctggttggtcctgtttatgctgcagcagtaattttaaacaacaaagttgataaaaaaaaaataaaagattctaaaaaattatcgaaaaaaaagagagaaacaatgaataattatttaaaaaaaaattcagtatggtccattggatctgcttcattaaaagaaatcgataaactcaacattttaaatgctagtcttttggcaatgaaaagagcagttaaaaaattaaaaaaaaaaccagaaatcgtcttaatagatggaaacaaactaccaaaaattaataattacaaactaaaaaatataattaaaggagacgaaaaaattcctgaaatatcagcagcgtcaataattgctaaagtttcaagagatcgtttagtgtctcagctttcaaaaaaatttaaaaattattactggaataaaaattctggttatggaactaaagaccatattaaagctataagaaagtttggtgtaactaaatatcacagaaaaacatttcaaccgatctacaatatattgagtctcaaataa

SEQ ID NO: 260160 - DNA, 463 bp, Unknown
  Bacterial polypeptide expressing nucleotide sequence isolated from the Sargasso Sea
atgaataaatcaattacaatatatactgatggttcatcgattggaaatccaggtcctggaggttacggaattgtaatgttagttgatggtgaagattacaaaaaggaatttagtcagggatttaagtttacaactaacaataggatggagctcttggcagtaattgttgctttagagacaataaagattaaaaattctaatgttagtatatttactgactcaaagtatgtagcagatgcagttgaaaaagggtgggtatttgattgggagaaaaaaaagtttaaaaataaaaagaaccctgatttatggatacgttttcttaacatctataaagaacataaaattaaatttcattgggtcaaaggacacagtaatgacttttataatgacaggtgcgaccttttagcaacaaatgctgctaaaagttcaaatctaattgaggatttaggttacattaattaaa

SEQ ID NO: 260161 - DNA, 574 bp, Unknown
  Bacterial polypeptide expressing nucleotide sequence isolated from the Sargasso Sea
atgactagagtaattgcaggtgttgatgaggttggaagaggaagtcttgtaggtcctgtttatgcagctgcagtcattttaaaaaaaaacttagatataaaaaaactaaaagattcaaaacaattgtcaaaaaaaaatcgtgaaatattagaaaaatacattaagaaaaattcacactggtcaattggttcagcttcaacaaaagaaatagagaaaataaatatattaaatgcaagtttgcttgcaatgaaaagagcaattgagaaattaaaaaaaaaaccaagcctagtattaattgatggtaacaaagttccaataatgaaaaactacaatttaaaatttataataaaaggagatcaaaaaatacctgaaatatctgctgcctcaataattgccaaagtttcaagagatcgtttgattacaaaattatcaaaaaaaaataacaaatatctttggaataaaaatgcaggttatggaactaaagatcatttatcagcaattaaaaaatttgggataaccaaacaccatagaaaaacattccagccaatacacaatatattgagtctaaaataaa

SEQ ID NO: 260162 - DNA, 307 bp, Unknown
  Bacterial polypeptide expressing nucleotide sequence isolated from the Sargasso Sea
atggttagacagagtaaaaggatattattgccagtacgtaatggattttgttgcggtgtggatgaagtaggccgaggtgccatagcgggtccagtggtttcagctgcggtaattttaccaaggggttattatcctgtgggtttggatgattctaaaaaactgtcaaaatctaaacgggaagacctttacgcatttatggaggaaaaggtacagtttggtatagggctagcgacttcaaaagaggtggatagagtgaatgtacatcatgcctctctcttggcaatgagaagggcattggtaaattaag

SEQ ID NO: 260163 - DNA, 433 bp, Unknown
  Bacterial polypeptide expressing nucleotide sequence isolated from the Sargasso Sea
tatggaagaaattgagatattcactgacggtgcttgtagaggaaatccaggtttaggtggctggggagccttgattagaaaagatggcaaggaaacttccctttggggcggagaaacagatacaactaacaatcggatggagatggaagcggcgataagaggactggaatcaatagttgaaagctcaaatattactataaccacggactctaattatcttaaagacggcatcacccaatggttagatggatggaaaaaaaaggactggaagacggcttcaaagaagccagttaagaataaagatttatggataaaactagatgaactgtcaaattttcataatgtgaaatggaaatgggtaaagggtcatagcggacatagagaaaatgatattgctgacttattggcaaataaaggaatagatgaattataa

SEQ ID NO: 260164 - DNA, 426 bp, Unknown
  Bacterial polypeptide expressing nucleotide sequence isolated from the Sargasso Sea
aaagagagtcgttatctgattatattaaaaaaaattctatttgggcaataggaaaagcatctacaaaagaaatagaaaaaacaaatatcttacaagcaagtttacttgcaatgaaaagagctataaaaaaacttaaaaaaaaaccatcgcatgttttaattgatggaaataaaattccagaattaaataattataagttaaaagctatagtcaaaggtgatcaaaaaattccttcaatttctgcagcttctatagttgctaaagtttcaagagataaattcataataactttatcagttaaaaataaaggttatcattgggatcaaaattttggctatggaacaaagcaacatttaaatgcgataaaaaaacttggagtcacaagacaccaccgaaaaaacttttctcctatatcaaaaatgtaaa

SEQ ID NO: 260165 - DNA, 580 bp, Unknown
  Bacterial polypeptide expressing nucleotide sequence isolated from the Sargasso Sea
atgaaaaaggcgattgctggtgtagatgaagttggtagaggcagtttaattggacccgtttatgctgctgcagttattttaaacaaaaatattaaaaaaaaagaaattaaagattctaaaaaaattagtaaagctaaaagagagatattagcaaaatatattaaaaaaaattctgtatgggctataggtgctgcctcattaaaagaaatagaaaaaataaatattttaaatgcaagcttgcttgctatgaaaagagcaattaaaaaacttaaaattaaaccaaaattagttctaattgatggaaataaatctcctaaaataaaaaactatttaattaaaactatagttaaaggtgatcaaaaaataaaagaaatatctgcagcatctataatagcaaaggtatctagagataaattaataaacaagatgtcaaaaaaatttaaaaaatacaaatgggatttaaatgttggttatggaacaaaagatcatattaaagcgattaagaagcatggcataaccaaatttcatcgaaaaacatttaaaccaatacacaagatattgagtctccaaaaaaactagt

SEQ ID NO: 260166 - DNA, 431 bp, Unknown
  Bacterial polypeptide expressing nucleotide sequence isolated from the Sargasso Sea
tgaaattttagaaaaatacattaaaaaaaattctttttggtctgttggatctgcttcaattattgaaatagaaaaattaaatattttaaatgctagtttattggctatgaaaagagctattaaaaaacttaaaaaaaaacctaaattagtattaatagacggtaataaaattccaaaattacaaaattataagatgaaaaatattattaaaggtgatcaaaaaatacctgaaatttctgctgcatcaataatagcaaaagtatctagagatcgtttgataaccaaaatgtcaaaaaaatataaaaattacaattgggacaaaaacgctgggtatggaacaaatgaacatttaaaatccatacgaaaatttggggtaacaaaacaccacagaaaaacatttaaaccagtacacaacatattgagtcgataaa

SEQ ID NO: 260167 - DNA, 574 bp, Unknown
  Bacterial polypeptide expressing nucleotide sequence isolated from the Sargasso Sea
aatggcaggtgtggatgaggtaggcagaggttgcttagccggaccagtttttgccgctgcagtaattttaaaaaaaaatattaatacaaaagatattagagattcaaaaaaactttcttttgataaaagaattttgctttctcaatacataaaaaaaaactctatatatgccttgggaattgctacagtagaagaaataaacaaaattaatattttaaatgcatctcttttatctatgaaaagagctgtgtctaatcttaaaatcaaacctaacattgcatacatagacggaccgtttgcacccgacttaaacatgaaatgtaaaacttttataaaaggcgatgaaaaaattaaatcaattgccgccgcttctataatcgctaaagtatcaagagatctttttatgataaaattatctagcaaatatccaaaatatttttggcacaaaaattttggctacggaacgaaagatcacttacacagtcttaaaaaacacggaattactaaacatcacaggaaaaaattcaaacctatacacaacatcttgttttataaaacacgtgaaacactatag

SEQ ID NO: 260168 - DNA, 220 bp, Unknown
  Bacterial polypeptide expressing nucleotide sequence isolated from the Sargasso Sea
tttaaaggtgacaaaaaaatcccttcaatttctgcagcatcaattattgctaaagttactcgagataaaatgatagctaatttaggtaaaaaaattaaaggttatcatttggatcaaaattatggatatggaacaaaacaacacttaaaagctataaaaaaattgggaattactcctcaacatagaaaaactttttcaccaattaacaaaatgaaatagg

SEQ ID NO: 260169 - DNA, 220 bp, Unknown
  Bacterial polypeptide expressing nucleotide sequence isolated from the Sargasso Sea
atgtcaaaaattatagaaatctatactgacggatcatgttcaggaaatcctggaccagggggttgggcagcaatagttttaatgaatgacgacaaatacattataagtgggtttgaaaagcaaactactaataataggatggaaatattagcttctataaattctctaaaaaaaataaaagaagattataggataaaattatacactgattctaattatt

SEQ ID NO: 260170 - DNA, 664 bp, Unknown
  Bacterial polypeptide expressing nucleotide sequence isolated from the Sargasso Sea
atgactacaaaatatggattaagtacatgctaccattccaatgatatatacgaaataggtgtagatgaagcaggaagaggaccgttgtttggtcccgtatatacagcagcggtggtattgcctaaagacaatagttttaatcatgagttaatgcgtgatagtaaaaaaataacctctaaaaagaaaataaaagaaatagctgattatatcaaagcaaacgccattgcatggagcattcaatttgaaaccgaacaaatgattgataaaatcaatattcgccagtgtgtgctctcgtccatgcataaagctattaaagattgtatccatcaagtaaacacccatgaagttcaacttctaatagacggtaacgactttaaaccctatacttatatagagaacgatcaaatagaatattgtccacacgttacgattaaaggtggggacaatttgtatacgagtattgccgcggcatcaattttggctaaaacggctagagatgaatttatagtagagttgtgtaatgaaaacgccgaactagagcaacattatggtatagcatcaaacaaaggttatggagcaaaaagacatatggatggtattcgtcttcatggaataacacagtggcatcgtaaaacgtatggaatttgtaaagaatatgtttaaa

SEQ ID NO: 260171 - DNA, 487 bp, Unknown
  Bacterial polypeptide expressing nucleotide sequence isolated from the Sargasso Sea
atgtcaaacagagtaaatatttatactgatggttcagcaattggtaatcctggtcctggcggatatggaattataatggagtgggtaaataaaaaatatataaaagaattttctgctggataccaaatgacaacaaataatcgaatggagctattagctgtaattattgctttggaatcactaaaaattcaacccatggatgtgatagttttttcggattcaaaatatgttattgagtcaatagataaaaaatgggtatttaattgggaaaaaaaccaatttagcggaaagaaaaatcaggacttatggcaaagatatttattaattcatcgcaaacatagggtaaaatttcaatgggttaaaggacataataaacatcctcaaaacgagcgatgtgatagattagcagtaaatgctgcaaaagaaaagaaaaagaaaattgatcattattttgagaacagtattaaaggtatttcaaagtcttaag

SEQ ID NO: 260172 - DNA, 473 bp, Unknown
  Bacterial polypeptide expressing nucleotide sequence isolated from the Sargasso Sea
aatgaaaaaagtagctggtgttgatgaagttggccgtggaagtttaattggcccagtttatgcggcagctgtaatattaaacaaaaatattaataaaaaagtattaaaagactcaaagattttaccaagaaatagaagagaaattttagcaacatatataaaaaaaaattctatatgggcagttggaaaagcatcagctaaagaaattgaaaaaataaatatccttaatgcaagtttattagcaatgaaaagagcaattaaaaatttaaaaataaaaccagaactagttttaattgatggaaataaattgcctgatatgaaaaattataatttaagatcggttattaagggagaccaaaagatagcctcaatatctgcagcatcaattattgctaaagttagccgtgataagatgataatcaaactaggaaaaaaatttaagggttataattggtgtcaaaattttggttatg

SEQ ID NO: 260173 - DNA, 562 bp, Unknown
  Bacterial polypeptide expressing nucleotide sequence isolated from the Sargasso Sea
atgaaaattattgcaggagttgatgaagttggtcgaggcagtttgattgggccagtttatgctgctgcagtcatactaaataaatcaattaataaaaaattattaaaagactcaaaaagtttaacaaaaaataaaagagaaattttatcaaagtatattaaaaaaaattctatctgggcaataggtaaggcatctgttaaagaaattgaaaaaattaatattcttcatgcaagtttattagctatgaaaagagctgtaaaaaaacttaaaaaaaaaccaacacttgttttaattgatggaaataaatcacctcaaataaaaaactataaacttaaattagtaataaaaggagatcaaaagataccttcaatttctgcggcttcaattattgctaaagttgcacgtgataaaatgataaccaaactcggaaaaaaatttaaagtttataattgggatcaaaattatgggtatggaactaaagaacatttaaaagcaataaaaaatttaggaattacagctcatcatagaaaaactttttcaccaataaataagataaaataag

SEQ ID NO: 260174 - DNA, 565 bp, Unknown
  Bacterial polypeptide expressing nucleotide sequence isolated from the Sargasso Sea
ttggttggtattgacgaggttggtattggttgtctagcaggtcctgtggtagctgccgcagtgatacttgatcctgcgaatcctataaccggaataacagattcaaaaaaaatttctgaacaaaagagaaagattcttgcggaccagattatggctaatgctgttgcctgggcgataggtcaagcaagtgtttccgagatagatcagcacaatattttgcgggccagtcatcttgcaatgcagcgggcctacggcgatttaaagtctgacgccactttggttttggttgatggcaataagtcaccttacttccctgtagagtcaaaagctgtcataaagggagatgagacggtgctcgcaattggagcggcttcgatcatagctaaggtctttcgagacggcttgatggaggagttgggaaagaaatatccggcttacgattttgaacggaacaaaggatatcctacgaagtcgcatatgcaaacgctcagggctattgggccttgcgcacagcatagaaacagttttgcaccagttaagaattggaacagaacgagttactaat

SEQ ID NO: 260175 - DNA, 679 bp, Unknown
  Bacterial polypeptide expressing nucleotide sequence isolated from the Sargasso Sea
agcctgtagtggtaatccaggccctgggggttggggcggtttaataatttttgacgataacagcgaattagaaataggtggttccgagcaaaatactacaaataatagaatggaactcactgcggctataaaaactcttgagaaattaaaaacctaccaattaaaagagaactttaaactaagaactgatagtaaatatgtcatagaaggttatacaaaatggattattaattggaagagaaatggatggaaaacaagttcaggaaaaccagttcaaaatcttgatctatggcaaaaaattgatcaattaagaattaatggcctagtaatggaatatgttaaaggtcatagcggggacaaacaaaatgatagggttgataaaattgcaactacttacagcaaaggtatttttatagaaagtaacttaaaaaaagcagaatcctctgttgatttttttgaaaaaattgcacctgcagaaattcaggaattattttcccgcaatgaattaattaaaaaatttgcagaaaaaaagtaccttttaagttcacctgaactaaacaccttattaggtgaagaataccacttaaagataaaacaatattcactttttgaatggcgtaattggagattgattcctaaagataaaaaatattggataatagaaaaaaaagaagcctaa

SEQ ID NO: 260176 - DNA, 343 bp, Unknown
  Bacterial polypeptide expressing nucleotide sequence isolated from the Sargasso Sea
tatgagtagtgatagtattgcgattgaagccgcaacagatggagcctgcagtggcaatccaggcccaggtggttggggcggtttaataatttttgacgataacagcgaattagaaataggtggttccgagcaaaatactactaataatagaatggaactcactgcggctataaaaactcttgagaaattaaaaacctacaaattaaaagataactttaaactaagaactgatagtaaatatgtcatagaaggttatacaaaatggattattaattggaagaaaaatggatggaaaaccagttcaggaaaaccagttcaaaatcttgatctatggcaaaaaatt

SEQ ID NO: 260177 - DNA, 619 bp, Unknown
  Bacterial polypeptide expressing nucleotide sequence isolated from the Sargasso Sea
catgggaagatttaaaaattataaaaaaaaaaatagaagaactgcagataaaaatataaaatttaatattcttgcaggagtggatgaggttgggagaggaagtctagttgggccagtttatgcagctgcggttattctaaataaatcgattaatttaaaaatactaaaagactcaaaaactttaacgaaagaaaaaagggaatatttgtttagttatattaaaaaaaattctatatgggcagtagggaaagcttcagttaaagaaatcgataaaattaatattctacaagcaagtttgcttgctatgaaaagagcaataaaaaaacttaaaagaaaacctacaaaagtcttaattgacggaaataaaattccaaatataaaaaattataatttaagagcaataatcaagggtgaccaaaagataccatcgatttccgcagcatccattattgctaaagtatcccgggatacatttatcaaaacattagcaaaaaaaaataaaggttataattgggaacagaattatggatatggaactaaacaacatttaaaagcaatcaaacaacttggtattaccaaacatcacagaagaacttttgctcctgtttctaaattttaa

SEQ ID NO: 260178 - DNA, 721 bp, Unknown
  Bacterial polypeptide expressing nucleotide sequence isolated from the Sargasso Sea
tatgaatattgatagtattgcaattgaagctgcaactgatggagcctgcagtggtaatccaggtccaggtggttggggtggactaataatttttgacgacaaaagtgaattagaaataggtggttccgagcaaaataccaccaataatagaatggaacttactgcggctataaaaacacttgagaaattaaaaacctataaattaaaagagaactttaaattaagaactgatagtaaatatgtcatagaaggttatacaaaatggataactaattggaagagaaatggatggaaaacaagctcaggaaaatcagttcaaaatattgatttatggcaaaaaattgatcaattaaggattaatggtcttgtaatggaatatgttaagggtcatagtggtgacaaacaaaatgatagagttgataaaatcgcaaccaactatagcaaaggtatatctttagaaagtaaatttaaggagtcagaatcttcagctgacttttttgaaaaaaatgcccctttagaaattcaggaattattttcaaggaatgaattaattcaaaaatttgccgacaaaaagtatttgttaagttcaccagaactaagcaccttattaggtgaagaaaaccacttaaagatcaaactatattcactttttgaatggcgtaattggagattgattcctaaagataaaaaatattggataatagaaaaaaaagaagcctaa

SEQ ID NO: 260179 - DNA, 721 bp, Unknown
  Bacterial polypeptide expressing nucleotide sequence isolated from the Sargasso Sea
tatgaatagcgatagcattgcaattgaagctgcaactgacggggcctgcagtggcaatccaggtccaggtggttggggtggtttaataatttttaacgacaaaagtgaattagaaataggtggttctgagcaaaataccactaataatagaatggaactaactgcagcaataaaaactcttgagaaattaaaaacctataaattaaaagagaattttaaattaagaactgatagtaaatatgtcatagaaggttatacaaaatggattattaattggaaaagaaatggatggaaaacaagctcaggaaaatcagttcaaaatcttgatttatggcagaaaattgatcaattaagaattaatggcctaataatggaatatgtgaagggtcatagtggtgataaacaaaatgatagggttgataaaattgcaactaattatagtcagggaatatctataataaaaaactcaaaagaatcagaaacttcagtcgacttttttgataaagatgcaccttctgagattcaggaattattttcaagaaatgaattaattcaaaaatttgcagacaaaaagtacttattaagttcattagaactaagtaatttattaggaaaagaaaaccacataaagatcaaacaatatttactgtttgaatggcgtaattggagattgattcctaaagataaaaaatattggataatagaaaaaaaagaatcttaa

SEQ ID NO: 260180 - DNA, 430 bp, Unknown
  Bacterial polypeptide expressing nucleotide sequence isolated from the Sargasso Sea
atgatcacaatttatacagatggagcatgctctggaaaccctggtgttggtgggtggggtgttgtgattattgaggataataaaaatgaaattttattgaatggcggagataaggatacaacaaataataaaatggagttaacggccgcaattcaagcattaaaaacttttgaacacaaaagcacaataaccctcataactgatagtaaatatgtaaaggatggtattcaatcttggatacaaaactggaaaaaaaatggatggaaaactgctgcaaaaaaaccagttaaaaataaagaattatggatagaacttgatgaattaatagcaagacataatataacttgggaatgggttaaaggtcatgctggaaacacacacaatgaaaaagcagattacttggctagacaatatattgaagaaatgtaaa

SEQ ID NO: 260181 - DNA, 433 bp, Unknown
  Bacterial polypeptide expressing nucleotide sequence isolated from the Sargasso Sea
atggaagaaattgagatattcactgacggtgcttgtagaggaaatccaggtttaggtggctggggagccttgattagaaaagatggcaaggaaacttccctttggggcggagaaacagatacaactaacaatcggatggagatggaagcggcgataagaggactggaatcaatagttgaaagctcaaatattactataaccacggactctaattatcttaaagacggcatcacccaatggttagatggatggaaaaaaaaggactggaagacggcttcaaagaagccagttaagaataaagatttatggataaaactagatgaactgtcaaattttcataatgtgaaatggaaatgggtaaagggtcatagcggacatagagaaaatgatattgctgacttattggcaaataaaggaatagatgaattataaa

SEQ ID NO: 260182 - DNA, 595 bp, Unknown
  Bacterial polypeptide expressing nucleotide sequence isolated from the Sargasso Sea
aatgaataatttttctaattcaaattttgaagctggtgttgatgaagctggaagaggaagcctggcaggcccattaactgctgctgctgttatcttaccaaaagactatgaaaacaatgctttgaatgattccaagagactttcagaaaaaaaacgttttcagttaaaaagtataattgaaaaagactcaattgactttgctgttttttttgttgacccatatgtaattgataaaataaatatccttaattcaacttataaagctatgcatggtgcattaaataatttaaaaactatccctagttttattgtagttgatggaaatagattcaaaaaatttaaaaatataaatcataagtgtataataaaaggggatgctaagtatcaaaatattgctgcagcatcaatacttgcaaaaacttatagggactcatatatgatagatcaacacaatagttttcctgtatttggttggaacaaaaataaaggctacggaacagaatttcatatcacaaatattattaaatatggtatgagcgaacttcatcgaaaaagttttgtaataaaaaaatctcagactagactagaattataa

SEQ ID NO: 260183 - DNA, 574 bp, Unknown
  Bacterial polypeptide expressing nucleotide sequence isolated from the Sargasso Sea
atgaaagttattatagctggagtagatgaggtaggtagaggaagtttaattgggccagtatacgctgcagcagttattttaaaaaaaaatttagataaaaaaaaactaaaagattctaagaaattaacaaaaaaaaatcgtgagatattagaaaaatatataaaaaaaaattcctattggtctataggatctgcatccataaaagaaatagaaaaatttaatattttaaatgcaagtttaatggctatggaaagagcaataaaaaaattaaacaaaaaaccctctcttacattaattgatggaaataaaattccaaaaataaaaaattataatatcaaatatgtgatcaaaggagatcaaaaaatacccgagatatctgctgcatcgataatcgctaaggtagctagagatagacttgttacaaaaatgtcaaaaaaatttactaaatatgcttgggataaaaatgctggatatggaactaaaatacatcttttggcaattaagaaatttggtgtaactaagcatcatcggaaaacgttcgcccctatacacaacatattgagtcccaattaaa

SEQ ID NO: 260184 - DNA, 433 bp, Unknown
  Bacterial polypeptide expressing nucleotide sequence isolated from the Sargasso Sea
tatgaaaacagtaaatatttatacagatggtgcatgtagaggcaatccaggagatggaggctggggcgtattaattgaatacgaaaatttttcaaaagaaatttttggtggtatgagggatacaaccaacaatcaaatggaacttcaagcagctattgagggattaagcatgctaaaggagccttgcgaggttgttataactaccgactcgaaatatgttatgaatggtattactttatggatagaaaaatggaaaaaaaataactggaaaagcgcatctaaaaaagatgtaaaaaataaagatctctggattaagcttgatcaattaacaataaaacataatgtaaaatggaattgggtcaaagggcattccggtcacgaaaaaaatgaaactgcagatgctcttgctaataaaggaatagacaatctataa

SEQ ID NO: 260185 - DNA, 577 bp, Unknown
  Bacterial polypeptide expressing nucleotide sequence isolated from the Sargasso Sea
atgattattgcaggtgtagatgaggtaggcagagggtgtttagctggtccagttttagctgcagcagtaattctaaatgattctatcgactcactaaatgattcaaaaaaattatctaaaaagaaaagagagattttgtatgatgagattttagaaaaagctacttcagttgcagttggagttaaatggaatgattatattgatgagtataatattaaaattgcatccgaggacgctatgaaagatgcaataaactcattaaatgtgacaccagataaagttttggttgatggattttcgttagatattcaaattcaaaatgagggtattataaaaggcgatcaaaaatatcagcaaattatggctgcttcaattatagcaaaagtaacaagagatgaaataatgcgatcatttcattatatttatccacaatatgattttatatcaaatagcggatatggaacaaaaaaacacttggaagcattagaacaatactcatacacaccaatacatagactaacctttaagccaatatcaactaatattaaaaaatgcaaaacttcattaaagaaataaa

SEQ ID NO: 260186 - DNA, 721 bp, Unknown
  Bacterial polypeptide expressing nucleotide sequence isolated from the Sargasso Sea
atgaatagtgatagtattgcaattgaagctgcaactgatggagcctgtagtggtaatccaggtccaggtggttggggtggtctaataatttttgatgacaaaagcgaattagaaataggtggttccgagcaaaataccactaataatagaatggaactcactgcggctataaaaactcttgagaaattaaaaacctataaattaaaagaaaactttaaattaagaacagatagtaaatatgtcatagaagggtatacaaaatggattattaattggaagagaaatggatggaaaacaagctcaggaaaatccgttcagaatcttgatttatggcaaaaaattgatcaattaagaattaatggccttctaatggaatatgttaagggtcatagcggtgacaaacaaaatgatagggttgataaaatagcgaccaactatagcaaagggatatctttagtaaataacttaaaagagtcagaatcttcatttgacttttttgaaaaaaatgcacccccagaaattcaggaattattttcaagaaatgaattaattcaaaaatttgcagacaaaaagtacttgttaagttcattagaactgagtaacttattgggcgaagaaaaccacttaaagataaaacaatatttactttttgaatggcgtaattggagattgattcccaaagataaaaaatattggataatagaaaaaaacgaatcctaat

SEQ ID NO: 260187 - DNA, 538 bp, Unknown
  Bacterial polypeptide expressing nucleotide sequence isolated from the Sargasso Sea
atgattgctggtgttgatgaggttggtaggggctgtattgctggaccagtagtagctgcgtctgtaatgcttaagaggccaatcaaaggccttatggactcaaagaaactttcttcaaaaaaaagggagcatctaagtcaggtaataatagaaaattccatatttgctataggagctgcagacaataaagagattgatcaaattaatatcttacaagcttccttgttagcaatgcagagatctttagaaaagctagatgtaaaaccaaaaaaagtattagttgatggcgctcatatttttaaaactccaattgaaatagagtctattgtgggaggagataatttgataccatcaatcagtgcagcttctatagtagcaaaggtatatagagataggttaatgatgacgtatagtaaagaatttccaaattatgggtttgataaacacaaaggatatccaacaaaacttcataaagaaatgcttaaaagatatggattaacaagaattcatagaagaacttttaaaggtgtaaattaat

SEQ ID NO: 260188 - DNA, 433 bp, Unknown
  Bacterial polypeptide expressing nucleotide sequence isolated from the Sargasso Sea
catgaaaaaagaaattactatttttacagatggtgcatgctctggaaaccctggaaaaggtggatggggagctgttttactttatcaggataatgaaaaacatttatctggatcagaaaaattaactacaaataatagaatggaacttaaggcaacaattgaggctttaaaagcaataaaacacccaagtaaaataaaattatatacagattcacaatatgttaaaaatggaataacagaatggattattaattggaaaaaaaatggatggaaaactgctaataaaaaaaaggtctccaataaagaactttggattgaactagatgaaaatgtgaatcttcataatgtagaatggttttgggttaaaggacattctggaaaccattacaatgaaattgcagataaattggctgtaaatgcaatgaatgagtaa

SEQ ID NO: 260189 - DNA, 430 bp, Unknown
  Bacterial polypeptide expressing nucleotide sequence isolated from the Sargasso Sea
atgaagtataaaatttatactgatggagcatgttctggaaatccaggtcctggggggtgggcagctgtaatattgttaaatgatcaagttgaagaaatgatttcaggtagcgaaaaaaacactactaataataaaatggaacttcttgctccaataaaagcaattctaaaattaaaaaaaaaatctgaagttttaatttttaccgattcaacttacgtcaaagatggaataacaatttggattaaaaaatgggaaacaaatggttggaaaacttcttcaaaaaaaccagttaagaataaggatttgtggaaaaaattaaaaagtttatcaactaaacattcgattaagtggatttggataaaaggccatgcacaagataaatataataatttagctgaccaccttgctcaaagggcaattaagaattaaa

SEQ ID NO: 260190 - DNA, 688 bp, Unknown
  Bacterial polypeptide expressing nucleotide sequence isolated from the Sargasso Sea
tatgaaaaatgccttagaaaatttatccgttaggcctaatcaggtgctcatagatggtttagataaacctgagattgatatagagactaagtgtatagtcaaaggcgattcaaaaatcgagagcataatggcagcttcgataatagcaaaagtaacaagagatcaaatgatgatcaattattcaaaaatattttatgaatatggctttgagaaaaataaaggctatggtacaaagcaacatatgatggccttaaataattttatgtctacgtcaattcacagaagaagcttccaaccagttaataaatatttaccaacattaaagtggttgaaagacaataacagattaagatggatggctcaaaagatgactgcgctatatttaatggatttagagtatgaaataatatctttaaattatattttaaatcagaaattaattttcgatgttatatgtaatcaatcgcagaaaattaattttatatgtattaaactaaaaaatgacagtatttacaacaaaaagttagaatcaatactaaaaactgaaattaaaaattatattatcaattactttaaaaaagagcatataatcaaaagtcaattatggcaaatcgatataatggaggttgatttgtataataaaaaatccaaatttgaacattttcaaggaattctaaattccatttag

SEQ ID NO: 260191 - DNA, 502 bp, Unknown
  Bacterial polypeptide expressing nucleotide sequence isolated from the Sargasso Sea
attgagagaattaatcacagcaggagttgatgaagttggcagaggatgtcttgctggtcccgtagtttctgcagctgtaatactaaaaaaaggtataaatttaaaccttctaaaggattcaaagaagataacatttaacaagagagaggaaatttcagaacatattaaaaataactcttgttatgctattggaatcgcttcagtaaaggaaattttaaatttaaacattttgcaagcttcattgctctctatgaaaagagcaattgaaaaacttcctgtaagaccaggtatgaccttaatagatggaaactttgctccaaagggtttaaaaaattacaaaacaatagttaacggggatgagaaaattaaagtcataagcgccgcttctatagttgcaaaagtttatagagatagatttatgataaaattatcaaagaaattttctaactatgcttgggaaagaaattttggatacggcactaaagctcacttaagtggttaa

SEQ ID NO: 260192 - DNA, 571 bp, Unknown
  Bacterial polypeptide expressing nucleotide sequence isolated from the Sargasso Sea
atggtaaataaaatattcgcaggcgttgatgaggttggaagaggttgtttagcagggcctgttgtttcttgtgtggtgattttaaagaagaatattaaaaaaaaattattaagagattcaaagataattccttttaaagatcgtttatatattgcagatcacattaaaaaaaattcttggttttctataggtactgcgtctgtaagtgaaatagataaatataatatatttaatgcttcactgctttcaatggaaagagcaattaaaaaattgaaaaaaaaacctgatctttatttaatagatggcacgcatggtccaaaaaaaataaagaattttaaaacagtgattaaaggtgaccagaaaattaaatgtatttctgcggcatcaatagtagcaaaagtttttagggatctttatatgatcaaattgggaaataaatttccccaatataattggcaaaaaaattttgggtacggaaccttgcagcatttaaatgcattaaaaaaatttggaatttctaattaccatcgaaaaagttataggcctgtacacaatatcttgtcaaaataag

SEQ ID NO: 260193 - DNA, 457 bp, Unknown
  Bacterial polypeptide expressing nucleotide sequence isolated from the Sargasso Sea
catggttaagataatcgtatatacggatggagcttgttccggaaaccctggccgaggtggctggggagcaatattaacagcatctgaagacggaattactgtttcagaaaaagaaatttttggaggtgaggcgaacaccaccaacaatagaatggaattaactgcagcaataaaagctctagaggcgcttaagaaaaaaaccaccctcaccgttgtaactgatagtaaatacctaagagacggaatgacaatgtggcttgacaactggattaaaaataattggaaatcatcgcaaaacaaagaaataaaaaataaagacctatggcaaaaaatttatactctgtctcaaagacacaagatcagttggcactgggtaaagggtcacaacgaccatccggaaaacgaaagagcggataatctggccaggaagggaattcaaaatacccaagacaattga

SEQ ID NO: 260194 - DNA, 580 bp, Unknown
  Bacterial polypeptide expressing nucleotide sequence isolated from the Sargasso Sea
atgaaaaaaattattgctggtgttgacgaagttggtagaggtagtttgattggtccggtttatgcggcggcagttatatttaatcctaaaataaataaaaaagaaattaaagactccaaaaaattgaaaaaaattgagagagaaaaattatctaagtatataaaaaaaaattctatttgggctattggatcagcgtcaattagagaaatagaaacacttaatatattaaatgcaagtctattagctatgaagagagcaataaaaaaactaaaagttaaaccaaatttagtacttgttgatggaaataaatcgccagatttgaataattacattacaaaaacaataatcaaaggagatcaaaaaataaaagagatatctgcggcatcaattgttgcaaaagtatcgagggataaactgatactcaaaatgtcagaaagtttcaaaaaatacaaatgggatgtaaatgcaggttatggaaccaaagatcatattaacgctataagaaaatatgggataactaggtttcatcgcaaaacattcaatccagtacacaacatattgagtcttaaaagaaaataac

SEQ ID NO: 260195 - DNA, 331 bp, Unknown
  Bacterial polypeptide expressing nucleotide sequence isolated from the Sargasso Sea
atgaaattaaaaatttatactgatggtgcttgctctggaaatcctgggaaaggaggttgggcagcaatcatattagatgactctaatcaattaagtatttctggaggtgaaagtaatacaactaataataggatggaattaatggctacaattatggcattaaaaaaaataagaaagaaatcagagattacaatttttactgactcgaaatatgtgaaagatggaataactgattggattaaaaagtggaaagttaataattggaaaagttcaaacaagaaacctgttaaaaataaagatctttggattaaattggataatgtttgctaaa

SEQ ID NO: 260196 - DNA, 427 bp, Unknown
  Bacterial polypeptide expressing nucleotide sequence isolated from the Sargasso Sea
aatgaaattaaaaatttatactgatggtgcttgctcaggtaatcctggaaaaggaggttgggcagccatcatattagataacaattctaatcaatcaagtatctctggaagtgaaaataatacaactaacaataggatggaattattagctccaattatggcattaaaaaaaataaaaaaaaaatcagatattacaatttttacagattcaaaatacgtaaaggatggaataactgattggattaaaaactggaaaattaataattggaaaaattcaaacaagaaaccagttaaaaataaagatctttggattaaattagataatgcttgtctaaaacataaagttaattggaaatgggttaaggctcacgcaggcaacaaatataataatcttgttgatgaattagcagtttcaaacactaaatag

SEQ ID NO: 260197 - DNA, 463 bp, Unknown
  Bacterial polypeptide expressing nucleotide sequence isolated from the Sargasso Sea
tatggaaaatagtgaaaaaataaagatgtatacagatggtgcctgtaagggtaacccaggtattggaggatggggtgtattaattcaagattctaaaactgaaactgagcttaatggattttctcctagcacgaccaataataaaatggaattaaacgctgtaataatgggtcttaaatcacttaattcaagaagaatcgtgactgtaattacggactcacagtatgtgaaaaatggaatcagtcaatggataattaattggaaaaggaatggatggaggacagcatctaaaaaaccagtgaaaaacaaagaattatggcaaatactagatagtttagtccaaaaacatgatgtccattgggaatgggtaagggggcactcaggtcatcccggaaacgaaagagccgatcaattagcaaataaaggaatcgaagagcatcttcaaaatattaccctacgataa

SEQ ID NO: 260198 - DNA, 318 bp, Unknown
  Bacterial polypeptide expressing nucleotide sequence isolated from the Sargasso Sea
tgaaaagagcaataaaaaaactcaagaaaaaaccatcacacgttttaattgatggaaataaattgcctaatatgaaaaattacaaacttaaatctattattaagggtgaccaaaaaattccatctatttcagcggcatcaattattgcaaaagttacacgtgataagatgatttcagatttaggtaaaaagtttaaaggctataattggcaaaaaaattttggatacggtactagtcaacatttaaaggctataaaaatcttaggaattacaaagcatcacagaaaaactttttctcctataaacaaattgaaatagt

SEQ ID NO: 260199 - DNA, 589 bp, Unknown
  Bacterial polypeptide expressing nucleotide sequence isolated from the Sargasso Sea
atgattgaagataaaatatggtcagaagatccaaatagattcatcataggtgcagatgaagtaggtagaggctctttcgcaggcccgatatgtgctgcagcagtaaaaattaattattcacatttagaatatctctcaagtgtaaaggactcaaaaaaactcagtgcaaaaaaaagagaagcaatatttgcaatggtccaaaaaaacagtatagagtattcatttaaggaatcatcaaatatttttattgatcaatttggaattaaaaatgctaatgaaaaagtattaactgattcaatttctgatatctacacaggcagagaagcagtatatgtagatcattttaaaataaacgattttaaatcaatctctgtggttcgtggagaagataattgtagggcaatagcattggcaagtattattgcaaaagtatttagagacaatttaatgatcaaatacgcagaaaaatatcctgaatatttatttgaaaaaaataaaggttatgggacaaaagatcatagaaaggctatttcaaaatatggtttatctaatattcacagaaagtcttttaacttaaagcccatataac

SEQ ID NO: 260200 - DNA, 490 bp, Unknown
  Bacterial polypeptide expressing nucleotide sequence isolated from the Sargasso Sea
tatgattaaattaaatatttcaaaagaagaaattgatatttttactgacgggtcatgttctggaaatcctggccctggtggttgggcaggcgttattattcatgatttaatttcaatattaacaggacatgagactgatactactaataatagaatggaactaatggcaacaatcaatattattaaattaattgaccctagaataaatattaacttatatacagattccaattatgtaaaaaatggaattacagtctggattcataattggataaaaaataactggaaaaattcacaaaaaaaagaagttgctaataaagatttgtggctgcagctttatgatttgaataacaagtacagaattaattggaactgggtaaaagctcatgaaaataataaatataacaatctagctgatgaatacgcagtcttgtcaatgaaaaatcaaaaaagttataatatagaaaattatactactacaaatgtttga

SEQ ID NO: 260201 - DNA, 574 bp, Unknown
  Bacterial polypeptide expressing nucleotide sequence isolated from the Sargasso Sea
aatgaaaataatcgcaggtgtagacgaagttggcagaggcagtttaattggaccagtttatgcggcagctgttattttaaatagatcagttaattataagatactcaaagactctaagacactaactaaggaaaaaagggaaattttatttaattacatcaaaaaaaattctatttgggctactggtaaagcatctgttaaagaaatagataaaataaatattcttcaagcaagcttgcttgccatgaaaagagcaataaaaaaactcaaaaaaaaaccttcgcaaattttaattgatggaaataaaataccagatttaaaaaattacaatttaagggcaatagtaaaaggtgaccaaaaaataccctccatttcagcagcatccattatcgctaaagtaacaagagataattttataaaaactttagcaaagaagaacaaaggatatcattgggatcaaaattttggttatggaactaaccagcatttaaaggcaataaaaaagcttggtgttaacaaacatcatagaaaaacgttctcaccaatatcaaaacttaagaaacacaatatctag

SEQ ID NO: 260202 - DNA, 598 bp, Unknown
  Bacterial polypeptide expressing nucleotide sequence isolated from the Sargasso Sea
ttgaaagttaatattattataaaaaaaaaaataatttcaggagttgatgaagcaggcaggggatcatgggctggtccagtagtatctgcagctgtaattttaaaaaattacccaaatgctaaagaattgaaagattcaaaaattattaataaaaaagatagaaatgaaattttcgataaattaaaaaataattctattataggagtaggtttttcctctgttaaagaaatagagaaatttaatattttacaggccacatttctttctatgaagagggcaataaattccctaactttaactcctgatttgttacttattgatggaaatagggttccaccaaaactgacaatagaagcttatccaataattaaaggggacaagtttatctcagagatatccgcagcctcgatagtggccaaggtaataagagatactcatatgaaaatattagataaaaaatatcctggttatggtttcacaaataatgcaggatatggtgttaaactacatttagatgctcttaaaactcttggagtcactcccatacatagacaaacatttaaaccaatacacaacatattgtatgaagaaaattaaa

SEQ ID NO: 260203 - DNA, 559 bp, Unknown
  Bacterial polypeptide expressing nucleotide sequence isolated from the Sargasso Sea
atgatccttggattagacgaagttggaagaggatccatcgctggtccggttgtgtctgcagcggttattttaggagaaaataaaatctttgggctcaaggactctaaagatctttcagaaaaaaaacgcatagaatattctaatcaaattaaggaactatctcttgaatggtctattggattatcttctgtagaggaaatagataaatataatatccgggaagctacaaagctttcaatgatcagggccataagcagattaaaaaaacctttttcaaaaataattattgatggaaacgataatttctttaatgataaatctgtagaatttataattaaagcagacactaaaattagggaagtaatggccgcttctataattgcaaaagtctatagagatgaatacatgagagaactagaaaataaatttaaaggctatttttttgacaaacataaaggttactcaaccaaacttcataagagtatgattaagaaatatggagtcacaaatattcatagaaaatctttcaagccaattaagcaatttctaaatgaataaa

SEQ ID NO: 260204 - DNA, 583 bp, Unknown
  Bacterial polypeptide expressing nucleotide sequence isolated from the Sargasso Sea
aatgaaaaaagttattgctggggttgatgaggttggtagaggaagtttggtaggaccagtttttgcagctacagtaatatttaaaaaaaatgtggataaaaaaaaaattaaggactcaaaaaaactttcaaaaaataagagaaacttattagaaaaatatattaaaaaaaatagtatttggacgattggttcagcttcattaaaagaaattgagaaattaaatatattgaatgcaagcttactagctatgcaaaggtcaataaaaaaacttaaatctaaaccatctttaatcatgattgatggcaataaattaccaataatgaatggttataaattaaagtctatagttaagggtgaccaaaaagtacctgaaatttcagcagcatccattattgctaaagtttctagagatagacttatctcaaaaatgtcaaaaaagttcgtaaaatatggctggaataaaaattcaggctacggcacaaaacagcatttgaaagcgattaaaaaatttggtgtaacaaagcatcacagaaaaacgtttgttcctatacacaatatattgagtctcaaaaaaattttgtaa

SEQ ID NO: 260205 - DNA, 436 bp, Unknown
  Bacterial polypeptide expressing nucleotide sequence isolated from the Sargasso Sea
tatgtctattaaagtatatacagatggtgcttgtaaaggtaacccaggaccaggaggatggggggctttgatcatagatggagattcaagaaaagaactttattctggaaacccagacacaacaaataatcaaatggaaatgcaagcggcaattgaggcattaaaacatttaaaaggaacctcagagcttatagagctttatacggactcgaattatttaagaaaaggtattaccgaatggattgtaaaatggaaatcaaataattggagaacagcatctaaaaaaccagtagccaatagagatctatggatggaagtagatgaactatcaaatactctaaatgttgagtggcattggataaaaggacatgatggtgatccaggcaatgaaagagccgattatttagctaatctaggagcagatagtgtcagttag

SEQ ID NO: 260206 - DNA, 436 bp, Unknown
  Bacterial polypeptide expressing nucleotide sequence isolated from the Sargasso Sea
atgaataatgtgattgctggggtagatgaagtaggaagaggaagtttagtaggaccagtttttgcagcaacagtaatattcaaaaaagatgtagataaaaaaaagttcaaagattctaaactgctttcaaaagtgaaaagagagaatcttgaaaaatatattaaaaataactgcatatggactattggctcagcttctttgcaagaaatcgaaaaattaaatattttaaatgcaagtatgctggctatgaaaagatctataaaaaaacttaaaattaaaccttcgctaatactaattgatggaaataaatcaccacatttaattggttataatttaaaatgtatagttaaaggtgataaaaaaatacctgaaatatcagctgcttctattattgccaaggttgcgagggatagacttattactaaaatgtcaaaaa

SEQ ID NO: 260207 - DNA, 619 bp, Unknown
  Bacterial polypeptide expressing nucleotide sequence isolated from the Sargasso Sea
atgcaagaaaaaaaagaagaagatcttcagcaagcattgaataaagttttcgaagttggaatagatgaagttggaaggggagcaatttttggtccggtttttgcagcagctgtagtattaaatgaaaaaaatatatctatcttaaaacaatttggagtgacagatagtaaaaaactaactcccaaaagaagaaaattacttttaccaaaaattttattactctcttcagattatggaattgggcaatcttcggccaaagaaatagataagttaggtatcagggttgcgacagaactttcaatgataagggctttaaaaaaattaaaagaaaagccatctgaattaataattgatggtcccttattattaaggccatgggacggaatgcagaaaaacatagtatcaggagactcaaagtttatctcgatagcttcagcaagcatagttgccaaagtttatcgcgacgatctaatggagaggttagaaaaaaaatactcaggatacatgatatttaaaaataaaggttatggaaccagagagcatctttcattaatcaaaaaaaatggaataaatgaacttcataggaaaagttttttaaagaaatcaaatcttatttaat

SEQ ID NO: 260208 - DNA, 478 bp, Unknown
  Bacterial polypeptide expressing nucleotide sequence isolated from the Sargasso Sea
atgacaaaaaaaattaacatatatacagatggatcatcaattggtaatcctggacctggcgggtatggtataattatgatttcagataatggggaatacaaaaaagaatttagtaaagggtttaaattaactacaaataatagaatggaacttctagcagttatcgttgcacttgaaagtataaaaattaaaaactgtaatgctgaagtatttactgattcaaaatacgtatcagatgctgttgataaaaaatgggtttttgaatgggaaaaaataaattttaagaagaaaaagaatcctgatttgtggaaaagattcttgatgatatatagaaaacataatgtaacttttacatggattaaaggacataacaatcaccctgagaatgaaagatgtgattatatggctaataattcagcaaaaagctctaatcttattagtgatacatattatgaaaaaaatataaaagggttataat

SEQ ID NO: 260209 - DNA, 538 bp, Unknown
  Bacterial polypeptide expressing nucleotide sequence isolated from the Sargasso Sea
aatgattgctggtgttgatgaagttggaagaggctgtcttgctggacctgtaatagctgcatctgtaattctaaagaggccaataaaaggtctcatggactcaaaaaaactttcctcaaaacaaagggagaatttgagtcaggaaataatagaaaattccatatttgcaataggatctgcagataatcacgagattgataaaattaatatcttacaagcttctttgtcagcgatgcaaaggtcattagaaaagcttgaagtgaaaccaaaaaaaattttagttgatggtgctcatatttttgaaacttcaattgaaatagagtctattgtgggaggagataatttgataccatcaattagtgcagcttccatagtagcaaaggtatatagagataaattaatgatggcatatagtgaagaatttcctgaatacggattccacaaacacaaaggatatccaacaaaatttcacaaagaaatgcttaaaagatatggtttaacaagaatccatagaaaaacttttaaaggcgtggattga

SEQ ID NO: 260210 - DNA, 433 bp, Unknown
  Bacterial polypeptide expressing nucleotide sequence isolated from the Sargasso Sea
tatgaaaacagtaaatatttataccgatggcgcatgtagaggaaatccaggtgacggaggttggggagtgctgattgaatatgaaaatgtttcaaaagaatattttggaggagagttaaatacaactaataataagatggaattaaaagctgctattgaaggattaaaagccttaaaagaaccatgtatagttaatttaactacagattcaaaatatgtaatgcaaggtattactgcttggattgataattggaaaaaaaataattggaaaaatgcatcaaaaaaagatgtcaaaaataaagacttatgggttgagctcgataaatatgttgcaaagcataatgtaagatggaattgggttaagggacattcagggcatgagaaaaatgagatcgctgatgctttggcaaataaaggaatagataatatttaa

SEQ ID NO: 260211 - DNA, 466 bp, Unknown
  Bacterial polypeptide expressing nucleotide sequence isolated from the Sargasso Sea
aatgaaaaaatcaataagaatatatacagatggttcttcaattggtaatcctggacctggaggttatggaatagttatgttagttgagggtgaaaattataaaaaagaatttagtcagggctttaggttaacaactaacaatagaatggagcttttagctgtaataactgcccttgaaaaaattaagattaaaaattctaatgttaatatatttacagactcaaaatatgtatcagatgcagttgaaaaaggttgggtatttgaatgggagaaaaaaaattttaagaataaaaaaaactctgatttatgggtacgttttttaaatatctttaatgaacataaaattaaatttcattgggttaaaggacatagtaataacctttataatgatagatgcgatcttttagcaaataacgctgctagaggctcaagccttattgaagattcaggttacataaacaaaaat

SEQ ID NO: 260212 - DNA, 721 bp, Unknown
  Bacterial polypeptide expressing nucleotide sequence isolated from the Sargasso Sea
atgaatattgatagtattgcaattgaagctgcaacagatggagcctgcagtggtaatccaggtccaggaggttggggtggtctaataatttttgatgacaaaagtgaattagaaattggtggttccgagcaaaatactactaataatagaatggaactcactgcggctataaaaacacttgagaaattaaaaacctataaattaaaagaaaactttaaattaagaactgatagtaaatatgtaatagaagggtatacaaaatggattattaattggaagagaaatggatggaaaacaagctcaggaaaatcagttcaaaatcttgatttatggcaaaaaattgatcaattaagaattaatggtcttgtaatggaatatgttaaaggccatagcggtgacaaacaaaatgatcgggtagacaaaatagcaaccaattatagcaaaggtatatctctaaaaagtaacttaaaagagtctgaatcttcagaagaattttttgaaaaaaatgcaccttcagaaactcaggaattattttcaagaaatgaattaattcaaaaatttgctgacaaaaagtacttattaaattcattagaactaagcaatttgttaggtgaagaaaaccacataaatataaaacaatatttactttttgaatggcgtaattggagattgattcctaaagataaaaaatattggataatagaaaaaaaagaatcctaat

SEQ ID NO: 260213 - DNA, 427 bp, Unknown
  Bacterial polypeptide expressing nucleotide sequence isolated from the Sargasso Sea
tatgataacaatttacactgatggagcttgttctggtaatccaggtattggaggatggggagcagtcataattaaagaaaaaaaaattacccatctttctggcggtcttgatgaaacaacaaataatcagatggaattaacagctgcaatcaaagctctagaatattttaaagagcctgaaaagattgcgatacatacagatagtaaatatgtaatgaatggtattgaaagttggatcaataattggaaaaaaaatggatggaaaacagcatctaaaaaacctgttaaaaataaagagttatggatggctttagacactgttatatcaaaacatgagatagaatggcattgggtaaaaggacattctggagatgaaaataatgaaatagccgatcaattagctcgaaaatatattgaaaaatattaa

SEQ ID NO: 260214 - DNA, 592 bp, Unknown
  Bacterial polypeptide expressing nucleotide sequence isolated from the Sargasso Sea
aatgattgaaaataaagtttggagtaacaatcctaatcaatttgtaataggagctgatgaagtaggtagaggttcctttgctggaccaatagtaggagcagcagtaaaaataaataaatcccatgaagatttattagtagaagtaaaagattcaaaaaagcttagcgaaaaaaaaagaaatcaaatatatgagttaatttctaataataatgttgcttactcgatatctgaatgttcgaataatatcattgacgaagttgggatatcagaagcaaacaaaatagtgttagaaaattctatcgaagaaatatatacgggtaaagaaaaagtgtatgtagatcactttaaaataaataaattttcttcagtttcattagttaggggtgaagacaacagtaaagctatagctcttgcaagtattattgcaaaagtatatagagacaatttaatgaaaaaactatccaaaaaatacccccaatatttgtttgaaaataataaaggttacggaactcaagcacatagagaaagtattgagaaatatggtttaacagaaattcatcgtaggtcttttaatttagagcccaataaatag

SEQ ID NO: 260215 - DNA, 553 bp, Unknown
  Bacterial polypeptide expressing nucleotide sequence isolated from the Sargasso Sea
ttgaagaatattatcgctggagttgatgaagttggtagaggagctattgcaggaccagttattgcagcggctgtaattttaaaaaaagacattgaaggcttaaaggattcaaaaaaaatttctgaaaaaaaaagaattgaactctcaaataagattaaaaaatattcatattttgctataggttcagcatctcacaatgaaatagataaatttaatattcttaatgcttctttattggcgatgaaaagagctatacttaacttgccaataaagccaacaaaaattcttgtcgatggtattcataaacctgatttagacatagaaatggaggttattattggaggcgattcgctgattaaacaaataagtgcagcatcaataatcgcaaaagtatatagagataacttaatgtacaaatttgataaaaaattctcagtctatggttttaaaaataacaaaggttatggaactaaacagcattatagtgcgctcgagattaatggacattcgactattcatagaagaacatttaaaggggtcttgaaaagatgag

SEQ ID NO: 260216 - DNA, 478 bp, Unknown
  Bacterial polypeptide expressing nucleotide sequence isolated from the Sargasso Sea
gatgagtctagtatcaattttttctgatggttcttcgctaggcaatcctggccctggtggttatggagtaataatgagatggaagaatgaggaaataaaaatttctcaaggttatcgtgagactactaataaccgaatggagcttttaggacctattgaagctttatcaaaactaaaaaaaccagaagaagttgttattactacagattctcgatatgtaattgatgggattgaaaaaggttgggccaagaaatggaaaaaaaataactggatgagagataaaaaaaataaagcactcaatgcagatttatgggatcgtttgcttgatctatgtgaatttcaccaaaaaattgaatttgtttgggttaagggacataaaggtcatgcagaaaatgaactatgtgatttactagcaaaggatgctgcttcttctgatagtttacttattgatgaaaattttgaaaaaaaggaaaattag

SEQ ID NO: 260217 - DNA, 433 bp, Unknown
  Bacterial polypeptide expressing nucleotide sequence isolated from the Sargasso Sea
tatggataaaatagaaatttttactgacggtgcttgcaggggcaatcccggagatggcggatggggtgctctaattgtagtaaattccaacgaaagctttatctatgggggcgagaggaatacgacaaataataaaatggagttaatggctgcaataaaagcattggatcactttgataaaccatcaaccgttactttaactactgattctgaatacgttagaaaagggattactgaatggattgaaaactggaaagttagaggatggaaaacagcttctaaaaaacctgtaaaaaatagagaattatgggaactcctagataatttagataagaagcataatgttaattggaaatgggtaaagggacacagtgggcatagagaaaatgaaatagcagatcaattggctaataaagggattgatgaactttaa

SEQ ID NO: 260218 - DNA, 377 bp, Unknown
  Bacterial polypeptide expressing nucleotide sequence isolated from the Sargasso Sea
tggctggggagccttgattagaaaggatggcaaggaaacttccctttggggcggagaaacagatacaactaacaatcggatggagatggaagcggcgataagaggactggaatcaatagttgaaagctcaaatatcattataaccacggactctaattatcttaaagacggtatcacccaatggttagatggatggaaaaaaaaggactggaagacggcttcaaagaagccagttaagaataaagatttatggataaaactagatgaactgtcaaattttcataatgtgaaatggaaatgggtaaagggtcatagcggacatagagaaaatgatattgctgacttattggcaaataaaggaatagatgaattataaa

SEQ ID NO: 260219 - DNA, 283 bp, Unknown
  Bacterial polypeptide expressing nucleotide sequence isolated from the Sargasso Sea
tgttctagtggatggaaatcgtcttccaagtctaatttttaacgacatcatcattgaaggtgatgccatagtgaaaggggatgaaaaggtccctcaaataagtgcagcctcgattttagcaaaagtttatagagataaaatgatggaaaattttgataagatttacgacggttaccttttttctgagcataaaggttatggtaccaagaaacatatagacattatttcgtcattaggaccatccccgcaacatagactaacatttaaaccattctcttcataa

SEQ ID NO: 260220 - DNA, 595 bp, Unknown
  Bacterial polypeptide expressing nucleotide sequence isolated from the Sargasso Sea
atgagtgaatatgttgttggagtcgacgaggttggcagaggatctcttgttggaagtgcaataatttgtgcttttagatcacaaaattccttatttgataaacttccttttagtgtctctgactcaaaaaaaataaataaaaaaaagagagaggaaatttatgaatatttcagattaaacaaaggtttcgactataattatcaaattatttttggaaaaaaaaaatttattgaaaggtttaatattcacaatgtagttttgcaaagtatgaaacaatcgataattttgttgtctaaaaaatcagatacgatcatcatagacggaaaatttattccaagcgaaatgaaaggttataaggtgaagtctttaattaaagcagatgataaaataaatcaggtgtcagcagcttcaattatagcaaaagtcttcagagacaagttacttctgaaactccactcattagatggtaattatcaatggaataaaaatgctgggtacggtacaaagtctcacttaagcgctatcaatacacacggggtcagcaaatatcacaggaacactaatcaacctataagtaaactaatcaaaaagtgat

SEQ ID NO: 260221 - DNA, 436 bp, Unknown
  Bacterial polypeptide expressing nucleotide sequence isolated from the Sargasso Sea
ttggataaagttacattcataactgatggtgcttgcagtggaaacccagggcccggaggatggtgtgtaattattaaaaaaggtgataaagtaaatgaattttttggtggtgatttagagacaacgaataataaaatggaattaacagctgtaattaagggttttgaaaacttaaataatatctctgaagttttagtaaagactgacagtacatacgttattaatggaatcactaaatggctaccaaattggaaagcaaaaggatggataaattcagccaaaaaacccgttgctaataaagagctttgggagcaacttgagtctcttataagcaagcacaaagttgattggttatgggttaaaggtcactcaggtgattatgagaatgaaagagctgatgaattggctcgtaaaggtttaaccgacaatttataag

SEQ ID NO: 260222 - DNA, 277 bp, Unknown
  Bacterial polypeptide expressing nucleotide sequence isolated from the Sargasso Sea
gatggaaaataaaattccaaaaataaaaaattataatttaaaatacatagtaaagggagatgaaaaaatacccgagatatcagctgcatcaataattgctaaagtatcaagagaccgtttaattacaaaaatgtcaaaaaaatatattaagtattcttggaataaaaatgccggatatggaaccaaagatcatatgtcagcaataaaaaaatttggaataactaagtatcatcgtaaaacatttaaaccaatacacaacatattgagtctcaaataa

SEQ ID NO: 260223 - DNA, 598 bp, Unknown
  Bacterial polypeptide expressing nucleotide sequence isolated from the Sargasso Sea
aatgaataagttttcaaaatttaagtatgaagcaggaattgatgaagcaggtagaggaagtctagcaggacctgttacagctgctgctgtaatacttggaaaaaaatttgaaaacaaaaatcttaatgattctaaaaagctatctccaaaaaaaaggttagaacttaaaaaatatattgaaaaaaatgcattggcttactcagttgcatttgtcagctcctcgcacattgataaaaataatattttaaactctacttttaaggcaatgcataattcaatagagggcttagatattgaacctaatttcattctagttgatggaaaattatttaagccatacatgaatctagaacataagtgtattatcaaaggtgaccaaaaatatcagaatattgctgcagcatctatattagcaaaaacatacagagatgaatatatgtctaatttacatctaaagtatccagaatataattggataaaaaataaaggatatggaacaaaatttcatatagatatgattacaaaatacggcagaacagaatatcacagaaaatcatttcaaattaagtctaatcaacaaacccttaaattcaattaa

SEQ ID NO: 260224 - DNA, 176 bp, Unknown
  Bacterial polypeptide expressing nucleotide sequence isolated from the Sargasso Sea
aatggctgaagaacgtggtcgggtggtggctgcagccaccgatggagcctgcagtggcaacccgggtccaggcggttggggcgctttgctgcgctttgaagatggcagtgttgaggaattcggcggccatgacccggcaacgaccaacaaccgcatggaactgcaggcggcgctgg

SEQ ID NO: 260225 - DNA, 226 bp, Unknown
  Bacterial polypeptide expressing nucleotide sequence isolated from the Sargasso Sea
aatgagagtaaaagcttacactgacggggcatgtagcggaaacccaggaccgggaggatggggtgtttatttagtagctgaaaataatgtaggtgaaatcataaaagaagaagttctttatggaaaagacaaagaaacaactaatcaaataatggaactaacagccgctatacaagctttagaaagcttaaaaagaaaaaacgtcgaaattaccatttcaccgaca

SEQ ID NO: 260226 - DNA, 574 bp, Unknown
  Bacterial polypeptide expressing nucleotide sequence isolated from the Sargasso Sea
aatgaaatttattatagctggagtagatgaggtaggcagaggaagtttaattggaccagtatacgctgcagcagtgattttaaaaaaaaaattagataaaaaaaaactaaaagattcaaagaaattaacaaaaaaaaatcgagagatgttagaaaaatatataaaaaaaaattcttattggtctattgggtcggcatcattaaaagaaatagagaaattaaatattttaaatgcaagcttactagctatgaaaagagcaataaaaaaattaaataaaaggccttcttgtgtattgattgatggaaataaaattccaaaaataaaaaattataatttaaaatatgtaattaaaggtgatgaaaaaatacctgaaatatccgctgcatcaataattgcaaaggtcgccagagatagacttattacaaaaatgtcaaaaaaatttgttaaatatgcttgggataaaaatgcgggttatggaactaagcttcatttaattgcaattaagaaatttggaataaccaagtatcatcgaaaaactttcagtcctatacacaatatattgagtcctaattaa

SEQ ID NO: 260227 - DNA, 565 bp, Unknown
  Bacterial polypeptide expressing nucleotide sequence isolated from the Sargasso Sea
atgacaagccaaatttatgcaggcgtagatgaagtaggcagaggatgtttggcaggtcctgtagtctctgctgccgtaatacttaaaaaagagattgattgcaatatactaaaggattcaaagaagttgtcagagagaaaacgtatattaatagctgattatattctaaatcattcattatccttaggaattggagtatgctctaattatatagttgacgacatcaatattcataatgcatcgttgttagctatgaaaagggctattatgaatctatcaattaagccttctcaggttttaattgatgggttatttgctccgcatgttgatgtagagacttcaactataattaaaggagatgaaaaaataccagaaatttctgccgcaagtataatagctaaagttttaagagataattatatggcttatctagacagaatagcttttggctatggattctctaaacataaaggctatgcaactaaagagcatgtgctggcacttgagcttcttggtccttctatctttcacagattcagctttaaaccagtttgcgagttataaa

SEQ ID NO: 260228 - DNA, 496 bp, Unknown
  Bacterial polypeptide expressing nucleotide sequence isolated from the Sargasso Sea
aatgggtttaaaacttagtttctctggttccttagaagcaggtattgatgaagctggaagaggaagtcttgccggaccggttacggctgcagcagttatacttccagacaattttaattcagaaattttagatgattcaaagaaaatttcaaagctcaaaagaaacaaattaaggaaaataattgaaaaagaagctgttgcattttcagttattaacattgaatcaaaaataattgatgaaataaatattcttaatgctactataaaggcgatgcatctagcaattcaaaatttaaaggttatacctaagcatcttttaattgatggaaattttttttatgattacaaaaacattcctcatacatgtataataaagggtgatggtaaataccaaaacattgcagctgcttcaattcttgcaaaaacatatcgtgacgatcacatgctaaatttgaataaaataaattgcaattatgggtggaataaaaataaaggt

SEQ ID NO: 260229 - DNA, 310 bp, Unknown
  Bacterial polypeptide expressing nucleotide sequence isolated from the Sargasso Sea
catggagctcatggcagcaatcaaggctcttgaaacggtgaaagagatgtgcgagatcgatttatacacagattctaagtatgtgaagcagggcatcacggagtggattatcaaatggaaagtaaatggatttaaaaattcaaaaaagaaacctgtagtcaatgctgatctttgggttcagttggatgatctcaccagtaaacataaaatcaattggtactgggttaaggggcatgcggggcacgaattcaatgagagagctgatttacttgctaataaaggcttggatgacatgctggagagctcatga

SEQ ID NO: 260230 - DNA, 556 bp, Unknown
  Bacterial polypeptide expressing nucleotide sequence isolated from the Sargasso Sea
atgaaaattattgctggtgtagatgaagttggtagaggaagtctaattggccctgtctatgctgcagcggtaattttgaataagaccataaatcttaaatatttaaaagattctaagaagttaactaaagaaaaaagggaatttttatctaattatataaaaaaaaattcaatttgggctattggaaaagcatctaataaagaaattgacaaaattaatatcttacaagctagtttactagcaatgaaaagagcaataaataaattaaagaaaaaaccctcatatattttagtagatggaaataaacttccagatctaaaaaatttcaaaatgaaagcaattgtaaaaggtgatcaaaaaataccagtaatttctgctgcttcaataattgctaaagtttctagagataaatttataacttcactagctaaaaaaaactcagggtattattggcatttaaattttgggtatggtacaaaacaacatttgggagctataaaaaaacttggagttagtaaacatcatagaaaaacctttgccccaataagaaaataag

SEQ ID NO: 260231 - DNA, 538 bp, Unknown
  Bacterial polypeptide expressing nucleotide sequence isolated from the Sargasso Sea
atgattgctggtgttgatgaggttggtaggggctgtcttgctggaccagtagtagctgcatctgtaatactaaagaggccaataaaaggccttatggactcaaagaaactttcttcaaaaaaaagggagcatctaagtcaggtaataatagaaaattccatatttgctataggagttgcagataatatagagattgatcaaattaatatcttacaagcttccttgttagcaatgcagagatcattagaaaagctagatgtaaaaccaaaaaaagtattagttgatggcgctcatatttttaaaactccaattgaaatagagtctattgtgggaggagataatttgataccatcaatcagtgcagcttctatagtagcaaaggtatatagagataggttaatgatgacgtatagtagagaatttccaaattatgggtttgataaacacaaaggatatccaacaaaactccataaagaaatgcttaaaagatatggattaacaagaattcatagaagaacttttaaaggtgtaaattaat

SEQ ID NO: 260232 - DNA, 580 bp, Unknown
  Bacterial polypeptide expressing nucleotide sequence isolated from the Sargasso Sea
atgaaaaaaattattgctggtgttgatgaagttggtagaggtagtttgattggtccagtctatgcagcagcagttatatttaattctaaaatcaataaaaaagaaattaaagactcaaaaaaattaaaaaaaattgagagagaaaaattatctaggtatataaaaaaaaattctatttgggcaattggatcagcatctattagagaaatagaaacacttaatatattaaatgcaagtctattagctatgaagagagcaataaaaaaactaaaagttaaaccaaatttagtacttgttgatggaaataaatcaccagatttgaataattatattacaaaaacaattatcaaaggagatcaaaaaataaaagagatatctgcagcatctattgttgcaaaagtatcaagagataaactgatactcaaaatgtcagaaagtttcaaaaaatacaaatgggatttaaatgcaggttatggaactaaagatcacattaaagctataagaaaatatggaataactaggtttcatcgcaaaacattcaatccaatacacaacatattgagtcttaaaaaaaaataac

SEQ ID NO: 260233 - DNA, 574 bp, Unknown
  Bacterial polypeptide expressing nucleotide sequence isolated from the Sargasso Sea
atgacaaaagccatagctggcgttgatgaagttggaagaggaagtttagtaggtcctgtttatgcggcagcagtagttttaaaaaagaaaattattaaaaaaaaattcaaagattcaaaaaaattatcgaaaaagaatcgcaaaatattatataagtacataaaaaaaaattctttttgggctattggttcagcatcattaaaagaaattgaaaaattcaatatattaaatgctagcttactagctatgaaaagagctattacaaaattaaaaaaaaaacctggattagttcttattgatggtaataaaattccaaaaatgaaaaattataatttgaaaaatattattaaaggtgaccaaaaaattcctgaaatttcagctgcttcaattatagccaaagtatcacgagatcgttttattgctaaattgtcgaaaaattttaaaaaatactcgtggcataaaaattttggctatggaactaaagaccatattcaagcgattaaaaaatttggtataacaaaacatcatagaaagacattcatgccagtgcacaacatgttgagtctaagataat

SEQ ID NO: 260234 - DNA, 424 bp, Unknown
  Bacterial polypeptide expressing nucleotide sequence isolated from the Sargasso Sea
aatgaaattaaaaatttatactgatggtgcttgctctggaaatcctgggaaaggaggttgggcagcaatcatattagatgatactaatcaatcaagtatttctggaagtgaaagtaatacaactaataataggatggaattaatggctccaattatggcattaaaaaaaataagaaagaaatcagagattacaatttttactgactcgaaatatgtgaaagatggaataactgattggattaaaaagtggaaagttaataattggaaaaattcaaacaagaaaccagttaaaaataaagatctttggattaaattggataatgtttgcataaaacataaagttacttggaaatgggttaaggcgcacgctggtaacaaatataataatcttgttgatgaattggcagtttcgaaaactaaatag

SEQ ID NO: 260235 - DNA, 571 bp, Unknown
  Bacterial polypeptide expressing nucleotide sequence isolated from the Sargasso Sea
ttgattgaagctggagttgatgaagcaggaagaggccccatagcaggtccagtgtttgctgcagcagttatattaggaaagaaacattcaatatttaatctaaatgactcaaaaaagatttctgagaaaagaagggaactgttagcagaagaaataaaagttaatgctatttcatggtctataggaatcagtacagttaaagagatcgatgatataaatattcttagagcatctttgttagccatgaggagagccatagatggtttggatgtgagacctgaacttatatctgtagacggtcagttttcacctgaaacggatttgaaagttcggactataattaaaggagaccagtcaaatgagaatattatggcggcttcaatccttgctaaagtttatagagataattatatgaaagaattagataagtccgttccagaatatggctttaaacaacacaaaggttatcctacaaagatgcacctagaagcattagaatcatatggtataactttagaacataggttaagttttaaacctgttagaaatattaatgagtcaactagataat

SEQ ID NO: 260236 - DNA, 299 bp, Unknown
  Bacterial polypeptide expressing nucleotide sequence isolated from the Sargasso Sea
atctttagaaaagctagatgtaaaaccaaaaaaagtattagttgatggcgctcatatttttaaaactccaattgaaatagagtctattgtgggaggagataatttgataccatcaatcagtgcagcttctatagtagcaaaggtatatagagataggttaatgatgacgtatagtaaagaatttccaaattatgggtttgataaacacaaaggatatccaacaaaacttcataaagaaatgcttaaaagatatggattaacaagaattcatagaagaacttttaaaggtgtaaattaat

SEQ ID NO: 260237 - DNA, 604 bp, Unknown
  Bacterial polypeptide expressing nucleotide sequence isolated from the Sargasso Sea
atgagtgaatatgtcgttggtgttgacgaagttggtagaggttctcttgttggaagtgcaatagtttgtgcatttagatctcaaaattctttctttcaagcacttccttttgatgtatctgactcaaaaaaaataaataaaaaaaagagagaggaaatttataattatttcaaattaaataagggctttaattataattatcaaattattgttggaaaaaaaaaatttattgagaaatttaatattcacaatgtagttttgcaatgcatgaaaaaatcaattattttgttatctaaaaaaacggatacagtcattattgacgggaagtttatcccaaatggtatggaggattataaagtaaaagccctagtcaaagcagacgataaaataaatcaagtctctgcagcatctattattgcaaaagtatatagggacaaattaatcaccaaacttcacttaaaagataatgtttatcagtggaataaaaatgcaggttatggaactaaaaatcatttagatgctatttattcacatggtgtcagtaaatttcatcggacaacttatcaaccaataagtagacttatcaaaaagttatctacttagt

SEQ ID NO: 260238 - DNA, 430 bp, Unknown
  Bacterial polypeptide expressing nucleotide sequence isolated from the Sargasso Sea
tatgagatataaaatatacactgacggtgcatgctctggtaatccgggtcctggtggatgggctgcaataatactagtagatgataaaatcaaagacgagatctcgggtagtgaaaaaaacacaacaaataacaaaatggagttactagcaccaattagggcgatacaaaaatttaaaaaaaaatctgaaattttaatttacacagactctacatacgttaaagatgggattacaacttggataaaaaaatgggaaaaaaatgggtggaaaacagcttcaaagaaaccagttaaaaatattgaattatggaaaaaattaaaaaatttatcatcaaaacattctataaaatggatatggataaagggtcacgctcaaaataaatataataatcttgttgatgaaattgctcaaggagctataaaaagataa

SEQ ID NO: 260239 - DNA, 580 bp, Unknown
  Bacterial polypeptide expressing nucleotide sequence isolated from the Sargasso Sea
atgagaaaaattatagctggagttgatgaagttggtagaggaagtttaattggtccagtgtatgctgcagctgttattcttaaaaaaaatattagaaagaaagagatcaaagattcaaagaagttaactaagattgagagagaaaaattagcaaaatttataaaaaaaaattctacttgggcaataggatctgcctcagttaaggaaatagaaaaactaaatattttaagtgctagtctattagccatgaagagagctataaaaaaactaaaagttaaacctaatttagtacttattgacgggaataaatcaccagaattaagtaattatcttattaaaacaataattaaaggagaccaaaaaattaaagaaatatcagcagcatcaataattgcaaaagtttcaagggataaactgatgctcaaaatgtcagaaagttttaaaaaatataaatgggatttaaatgctggttatggaactagagatcacattaatgctattagaaaatatggagtaactagatttcatcgaaaaacattcaatccaatacacaacatattgagtcacagaaaaaaatagt

SEQ ID NO: 260240 - DNA, 574 bp, Unknown
  Bacterial polypeptide expressing nucleotide sequence isolated from the Sargasso Sea
atgaaatttattatagctggagtagatgaggtaggtagaggaagtttaattgggccagtatatgctgcagcagttattttaaaaaaaaaattagataaaaaaaaactaaaagattcaaagaaattaacaaaaaaaaatagagaaaaaatagaaaaatatataaaaaaaaattcttattggtctattggatctgcatctttaaaagaaatagaaaaattaaatattttaaatgcaagtttactagctatgagaagagcaataaaaaaattaaataaaaaaccatctcttgtattgattgacggaaacaaaatcccaaaaataaaaaattataatttaaaatatgtaattaaaggagatgaaaaaatatctgaaatatctgccgcatcgataatcgctaaagttgctagagatagacttatttcaaaaatgtcaaaaaaatttactcaatatgcttgggataaaaatgcaggttatggaactaagatacatttattagcaattaagaagtttggtgtgactaagcatcatcgaaaaacttttgctcctatacacaacatattgagtcctaattaaa

SEQ ID NO: 260241 - DNA, 472 bp, Unknown
  Bacterial polypeptide expressing nucleotide sequence isolated from the Sargasso Sea
tatgactaacccagatataatcatatacactgatggttcatcaagaggaaatcctggcccaggtggatatggtatagttatacaaaaatacgacacaaattatagtaaagaattttctgaaggattcagaaaaacaactaacaaccgtatggaattgctggctgtaatcgttgctttagaaaaattaaaaaaaccaaatcagaaagttcacgtttacactgattcaaaatatgtaagcgaatcagtagaaaaaaaatgggttaatagatgggaaaaaaaagggtttaaaaacaaaaaaaacccagatctttggatccgttttttaaaaatatttaggaaacatgaggtgtgttttttttggatcaaaggacataataacaatccaggaaacgaaaggtgtgatgagcttgcttttaatgcaagcttaaaacagaaacttttaattgatgctgaatatgagtcaaaaaaataa

SEQ ID NO: 260242 - DNA, 361 bp, Unknown
  Bacterial polypeptide expressing nucleotide sequence isolated from the Sargasso Sea
atgaaacaggtaattatttatactgacggagcctgcagaggtaacccaggtccaggtggttggggagccctaattaaatttggtagtgaggaaaaagaaatttatggaggtcaagctaatacaacaaataatcaaatggagcttgcagccgcaattgagggcctagcttcgctaaaagtatcttgcagtgtagacctgtttactgattcaaaatatgtaatggatggtataactaaatggatccaaaactggaaaaaaaataattggagaactgccgcaaaaaaagatgtgaaaaacaaagaattgtggcaaaaattagatcagttaatttcccagcatcagtacaatggcattgggtaaa

SEQ ID NO: 260243 - DNA, 436 bp, Unknown
  Bacterial polypeptide expressing nucleotide sequence isolated from the Sargasso Sea
atggcctctaaaaaggttgttatgtacaccgatggagcttgctcaggcaatccgggcaatggaggttggggagcttacattgaaattgatgataagaaaattgagttaagtggatctgaaaataacaccacaaataacagaatggaattaaaagcagttatttatgctctagattatcttaatgaaaaaagagacataataattttcactgactcaaagtatgtcatgcaaggtattcaggagtggataaaaaagtggaaaaccaatgattggaagactgcgcaaaaaaaagacgtaaaaaataaagatctttgggttgaattagacaatctgaccgataaacactcgataaaatgggagtgggtgaaaggtcattcaggtgattacggaaatgaaattgctgataaactggcggtcgctcagataaaaagataaa

SEQ ID NO: 260244 - DNA, 424 bp, Unknown
  Bacterial polypeptide expressing nucleotide sequence isolated from the Sargasso Sea
aatgaaattaaaaatttatactgatggtgcttgctctggaaatcctgggaaagggggttgggcggcaatcatattggatgactctattcaatcaagtatttctggaagtgaaaataatactactaataataggatggaattaatggctccaattatggcattaaaaaaaataaaaatgaaatcagagattacgatttttactgactcgaaatatgttaaagatggaataactgattggattaaaaagtggaaagttaataattggaaaagttcaaataagaaaccagttaaaaataaagatctttggattaaattggataatgcttgtctaaaacataaaattacttggaaatgggttaaggcacatgcaggcaacaaatataataatcttgttgatgaattggcagtttcgaaaactaaatag

SEQ ID NO: 260245 - DNA, 580 bp, Unknown
  Bacterial polypeptide expressing nucleotide sequence isolated from the Sargasso Sea
atgaaaaagattattgctggtgtagatgaagttggtaggggcagtttaattggaccagtttatgctgcagcagttattcttaacaataatataaataaaaaagaacttaaagattcaaaaaagttaaataaaataaaaagagaagttttagcaaaatatataaaaaaaaattctacatgggctattggttctgcttctttaaaagaaattgaaacaattaacattttaaatgcaagtttgcttgcaatgaaaagagctataataaaacttaaaaaaaaaccaaagatagttcttattgatggaaataaatctcccaaaataaaaaattattttattaagactataattaaaggtgatcaaaaaataccagaaatatctgcagcttctataattgcaaaagtttcaagagataaattgataactgatatttctaaaaagtttaaaagctataaatggcatttaaacgctggttatggaacaaaagaacacctgagagcaattaagaaatttggagtaactaaatttcatcgaaaaacatttaaaccaatacacaatatattgagtctccaaaaaaactgat

SEQ ID NO: 260246 - DNA, 577 bp, Unknown
  Bacterial polypeptide expressing nucleotide sequence isolated from the Sargasso Sea
atgaaaaaaactttagctggtgtggatgaagttggaagaggaagtttaattggcccagtctttgctgctgctgtaattcttaataatgatatcaataagaaaatacttaaagactcaaaaagtttatcaaaaaataagcgtgaaaatttagaaaaatatattaagaaaaattcaaaatggtcagttggttcagcgtccttaaaggaaatagaaaaatataatattttaaatgcaagtctgcttgcaatgaaaagagctataaaaaagttaaaaataaaaccaaaaattatattagttgatggtaacaaaattcctgatatgaggagttataatttaaagtacgtaattaagggtgaccaaaagatacctgaaatatctgctgcatctataattgcaaaagtatcacgagatagattaatcaaaaaattagcaaagatacatcataggtatttctggcacaaaaacgctggctacggaacaaaagaccatcttcaggctcttaaaaaatttggagttacgaaataccatagaaaaaaatttaaacctatacacaacatattgagtctcgaaaaataac

SEQ ID NO: 260247 - DNA, 538 bp, Unknown
  Bacterial polypeptide expressing nucleotide sequence isolated from the Sargasso Sea
atgattgctggtgttgatgaagttggaagaggctgtcttgccgggcctgtaatagctgcatctgtaatcctaaagaggccaataaaaggcctcatggactcaaaaaaactttccccaaaaaaaagggagaatttgagtcaggaaataatagaaaattccatatttgcaataggagctgcagataaccacgagattgataagattaatatcttacaagcttccttgttagcgatgcgaaggtcattagaaaagcttgatgtgaaaccaaaaaaaattttagttgatggcacccatatttttgaaacttcaattgaaatagagtctattgtgggaggagataatttgataccatcaattagtgcagcttccatagtagcaaaggtatatagagataagttaatgatggcatatagtgaagaatttcctgattacggattccataaacacaaaggatatccaacaaaatttcacaaagaaatgcttaaaagatatggtttaacaagaatccatagaaaaacttttaaaggtgtgaattgat

SEQ ID NO: 260248 - DNA, 562 bp, Unknown
  Bacterial polypeptide expressing nucleotide sequence isolated from the Sargasso Sea
ttgataacagctggtgtagacgaagtaggtagaggttgccttgcaggtccagtggtttctgctgctgttgttcttaagaaaagtataaacttaaatcttttaaaggactcaaaaaaaatatcatttaataaaagagaagaaatttctgagcatattaagaaaaattcttattatgcactgggaattgcctctgttgaagaaatcttaaatttaaatattttacaagcatctttactatctatgaagagagcaattttaaagcttgaaataaaaccaggtttaaccttaatagatgggaaatttgctccaaagggtctaaaaaattataaaacaatcgtaaatggagatgaaaaaattaaagtcataagtgcagcttcaattattgcaaaagtgtaccgagatagattcatgataagattatctaagaaattttctaattatgcttgggatagaaattttggatatggcactaaagctcattttgaaggtttaaaaaaatttggcgtaacctcacaccatagaaaaagttttaaaccgatacacaagatattgtcgaattaag

SEQ ID NO: 260249 - DNA, 463 bp, Unknown
  Bacterial polypeptide expressing nucleotide sequence isolated from the Sargasso Sea
atgagggcacgagtcttcactgatggttcatgtagtgggaatccaggaccaggggggtgggcatggattgttcccaatggaagtttcgctgctggttattcccccgatactacgaaccaaagaatggagctaactgctgctatcgaagctgtcaccacattaaaaggccccttggagatcgtcagtgactctacatacgtagtcaactgttttagagatagttggtggaaaggatggctacagcgcgactggaaaaatagtcaacgaaaacctgtagcaaataaggacctgtgggagcctctaatcgcggaatatcaaaatagggatctattattcacatgggttaagggccacggtggagatcagtggaatgactatgctgaccgcctcgctgtcgaagcagggtatctccaggctgacaggtcagggtcccagcctccagatgagataatcttgccttaag

SEQ ID NO: 260250 - DNA, 436 bp, Unknown
  Bacterial polypeptide expressing nucleotide sequence isolated from the Sargasso Sea
atggatacaataactttagtaactgatggagcatgtagtggaaaccccggacctggaggatggtgcgttattgtaaaaaaagagaatgaaataaaggaattttttggtggagaattaaaaactactaataataagatggagttaacggcagtaatcaaaggatttgaaaatatagattcatattcaaatgttactgttaaaacagacagcacctacgtaatcaatggaataacaaaatggcttgcaaattggaaaaaaaaaggttggataaatgctgcaaaaaaaccagttgcaaacaaggagctttgggagaaattagagtcattagttagtaatcataaagtaaaatgggagtgggttaaaggtcattctggagatgcagaaaacgaaagagctgatgaacttgctcgcaaaggtattcagaatataatataat

SEQ ID NO: 260251 - DNA, 359 bp, Unknown
  Bacterial polypeptide expressing nucleotide sequence isolated from the Sargasso Sea
aattaatattttaaacgcatcgcttttggcaatgaaaagatcaattttaaaattaaaaattaaacctaaaatagtaaaagttgatggaaataaaaaacctaacgttaataacctaaatataaaatcagttgttagaggtgaccagaaaattccagaaatttctgcagcatctattttagcaaaagtctcaagagaccgattgataaaaaaaatgtcgaaaaaatttaaagcttatttgtgggataaaaatgttggctatggaaccagagatcatctttcagcaattaaaaaatttggaattacaaaacatcacagaaaaacatttaaaccaatacacaatatattgagtcccaaataat

SEQ ID NO: 260252 - DNA, 436 bp, Unknown
  Bacterial polypeptide expressing nucleotide sequence isolated from the Sargasso Sea
tatggactctgatattttacatatatacacagatggagcttgctctggaaatcccggacgaggtggttggggggtttatattgaaaaaggtattgagaaaattgagttaaatggatctgatgaagacacgaccaataatagaatggaattagtagctgttattcaagctcttcggtacgttgatcagaattcaaaaataaaactttttacagattcaaaatacgtaatgcaaggtatacaagaatggatcttaaaatggaaaacaaatgattggaaaactgcaaacaaaaaagatgtcaaaaataaagatctttggatggatcttgatgaacttgttgaactacataatattgactggatatgggttaagggtcattctggtgactttggaaatgaaatagctgataaattagctacttccgcaatatcaaattag

SEQ ID NO: 260253 - DNA, 436 bp, Unknown
  Bacterial polypeptide expressing nucleotide sequence isolated from the Sargasso Sea
atgtctataaaagtatacacagatggagcttgcaggggcaatcccggacctggagggtggggcgtatatatacttgatggaaatgagcagaaagaattttatggtggcagtccctcaaccacaaacaatcaaatggaaatgcaagcggctcttgaagctcttatttatttaaaggatagaaatgagcatattgaactatttacagattcaaatatcgtaaaaaaaggcatgactgaatggatggagaactggaaaaggaataactggaaaaactcaaataaaaagactgttaaaaataaagaaatttggatgcaattagatgaagcaagtaaatcattgaatgttacatggacatgggtcaaaggacatgatggtgatccaggaaatgaaaaagcagattttctagcgaataaaggagccgatagtgtctcataga

SEQ ID NO: 260254 - DNA, 163 bp, Unknown
  Bacterial polypeptide expressing nucleotide sequence isolated from the Sargasso Sea
atgagtgtgaaagctctgaatgctgaaacctaccaaagaccacaagttcagctgatttgtggtgttgacgaagtagggcgcggtcccctggttggcgctgtagtgacagctgctgtgatccttgacccgaataaccctattgttggtttaaacgattccaaaa

SEQ ID NO: 260255 - DNA, 577 bp, Unknown
  Bacterial polypeptide expressing nucleotide sequence isolated from the Sargasso Sea
tatgaaaaaaattattgctggggttgatgaagttggaagaggaagccttgtaggaccagtttatgcagctgctgttatattaaataaagaaattaatagaaaaattcttaaagattcaaaaaaacttaataaaattcagagggaaactttagctaaatatataaaaaaaaattcagtttgggcgttaggatctgcatcaataaaggaaattgaaaaaattaatattttaaatgctagtctactttcgatgaaaagagcaattaagaaactcaaattgaaacctagaaaagttttaatagatggtaataaaccaccagacttaaaaaattatgttattaaaactattgtaaaaggtgatgaaaaaattcctgaaatttcagccgcatcgattattgctaaagttgaaagagataagctaatgaaaaagatgtctttttcttttaaaaaatacggctgggataataatgcaggttatggaactaaggatcatattaaagctattaaaaaatttggagtgactagatttcatagaaaaacctttcaaccaatacacaagatattgagtcttaaaaaataa

SEQ ID NO: 260256 - DNA, 916 bp, Unknown
  Bacterial polypeptide expressing nucleotide sequence isolated from the Sargasso Sea
aatgcaatctattcaacctattcagatctacacagatggttcatgcaaaggtaatcctggccccggcggttgggcagccgttattttctccaatggtcaaataatcaaggaactatctggaggggatgcgaacacaacgaataacaaaatggaaattactgcagtaattaaaggcctacaagctataccttcgagttccaagatagatattttttctgacagcagctatgtcatcaattcaatgaccagaaactggaaaaggaatgttaataaagacctttggtcgcaactagactttgaagcagctaggcatcaactcacttggtattgggtcaaaggacactctggggatcccgggaatgaactcgctgacaaactagcatatgcagccgctgacgcggccagcaaaggagatactgtcatggaccagcatcaaccatcagaaggcctaactcacatagatgaaggaggtaatgcatctatggtagatgtggcggacaaaaatgtaacagttcgcgaagctactgcagtaggggctgtgacaatgtcaaaagagacacttaatttaattaaacaaggattgatcaagaaaggagatgtgtttacggttgctcaattagcaggaatcatgggagcgaaaaaaacatcagatcttattcctttgtgccacccactaccactggaaaaaatcactgtagaactgaaaattgaagaatctacttcgtcgataaatatcgaaggttatgctaaaacttccagtaaaacaggtgttgaaatggaagctttaacagccgttagtatcgctgcactcactatatacgacatggctaaagcatccgatcgccaaatgaccattaccgatataaaagtgattaagaaatccggcggaagaagcggggatttggatttctcgtaa

SEQ ID NO: 260257 - DNA, 598 bp, Unknown
  Bacterial polypeptide expressing nucleotide sequence isolated from the Sargasso Sea
cttgaatcagaaaaatgcaaaaatctttattggtgttgatgaagccggtcgaggttgcctggccggaccagttgtcagtgcctctgtagcaatctatgaggatcaaatcattaatggcgttaatgattcaaagctattgtcccctaagaagagggagagtctttatgatgtcatacaaaatgaatgtttaggtttttcaattaaaagcattgataatcatgtcattgatgaaaaaaacattctagttgctactctagaatccatgaaagaggcaattgatgcgatcgaaatagcagcagatgaaatagtcatagatggtcctcataagccagcaatgcataatgatagagatttaatcaccaggggtgtcattggaggagataaactatttcattgcatctcagcagcatctataattgctaaggtctacagagataggtttatgattcaattgcatcaaaagtttccagaatataatttccagaaaaacaaaggatacccaacaaaagatcatatcgaagtcatcaaaacattagggccaagcccatatcataggttgacatttaagccagaactatatgatgagagccttctatga

SEQ ID NO: 260258 - DNA, 592 bp, Unknown
  Bacterial polypeptide expressing nucleotide sequence isolated from the Sargasso Sea
aatgattgaaaataaagtttggagcaacaatcctaatcaatttgtaataggagctgatgaagtagggagaggatcatttgcagggccaatagtaggagctgcagtaaaaataaataaatctcatgaagatttattaatagaagtaaaagattcaaaaaaacttagcgaaaaaaaaagaaatcaaatatttgaattaatttctaataacaatgttgtttactcaatatccgaatgttcgaataatatcattgacgaaattggaatatcagaagcaaacaaaatagtattagaaaattctatcaaagaaatatatacaggtgcagaaaaagtctatgtagatcattttaaaataaataaattttcttcagtttcattagtaaggggtgaggacaatagtaaagctatagctcttgcaagtattatcgcaaaagtatatagagacaacctaatgaaaaaaatatcaaaaaattatcctcaatatttatttgaaaacaataaaggttatggaactcaggcacatagagaaagtattgaaaagcatggtctaacagatattcaccgtaggtcttttaatttagagcccaataaatag

SEQ ID NO: 260259 - DNA, 619 bp, Unknown
  Bacterial polypeptide expressing nucleotide sequence isolated from the Sargasso Sea
catgggaagacctaaaaaaaataagaaaaaaagtagaagatttaaatattataatttaatgaaaataattgctggtgtagatgaagtcggtcgaggaagtttggttggaccagtctatgcagctgcagttattttaaaaaaatctataaatacaaaattactaaaagactcaaaaagtatatcgagctctaaacgcaaagtcttatttagccatattaaaaaaaattcaatttgggcaattggaaaggcatcattgaaagaaattgaacaattaaatattttaaatgccagtttattagcaatgaaaagagcaatcaaaaaacttaagaaaaaaccttcacacgtattaattgatggaaataaattgcctgaattaaaaaattacaaacttaaatctattattaaaggtgaccaaaaaattccatctatttctgcagcatcaattattgctaaagttacacgtgataaaatgatctcaaatttaagtaaaaagtttaaaggctatagttggcaaaaaaattttggatatggtactagtcaacatttaaaagccataaaagttttaggaattacaaagcatcacaggaaaaacttctctccaataaatagattaaaatag

SEQ ID NO: 260260 - DNA, 583 bp, Unknown
  Bacterial polypeptide expressing nucleotide sequence isolated from the Sargasso Sea
atgaaaaaagtaattgcaggtgttgatgaagttggtagagggagtttagtaggtccagttttcgcagccacagtaatattcaaaaaaaatattgataaaaaaaaaattaaagattctaaacaactatcaagaaatcagagaaacttattggagaaatatataaaaaaaaatagtgtctgggcagttggatctgcttcattaatagaaatcgaaaaactgaatatattgaatgcaagtttactagcaatgaaaaggtctataaaaaaactaaaatctaaaccatccttgatcatgattgatgggaataggttgccaattatgagtggttataagttaaaatctataattaagggtgatcaaaaagtacctgaaatttcagcagcatctattattgctaaagtttctagagatagatttatttcaaaaatgtcagaaaactttaaaaaatatgcttggaataaaaattcaggctacggtacaaaacaacatttaagcgcgattaaaaaatttggcgtcacaaagtatcatagaaaaacattcagccctatacacaatatattgagtctcaaaaatacctcgtaac

SEQ ID NO: 260261 - DNA, 574 bp, Unknown
  Bacterial polypeptide expressing nucleotide sequence isolated from the Sargasso Sea
attgaagaaaataaaattaatagcaggagttgacgaagttggcagaggatgtttggcgggtccagtagtttcttgtgccgttatttttaaaggtaaattcaaaaaaagcgagattaaagattcaaaaactcttacttttaaaaaaagggcagaactctctaaatatatcaaaaaaaactcttattatggtattggtttagcttctgtaaatgaaattgaaaaatataatattttaggtgcaactttaatatcgatggagagagcaattaataagttaagtgttaagcctcacaaaatattaattgatggtttgtttgccccaaaaaatatcacaaattgtaaaactataatcagaggggataaaaaatttaaatgtataagtgcagcatcgatattggctaaagtttttagggataaattaatgataaaattatcaaaaaaatataagaattataattttgaacataattttggttatggaacaaaaaaacatttatctggtataaaaaaatttggaattaccacaatccatagaaaaactttccagccaatacacaatatattgatgaaataa

SEQ ID NO: 260262 - DNA, 280 bp, Unknown
  Bacterial polypeptide expressing nucleotide sequence isolated from the Sargasso Sea
tgtgaaaccaaaaaaaattttagttgatggcactcatatttttgaaacttcaatcgaaatagagtctatgtgggagggagataatttgataccatcaattagtgcagcttccatagtagcaaaagtatatagagataagttaatgatggcatatagtgaagaatttcctgattacggattccataaacacaaaggatatccaacaaaatttcacaaagaaatgcttaaaagatatggtttaacaagaatccatagaaaaacttttaaaggtgtgaattga

SEQ ID NO: 260263 - DNA, 595 bp, Unknown
  Bacterial polypeptide expressing nucleotide sequence isolated from the Sargasso Sea
aatgaaaaaacttgttgctggtgttgatgaggttggtagaggaagtttgataggacctgtatgtgctgcagcggtagtttttaaaaaaggttttaataagaagatggttaaagactcaaaaaaattaagtcccaaaaaaagagagtatttagaaaattatattaaaaaaaattcctactgggctattggtacagcatccacaaaagaaatcgaaaagattaatattttaaatgcatcacttctggcaatggaaagatcgattttaaaattaaaagtaaagcctaagatgattaaagtagatggaaacaaaaaaccttcaataaataatcttgaaatcagaacagtgattaaaggtgatcaaaaaattccagaaatctctgccgcatctattattgctaaggtctcaagagatagattgataaaaaaaatttcaagaaaatttcaaggatatttttgggaaaaaaatgcaggctacgggacaaaggatcatatgttagcaataagaaaacttggaataacaaagcatcataggaaaacattcaaaccaatacacaacatattgagtcttaaagtagtacaagacacaaatagttaa

SEQ ID NO: 260264 - DNA, 430 bp, Unknown
  Bacterial polypeptide expressing nucleotide sequence isolated from the Sargasso Sea
atgagatataaaatatacactgacggtgcatgctctggtaatccaggtcctggtggatgggctgcaataatactggtagatgataaaatccaagacgagatctcgggtagtgaaaaaaacacaacaaataacaaaatggagttgttagcaccaattagagcgatacaaaaatttaaaaaaaaatctgaaattttaatttacacagactctacatacgtaaaagatgggattacaacttggataaaaaaatgggaaaaaaatgggtggaaaactgcttcaaaaaaatcagttaaaaatatcgaattatggaaaaaattgaaaaatttatcatcaaaacattctataaaatggatatgggtaaagggtcacgctcaaaataagtacaataatcttgttgatgaaattgcacaaggagctataaaaagataaa

SEQ ID NO: 260265 - DNA, 430 bp, Unknown
  Bacterial polypeptide expressing nucleotide sequence isolated from the Sargasso Sea
atgatcacaatttatacagatggagcatgctctggtaaccctggagttggggggtggggcgttgtaattattgatgataataaaaatgaaacttttttaaatggtggggacaatcatacaacaaataataaaatggaattaacagcagcaattcaagcactaaaagcatttgaaaaggaaaggacaataacacttataactgatagtaaatatgtaaaagatggcattcaatcctggatacaaaactggaaaataaatggatggaaaactgctgcaaaaaaaccagttaaaaataaagaattatggatagagcttaatgaattaatagcgaaacataatataacttgggaatgggttaaaggtcacgctggaaacacacacaatgaaaaagcggattacttggctagacgctatattgaagaaatgtaaa

SEQ ID NO: 260266 - DNA, 433 bp, Unknown
  Bacterial polypeptide expressing nucleotide sequence isolated from the Sargasso Sea
atgaaaacagtaaatatttatactgatggtgcatgcagagggaatccaggtattggaggttggggagtgctcattgagtttggagatatttctaaacagcatttcggaggagaaaataatacaactaataataaaatggaattaaaggcggccatcgaaggtctaaaacttttaaaggaaccatgtaatgtaaatcttaccactgattctaagtatgtaatgcaaggcataaccacttggatagataattggaaaaaaaataattggaagaatgcctcaaaaaaagatgtcaaaaataaagatttatgggtcgagcttgataaatatgtatctaaacataatgtaaaatggcattgggtaaaagggcacgctggtcatgagaagaacgaaatagctgatgctctagcgaataaaggaatagatagcttgtaac

SEQ ID NO: 260267 - DNA, 562 bp, Unknown
  Bacterial polypeptide expressing nucleotide sequence isolated from the Sargasso Sea
aatgaaagttattgctggagttgatgaagttggaagaggaagcttaattgggccagtctttgctgctgcagttatattaaataaatctataaacaaaaaattattgaaagactcaaaaagtttaacaaaattaaaaagagagaaactatcaaaatacataaaaaaaaattgtgaatggtctgtaggtaaagcatcagttaaagaaatagaaaaaattaatattcttcaagcaagcttattggctatgaaacgcgcaattaaaaaacttagaattaaacctagccttgttttaattgatgggaacaacttaccagaaattaaaaattacaatctcaaagctattacaaaaggagaccaaaagatcccatcaatttcagcagcttcaattattgcaaaagtatcacgtgataaaatgataactaacttagggaaaaaatttaaaggttattatttacatcaaaattttggctatggaactaaacagcacttaaaagctataaaaaatctaggtattactattcatcatagaaaaactttttctcctaataataaaacaaaatag

SEQ ID NO: 260268 - DNA, 562 bp, Unknown
  Bacterial polypeptide expressing nucleotide sequence isolated from the Sargasso Sea
atgaagataattgctggggttgatgaggttggtagaggaagtttaattgggccagtttatgcttcagcagtaattttaaaaaaatcaattaatccaaagttattaaaagattcaaaatccttaagtaaaaaagagagagagtatctatgtacatatataaaaaaaaattctacttggtcgataggcaaagcttctgtcaaagaaatagaaaagctgaatatactgcaagcgagtttgctggctatgaaaagagccatcaaaaaacttaagaaaaaaccaacccacgtccttatagatggaaataaaactccagaattagaaaattataatttaaaatcagttattaaaggagataaaaaaatcccctctatttcggcagcttctataattgcaaaagtatcaagggataagtttataaccaccttatcaaaaaaaaataaaggttataattgggataaaaattttgggtacggaacaaaacagcacttaaaagctttaaaaaaattaggtattactaaacatcatagaaaaactttttcacctatatctaaaataaattaac

SEQ ID NO: 260269 - DNA, 462 bp, Unknown
  Bacterial polypeptide expressing nucleotide sequence isolated from the Sargasso Sea
ctaagattatttctaaaattaaaagagaattattatcaaattatattaaaaagaattcaatttgggtaattggtaaagcatcagttaaggaaatagataaaattaatattttgcaagcaagtttacttgcaatgaagagagctattaaaaaacttaaaaaaaaacctacacaaattttaattgatggaaataaagttcctgatttaaaaaattataatttaaaagcaataataaaaggtgatcaaaaaattccttctatttctgcagcatcaattattgcaaaggttgctagagataaatttataacatcattggcaaaaacaaataaaggataccattgggatcaaaattttgggtatggaactaagcaacatttaaaagctattaaaaagctcggtatcagtaagcatcatagaaaaaccttctcacctataaataattacaagacatacaatatctagt

SEQ ID NO: 260270 - DNA, 433 bp, Unknown
  Bacterial polypeptide expressing nucleotide sequence isolated from the Sargasso Sea
tatgaaaacagtaaatatttataccgatggtgcatgcagaggaaatcccggtcttggtggatggggagtgttaatagagtatgaaaatatatcaaaagaatattttggtggtgaaaaagatacaactaataatcagatggaacttaaagctgcgatagagggattaaaaattttaaaagaaccttgtgaggttaatcttacaaccgattctaaatacgttatggatggaataacttcatggattgaaaattggaaaaaaaataactggaaaaattcagcaaaaaaagatgttaaaaataaggttttatggatggaattagatgaacttgtttgtaaacacaatataaaatggaattgggttaagggacattcaggacacaaaaagaatgaaatcgcagatgcacttgcaaataaaggaatagataatctttaa

SEQ ID NO: 260271 - DNA, 481 bp, Unknown
  Bacterial polypeptide expressing nucleotide sequence isolated from the Sargasso Sea
aatgaacgtagaggtatatactgatgggtcttcaaaaggaaatccaggtcctggaggctttggtattgtaatgatatttggagggaaacgcaaagaaatttctcagggttttcgtttgacaactaataacagaatggaattaatggcgattgtaatagttcttgagtcattaaaatcaaaaaaacatcctgttcacattacatctgattcaaaatatgtaattgattcaattaccaaagggtgggtttattcttgggttaaaaaaaactttaaaggaaaaaaaaataaagacttatggctaaggtatatcgcagctgaaaaaggatataagttaagttttacatgggttaaaggacatgcgggacatattgaaaatgaaagatgtgatcaattggctgttttagcagctgatttagggccttggcaagaagatgttggatataatgatggtgagacttccgaaaatgatttgttcaactaa

SEQ ID NO: 260272 - DNA, 472 bp, Unknown
  Bacterial polypeptide expressing nucleotide sequence isolated from the Sargasso Sea
gatgcgtaaaacagtagctatctatacagacggttcttgtcttggaaaccctggtccgggcggttatggcgtggttttacgctatcagcaacaccaaaaagaaatgtctgggggctacaagcaaaccaccaataaccgcatggaattactagctgctattgtaggtctggaaagtttaaagcagccttgtgatgtggatttaaccacagacagtcaatatgtgcgtttaggtattacgcagtggctggccaactggaaaaaaaacaactggaaaaccagtcagaaagaacctgtgaaaaatcaggatttatggcgccgcttagatacagcctgtcaggggcataaagtgaactggcattgggtcaaaggccatgcaggacatccggagaacgaacgttgtgatgaactggcccgcgttgctgcaacccatcaggccacagaagtggacgagggttttcagccttccgcttga

SEQ ID NO: 260273 - DNA, 574 bp, Unknown
  Bacterial polypeptide expressing nucleotide sequence isolated from the Sargasso Sea
tttgcataagttaattgccggcgttgatgaagtaggtcgcggccctttagtaggtgatgtggtcaccgccgcggtcattcttgaccctgaaaatcccattgaagggcttacagactctaaaaaactgagtgaaaaaaagcgcgtagcccttgcccaagaaattcgtgaaaaagcactctactggaatattggtagagcgagcccagaagaaatagacaaacttaatatactgcacgctaccatgctcgccatgatccgcgcagtggaaggtttacctgtaaagcctgactttgtgcgcgtagacggcaaccgggttccggcgtggaattttgagtctgaagcggtagtgaaaggcgatagcctgcacgcagaaatttcagcggcttccattattgccaaagtagagcgagataacgatatgatttcgctccacgaggcctacccgcaatataactttgccgggcacaaaggttaccccacaaaagcacactttgaagccatcgctgaatatggcatcttagattgctatcgaaaaagttttaaacctgtaaaagcgctactcgaagagaaataa

SEQ ID NO: 260274 - DNA, 598 bp, Unknown
  Bacterial polypeptide expressing nucleotide sequence isolated from the Sargasso Sea
tatgttaaaagtctttgataacaaaatttttgtttgtgggattgatgaggctggtagaggttgtttggctggtccagtcactgcagccgctgttgtgcttccaaaaaaatatacaaatccatttataaaagattcaaaaaagttaaacaaaagtgataggcttgatttgtttaatgaaattattgaatgctcattagattatgcaataattgatatatctcctaaaataattgattctattaacgttcttgaatctacgttcttagcaatgaataatgcaatatctaaaatccataataaaattgattataccattattgatggaaataaatttaaaactgaaaaaagaataaaatacaagtgtatagtgaagggtgataatatttatcaaagtattgcagcagcatctatactagcaaaagtacacagggataaaattatggaagatttacatttaaattttccaaaatatgactggattaacaataaaggttatggaacttcaaagcacagactagccataagaaattatggaataactaaataccatagaaaaagttttaatctagttgaaaaacaattaaaaattaaaatttga

SEQ ID NO: 260275 - DNA, 484 bp, Unknown
  Bacterial polypeptide expressing nucleotide sequence isolated from the Sargasso Sea
aatgactatcacagctggtgtagatgaagtaggtagaggcccacttgctgggcccgttgtagctgcagccgtgattctaccagaagaccatactattgatgggcttagggactcaaaaaagttatctaagttgaaacgagagtttctttttccattgatccatgaacaagcaataggggtaggggtaggcgaggtagacgtaaaaacaatagacaagataaatattcgagaagcaaccttcaaggctatgcagatagcattaaacggcctttctacagtaccagaaaaagcattgatcgatggacatccattaaataaccaagtaattccaaatgaagggattattggaggtgatgataaagtagattcaattaaggccgcatccatcattgcaaaggtaactagagaccgaataatgaaagaatatgctattatttttcctgaatatgattttgagaataatagtggctatggaaccaaaaaa

SEQ ID NO: 260276 - DNA, 282 bp, Unknown
  Bacterial polypeptide expressing nucleotide sequence isolated from the Sargasso Sea
taattatagatggtaatttttcattaaactacaaatcttataaagaaaaatctattattaaaggtgataacaaatctttatcaattgcagcagcatctattattgcaaaagttcaccgtgatagattaatgaaaaaattatcaataaaatttcaagatttcggctgggaaaaaaatgcaggatatggaacaaaaaagcatatagaaaatattcatcgatttggcccaacaatacatcatagaaaaacttttgaaccaattaagtcacttatccataactaaa

SEQ ID NO: 260277 - DNA, 340 bp, Unknown
  Bacterial polypeptide expressing nucleotide sequence isolated from the Sargasso Sea
ggcaccaaattatcgatgaaaagagttgtagataaatttaatctaaaaaatgcagaattaattatagatggtaatttttcattaaattacaaatcttataaagaacaacctattataaagggcgataataaatccttatcaattgcagcggcatctattattgcaaaagttcaccgtgatagattaatgaaaaaattatcaataaaatttcaggattttggctgggaaaaaaatgcaggatatggaacaaaaaagcatatagaaaatatttatcgttttggcccaacaatacatcatagaaaaacttttgagccaattaagtcacttatccataactaaa

SEQ ID NO: 260278 - DNA, 357 bp, Unknown
  Bacterial polypeptide expressing nucleotide sequence isolated from the Sargasso Sea
tatgacgaacgagacggacatcgaaattttcaccgatggtgcctgcctaggcaacccagggccggggggctggggtgttttgctacgctggcgcggcaccgagaaggagctttccggcggggaaaaagagaccaccaacaaccgtatggaattgatggctgctatccaggggctggaggcgttgaagcggccgggccgagtgaccttgaccacggacagtacctacgtgaaagacggcatcaccaagtggatctttacctggaagaaaaacggctggcgttcggcagcgaagaaaccagtcaagaatgtggatctttggcagcgcctggacgcggcggtcgccggacatgatgtcag

SEQ ID NO: 260279 - DNA, 175 bp, Unknown
  Bacterial polypeptide expressing nucleotide sequence isolated from the Sargasso Sea
atgaaaataacatgtggtgttgatgaggcaggtcgtggtccattagctggtcccgtagtagcagcagctgtaattttacctgaagagcatcaaatttcaggtttaaatgactcaaagaaattgactgaaaaaaatcgagttaaactttataaagaaatatctgatttagctcaaa

SEQ ID NO: 260280 - DNA, 409 bp, Unknown
  Bacterial polypeptide expressing nucleotide sequence isolated from the Sargasso Sea
attgatttgtggtgtagacgaagtaggacggggcccgcttgttggcgctgtagtgacagctgctgtaatactggatccgaataaccctattattggcctcaacgattcgaaaaaactgtcagaaaaaaaacgcctgcagctggctgaagaaattaaagctaaagctttaagctggagcttaggccgtgctgaagtacatgaaattgatagtttaaatattctccacgccactatgctggcgatgacccgtgctgtacagggcttacatatcaagccggaatgggccttaatagacggcaaccgtgtgccgaaagatataggtgttcaggccagcgctgtggtgaaaggtgatgctttagtaccggaaatcagtgctgcttctatttggccaaagtggcgcgggagaaga

SEQ ID NO: 260281 - DNA, 445 bp, Unknown
  Bacterial polypeptide expressing nucleotide sequence isolated from the Sargasso Sea
atgaaaatcataggtattgatgaggcgggaagaggacctttagcaggtccagtcgctattggagcagttcaattagatcccaataaagaatttgctgaattaaatgattcaaaaaaattatcagaaaagaaaagaaatgaacaagaactttatataaaagaaaatgctttgtacttcgatgtaaaacttattgataaccaaataattgatgaacttggcattaagcaagcaactatttttggtatggaagaaatcatcaaatcaatccaaccaattccagataaggtcatcattgatggtaatgatgaaataaatacatcaataaattatcaaagtattgtaaatggagaccaaaccgagaaaccaataatggcagcttctataatagctaaagttgccagagataaattaatgctagaaattgatgaagagtttccagagtagg

SEQ ID NO: 260282 - DNA, 317 bp, Unknown
  Bacterial polypeptide expressing nucleotide sequence isolated from the Sargasso Sea
agtggtagataaattcaatatagagaatgcctatcttttaattgatggaaatttttcactcaactataaatcttttagagaacaatcaattatcaaaggagatgataaatcattatcaatagctgcagcttcaattattgcaaaagttcatcgagaccgactgatgaaaaaattatctctcaaatttcaagattttggttgggaaaaaaatgcaggatacggaacaaagatgcatattgagaatatttatcgtttaggtccaacaatccatcatagaaaaacttttgaaccaattaagtcacttatccatagttaaa

SEQ ID NO: 260283 - DNA, 568 bp, Unknown
  Bacterial polypeptide expressing nucleotide sequence isolated from the Sargasso Sea
ttggtcgagggaccattagcgggtccagtaattagttgtggttgtcattttaaaagttatacaattctaaatgagtttaaagattttattgaagattcgaaaaaactttctgaaaaaaaaagagaattatcgtttaggtttcttcagagtttaaaaaaagaaaacattattgattttcatttgggtatagcaaatgtttatgagattgataatcttaatatattggaggcaacaaaattatcgatgaaaagagtgatagataaatttaatctaaaaaatgcaaaattaattatagatggtaatttttcattaaactacaaatcttataaagaacaatctattgtaaagggtgataataaatctttatcaattgcagcggcatctattattgcaaaagttcaccgcgatagattaatgaaaaaactatcaataaaatttcaggatttcggatgggaaaaaaatgcaggatatgcaacaaaaatgcatatagaaaatattcatcgttttggcccaacaatacatcatagaaaaacttttgaaccaattaagtcacttatccataactaaa

SEQ ID NO: 260284 - DNA, 454 bp, Unknown
  Bacterial polypeptide expressing nucleotide sequence isolated from the Sargasso Sea
tttggagcgagtaattaaagtcgatatttttaccgatggagcgtgtcgtggaaacccgggacctggaggttgggcagcgctccttcgctatggcgacaccgaaaaaatgttttctggtgctcaggagcaaacaacgaataaccgaatggaacttatggcggcaatcgagggtttggaaaaactaaaaaaacctatggatgttgttctcactactgattcccaatatgtaaaggatggaatcactaagtggatcgatgggtggaagaaaaagggttggattacttcacagaaaaaacctgttaaaaacgtcgacctttggaagcgattagatgcggctgttgccaaccactctgtggaatggaagtgggtcaaggggcacagcgggcatacggaaaatgaaatagttgatcaggcagccaacgtcgccatagataatcttttagtaacaaaatga

SEQ ID NO: 260285 - DNA, 304 bp, Unknown
  Bacterial polypeptide expressing nucleotide sequence isolated from the Sargasso Sea
atgatagcaggagtagatgaagttggcagaggccctttagcaggtccggttgtggcagctgcggtaatattaggtcatgattttgatatatctggtttaatggattctaaaaaattaacagctcttaaaagagaaaaattatcagctattatttgggaaaatgctttagctgtgtctattgctgaggcaagcgtagaagagattgatgaaattaatattttacaagcaagtttattagctatgaaaagggcggtgctaggtttaagcatatctccacgagaaattttagtagatgggtcacatg

SEQ ID NO: 260286 - DNA, 568 bp, Unknown
  Bacterial polypeptide expressing nucleotide sequence isolated from the Sargasso Sea
attgctaacggctggtgtggacgaagtaggcagaggtcctttggcaggaccggttgttgccgctgctgtaatattaaagctagacgaaaaaatagaggagttaaatgattctaaaaagctttctcctactaaacgagaaaatctagttgatacaataaaatctaattctatttcttggtctattggtatcagttctcaaatagagattgactctattaacattttacaggcttctttgcttgcaatgaaaagagcggttgaaggattaaaaatagtaccagaattagtcttaattgatggtaataaagccccagatttaggtatccaaacacagactattataaaaggtgatcaaagtgaaagatgtattatggctgcttcaattcttgcaaaggttcacagagataattatatgaaggatattgataagttttatccaaattacgggtttaaattacataaaggttaccctacaaagttgcatctagaagcattaaaatcatatggagtaactaaagaacatagactaagttttaagccagtaaagaatatatatgaatcaaattga

SEQ ID NO: 260287 - DNA, 433 bp, Unknown
  Bacterial polypeptide expressing nucleotide sequence isolated from the Sargasso Sea
tatgaaagaagtaattatttatactgatggagcttgtagaggcaatccaggccttggtggatggggtgttttaatgcagtatcatgatgaaaataaagagttatatggtggtgaaagaaatacaacaaataacaaaatggagttaagtgccgtgattcaaggacttggcgcattaaaagaaccttgtcaggtaaaactttttactgattcaaagtacgtaatggatggaattaattcttggattcacaattggaaaagaaataattggaaaactgctaataaaaagcctgttaaaaacaaagagctttgggttgagcttgataagttagttcaaaaacataatatttcatggaattgggtaaaaggtcactctggggatccaggtaatgaaaaagcagatgcactagcaaatttaggaatagaagatctttga

SEQ ID NO: 260288 - DNA, 616 bp, Unknown
  Bacterial polypeptide expressing nucleotide sequence isolated from the Sargasso Sea
atgcctgactggagttatgaggatgcggctaatcgtgatggccacgacattgtagtaggtgtcgatgaagctggccggggtccactggccggccccgttgtagcggctgcggtaattttggagcgggatcaactttctgccgtcttgcgagaaggtcttgatgattcaaaaaaaattagagcgactatgcgagcggagctatttcaagaactaaaatgcacggccagatacggtattggtaaagcgagcgtccatgaaatcgatacccaaaatattcttcgggcaacccttcttgcaatgtcccgtgctgtctccaatatcaacaagccagcccctcaatatgcgcttgtcgatggaaatcatgagccaatattagattgccccgtgcgatgtgtaatcaagggcgatagtcattcattttcaatagcggccgcatccattattgctaaggttgcgcgtgatcagattatgcgggatttggatgcttattatcctggttatggttgggataggaactctggctacggaaccccagaacaccaaaacgcgatcctccgcttaggtataactgcagaacatcgaaaaagctttgcgccgatccgcaacatgttgtgaa

SEQ ID NO: 260289 - DNA, 583 bp, Unknown
  Bacterial polypeptide expressing nucleotide sequence isolated from the Sargasso Sea
ttgaaaaatcgaaaaaattttaaaattatcgctggagtagatgaggttggaagaggatgtttggctggtccagttgtttctgctgcagtaattttaaaaaaaggagttctaataaaaaacttaaaagactcaaaaaaacttacttttgaacaaagaattgaggtgtctaaagatattaaaaaaaactctttcttttcaattggtgtggcttccgtcaaagaaattgaaaaactaaatattttacaagcgtcgctattatcgatgaaaagagctattttgagtttatctagaaaaccagatttgatactcgtagatggtatatttgctcctcaagtttttaataaatgtaaaaccgtagttaaaggtgatgaaaaaattaaatgtattagtgctgcatctatattggcaaaagtttatagagataaaataatgattaaaatgtcaaaaaaatataaaaactattcttggaataaaaactttggttacggaaccaaacagcatatattaggattaaaaaagtatggtttaacaacaatgcatagaaaaaattttaaaccaatacacaagatgttgttaaaataat

SEQ ID NO: 260290 - DNA, 640 bp, Unknown
  Bacterial polypeptide expressing nucleotide sequence isolated from the Sargasso Sea
atgcgcgtcctgcagaagatattcagaccgacacttgagtttgaaaatgcggcttatagccgcggattcagcaagattgcaggtatcgatgaagcaggaagaggaccgcttgcaggaccagtcgttgttgctgcagttattttaggaaaaaattggaataccgagtttgagatcaatgattcaaagcagcttaccgctaaaaaaagacagaagctgttcgacttgatttgtgcagaatcttcggcatttaagatagtctcagtttctccgcaggaaattgaccggctaaatatcctgcaggcaacaatgttcgggatgcagcgttgttcagctgaaattgagcctattccggattatctgctggttgacggtaatcgttatcccgtcactaacatccagggtcaggcaatagtgaaaggggattgtctttccaaaagtattgcagcggcttcaattttggcgaaagtgacacgggacaggaagatggttgaatttggggaaaagtatcctcaatggggctttgagcgtcacaaaggatatcccaccagtcagcacagggaagcaattgccgagcatggactgtctccaattcacaggcgttctttcaggctcaaaccagtacagactaatttgctttgac

SEQ ID NO: 260291 - DNA, 337 bp, Unknown
  Bacterial polypeptide expressing nucleotide sequence isolated from the Sargasso Sea
gcggtgatcggcggcgatgcactgatcaagagcatttcggcggcgtcgattctcgccaaggtcacgcgcgaccggatgctgctcgaattgcatcaaacctatccggtttacggctttgacgcgcatgccggctatggcacaccgcagcatcttgccgcgctgcgcgaacatggcccttgcgagcatcatcggcgttcgttcgcgccggtgcgtgaagcgcagctgcgcttcggcatggctttgaagccgccgctgggcgacgtgatcgtcgtgcccggcacgctcgccgacgccatgctcgacgacgacgctttcggcgaacgcagcggcgcctgag

SEQ ID NO: 260292 - DNA, 556 bp, Unknown
  Bacterial polypeptide expressing nucleotide sequence isolated from the Sargasso Sea
tttgaaaaaaaatcttattgcaggcactgatgaagttggtagaggttgtctagcagggcctgttgttgctgcagcagtaatcttgaaaaataaagtagataatctaaatgattcaaaaaaattatctacgaaaaaaagaaatttattatcaaaaaaaattcttgaaaattcttactatgggtttgggatagtttctaataatgaaattgataaaattaatattctgaatgcttctttattagcaatgaaaagagctatactaaacttaccaataaaacctgctttggttttagtcgatggcatatataaacctgatttaaatattccaatgaagactattattggaggtgattctattgaagatgcaattagtgcagcttcaataattgctaaagtatacagagataaccttatgattgaatacaataataaatatcctgattataattttaaaaaaaataaaggatatggaactaaggagcatttttttgcaattcaacaaaaggggatttgcacaattcatagaaaatctttcaagggtgttttgaataaatga

SEQ ID NO: 260293 - DNA, 448 bp, Unknown
  Bacterial polypeptide expressing nucleotide sequence isolated from the Sargasso Sea
atggaaataaaaatttatactgatggtgcatgcgtaggcaaccctggaccaggaggttgggccgctgtaattttaatcgataataaaaaagaagaaatttttgggggggaaaaattaacaacaaataatcgaatggaattaactgcagcaattaaagctttggagcattgtgttagtgcagatggttctcaaccttcattaaaacaaattaaaatatatacagattcttcttatgtaaaagatggaataactaactggattaataattgggaaaaaaataattggaaaacagcagacaaaaaaaatgtaaaaaatgtggacctttggaaaaaacttaaagaacttagtagtttaaatcaaattgagtggttctgggtgaaaggtcattcgaataatcctatgaatgaacttgctgataaacttgcaaaaaaagctacgccaatttagt

SEQ ID NO: 260294 - DNA, 610 bp, Unknown
  Bacterial polypeptide expressing nucleotide sequence isolated from the Sargasso Sea
atggatctattagaatatgagaccaaagcgattgctaaaggttacgggaatattgcgggtattgatgaagcagggcgggggccccttgccggacctgtggtcgctgccgctgtaatctttgctactaaagtcgatatagctggcttggatgattcgaaaaagctttctcccaaaaaacgtcaagagttgttcccgcaaattcaggccaaggcgagtgcttatggaatcgccattgtcaatcgggaggtgatcgatgaaatcaatattttgcaagcgtctcgattggctatgaagcaagctgtagaacagttacagccaattccggatctattactcatcgatggaagtcaaaaaatagattcttctctggatcagtgggcaattgtgaaaggtgattccaaaagcttttctatcgccgccgcatcggttcttgctaaagttactcgtgatcggattatggaagattatcataaggtttatccacaatatgagtttcatcgccataaagggtatggcacaaaactgcaccgagcgctcatcgaaaaacacggaccttgtccaattcaccgtagtacttttaagggtgttttagaattcataaactcataaa

SEQ ID NO: 260295 - DNA, 598 bp, Unknown
  Bacterial polypeptide expressing nucleotide sequence isolated from the Sargasso Sea
aatgattgaatttgtgtatccgcatacgcatttagtggcgggtgtggatgaagtcggacgcggccctttggtcggcgcggtcgtcactgctgccgtcattctggatccggctcgccctattatcggtcttaacgactcaaaaaaactgtcagaaaaacgtcgcctggcgctgtttgatgaaattaaagaaaaggcgttaagctggagcctgggtcgggcggaaccgcatgaaatcgacgaactgaacattttgcatgctaccatgctggccatgcagcgtgcggttgcgggtctgcatattgtgcccgaatacgtgctgattgacggcaatcgttgcccggcattaccggtaccgtcgatggcggtggtcaaaggtgatagccgcgtggcggagattagcgccgcatcgattctggcaaaagtgatccgtgacgctgaaatggcggcgctggatacggtttttccacagtatggttttgcacagcacaaaggttatccaaccgcatttcatctggaaaaattggcactgcatggtgcgactgagcaccatcgccgcagctttggccccgtcaaacgcgcactgggactctcgtcctga

SEQ ID NO: 260296 - DNA, 225 bp, Unknown
  Bacterial polypeptide expressing nucleotide sequence isolated from the Sargasso Sea
caaaaagtatttcatcagcatctattattgctaaagtttctagagacaatctcatgaaaaatcaaatatcaaataattatccaatgtataaatttgaaaaaaacaaaggttatggaactaaagaacatatggatgctataaaaacttttggaattacaaagcaacatagaaagtcttttgagcctataaaaagtatgatagaaaataatcatgaagcaaattaaa

SEQ ID NO: 260297 - DNA, 517 bp, Unknown
  Bacterial polypeptide expressing nucleotide sequence isolated from the Sargasso Sea
ttgattgaagcgggtgtagatgaagcagggcgaggccctttggcaggtccagtttttgctgctgctgtaatattagataaagagatacaaattgaaggattaaatgattcgaagaagatttcggaaaaaaaaagagagtcaattgctcaagaaattaaagaaaacgccattgcatggtcaataggtataagctcttccgaagaaattgatgaggtaaatattttaaaagcaactttaatagctatgaaaagagctattgaaggtttaaagatattacctgacatcgcacttattgatggacagcatgcacctcaaactgtgtgtaaagtgcgaacaatagtgaaaggagaccaatcaaaaaaaaatattatggctgcatcaattcttgctaaggtaagcagagacaactatatgaaagaaattgatgataaatatcctgaatatggttttgaacaacacaaaggttatcctacaaagatgcatctagaagcattaaaattatacggcattacaagtg

SEQ ID NO: 260298 - DNA, 426 bp, Unknown
  Bacterial polypeptide expressing nucleotide sequence isolated from the Sargasso Sea
aaaaaagaaatttattatcaaaaaaaattcttgaaaattcttactatgggtttgggatagtttctaataatgaaattgataaaattaatattctgaatgcttctttattagcaatgaaaagagctatactaaacttaccaataaaacctgctttggttttagtcgatggcatatataaacctgatttaaatattccaatgaagactattattggaggtgattctattgaagatgcaattagtgcagcttcaataattgctaaagtatacagagataaccttatgattgaatacaataataaatatcctgattataattttaaaaaaaataaaggatatggaactaaggagcatttttttgcaattcaacaaaaggggatttgcacaattcatagaaaatctttcaagggtgttttgaataaatgac

SEQ ID NO: 260299 - DNA, 349 bp, Unknown
  Bacterial polypeptide expressing nucleotide sequence isolated from the Sargasso Sea
attgaatattcttcacgctagtttattagcaatgaagagatcaataaaaaaacttaaaaaaaaaccaaagctagtattaattgatggaaataatttgcctaaaattaaaaactacaagcttaaatccataataaaaggggatcaaaaaatagcttctatttcagcagcctcaataattgctaaagttacacgtgataaaataattactaatcttggaaaaagatttaaaagatataaatggaataaaaattatggatatggaaccaaacaacacattaatgcaataaaagttttaggaataacgcctcatcaccgaaagtctttttcaccaattaataaattgaaataa

SEQ ID NO: 260300 - DNA, 433 bp, Unknown
  Bacterial polypeptide expressing nucleotide sequence isolated from the Sargasso Sea
gatgaaaactgtaattatttacactgatggagcctgcagaggcaatccaggacctggtggttggggagtacttattgaatatggcgaattaagtaagcagctttatggaggagatgtttctactactaataataagatggagctaacagcagcgattatggctcttaaagaaataaaagaaccttgcgaaatcatcctttacacagattcaaaatatgttcttcagggcattgaagagtggatacataactggaaaaaaagagactggagaggcgcaaataagaaaccagtaaaaaatattgatctttggaaagaattagatgaacttagagataaacataatataaaatggaactgggtcaagggtcattcaggtgatccaggcaatgaaactgcagacatgcttgcaaatagaggtatagacgaactttaa

SEQ ID NO: 260301 - DNA, 577 bp, Unknown
  Bacterial polypeptide expressing nucleotide sequence isolated from the Sargasso Sea
atgccatccttagattttgaattagaggcatttcagcaaaatcacacgtacgtagcagggttagatgaagttggtagaggaacaattgcaggaccagtggtttcaggagctgtcatattagatttaaacaaacactacgaattttatgaagaaattaatgatagtaaaaaactaacctcaaaaaaacgtacttcactgagtatattaataaaaagattttctttaacctatggaattggtatttcttcagcaaaagaaattgataatattggaatagttcctgcaacaaaactttctatgattagagcaataaatcatctgaccccaaaaccagaatatttactaatcgacagtttagaaataccggaaattaatatagatcagaattcgttaatcaaaggagacaatatatcaatatctatcgctgcagcgtccataattgcaaaggttgcaagagatagaatgatggaaaaatacgataaatattttcctaattatagctttaaaagtcataaaggttactatacaaaatcacacgcaagtgaactaatacaaaaggagttactaaatccaccga

SEQ ID NO: 260302 - DNA, 625 bp, Unknown
  Bacterial polypeptide expressing nucleotide sequence isolated from the Sargasso Sea
attgccagatttcagccttgaagaaagtcttggtttatcaaccagtgcagtaatcgtaggggtagacgaagtggggagaggcccattagcgggaccagtcactgctgcagctgttgttgttgatagacaaaaaatcacattggacttattgaccaaaatagatgactcaaaaaaaatttcccaaaagaagcatgcaacaataagtaagcaaattgagagcatcgcaattattggtataggatgggcaagtagcggcgaaatagatcagctgaacatcctcgaggccactatgctcgcaatgcaacgtgcgatttcttccctacggaaacaaattatttcggatccggactatattttaatcgatgggaataaggttccacgtttagattttccatcgaaggcgattgtgcgcggcgatgaaaaatccctctctatagctgcagcctcaatagtcgcaaaaaacaaacgagatgcattcatgacctcgctttcaaaactgtatcctgggtacggatgggagaagaatgcgggctatggaacaggtgagcatctggccgctatcgagcgtgaggggataacggttcatcatagaagatccttcaagccaatcgccaaatatttgtga

SEQ ID NO: 260303 - DNA, 466 bp, Unknown
  Bacterial polypeptide expressing nucleotide sequence isolated from the Sargasso Sea
catgctaaaaaagatcgatttgtatacggatggttcctgtctcggcaacccaggccctggcggctatggtgccgtcatggtctatggcaagcaccgcaaggaactcgccggcggttttcgcctcaccaccaacaaccggatggagctgatggccgccatcatggggctgcgcaccctgaacgagccctgccaggtcagactcaccaccgacagccagtatgtgcgccaggggatcacccagtggatcatcggctggaagaagaaggggtggatgactgccagccgccagccggtcaagaacgtcgatctctggcaggcattggatgcggaagtggcgcgccatcaaatcgaatggctctgggtcaaggggcactccggtcacccggaaaacgaacgttgcgacgagctggcccgcgaggctgccagcggcaagcagttggctgaggataccggctaccagccctga

SEQ ID NO: 260304 - DNA, 843 bp, Unknown
  Bacterial polypeptide expressing nucleotide sequence isolated from the Sargasso Sea
cgctcgcggccgcggcgccgccgccgccgatgcgttcggtggcgacgaaggccaaggcgacggagaacgatgccgcgggggcgaacggcgcggcgggcgacgccaaggcgacgaagacgacgtctcgtgggcgtaagacgtctaaaccggcgacgttcgaggcgtcgccggcgaaacgggcgaagaaagcgacgggaccgggaccggatcgatcgcacgagaagaagcactgggaggctggacgtcatcgcgtcgtcggtgtggacgaggcggggcgaggtccgttggcgggaccggtggtggcggcggcgtgctacgtgccgaaggattgcgtcgtcgattgcgtcaacgattccaaacagctcactgaggagggacgcgacgagatttttgaggaattgatggcgaataaggacatcgagtacggcgtgtgcgtcatcgatcaggaccgcatcgacgagattaacattttggagtgcacgatggaggcgatgacgaagagcgcggcggacgtgccgaacgtggactgggtattgatcgacggtaaccgcgtgccgaaaccgttggagggtaaggccgaggccatcgtcaagggagacgcgaagaacgtcgccatcgccgcggcgtccatcatcgcaaaggtgacgcgagaccgcatgatgttggaaatcgacgaggagtttccgatgtacggtttcaaagaccacaagggatacggcaccaaggcgcacatggccgccatcgacaagtacggtccgtgcatctatcaccgcaagacgttcgccccgatcaagcacatggacctctccaagtggcccgactgcatgaaaaagaaggactaga

SEQ ID NO: 260305 - DNA, 433 bp, Unknown
  Bacterial polypeptide expressing nucleotide sequence isolated from the Sargasso Sea
atgaaaactgtaattatttacactgatggagcctgcaggggtaatccaggacctggaggttggggagtacttattgaatatggcaaattaagtaagcagctttatggaggtgatctttctactaccaataataaaatggagctaacagcagccattatggctttaaaagaaattaaagaaccttgcaaaattattctttacacagactcaaaatatgttcttcaaggcattgaagagtggatacataactggaaaaaaagaggatggagaggcgcaaataagaaaccagtaaaaaatattgagctttggaaagaattagatgaacttagagatgaacataatataaaatggaactgggttaagggtcattctggtgatccaggcaatgaaactgcagatatgcttgcaaatagaggtatagacgaactttaaa

SEQ ID NO: 260306 - DNA, 433 bp, Unknown
  Bacterial polypeptide expressing nucleotide sequence isolated from the Sargasso Sea
aatgaaatacaaaatatatacagatggagcatgttcgggcaatcctggccctggtggttgggctgttataattctggttaacaatgaaataaaagaaatgttttttggaagtgaaaaaaatacaaccaacaatcaaatggaacttttagctcccattaaagcaattcaaaaatttaaaaagaaatcagaaatttcaatttttaccgactctacttatgtaagagatggaatcacaatctggattaagcagtgggaaaaaaatgggtggaaaactgcgtcaaaaaaacctgtaaaaaataaagagttgtggaaaaaattaaaaaatttatcttctaagcattctataaaatggatttgggtaaaaggccatgcccaggacaaatataataatcttgttgacgaacttgctcaaggagctataaaaaataaatga

SEQ ID NO: 260307 - DNA, 322 bp, Unknown
  Bacterial polypeptide expressing nucleotide sequence isolated from the Sargasso Sea
actaataaccagatggagttattggcagcaatatccgctctggaagctttggataggccaagtaaaatcaaaattattaccgacagttcttacgtcaaaaatggtgtgacccaatggttagaaaattggaaaaataataaatggaaaacagcatcaaaaaagccagttaaaaatgccgaattatggcgcagattagaccaagctaaatcaaggcatgaagttatctggaagtgggttaaaggacatgcgggacaccctgaaaatgagagagcagatgaattggccagaaaagggatgcagccattcaaaaatcagagttagc

SEQ ID NO: 260308 - DNA, 607 bp, Unknown
  Bacterial polypeptide expressing nucleotide sequence isolated from the Sargasso Sea
attgaaatttgaccctcataaattaattgcttttgaaaataacttttccttgcccattgctggtattgatgaagttggtagaggtccacttgctggtccagtaattgcagcagccgtaatacttgatagaaaaaatattccagaaggaattaatgactctaaaaaaattcctaaagctaaaagaatattgttagcagaaaagataaaagagaatagtatttatgcctatggagccgcatccgagatagaaatagatgagatcaatatcttacaagcttcattattagcaatgaaaagagcgagtgatagactatcagtcgttccgaaaacaacacttatcgatggtaatttcaaaccagatataaaaaacaacaccattagtattattaaaggagatagtaagtctgtttcaattgcagcagcatccattcttgctaaagtttatagagacgaaattatgcttaaatattcaaagcaatttccagaatatggctttcaaaccaattcaggttatggaacaaaagagcacctttcagctctaaaaaactatggaattaccccaatacatcggaaatcttttaaaccagtacacaatatattgaattaa

SEQ ID NO: 260309 - DNA, 473 bp, Unknown
  Bacterial polypeptide expressing nucleotide sequence isolated from the Sargasso Sea
agggttaaatgattcgaagaagatttcagaaaataaaagagagtcaattgctcaagaaattaaggaaaaggccattgcatggtcaatagggacaagctctattaaagaaatcgatgagataaatattttaaaagcaactttactagccatgaaaagagctattgaaggtttaaaaatatctcctgatatagcacttattgatggacaacatgcacctcaaactgagtgtaaagtgcgaacaatagtgaaaggggatcaatcaaaaaaaaatatcatggctgcatcaattcttgctaaggtaagtagagataaatatatgaaagaaattgatgttaaatatcctgaatatggttttaaacaacacaaaggttatcctacaaagatgcatctagaagcattaaaattatacggagttacaagcgaacatagattaagctttaaacctgtaaagacaataaatgaaccaagttgaa

SEQ ID NO: 260310 - DNA, 568 bp, Unknown
  Bacterial polypeptide expressing nucleotide sequence isolated from the Sargasso Sea
attgattgaagcgggtgtagatgaagcagggcgaggccctttagcaggtccagtttttgctgctgctgtaatattagataaagagatacaaattgaaggattaaatgattcgaagaagatctcagaaacaaaaagagagtcaattgctcaagaaattaaagaaaaagccattgcatggtcaatagggataagttcttccgaagaaattgatgaggtaaatattttaaaagcaactttaatagctatgaaaagagctattgaaggtttaaagatatttcctgatatcgcacttattgatgggcaacatgcacctcaaactgattgcaaagtacgaacaatagtgaaaggagaccaatcaaaaaaaaatattatggctgcatcaattcttgctaaggtaagcagagacaactatatgaaagaaattgatgataaataccctgaatatggttttaaacaacacaaaggttatcctacaaagatgcatctagaagcattaaaattatacggcgttacaagtgaacatagattaagctttaaacctgtaaagataataaatgaaccaagttga

SEQ ID NO: 260311 - DNA, 244 bp, Unknown
  Bacterial polypeptide expressing nucleotide sequence isolated from the Sargasso Sea
aaagaagagtcgattataaaaggagatcaaaaatcaatttctattgctgcagcatcgattattgcaaaaatctacagggatagattgatgaatattctttcacaaaaatataaagattttaattgggatcataatgcaggctatggtacaaaaaaacatattgaagaattgacaaaaagaggacctactattcaccatcgaaaatcttttgaaccaataaaatcaattatttttagtaattaaa

SEQ ID NO: 260312 - DNA, 250 bp, Unknown
  Bacterial polypeptide expressing nucleotide sequence isolated from the Sargasso Sea
cttgaacgactcattcgggatcgacgttgtcgacatctacaccgatggtgcctgctcaggaaaccccggccccggcggctggggggccctcctaatttttggcgaacacgagaaagaaataagcggcggcgagcacaagaccacgaacaaccgaatggaattgcaggccgccattgaagctctcaacgcgctcaagcgaccgatgaaggtgcgcctgcataccgatagcacctaccttcgtgacggcatc

SEQ ID NO: 260313 - DNA, 648 bp, Unknown
  Bacterial polypeptide expressing nucleotide sequence isolated from the Sargasso Sea
tatgtttgaattcgataaaaaatatttttctaaatttaatatagtagcaggtgttgatgaggctggaagaggtccgcttgctggtccagttgtggcttcggctgtcatttatgatagtggtatatatattgagggggtagatgactctaaaaaaatatcagaaaagaaaagagaagtgtactataaagagataatgtctaaagcaaagcatgtgggagtcggcattgttttccaagaagaaattgataaaatgaatatattaaatgctaccaaagaggctatgaggaaagcgattcaaaacttaaccgttaaacctgaattagtccttgttgatggaaatcaaattgaattttcagattacaatcaagaaagtattattaaaggtgatgcaaaaagtttctctattgcttcagcttcaatcgtagcaaaagtaacaagagataaaataatggaaaattatagcaagctgcttcctgagtatggatttgaaaatcataagggctatggcacaaaaaaacatcttgaggcgattagtaaatataggtcatcaatcattcatagaaaatcatttaaaccaataagtgagcatatgcctaccttcgattattactttaaaaataaagccgtagatagattgcttattcaaat

SEQ ID NO: 260314 - DNA, 442 bp, Unknown
  Bacterial polypeptide expressing nucleotide sequence isolated from the Sargasso Sea
aagagaaaaattatttttattttttaaaaaattacaaaaagaaaaaaagcttcaatattacttaggctacgctagcgtagaagaaatagatacaattaatattttggaagcaacaaaattatcaatgaaaagagtagtagataaatttaattttgaaaatccacatcttattattgatggaaacttttcattaaattatcaaaatgaaaaatctataataggcggcgataaaaaatctttatcgattgcaagtgcatctattattgcaaaaattcaccgtgatcgactgatgagtatacttgatagtaagtttacattttatgattggaaaaaaaatgcaggctatggaactaaaaaacatattgatgcaatacacaaatacggtgtaactcaatttcaccgaaaatcgtttgaaccaattaaatcgttatttaaaaaataa

SEQ ID NO: 260315 - DNA, 370 bp, Unknown
  Bacterial polypeptide expressing nucleotide sequence isolated from the Sargasso Sea
agaaatagaaaaattaaatattttaaatgcaagtttattggctatgaaaagagcaataaaaaaattaagcagaaaaccttctcttgtattaattgatggtaataaaattccaaaattaaaaaattataatttaaaatatgtgatcaaaggagacgaaaaaatacccgagatatctgccgcatctataatcgctaaggtcaccagagatagacttattacaaaaatgtcaaaaaaatttattaaatatgcttgggataaaaacgctggctatggaactaaacaacatttaagagcaattaaaaattttggtgtaactaaacaccatagaaaaacctttggtcctatacacaacatattgagtcctaattaa

SEQ ID NO: 260316 - DNA, 451 bp, Unknown
  Bacterial polypeptide expressing nucleotide sequence isolated from the Sargasso Sea
atgacttcacaaggcagcggcgataaccacgtcgagatttacaccgacggcgcatgcagcggcaatcccggtcccggtggatggggcgcaatcctgcgctttaaaggtgtcgaaaaggaattgtcgggtggtgatcctgaaaccaccaacaaccgcatggaaatgatggccgccatcagtgcgctggaagcccttaaacgtccgtgcgtcgtcgatatttataccgatagcagctatgtccgtgacggcattacgaaatggattttcggctggcagaaacgcggttggaaaaccgcggacaagaagccggtgaagaatgtcgaactgtggcaaagaatgcttgatgcgttgcgcccgcataaagtcgagtggcattgggtcaaaggccatgccggccaccctgaaaacgaacgttgtgatgaactggcccgaatggctgttccaaaatagt

SEQ ID NO: 260317 - DNA, 574 bp, Unknown
  Bacterial polypeptide expressing nucleotide sequence isolated from the Sargasso Sea
aatgaaaaaaatcattgctggagtagatgaagttggaagagggagtttagtaggacctgttcttgcggctgctgtaatatttagaaataatgtagataaagaaaagttcaaagattcaaaacagctttcaaagcataaaagaaattttttagaaaaatatattaaaaaaaattgtatctggtcaattggttcagcatctttaaaagaaattgaaaaattaaatatattaaatgcaagcttattggctatgaaaagagctgtaaaaaaacttaaatcaaaacctactatggtgctgattgatggaaacagatctccagatttaaaatgttataaaataaaatgcataattaaaggcgatcaaaaaatacctgaaatatctgcggcatctattgttgctaaagttactagagatagacttattacaaaaatgtcaaaaaaatttaataaatacgcctggaataaaaacgcgggctatggaactaaacaacatttaagggctattaagaaatttggcgtaaccaagcatcatcgaaaaacttttggtcctatacacaatatattgagtcccaattaa

SEQ ID NO: 260318 - DNA, 535 bp, Unknown
  Bacterial polypeptide expressing nucleotide sequence isolated from the Sargasso Sea
tcctgttgtgagttgtggatgttatttttctaattataatgatttagaatcagaaatacccattactgactcaaagaaacatacagtaaaacaaagagaaaaattatttttattttttaaaaaattacaaaaagaaaaaaaacttcaatattacttagggtatgcaagtgtcgaagaaatagataaaattaatattttggaggcaacaaaattatcgatgagaagagcaatagataaatttaattttgaaaatccatttctcattattgatggaaacttttcattacattatcaaaatgaaaaatcaattataggtggagataaaaaatctttatcgattgcaagtgcatctattattgcaaaagttcaccgtgatcgactgatgagtatacttgatagtaagtttacattttatgattggaaaaaaaatgcaggttatggaactaaaaaacatattgatgcaatacacaaacacggtgtaactcaatttcaccgaaaatcgtttgaaccaattaaatctctattaaaaaaataa

SEQ ID NO: 260319 - DNA, 574 bp, Unknown
  Bacterial polypeptide expressing nucleotide sequence isolated from the Sargasso Sea
tacaattaatggacaagtagtaggaatagacgaggcaggaagagggccattggcaggcccagtctttgcagcatcagttatcctgaacaaaaagaaaataccttctggcatagacgactcaaaatctttaagccctgaaaaaagacaagctctttataaaaaaattactgaatcaagcatctatggcctttcaatgtcatctgttattgaaattgataggttgaacattcttcaagcaacactccttgcaatgcgaaggtcatatattaacctttcttggaaactatctacgctcccaagtcacgcattaattgatgggaatcaatcgccgaggctaccttgtaaaactattacaataataaagggggataaaaaatctaaatcaatagctgcagcttcaattattgcaaaagttagtcgagatcgatacatcaaatttttacattctatatatccgaattatgattggattaataatcaaggatattcatcaaagaaacataggcttggactgacaattttgggaccctcaccccaccatcgtcttacatttaagccactcaaatcaaaataa

SEQ ID NO: 260320 - DNA, 817 bp, Unknown
  Bacterial polypeptide expressing nucleotide sequence isolated from the Sargasso Sea
tcaaagaaattaagcgaaaaaaaaagagagcgtctttttggtgagatatttatttccgcaattgcaattggtattggtattgtgcatgaatcagagatagatgaagataatattttacaggctacatataaatctatgcgaaagtcactaggtaatctatctgtaaaaccagaagtaatattagttgatggaaataaagcggatataaagcattataggcaagagaatattgtaaatggagatcaaaaaagcttaagcatagcagcagcatctataatcgcaaaagtaacaagagatcgtataatgaagcaatatgatctagtttttcccaattatgcctttggaaagcataaagggtacggaactaaacagcatattgaggctattaagtttaacaaagctgttccaattcatcggaaaacttttaatcccgtgccaaaatatttacctacaatcgcattttataaacagaataatcttgtagatactttaggagttcagttagttgcttgtaaaatgattcgtttaaatagtacaattttagagatcaattataatctatcagatttaagaaaagttgatattattagtattgaaaaaaatattataaaatttactaatgtaaaaacttttacattcaatgataataaagaagctgaagcatttaatttttcagatagtgatagtggcaaagaagaagagttggctctatcttttatgaatgataataatttggacttagattataagtttcaaaatgctattataactattggaaaaggtgaacctgaaataacaggtattaatttagaaaaat

SEQ ID NO: 260321 - DNA, 417 bp, Unknown
  Bacterial polypeptide expressing nucleotide sequence isolated from the Sargasso Sea
gatgaaaagaatcgagatatataccgatggagcatgcagaggcaatcctgggcctggtggctggggcgctttactcaaatttgataatcacgaaaaagaaatttctggcggagagaaaaatacaacgaataatcgcatggagctcatggcagcaatcaaggctcttgataaggtgaaggagatgtgcgagatagatttatacacagattctaaatatgtgaagcagggcatcaccgagtggattatcaagtggaaagtaaatggatttaaaaattcaaaaaagaaacctgtagtcaatgctgatctttgggttcaattggatgatctcaccagtaaacataaaatcaattggttctgggttaaggggcatgcggggcatgaattcaatgagagagctgatttacttgcccataaggg

SEQ ID NO: 260322 - DNA, 442 bp, Unknown
  Bacterial polypeptide expressing nucleotide sequence isolated from the Sargasso Sea
atgtctaagatcaaaatctatactgatggtgcgtgctcaggtaatcctggcccaggtggatggggagcagtgataattaatgataatatcactaacgaactttatggatatgaaaaaaatactacaaataatagaatggagttattagcagtaataagatcacttgaatatttggaaaaaacaattgagatagaaatctttaccgactctacttatgtaatggaaggaataacaaactggataaagaattggaaaaaaaataactggcttaattcatccaaaaaaccagtaaaaaatgaagacttatggaaaaagctagataaattaacagtagataaagaaattaattgggtttgggtaaaaggccattccggcaatccaggtaatgaaaaagcagattatttagcaagaaaagcaattaaaagaggaatgagtgggtaaa

SEQ ID NO: 260323 - DNA, 622 bp, Unknown
  Bacterial polypeptide expressing nucleotide sequence isolated from the Sargasso Sea
tctgagtcacgagctaaaggcctggcgtgaaggatttagaaatattgccggggtggatgaaaccggaagggggcccttggctggaccggttgttgtttcagcagtgattcttggaagaaactggaacgaaaatcaccgactggatgattcaaaggccttaaaactgaaggaacgtgaagaactttataatattatctgtcaagaagcacttgctgtcagtactgtctcaatgagtgccgagttggtggaccgccttaatgttcttcaggccagtttacaggggatgaaaaaggctgtagaaagacttaaccctaaagctgattatgcgctgatcgatggaaaccgttatcctgaaatgaagcttccaggtgaggcactggtcaagggggattcgcgatcagccagtattgctgctgcatcgatcgttgggaaagtggttcgagaccgcgtcatgcagggcatggaatgtctttatcccagttgggggtttgagcgtcacaaggggtatccgactcaagaacaccgggaattacttcagaagaggaaaccgtccatgattcaccgccaatcatttcagtgtgtgggtaactctgaggatttaattcagccgtccctgttttga

SEQ ID NO: 260324 - DNA, 640 bp, Unknown
  Bacterial polypeptide expressing nucleotide sequence isolated from the Sargasso Sea
atgcgcgtcctgcagaagatattaagtccgacacttgagttagaaaatgcggcttatagtcgcggtttcagaaagattgcaggaatagatgaagcaggaagaggtccgcttgcaggaccggtcgttgtcgctgcagttattttaggaataaactggaataccacgtttgagcttaatgattcaaaacagcttaccgctaaaaaaaggcaggtgctgtatgacttgatttgtgcagaagcttcagcatacaaggtagtttccgtttctccgcaggagattgaccggttaaacatactgcaggccacaatgtttgggatgcagcgttgttcggatgaaattgatccttctccagattttctgctagttgatggtaatcgttatcctgtcacgaacatccaaggccaggctgtagtaaaaggagattgcctttccaaaagtattgccgcggcttcgattcttgcgaaagtgactcgtgacaagaagatggttgaatttggaaaagagtatccacaatggggcttcgagcgccacaagggataccccactaaggagcacagggaagcaattgctgagtacggactttctccaatacacaggcgttctttcggcccaaaaaccgaacagatgagtttgctatagc

SEQ ID NO: 260325 - DNA, 364 bp, Unknown
  Bacterial polypeptide expressing nucleotide sequence isolated from the Sargasso Sea
tttgagagaatcaagcttcgttgaaatctatactgacggcgcctgtcgtgggaatcccggtccaggcggatgggccgccctgcttagatttaatggcgctgaaaaaataatatcgggtgccgaagaagaaaccacgaataatagaatggagttgatggcggctattcatggtttagaagccttgtctagagcgtgctcggttaaactaacaacggattcaaagtatgtaatgcagggaattacctcttggcttactacatggaagggaaataattggaagacgagccaaaaaaaaccagtgaagaatgttgatctgtgggcaaggctcgattcgtcggtggaaaaacatcgagtcgaatggtgt

SEQ ID NO: 260326 - DNA, 433 bp, Unknown
  Bacterial polypeptide expressing nucleotide sequence isolated from the Sargasso Sea
catgaaagaagtaattatttatactgatggagcttgtaggggtaatccaggccttggtggatggggtgttttaatgcagtatcataatgaaaataaagagttgtatggtggtgaaaaaagtacaacaaataacaaaatggagttaagtgcagtaattcacggacttggcgcattaaaagaaccttgtcaggtaaaactctttactgattcaaaatacgtaatggatggaattaattcttggattcacaattggaaaaaaaatgattggaaaactgctaataaaaagcctgttaaaaacaaagagctttgggttgagcttgatcagttagttcaaaaacataaaatttcatggaattgggttaaaggtcactcaggggatccaggtaacgaaagagcagatgagctagctaatttaggaatggaaggtctctaa

SEQ ID NO: 260327 - DNA, 514 bp, Unknown
  Bacterial polypeptide expressing nucleotide sequence isolated from the Sargasso Sea
tgttctgccgcggtcatccttgaccctcaaaatcctattgaagggcttactgactctaaaaagctcagtgaaaaaaagcgcgtggcgcttgcccaagaaattcgtgaaaaagccctgtactggaatattggtagagcgagccctgaagaaatcgataagcttaatatactgcacgctaccatgctcgccatgatacgcgcggtagaaggcctgcctgtaaagcctgactttgtgcgggtagatggtaatcggctgccggcctggaattttgactctgaagccgtggtgaagggagatagcctgcacgcagagatttcagcggcatcaatcattgctaaagtagagcgagacaacgatatgatttcgcttcacgaagcctttccgcagtacaattttgcggggcataagggttaccccaccaaagcgcattttgaagccattgcagagtatggcattttagattgctaccgtaagagttttaagcccgttaaagcgttacttgaagagaaataac

SEQ ID NO: 260328 - DNA, 627 bp, Unknown
  Bacterial polypeptide expressing nucleotide sequence isolated from the Sargasso Sea
aatgagtcttaaaaattatcatttgaaagaaggtattgaagcaggttgcgatgaagctggaagaggttgtcttgcaggaccagttgtagcagctgctgtcattctagatcctagaaaatggaactctgcgctcaacgattccaaaaagcttagcgaaaagcaacgtcacaaactgcgtctatggattgaagaaaatgcattggcttggtcagtaagttttgtaaatgaaaaaaaaattgatgaaatcaatatattgcatgcttccattttggggatgcacctagctttggataatttgaaccattcctttgatcgaattctagtagatggaaataagtttaaaccctacaaaaacatcgaacatcattgcatggtgaaaggagatgcacgatttaggtccatcgccgcagcttctatcctcgcgaaaacccatcgagatcaatttatgctgcaattgcacgaaaaatatccagaatatggttggaatcaaaacaaaggttacccaacaaaaatgcacagaaaagccatcaaatcaaatggtagtaatatacatcatagaattagcttcaaaactacttccagatcaactcagtttgatactgtaggcttttttactaaagaaagaaa

SEQ ID NO: 260329 - DNA, 340 bp, Unknown
  Bacterial polypeptide expressing nucleotide sequence isolated from the Sargasso Sea
tttggaagcaacaaaactatcgatgaaaagagtaatacataaatttaattttgaaaatccccatcttattattgatggaaatttttcattaaattatcaaaatgaaaaatccattataagtggtgataaaaaatctgtatccattgcaagcgcatctattattgcaaaagttcaccgtgatcgactgatgagtatacttgatacaaaatttaaagtttatgattggaaaaaaaatgcgggatacggaactaaaaaacatattgaagcaatacataaacatgggataactaattttcaccgaaaatcttttgaaccaattaaatcccttttaaaaaaataa

SEQ ID NO: 260330 - DNA, 448 bp, Unknown
  Bacterial polypeptide expressing nucleotide sequence isolated from the Sargasso Sea
atggaagtaaaaatttatactgatggtgcatgcataggtaatcctggcccaggaggttgggccgctataattttaatcgataatagaaaagaagaaatttttgggggagaaaaattaacaacaaataatcgaatggaattaactgcagcaattaaagctttggagcattgtgttagtgcagatggttctcaaccttcattaaaacaaattaaaatatatacagattcttcttatgtaaaagatggaataactaactggattaataattgggaaaaaaataattggaaaacagcagacaaaaaaaatgtaaaaaacgtggacctttggaaaaaacttaaagaacttagtagtttaaatcaaattgaatggttctgggtgaaaggtcattcaaataatcctatgaatgaacttgctgataaacttgcaaaaaaagctacgccgatttagt

SEQ ID NO: 260331 - DNA, 637 bp, Unknown
  Bacterial polypeptide expressing nucleotide sequence isolated from the Sargasso Sea
gggttgggtgtgatagggcagagcatggcgttgtctgaagagaagattgctggagtagatgaagcagggcgtggtccattggcgggtccggtggttgctgcagcggtgatcttgccccagtcacacagtattcatggtttggcagattccaaggcgctttcggtgcgcgcacgcgagcggatttatcagacaattattgagcatcatatggtggtgtggtcagtagcagtagtggaggcggcagtgattgatgaaatcaatatactgcaggcgactttacaggccatgcgtcaggctgtgatgcagttatgcaaggtgccgagtgcggtatgggtagatggtcgtgattgcccggatgttcccatggaatgtcgagccattgttaagggggatcagtgcgttgaggctatttctgcggcgtccattgtggcaaaagtaacacgagaccgcttaatgggagagtatgcggagcagtatccacaatatggattgatgcaacacaaggggtatggtacgaagcagcacctgcaagcgctgaagacatacggtccgtccccgattcatcgcagaagctatcgtcctgtcatggaagccatgcgggcacatgatatgtctgaggttgcacatggatcctagt

SEQ ID NO: 260332 - DNA, 562 bp, Unknown
  Bacterial polypeptide expressing nucleotide sequence isolated from the Sargasso Sea
atgaaatttattgctggggtagatgaagttggacgtggaagtttaattgggccagtgtatgctgcagcagttattctaaatagatctattaataaaagattattaagagactcaaagagtttaacaaaatctcaaagagaaattttatcaaaatatattaaaaaaaattctatttggtcaattggtaaagcttcagttagagaaattgagcaaattaatattcttcaagcaagcctattggctatgaaaagagctattaaaaaacttaaaaaaaaaccttctatcgtttttattgatggaaatacgttgccagatataaaaaattacaaactaagatcagtaatcaagggagatcaaaaaattccctcaatttctgcagcatctattatcgccaaagttacacgtgataaaatgataactcatttagcaaaaaaatgtaaagggtattattgggaaaaaaattatggatatggaaccaaacagcatttaaaagccattaaagatttaggtattacaagtgagcatagaaaaaatttttcaccaattaataaaatgaaataag

SEQ ID NO: 260333 - DNA, 435 bp, Unknown
  Bacterial polypeptide expressing nucleotide sequence isolated from the Sargasso Sea
tgtatgaggcaattcaagccaatgacaccatcatttcggccgtggccatggtcgaggcggcggtgattgatgagatcaatattcttcaggcgacgcaccgtgccatgaaccaagccctcgccggcttggggccgcctgcgaagcatgccctcgtcgatggacgtcctgtgccgtccctgaccttgccgcaaacggccattgtgaaaggggatgccaagagtttctcaattgccgccgccagtattctggccaaggtaacgcgcgaccggttgatggtgcaatatgatgaacaatttcccggctacggtttcgcgagccataagggctatggcaccaaggcgcatctgcttgcgattgaagaacttggggcgtgcccgctccatcggatgagttttgcgccgctgaaaaataatcagcccgatctttttgagtagc

SEQ ID NO: 260334 - DNA, 621 bp, Unknown
  Bacterial polypeptide expressing nucleotide sequence isolated from the Sargasso Sea
aaatagtggctgatttttcaatcgaaaaatcaattgatggaccagttattggtttagatgaagtaggacgtggaccattagcaggaccagttgttagttgtggttgttattatctaaattatgatgatttaaaatcagagattcctataactgattctaaaaaacatacaccgagacaaagagagaaattatttttattttttaaaaatctacaaaaagagaataaacttcaataccacttggggtatgccagtgtagaagaaatagataaaattaatattttggaagcaacaaaattatcaatgaaaagagtgataaataaatttagtattgatagtcccaatattattattgatggaaatttttcattaaattataaaaatgaaaaatcagtcattggaggagataaaaaatcattatctatagcaactgcttcaattatagcaaaagttcaccgcgatagactaatgaatattcttgatagtaagtttaattattatcattggaaaagtaatgctggttatggaacaaaaaaacatatcgaggcaattcataaacacggtataaccctcttccatcgaaaatcttttgaacctattaaatcgttattaaataaataat

SEQ ID NO: 260335 - DNA, 553 bp, Unknown
  Bacterial polypeptide expressing nucleotide sequence isolated from the Sargasso Sea
acgtggaccattagcaggacctgttgttagttgtggttgtcattatctacattatgatgatttagaatcagagattcccatcactgattcaaaaaaacatacaccaaaacaaagggagaaattatttttattttttaaaaagctacaaaaagagaataaacttcaatattacttaggctatgccagtgtagaagaaatagataaaattaatattttggaagcaacaaaattatcaatgaaaagagtgataaataaatttagtattaatgatcccaatcttattattgatggaaacttttcattaaattataaaaatgaaaaatcagtcattggaggagataaaaaatcattatctattgcaactgcttcgattatagcaaaagttcaccgcgatagattaatgaatattcttgatagtaagtttaattattatcattggaaaagtaatgctggttatggaacaaaaaaacatatcgaggcaattcataaacacggaataactctcttccatcgaaaatcttttgagcctattaaatcattattaaataaataa

SEQ ID NO: 260336 - DNA, 583 bp, Unknown
  Bacterial polypeptide expressing nucleotide sequence isolated from the Sargasso Sea
ttgccggataacgcatcacaaattattgcgggtgtagatgaggctggacgtggggcattggcaggtccagtggttgcttgtagcgtcgtattaaaaccatcctttaacttaaataaagaggtgaatgattctaaaaagttatctgaaaagaaacgttatcagttatttgatgttttgcttaatgatatttatttaggcattggattaaatagtcatcgctatattaatcaatataatgttttaaatgcgacaatgacggcgatggccacttctattcgtaaaaataagggtatatttaatcatattattattgatggcaataaagccccaaaattaggacattcatatgaaacaatggtgaaggccgatgccaaaataattgaagtcatggttgcatcaatttgtgcgaaagtaattcgtgatcgaatcatgctaaaatacaatcgcttatatccagattatggttttgaaaagcataagggctatggaacgaaaattcattatgatgccatatttaatcaaggaccttgcccagttcaccgcactagctttaatcttaatcgacagttaacgctattctaga

SEQ ID NO: 260337 - DNA, 556 bp, Unknown
  Bacterial polypeptide expressing nucleotide sequence isolated from the Sargasso Sea
aaaatatctgctggggtggatgaggttggaagaggtagtttggcagggccagtggttgccgctgcggtaattttcaaagggagtattaaaaggtctttatttaaagattctaagaaattatcatttaatagaaggatgattatcgcaaaatatataaagaaaaactcgatctatggcattggagttgccgatgtaaaagaaatttataaatttaatattttaaatgcctccttattagccatgaaaagagcgatatctaaattgagtactaaaccgaaccagatatatatagatggtatttatgtgcctaaaggaattaaaaattgtaaagcgataataaaaggagatcaaaaaattaaggtaattagcgctgcatcaatactagctaaagtttacagggatttacttatgattaagctctcaaaaaaatataagaattatttttgggaaaagaattttggatacggaaccaaagatcatttaaaaagtttgaaaaaatatggaatttcttctctacatagacgagatttcaagccagtatacaatatgttgtgat

SEQ ID NO: 260338 - DNA, 442 bp, Unknown
  Bacterial polypeptide expressing nucleotide sequence isolated from the Sargasso Sea
tatgtcaaaaaaaatccagatatattccgatggcgcatgccgaggtaatccaggccctggtggttggggagttttgttgatatatgatggcacagaaaaggaaatttatgggggagaattggggactaccaataatcgcatggaattgatggcagcaattgtgggtatggaatccataaaatactcatccgatattataataacaaccgactctaaatatgtaatggacggaataactaaatggatgcatgattggaaaaaacgtaattggaaaacagcatcaaaaaaaccagtcaaaaataaagatctatggcagcgattagatgaagcatgtagtcttcattcaattgaatggtgttgggtcaagggacatagcgggcatgaaaaaaacgaacgtgttgatttacttgcaaataaagcaattgacgaactagttttatga

SEQ ID NO: 260339 - DNA, 646 bp, Unknown
  Bacterial polypeptide expressing nucleotide sequence isolated from the Sargasso Sea
attggattataagattgttgaaagaattttaaacgtgtctccaaatttcttattagaaaaagatttaatccacagtggttactcaataattgcaggtgttgatgaagttggccgaggacctttagcaggtcctgtcactgccgcagcagtgatattagacccgctaaatattccagaaaatttaaatgactcaaaattattaagtttgaaaaaaagagaaaaaatatacgaagagcttatgtatagttctacttttgcaattgcacacgtctcacctgaagaaattgataaacttaatattttgcaagcttcgttgttggcaatggtaaatgctgtttctaaattaaacgtaacaccaaaccacatattaattgatggaaataaagttccggaacaattaggtggtatcgccaccgcaatagtcaagggagacagtaaggttgcatcaattgcagccgcttcaataattgcaaaagtaactagagacaggttaatgcgtgatctggatgcagactttcctgtttatgagtgggccaagaattctggataccccacaaagtgtcacatgaatgcaatacttaagtatggtattacccctcatcatagacgttcatttaagccgatacacaatatcttgtgtggttaa

SEQ ID NO: 260340 - DNA, 292 bp, Unknown
  Bacterial polypeptide expressing nucleotide sequence isolated from the Sargasso Sea
tccagccgcgattgaagggctgcgcgcactgaaacgcccgatgcgggtcgcgatccataccgacagcacatacgtaaaggacgggatcaccaagtggattgtgaactggaagcggaatggttggaaaaccgccgccaagaaaccggttaagaatgtcgatctctggcaagctcttgacgacgtcctgatcggccatgaagtcgaatggcactgggtaaaaggccatgcgggacatcctgagaacgagcgagctgatgcactggcgcgcgcggccgtaccgaccggagcataa

SEQ ID NO: 260341 - DNA, 583 bp, Unknown
  Bacterial polypeptide expressing nucleotide sequence isolated from the Sargasso Sea
gctggattttgaaaaaaattttaatagtccggttgcgggtgttgatgaggtgggacgaggtcctttagcaggaccagttgtggcagcggccgtaattttggataaaaataaccttcctggaggtataagagattcaaaaaaaatatcaaaaaataaaagagaaataattgcagaaaaaataaaattaaatagtcactatgcttatggagtggcgtcagtagaagagattgataatttaaatatattacaagcttcgttacttgcgatgaaaagagcaattgagtctcttaaaatagtaccctcaatctctcttatcgatggaatatatacgcctgaagttgatttaatttgtaaaccaattgttaaaggtgacagtaaatcaatttcaatcgccgcggcttcaattctagccaaagtatacagagataaaattatgaccaatctagctgacaaatatcctgaatattcatttgcaaaaaattcaggatatggaacaaaagagcaccttttggctctgaaatatcatggaattacccctatccatcgaaaaagtttcaaacccatctacaatatattgaattaa

SEQ ID NO: 260342 - DNA, 430 bp, Unknown
  Bacterial polypeptide expressing nucleotide sequence isolated from the Sargasso Sea
tatgaaatataaaatatacactgacggtgcatgctctggtaatccaggtcctggtggatgggctgctataatacttgcagatgataaagttaaagatgagatctcgggtagtgaaaaaaacacaacaaataacaaaatggagttattggcaccaattagggcgatacaaaaatttaaaaaaaaatctgaaattttaatttacacagactctacatacgtaaaagatggaattacaacttggataaaaaaatgggaaaaaaatggctggaaaactgcttcaaaaaaaccagttaaaaatatcgaattatggaaaaaattaaaaaatttatcatcaaaacattctataaaatggatatgggtgaagggtcacgctcaaaataagtataataatctagttgatgaaattgcacagggagctataaaaagataa

SEQ ID NO: 260343 - DNA, 433 bp, Unknown
  Bacterial polypeptide expressing nucleotide sequence isolated from the Sargasso Sea
gatgaaaactgtaattatttacactgatggggcttgcagaggaaatcctggaccaggtggttggggagcgcttattgaatatggtgaatcaagtaagcagctttatggaggagatatttctactaccaataataagatggagctaacagcagccattatggctttgaaagaaataaaagaaccttgcgaaattattctttatacagattcaaaatatgttcttcagggtatagaggagtggatacataactggaaaaaaagagggtggaaaggtgcaaataagaaaccagtaaaaaatattgagctttggaaagaattagatgaagttagagatgaacataatataaaatggaactgggttaaaggtcattctggtgatccaggcaatgaaaccgcagatatgctcgcaaatagaggtatagacgaactttaa

SEQ ID NO: 260344 - DNA, 337 bp, Unknown
  Bacterial polypeptide expressing nucleotide sequence isolated from the Sargasso Sea
atgaaaagaatcgagatatataccgatggagcatgcagaggcaatcctggacctggtggctggggcgctttactcaaatttgataatcatgaaaaagagatttctggcggagaggacaacacaacgaataatcgcatggagctcatggcagcaatcaaggctcttgaaacggtgaaagagatgtgcgagatcgatttatacacagattctaagtatgtgaagcagggcatcacggagtggattatcaaatggaaagtaaatggatttaaaaattcaaaaaagaaacctgtagtcaatgctgatctttgggttcagttggatgatctcactcagtaaa

SEQ ID NO: 260345 - DNA, 433 bp, Unknown
  Bacterial polypeptide expressing nucleotide sequence isolated from the Sargasso Sea
tatgagatataaaatatatactgacggtgcatgcgtaggtaatccgggtcctggcggatgggctgcaataatactattagatgataagatcaaagatgagatctcgggtagtgaaaaaaacacaacaaataacaaaatggagttattagcaccaattagggcgatacaaaaatttaaaaaaaaatctgaaattataatttacacagactctacatacgtaaaagatgggattacaatctggattaaaaaatgggaaaaaaatgggtggaaaactgcttcaaagaaaccagttaaaaatatcgaattatggaaaaaattaaaaaatttatcatcaaaacattctataaaatggatatgggtaaagggtcacgctcaaaataagtataataatttagttgatgaaattgcacagggagctataaaagataaatga

SEQ ID NO: 260346 - DNA, 604 bp, Unknown
  Bacterial polypeptide expressing nucleotide sequence isolated from the Sargasso Sea
aatgattagtaaagtgtatccaaatctaaaaattgaaaaaagttttttagataaagaaatcatatgtggtattgatgaagtaggtagaggctgtttagcgggaccagttatagcagctgctgtaattttagattacaaaaacatacccaaaggaataaatgactctaaaaagctatctaaaaaaatgagagaaattatttctaatgaaattaaaaaaacttctattgaagttgctattggagaagcatccgtatatgaaatagacaagttaaatattcttaatgcaagtattctagcaatgaaaagagcttattataatttaccaaaaaaacctaatgttgctctcatagatggaaatttttctcctgatattaattgtaaagttttaaatataattaaaggtgatacgaaaagtttatcaattgcagccgcctcaattattgctaaggtacataaagataaaatatttcaattattacataaaaagtttccaaaatataattttaaaaataattcgggatatggtactaaagaacactatactgcgataagtgaatttggaatatgtcaacatcatagaaagtcttttaagttatataaatag

SEQ ID NO: 260347 - DNA, 485 bp, Unknown
  Bacterial polypeptide expressing nucleotide sequence isolated from the Sargasso Sea
aatgcaaaaatcttcaaaccaaatcaaaaccaacaacattgaagttgttgctggtgtagatgaagtaggaagaggtgctttagctggacctgttgtaactacggccataatacttactaaagattgtccaattaacgaattaaaagactctaaagaactttcagaaaaaaaaagaaacgatttatacattaaattacttaaaacaacaccttatatacgaacagccatcataaataataacgtgatcgatacaattaatatcttaaatgccacacttaaaggaatgctttattgtgtgaaaaaactaaagaaaaaagctgaaataatatatattgatggaaaccaaactccaaaagatgataattataatatggaagcaattataaaaggagaccgtttcgtacctgcaatatcggcagcatcaattattgcaaaagtgacaagagataaaatcatgtccttatacgataatgaatatccccaat

SEQ ID NO: 260348 - DNA, 568 bp, Unknown
  Bacterial polypeptide expressing nucleotide sequence isolated from the Sargasso Sea
aatgaaaagtataattgctggcgtagatgaagttggaagaggtagcctaattggcccagtttatgctgcggcagttatttttaacaaaaatataaataaaaaaaatattaaagattcaaaaaagttaaataaatctaaaagagaagttttagcaaaatatgtaaaaaaaaattctatatggtctattggttctgcttctttaaaagaagttgaaaaaattaacgttttaaatgctagtttactagcaatgaaaagagcaattaaaaaattaaaaaaaaaacctacaatagttttaatagatggaaacaaagttcccaaaattagaaattataaacttaaaagtataataaaaggagatcaaaaaattcctgaaatttcagcagcatcaataattgcaaaagtttcaagagatcgttttgttaccagcttgtcaaaaaatttcaaaaaatataactggtcaaaaaatgctggatatggaacaaaagaccatattaatgctataaaaaaatatggtgtaacaaaacttcatagaaagtccttcaaacccatacacaatatgttgagtcta

SEQ ID NO: 260349 - DNA, 595 bp, Unknown
  Bacterial polypeptide expressing nucleotide sequence isolated from the Sargasso Sea
ttggattataaccatacaaatacggtggcgggagtggatgaagccggtcgtgggccgctggccggacccgtggtcgccgcggcggtggtcttgcctgagggaagcgtgattgatggactaaatgattcaaaaaaaatcaccgaaaaagcacgtgaacggttgtatcctacgatttgtgaattagcgatcagttacgcggtgggagtggtcacggctcaggaaattgatgaaatgaatattttgcaggccacgttaactgcgatgcagcgtgcggtactcgccctggaatgcgatatcacacgcgtgctggttgatggcaatcaacccccgcggctgccgtttcataccgaaaccgtgatcaagggtgatcaaaaagtgggctgcattgcagcagcatcgattgttgctaaggtcacgcgagatcgcatgatgatggagttggatcaacgttatccccagtacgggttttctggccacaaagggtacggtacaaaaaaacacctgctggcattggcggagcatggaccatgcccggttcaccggcagagtttcgcgccggtgcgacgtagttctggtgtgagtggggcagtttagt

SEQ ID NO: 260350 - DNA, 578 bp, Unknown
  Bacterial polypeptide expressing nucleotide sequence isolated from the Sargasso Sea
tttagatgaagtaggcagaggtccattagctggaccagttgtaagttgtggctgtttgtttaatcgatatgatcgattacctgaaaatattcaaattacagactccaaaaaacatacagcaaaacaaagacaaaaattattctcattatttaaaaaacttcaagaagataaaattattgagtttcacttgggttttgcaagtgtaaatgaaattgatgaatttaatattttagaagcaacaaaactttcaatgaaaagagttttagataaatttaacaacactaatttaaatattattatagatggtaacttttcacttaattataaaaatatttatgaaaaatcagtaattggtggtgataaaatatctttatcaattgctacggcatcgataatagcaaaagttcatcgagatagattaatgagtttgtacgacggaaagtttaaagtgtatggttggaaaaaaaattctgggtatggaacaaaacaacatattaatgcaattcacgaaaatggtataacggtacaacaccgcaaaacatttgagccaataaaatcactatcaaaacaaagatagc

SEQ ID NO: 260351 - DNA, 623 bp, Unknown
  Bacterial polypeptide expressing nucleotide sequence isolated from the Sargasso Sea
ttcaatagaaaaatcaataaaaggacctgtaataggattagatgaagtgggaagaggtccactagcaggccctgttgtaagctgtggttgtcttttttataattatgaaaatttacaatctgatattattataaaagactcaaaaaaacatacaacaaaacaaagagaaaaattatttttgtatttcaaaaaactaacaaaagaaaaaattatgaaatatcatctaggttttgccagtgttaaagaaatagatcaactaaatattttagaagcaactaaattgtctatgaaaagagttattaataaatttaataattacagtgataatataataatagatggcaactttttacttaattataaaaatataaaagagaggtcggtaattggtggtgataaattatctttatcaattgccgctgcatctataattgcgaaagttcatcgtgatcgtatgatggctatctatagtaataaatatcaaatttatgggtggaaacaaaatgcaggatatggaacaaaaaaacatattaatgctataattaaaaatggtattactgatcttcatagaaaatcatatgagccaataaaatcattatttaatgataataataaaatgtaat

SEQ ID NO: 260352 - DNA, 625 bp, Unknown
  Bacterial polypeptide expressing nucleotide sequence isolated from the Sargasso Sea
aatgactaatactgaaaaaattatagctggcgtggatgaagcagggagaggaccattagctggccctgtagttgctgctgctgttattttacctaagaatcactcaataaaaggattgattgattcaaaaaaattaacagctaataaaagagaaaatttatacaatgaaattatcaaagtctctgattatggtatcggtattgtttcacatcgtacaattgataaaataaatattttacatgctactttcaaagctatgaagaaagctattttaaatttaaatctaaagccagataaaacattagttgatggatatggacttccagatcaaacaataaagaatgaaggtataattggaggtgataatttaattgaatgtattagtgcagcttcaatattagctaaagttacaagagatagacttatgataaatattgataaaatatttccggagtatggattctctaaacataaaggttatgggacaaaaatgcatattgaaatgctaaaaataaataaagctacaccaatacatagaaaatcatttagaccagttaaggaaaatttgccaacgatggaatggttaggtagaaataatagaatagaaactcttggaatgcaatta

SEQ ID NO: 260353 - DNA, 625 bp, Unknown
  Bacterial polypeptide expressing nucleotide sequence isolated from the Sargasso Sea
aatggaattatatcgttatgaagaaaaattagaagctggattagatgaagctggtagaggatgtttagcaggtccagtatttgctgcagcagtaatatggccgaaagaattagatgactctcttgaacatccaatgttaaatgattcaaaaaaattatcaaaaaagaaaagagagtatttaagaaattatattcaagaaaatgccatagactattctgttgctttttgtacaaatcaagaaatagatgaaataaatattttaaaagcatctcataaagctatgcatcgttgtattgataaattaaatatagaaccggaaatgcttcttgttgatggtaatagttttactccatatgtaaaaaaatcagacggtgatgttattgaacatgaatgtataataaaaggagatggaaaatatgccagtatatcagctgctagtattttagccaaaacatatcatgatgattacattgaggaacttttagaaaaaaatcctgattttgaaaagtatggatggaaaacaaatatgtgctatggaacccgacctcatatggaagcggttaaaaaacatggacctacagagtatcatagattaacttttaatttatatccttgttttcaataa

SEQ ID NO: 260354 - DNA, 319 bp, Unknown
  Bacterial polypeptide expressing nucleotide sequence isolated from the Sargasso Sea
ttgatagtagcaggagttgatgaagcaggaagaggacctttagcagggcctgtagtatctgcagcagttatacttgatccgaactataaattagtaggtttaaatgactctaaaaagctttctgcaattaaaaggaagactttgtcagatgaaatcaagactcattcaaaggcttggtcaattggcatagcaacagtagaagagattgatgatttaaatattttaggagctacattattgtcaatgaaaagggcaataaaagacttatcaggagttccagaaaaagttatagttgatgggcaaaacacacccgaaatag

SEQ ID NO: 260355 - DNA, 354 bp, Unknown
  Bacterial polypeptide expressing nucleotide sequence isolated from the Sargasso Sea
atgagatcaatatcttacaagcttcattattagcaatgaaaagagcaagtgatggactatcgatcgttccgaaaacaacacttatcgatggtaatttcaaaccagatataaaaaacaacaccattactattattaaaggagatagtaagtctgtttcgattgccgcagcatctattcttgccaaagtttatagagatgaaattatgcttaaatattcaaaacaatttccagaatatggctttcaaaccaattcaggttatggaacaaaagagcacctttcagctctaaaaaactttggaattaccccaatacatcggaaatcttttaaacctgtacacaatatattgaattaag

SEQ ID NO: 260356 - DNA, 481 bp, Unknown
  Bacterial polypeptide expressing nucleotide sequence isolated from the Sargasso Sea
aatgaacaaaaaaattattatttatacagatggcgcctgtcgtggaaaccctggtcctggtggttggggggttgtgtttcagtctcaaggagttgaagacggcctgcttaatggttatgagttggaaacaacaaataatcgcatggagttaaaggctgccattcatgcgcttttgagcttaaacggctcctatgaaatggaattgtatacggactcacagtatttgcgtttgggtatgactcaatggatggcgagttggaagaggaaggggtggaaaaatgccaagcgcgagccggttaaaaaccaagacttgtggcgcagacttgatgacctggtggttgcgcgaaacattgtttggcactgggtgaaagggcattcgggtcacccagggaatgataaggctgatgctttagccaatgcggcaattgatgcccagggtcaatcacatgcattaacagaggattggtttgaacatctctag

SEQ ID NO: 260357 - DNA, 457 bp, Unknown
  Bacterial polypeptide expressing nucleotide sequence isolated from the Sargasso Sea
catgagcgacgattgggtcgagatctacaccgacggtgcctgcaagggcaatcccggtccgggcggctggggggcgctacttacttataagggcgtcaagcgtgagctctggggcggcgagcccgacaccaccaacaaccgcatggagctcatggcggcaatccgcgggttggcggagctgaagcgttcgtgcaaggttcgtttggtgaccgactcgcagtacgtcatgcagggcatcaacgactggatgcccaactggaagaagcgcggctggaaaacggcgagcaagcagccggtgaagaatgccgacctttggcagcagctcgacgagcaggtcaaccgccatcaggtgagctgggagtgggttcgcggtcataccggccatcccggtaacgagcatgccgacctgcttgcgaatcgcggcgtagtacaggccaaacgacaaccgattgtgtaa

SEQ ID NO: 260358 - DNA, 520 bp, Unknown
  Bacterial polypeptide expressing nucleotide sequence isolated from the Sargasso Sea
aatgcgcgtcctgcagaagatattaagtccgacacttgagtttgaaaatgcggcttatagtcgcggattcagaaggattgcaggaatagatgaggcgggtagaggaccgcttgccggacccgtggttgttgctgcagttattctaggaaggaattgggataaaaagtttgagctcaatgattcaaagcagcttacagcgaaaaaaaggcaggtgctgtatgacttgatttgcacagaagcttccgcatttaagatagtttcggtttgtccgcaggaaattgacaggataaatatactgcaggccacaatggttgggatgcagcgttgttccgatgaaatagagcctcctccagattatctactggttgatgggaatcgttatcccatcacaaacatccatggtcaggcagtagtgaagggggattgtctttccaaaagtattgccgcggcttcgattcttgctaaagtgacacgtgacaggaagatggttaaatttggggaaaagtaccctcaatggggc

SEQ ID NO: 260359 - DNA, 619 bp, Unknown
  Bacterial polypeptide expressing nucleotide sequence isolated from the Sargasso Sea
atgcaagaaaaaaaagaagaagatcttcggcaagtattgaataaagtatatgaagttggaatggatgaagttggaaggggatcaatttttggtccagttttttcagcagttgtagtattaactgaaaaaaataaatttactctaaaaaaatttggagtaatggatagcaaaaaaataacgtccaaaaaaagaaactttcttttcccaaaaattttatcactttctacagattatggaattggacaatcctctgttagagaaatagataagctcggcatcagagtcgcaactgaactctcaatgataagagctttaaaaaaattaaaagagaaaccatctgaactattaattgatggaccattgttgttaagaccatggaacggaattcaaaaaaatatagtatcaggagactcgaaatttacctcaatatctgcagcgagcatagttgcaaaagtatctcgggataatctaatggaaagtttagaaaaaaaatactcaggatacttaatatttagaaataaaggatatggtacgaaagagcatctttcaaatatcaaaaaaaatggaataactaatcttcataggaaaagttttttaaagaaatcaaatcttatttaat

SEQ ID NO: 260360 - DNA, 454 bp, Unknown
  Bacterial polypeptide expressing nucleotide sequence isolated from the Sargasso Sea
tttggagcgagtaattaaagtcgatatttttaccgatggagcgtgtcgtggaaaccctgggcctggaggttgggcagcgctccttcgctatggcgacaccgaaaaaatgttttctggtgctcaggagcaaactacgaataaccgaatggagcttatggcggcaatcgagggtttggaacaattaaaaaagcctatggatgttgttcttaccactgattcccaatatgtaaaggatggaatcactaagtggatcgatgggtggaagaaaaagggttggattacttcacagaaaaaacctgttaaaaacgtcgacctttggaagcgattagatgcggctgttgtcaaccactctgtggaatggaagtgggtcaaggggcacagcgggcatacggaaaatgaaatggttgatcaggcagccaacatcgccataaataatcttttagcaacaagatga

SEQ ID NO: 260361 - DNA, 421 bp, Unknown
  Bacterial polypeptide expressing nucleotide sequence isolated from the Sargasso Sea
gatgagtgattctaaaatagaaatttttactgatggagcatgtaaaggaaatcccgggcctggaggttggggagcattattgaaatatggggataaagaaaaagaaataaatggatttaactcttctactacaaataatataatggaacttacagcagtgatagaggctcttaaacatataaaaaaaccatatctgattaatatcactacggattcaacatatgttagaaatggcattacagaatggatacataattggaaaagtaatggatggaaaacagctgcgaagaagagcgtaaaaaataaagaattgtggatcgagcttgatagacttatccaggggaaaaaattaaattggatatgggttaaaggccattctggacaccctggcaatgaaagagctgatcagcttgctaatgct

SEQ ID NO: 260362 - DNA, 481 bp, Unknown
  Bacterial polypeptide expressing nucleotide sequence isolated from the Sargasso Sea
gtggtgatagttgactcagagataaaggagacagaccctactttagttgagatatttaccgatggtgcgtgcagtggaaaccccgggcccgggggatggggtgctctcttatgctggcgaaatgaagaacgcgaaatttggggaggcgaagcccatacgacgaacaaccggatggagttaactgccgcgattaaagccctggagagtataaaaaaaccggtaaaagctgtgctttatacggacagcacctatgtcaaagagggtattactagctggttgcctgcttggaaagcccgaaattggaagaccgccgccaagaaaccggttaagaatattgatttatggcaagcgctggaagaagttgttgataaacaccaaattcaatggtgctgggtaaaaggacatgccggtcaccctgggaatgagcgagccgacgcattggcccgccgtggcgtcaaagaaattcaggattctgaatgac

SEQ ID NO: 260363 - DNA, 499 bp, Unknown
  Bacterial polypeptide expressing nucleotide sequence isolated from the Sargasso Sea
atgaaaatcattgcaggcgtagatgaagcaggaagaggggcgttagctggtccagtagttgcagctgcagtgattttacctgataaatatgatctagttggtctgaatgattcaaaaaaagtatctccattgaaaagagaaaggttgtttggacaaatttcaaatcaagcaatttctattggtgttggaatcgtatcttctgatgagatagatcaaataaatattcttgaatccacatttaaagcaatgaaaatgtctttaggcaagctaaaccccgtgcctgatgaagcattaatagatggttttccattaaaaacacagattattccaaatcgaggtataattagaggtgatgaaacaattgatattattaaagctgcttctattattgcaaaagttactagagataaaataatggtagaatatgatctgcaatatccatcatatggttttaaaaatcataaaggttatggaacaaaagaacatatggaaatgttac

SEQ ID NO: 260364 - DNA, 478 bp, Unknown
  Bacterial polypeptide expressing nucleotide sequence isolated from the Sargasso Sea
atgactgaactaaaactaatccacatcttcaccgatggttcttgcttaggcaatccgggccccggtggctatggcattgtaatgaattataagggccatacaaaggagatatccgatggttttgccctgacaaccaataatcgcatggaattattagccccaatcgttgcgcttgaggccctaaaagaaccctgtaaaatcattctcaccagcgatagccaatatatgcgccaagggatcaccacttggatccacggttggaagaaaaaaggctggatgacatctaatagaacgccggtgaaaaatgtcgatctttggaaacgtttagataacgccgctcaactccaccaaattgattggcgctgggtaaaaggccatgccggacacgcggaaaatgaacgctgtgatcaacttgctcgcgccgccgcagaggcaaatcctacgcaaattgatgcaggttatcaggcggagtcctaac

SEQ ID NO: 260365 - DNA, 556 bp, Unknown
  Bacterial polypeptide expressing nucleotide sequence isolated from the Sargasso Sea
aatgattattgctggagtagatgaggtaggaaggggatgtttggcaggtcctgttgtagcagcagcagttattttagaaaattcaatcactggcttaaatgattcaaaaaaaatatctaaaaagaaaagagaagttttatatggcgagattttagaaaatgccacttcagttgcagttggagttaagtggaatgactatatagataagcataatattaaagttgcctcagagcatgccatgatagatgctatcaatttattgaacgtaaaacctaataaggttttgatagatggattttcacttgatattgatatagaaaacgaaggcattattaaaggagatcaaaagtttgagcaaataatggcagcatcaattatagctaaagtaacaagagatgaaataatgcgttcatttcattatatttatccagaatatgattttatgtctaacagtggatatggaacaaaaaaacatttaaaagcattagagaaatactcatatacacctattcatagattaacatttaaaccaatttctacagatataaaaaaatga

SEQ ID NO: 260366 - DNA, 553 bp, Unknown
  Bacterial polypeptide expressing nucleotide sequence isolated from the Sargasso Sea
tttgagtaaaattattattgcaggcactgatgaggttggtagaggttctttagctggtccggtagttgcggctgctgttattttaaagagtaaaatagctaatttacaggactctaagtctttgtcgccaaaaaaaagagaatgtctatcagaagaaattcttaaaagttcatattatgggtttggaattgtctcaaatattaagattgaccaaattaatattcttaatgcttctttattggcaatgaaaagagctatacttaacttaccaataaaacccactatggttttagtcgatggtatacataaaccagatctagatatcccaatgagggctattattggcggcgattcaattgaggaagccattagtgcttcatctataattgcaaaagtgtatagagataatttaatgattaaatatgaaaccaaatatccaggatttttctttaaaaaaaataaaggctatggtactaaagaacatcttgatgccattaaacaaattggtagttgtaaaatacataggaaatcattcaaaggagttataacttag

SEQ ID NO: 260367 - DNA, 583 bp, Unknown
  Bacterial polypeptide expressing nucleotide sequence isolated from the Sargasso Sea
ttggattttgaaaaaaattttaattgtccagttgctggtgttgatgaggtaggacgtggtcctttagcgggaccagtagtggcagcagcagtaattttggataaaaacaaccttcctgcaggtattagagattcaaaaaaaatatcaaaaaataaaagagaaataattgcagaaaaaattagattaaacagtcattatgcatatggagaggcgtcagtagaagaaattgataatttaaatattttacaagcttcgttacttgcaatgaaaagagctattgagtctctaaaaatagtaccatcaatgtctcttattgatggaatatatacgcctaaagttgatttaaaatgcaaaccaattgttaaaggtgacagtaaatcaatttcaattgctgcagcttcaattctagccaaagtttacagagataagattatgaccaatcttgctgacaaatatcctgaatattcatttgaaaaaaatgcagggtacggaacaaaagagcaccttttggctctgaagtctcatggaattacccctatccatcgaaaaagtttcaaacccatctacaatatattgaattaag

SEQ ID NO: 260368 - DNA, 631 bp, Unknown
  Bacterial polypeptide expressing nucleotide sequence isolated from the Sargasso Sea
atggcggtatttaagacgttgaccgacgccgatatcgccaccttctctacaggttttgtggcgggcgtggatgaagttggccgtggcccacttgttggcgatgtggtcaccgctgcggtgatcctcgatcctaatcgccccattgcaggcttaaatgattctaaaaagcttaccgagaagcgccgcgaggccttgttcgatgagatttgtgaaaaagccttaagctatcatgtggggcgggccagtcctttggaaatcgatgagctgaatatcctccatgccacaatgcttgcgatgcagcgcgcggtagcagggcttacacgtgcgcccgagttagttttagtcgatggtaatcgcagcccggcgtttacacaccagggactgtctctgaccagtcatagcatagtcaaaggtgatggcctgattgcgagtatcagtgcggcgtcgattattgccaaagtgacccgcgatcgggaaatggatgccctcgatgcggcctatccccagtatggatttgctaagcataaggggtatccgactaaggcgcattttgacgccatcgccgagtacggcgtgttcgaccaatatcgtaaaagtttcaaacccgtcaaggcattactggagcgttaac

SEQ ID NO: 260369 - DNA, 598 bp, Unknown
  Bacterial polypeptide expressing nucleotide sequence isolated from the Sargasso Sea
atgttaaaagtctttgataacaaaatttttgtttgtgggattgatgaggctggtagaggttgtttggctggtccagtcactgcagctgctgttgtgcttccaaaaaaatataaaaattcatttataaaagattcaaaaaagttaaataaaagtgataggcttgatttatttaatgaaattattgaatgctcattagattatgcaataattgatatatctcctaaaataattgattctattaacattctagaatctacattcttagcaatgaataatgcaatatccaaaatccataataaaattgattataccattattgatggaaataagtttaaaactgaaaaaaaaataaaatacaagtgtatagtgaagggtgataatatttatcaaagtattgcagcagcatccatactagcaaaagtacacagggataaaattatggaagatttacatttaaattttccaaaatatgactggattaacaacaaaggttatggaacttcaaagcacagactagctataagaaattatggaataactaaacaccatagaaaaagttttaatctagttgaaaaacaattaaaaattaaaatttgat

SEQ ID NO: 260370 - DNA, 430 bp, Unknown
  Bacterial polypeptide expressing nucleotide sequence isolated from the Sargasso Sea
tatgaaatataaaatttacactgacggtgcgtgctctggtaatccaggtcctggtggatgggctgctattatactagtagataataaaattaaagatgagatctcaggtagtgaaaaaaacacaacaaataacaaaatggagttattagcaccaattagggcgatacaaaaatttaaaaaaaaatctgaaattctaatttacacagactctacatacgtaaaagatggaattacaacttggataaaaaaatgggaaaaaaatgggtggaaaactgtatcaaaaaaaccagttaaaaatatcgaattatggaaaaaattaaaaaatttatcatcaaaacattctataaaatgggtatgggtgaagggtcacgctcagaataagtataataatcttgttgatgaaattgcacaaggagctataaaaagataa

SEQ ID NO: 260371 - DNA, 574 bp, Unknown
  Bacterial polypeptide expressing nucleotide sequence isolated from the Sargasso Sea
ttgcataagttaattgccggcgttgatgaagtaggtcgtggcccgttagtcggtgatgtggtcaccgccgcggtcattctcgaccctgaaaatcccattgaagggctaacggactctaaaaaactgagtgaaaaaaagcgcgtagcgcttgcccaagaaattcgtgaaaaagcactctactggaatataggtagagctagccctgaagaaatagataagcttaatatactgcacgctaccatgctcgccatgatccgcgcagtggaaggcctgccagtaaggcctgactttgtgcgcgtagacggtaaccgggttcctgcgtggaattttgagtctgaagcggtagtgaaaggcgatagcctgcacgcagaaatttcagcggcttccattattgccaaagtagagcgagacaacgatatgatttcgcttcacgaggcctacccgcaatataactttgccgggcacaaaggttaccccacaaaagcacactttgaagccatcgctgaatatggcatcttagattgctatcgaaaaagttttaaacctgtaaaagcgctactcgaagagaaataac

SEQ ID NO: 260372 - DNA, 457 bp, Unknown
  Bacterial polypeptide expressing nucleotide sequence isolated from the Sargasso Sea
atgaatagtgggatcacaaccgtttataccgacggagcttgctccggtaatccaggtccggggggatgggcgtgggtggtgccagatggagaatttgcagcgggaagtgattcagagacaactaatcaacgaatggagttgaaggctgctttggaggctgttaaggcactccaaggggaaattgttattgttagcgattcaacgtatgtcgttaaatgttttcatgaccgttggtgggaagggtggttgcgaagaggttgggtaaattccgcgaaaaaaccagttaagaatcgggatctctgggagccgctgattgaaagttaccgagatcgcaacaacatttctttcaggtgggttaaaggtcactcaggtgacagatggaatgatgaagcggaccgtttagccgtacaagcaggcagtgaacagatctccttaaagggaaatctttcctcgtagc

SEQ ID NO: 260373 - DNA, 154 bp, Unknown
  Bacterial polypeptide expressing nucleotide sequence isolated from the Sargasso Sea
gatgaaaagaatcgagatatataccgatggagcatgcagaggcaatcctgggcctggtggctggggcgctttactcaaatttgataatcacgaaaaagaaatttctggcggagaggacaacacaacgaataatcgcatggagctcatggcagca

SEQ ID NO: 260374 - DNA, 922 bp, Unknown
  Bacterial polypeptide expressing nucleotide sequence isolated from the Sargasso Sea
cctggctgaccgggcagatcatgcggcggcagggttacctgccgtacgtcggcttgccgaacatcctggcggggcgcttcgtcgtgcccgagctgctgcagcatttcgcgacgcccgaggcgcttgccgatgcgacgctcacgcagctgcgcgacgacgcgaaccgtcgcacgctgaccgaagtctttaccgaaatgcatctttcgctgcggcagaacacggctgcgaaggcggccgaagcggtcgtgcgcgtgctcgaacaacgcaaggggcgcgcatgaccgcagtacgtgcaccacgccgccgtgcgtcgagcgacgtgcagggcggtttcgatttcagccgtcccgacgagatcgtctgcggcgtcgacgaagcgggccgcggcccgctcgcggggccggtggtggccgccgcggtgattctcgatccggcgcagccgatcgacgggctcgacgattcgaaggcgctgtccgcgaagaagcgcgatgcgctgtacgagctgatcgtcgcgcgctcgctgtcgtattgcgttgcatcggcgagcgtcgacgagatcgacacgctgaacatcctgcacgcgacgatgctcgcgatgaagcgcgcggtcgagggcctgtcgatcctgccgacgcttgcgcagatcgacggcaaccgttgcccgacgctgacggtgcgtgccgaggcgatcgtcagtggcgatgcgctcgtgccgagcatctcggccgcgtcgattctcgcgaaggtctcccgtgaccgcatgctcgtcgacctgcacgagcgtttccccgtgtacggcttcaacgtgcatgcgggctacggcaccgtgaaacaccttgccgccctgcgcgagcacggcccgtgcgaagcccatcggcggtcgttcgcgccggttcgtgcggcactcgacctgattcgatga

SEQ ID NO: 260375 - DNA, 589 bp, Unknown
  Bacterial polypeptide expressing nucleotide sequence isolated from the Sargasso Sea
gatgatcgatattcctgacgacaggctggttgccggtgtggacgaagtgggccgtggcccgctggtgggtgacgtggtcactgccgcggtgattcttgacccggccaatcccatcatcgggctgaacgactccaagaagctctccgagaagaagcgcctcgccctgtttgacgagatcaaggagaaggcgctggcctggtccgtcggccgtgccagcccggcggagatcgacgagctcaacatcctgcacgccaccatgctggcgatgcagcgcgccgtggcggggctctccatcacccccgagctggtcttcatcgacggcaaccgctgcccaagtttgccgatggaggcccgcgccgtggtcaagggcgacagcctggtagccgccatcagcgccgcctcgatcctcgccaaggtgacccgtgatgcggagatgaccgagctggacagccgtcatcccgagtacggtttcgcccgccacaagggctacccgaccgcggagcacctcgccatcctggccgagcgcggcccgctgcccgaatatcgcaaaagtttcaaaccggtgcgtcgagcactggggatcgaatag

SEQ ID NO: 260376 - DNA, 610 bp, Unknown
  Bacterial polypeptide expressing nucleotide sequence isolated from the Sargasso Sea
aatgataagctcaattgatgatttagaaataggcaatgctaaattaattgctggtgttgatgaggtcggaagaggtccgttagctggccctgttattgcgtcagctgtaatattagatccgaaaaagaaaattgataacctttgtgattcaaaaaaattgagttcaaaaatgcgttttcttatttcaaaaaatataaaaatgaactgtatcgagtggtccgtaggaagagcagaagtaaatgaaatagatgaactaaatattctgcaggcaagtttacttgcaatgaaaagagcagtggataaattaaaggtaaaaccagaacttgttgttgttgatggacaatatactcctaatattgatataaaaaagattgcaattatcagaggagataattttatcccgtcaatttctgcggcatcgataatcgcaaaagtggaaagagatgaagaaatgattgcattagataaaatatatccaaactatggattttcatcacacaaagggtatccaacaaaaaagcatattgagtcaatagaacagttgggtgttacagtaattcatagacgtacattttctcctgtaaaaaaaattatagataaatcttgttga

SEQ ID NO: 260377 - DNA, 599 bp, Unknown
  Bacterial polypeptide expressing nucleotide sequence isolated from the Sargasso Sea
tatggcaaatttcaatcacgaaagatcggtagtaacaatgggttacgccagtgtatgtggggtagatgaggtaggaagaggttgtcttgcgggtccacttgtagctggagctgtagtatttgatattgttgattctgaatggattactagggtaaatgatagtaaaaagcttagtcctgccattcgattagaattgtcggaattgattaaaataaaggcaaaagattgggcgttaggtttagtcaatgcgcaggaactagaccaagtgggacttacaaaagccactgaactggttatgaaacaagcgatcgattcattaaatcatgtacctgattatttgttgttggactatgtgccaataagttcatggaatcaaccataccaattaataaagcaaggcgattctagtagctattccatagctgcggcttctatcatcgctaaagtgcatcgtgacgaaattatgactgctattgatgaactttatcctcaatatgatttcgcttctaataaaggatacggtacaaagctgcacatggaagctttgtctatacatggtccatgtgatatacatagacgaaagttttctcctggtcaac

SEQ ID NO: 260378 - DNA, 445 bp, Unknown
  Bacterial polypeptide expressing nucleotide sequence isolated from the Sargasso Sea
atgaaaagaatcgagatatataccgatggagcatgcagaggcaatcctgggcctggtggctggggcgctttactcaaatttgataatcacgaaaaagaaatttctggtggagagaaaaatacaacgaataatcgcatggagctcatggcagcaatcaaggctcttgattcggtgaaggagatgtgcgagatcgatttatacactgattctaaatatgtgaagcagggcatcaccgagtggattatcaagtggaaagtcaatggatttaaaaattcaaaaaagaaacctgtagtcaatgctgatctttgggttcaattggatgatctcacgagtaaacataaaatcaattggttctgggttaaggggcatgcggggcatgaattcaatgagagagctgatttacttgccaataagggtttggatgacatgttggagagctcatgag

SEQ ID NO: 260379 - DNA, 614 bp, Unknown
  Bacterial polypeptide expressing nucleotide sequence isolated from the Sargasso Sea
aattgaaaaagaatttgacggtcctgtaataggtatagatgaagttggtcgcggtcctttagctggtcctgttgttagttgtggatgttattttaaagattataattttttaaataatagtttagactttattaaagattcaaaaaaaatttcagctaaaaaaagattctcagttctaaaatatttgaataaattaaaaaacaataagattttaaaatacaatttaggtattgcttctgtaagggaaatcgatgatttaaatattttaaatgctactaagttgtcaatgaggcgtgttgttgataaatttaatttatcaaatgcaactcttattattgatggaaatttcaaattaaattataaaaattacaaagaaaaatcaattgtaagaggagaccaaatctctatttcaattgctgccgcttcaattattgccaaagttcatcgcgatcgcttaatgtccattttatcaacaaagtttgagggatttgattggcacaaaaattctggatatggaacagctaagcatattagagaaatttataaagttggacctactattcaccatcggaaaacctttgagccaattaaatcacttatccctactaaatgat

SEQ ID NO: 260380 - DNA, 436 bp, Unknown
  Bacterial polypeptide expressing nucleotide sequence isolated from the Sargasso Sea
atgaaagaggtaattatttacacagacggagcttgccgaggcaatccaggtccagggggctggggtgcgctaattaaatttgatactaccgagaaggagatttttggcggacaaaataacactacaaataatcaaatggaactttctgctgccattgagggactctcaatcttaaaagagccttgtagtgttgaattattcactgattcaaagtatgtgatggatggaataactcaatggatacaaaattggaaaaaaaacaattggaaaacttctgctaaaaaagaagttaaaaataaagaattatggcaacaattagatcggttaatgtcttatcatcaagtgcaatggcactgggtaaaaggtcattctggagatcctggaaatgagacagcagatctattagctaataaaggaattgattctatcttatgac

SEQ ID NO: 260381 - DNA, 586 bp, Unknown
  Bacterial polypeptide expressing nucleotide sequence isolated from the Sargasso Sea
attgataatagcaggagttgatgaggcgggaagaggacctttagcaggacctgtagtttctgcagcagttatacttgatcctaactataaattagtagacttaaatgactctaaaaagctttctgcaattaaaaggaaggctttgtcagatgaaatcaagactcattcaaaggcctggtcaattggtatagcaacagtagaagagattgatgatttgaatattttgggagctacattattgtcaatgaaaagggcaataaaagacttatcaggagttccagaaaaagttatagttgatgggcaattcacacccgaaatagatgtgccttgtgaagctataattcaaggagatgcaacagaagaaagtatcatggcagcttcaattatagctaaagttgaaagagatatgattatggtagaactagacaagaagtatcctcattatggtttttcaaaacataaaggatatcccacgaagctgcatttgcagatactaaaaaagttcggtccttgtaatgatcatagacaaacattcaaacccgttaagacatatttagctgaacttagtgatcatggaaagacttga

SEQ ID NO: 260382 - DNA, 359 bp, Unknown
  Bacterial polypeptide expressing nucleotide sequence isolated from the Sargasso Sea
taatgaaattgataaaattaatattctgaatgcttctttattagcaatgaaaagagctatactaaacttaccaataaaacctgctttggttttagtcgatggcatatataaacctgatttaaatattccaatgaagactattattggaggtgattctattgaagatgcaattagtgcagcttcaataattgctaaagtatacagagataaccttatgattgaatacaataataaatatcctgattataattttaaaaaaaataaaggatatggaactaaggagcatttttttgcaattcaacaaaaggggatttgcacaattcatagaaaatctttcaagggtgttttgaataaatgac

SEQ ID NO: 260383 - DNA, 234 bp, Unknown
  Bacterial polypeptide expressing nucleotide sequence isolated from the Sargasso Sea
cagtagtaaaaggagattgccattctaaaagtattgccgcggcttcgattctagcgaaagtaacacgtgacaggaaaatggttgaatttggaaaaaaatatcctcaatggggctttgagcgtcacaaaggataccccactagggagcacagggaagcaattaatgagtatggactttctccaatacacagacgttctttcggcccaaaaaccgaacagatgagtttgctatgac

SEQ ID NO: 260384 - DNA, 436 bp, Unknown
  Bacterial polypeptide expressing nucleotide sequence isolated from the Sargasso Sea
atgaaagatgtaattatttatacagacggagcttgcagaggcaatcctggtccaggtggctggggagcgctaattaaatttgacatcgcgcagagggaaatttttggtggacaaaataatactacaaataatcaaatggaactctctgccgccattgagggactctcaactttgaaagaaccttgtaatgttgagctgtttacagattcaaggtatgtaatggacggaattacccaatggatacaaaattggaaaaaaaataactggaaaacttcttcaaaaaaagaggttaaaaataaagaattatggcaaaaattagatcagttaatgagctatcataaagtgaaatggaattgggttaaaggccattctggagatcctggtaatgaggtagctgatcttttagctaataagggaattgattctatcttatgat

SEQ ID NO: 260385 - DNA, 673 bp, Unknown
  Bacterial polypeptide expressing nucleotide sequence isolated from the Sargasso Sea
tatgatttgtggaattgatgaagttggtagagggccactagcagggcccgtagttagcgctgctgttattttaccaataagtcatgggattgcaggcttaaaggattcaaagaaaatttcaccgaaaattcgtgaagaattattcgagcaaataattaaaatttcagatgtaggtattggcgtagtttctagcaggcaaattgataagattaatattttacaggctacacataaatccatggaaaaagcattatacaatttaaaaaggcagccagataaaataatggtggatggctttgcccttccattaaaaggtattaaatcagagggagtaattaaaggtgatgagaaaattgagcaaattagcgccgcttcaatcatcgctaaggtagtcagagataaatttatgaagcttgtagattcaattttccctgaatatgaatttaaaaagaataaaggatacggtacgaaaaatcacattgcagcattaaaagataataaagcaactttgattcatagaaagacatttcgaccagtttcagaaaatttgccatccaaacaaataaccaatacagtttcatataaggctcaactatccagccaaaaagatttactcaaagagcttaataaagatattaataattggttcaagttaaatgcccttattaagtaa

SEQ ID NO: 260386 - DNA, 127 bp, Unknown
  Bacterial polypeptide expressing nucleotide sequence isolated from the Sargasso Sea
atgctaatcgatgatcttgaagttaatgaaaccgatttaattgctggtgtcgatgaagtcggtagaggccccttagcaggaccagtagtcgctgccgcagtaatcctagatcccaaaaaaccaatga

SEQ ID NO: 260387 - DNA, 601 bp, Unknown
  Bacterial polypeptide expressing nucleotide sequence isolated from the Sargasso Sea
ctttggaacaaaaattataattatatttgcggtattgatgaggtaggaagaggttgcttagcagggccagtatattcgggagctgttattttagataaaaataaaagctttgaagatccttttttcgaaaaaattaacgactctaaaaaggtttctactaaagtcagagaaaatctcgttaattatataaatgaaatttctatttcaactgctgtaggtctatgcactgctgaagaaatagacgcaataggaattcaaaacgcagtcaaactatcaatgaagagagcattaaataacctaagtataaaacctgattatttattaattgatagcttatctatagattcgaaaattccacaaaaaaatattattagaggcgatcaagcctctaaatcaatatcttctgcgtcaataatagccaaagtgagtagagataattatatgattaatgaaatttcaaatgaatatcctaattactcatttgaaaaaaataaaggatatggcacaaaagttcatatggaggctatcaaaaattttggaatcacaaatatacatagaaaatcttttgaaccaatcaaaagtatgattttggagaattaaa

SEQ ID NO: 260388 - DNA, 445 bp, Unknown
  Bacterial polypeptide expressing nucleotide sequence isolated from the Sargasso Sea
atgccagaggtagagatcttcacggatggcgcttgtcgcggtaatcctgggccaggagggtgggctgcgttattgcggagccagggagtcgaaaagatgttctctggagccgagcaggaaacaactaataaccagatggagcttatggccgcaattcaggggcttgaggctctcaagcgcgcatcctcagtggtgttaacgacagactcacaatacgttcgccaaggcatcacccaatggatccatggatggaaacgtaacggttggaaaacgtcgcagaaacaaccggtgaagaataaggtgctctggcagcgactcgacgttgcggtcgcaaagcatcaggtcgagtggcattgggtaaaggggcatagtggccatgaggaaaacgagcgtgtggatatggcagcaaacgatgcaatagatgttatgcgggcccagacatgag

SEQ ID NO: 260389 - DNA, 565 bp, Unknown
  Bacterial polypeptide expressing nucleotide sequence isolated from the Sargasso Sea
tatgaaaatcattgcaggtgtagatgaagcaggaagaggggcattagccggcccagtagttgcatctgcggtaatcttgcctgaggaatatgatttagatggattaaatgactccaagaaagtatcacctccaaaaagagaggttttatttgataaaattacatctcaggccatatctataggtgttggtattgtaccagccattgaaatagatcgaataaacattcttgaatcaacatataaagcaatgaaaatgtctttaggaaaactaaaccctgttccagaggaagcattaattgatggtttccctttaaatacacagattattccaaatcgaggtataattaaaggagatgaaacaattgatgttattaaggctgcttctatcattgcaaaagttactagagacagaataatggtaaaatatgatcagaaatacccattgtatggttttaaaaaacataaaggttatggaacaaaagaacatttaaaaatgttacaattacacaaatcttgtgatatacatagaaaaacttttaagccagtatcaaaaatgctaaaatga

SEQ ID NO: 260390 - DNA, 436 bp, Unknown
  Bacterial polypeptide expressing nucleotide sequence isolated from the Sargasso Sea
atgaataaaaaagttgatatatatactgacggcgcatgttcaggaaatcctggtcctggtggctggggtgttcttatcgaaatagataatgaaaatatagagctatcaggtggagatagagaaactacaaataatcgtatggagcttatggctgcaattaaggcactagaagaaatagataaagattatgaaatcaccctatatacagactccaattatgtaaaagatggaataacaagttggatatcgaattggaaaaaaaataattggaaaacagccagtaaaaaagatgtaaaaaataaggaattatggatgcgtcttgatgaagctataaaagataaaaatatatcttgggtttgggttaaaggtcacgctggtaatgcaggaaacgagcaagcagattatcttgctcgttcagcattagaaaaattataat

SEQ ID NO: 260391 - DNA, 628 bp, Unknown
  Bacterial polypeptide expressing nucleotide sequence isolated from the Sargasso Sea
atgcctaatttttttattgaaaaaaaatttaaaggtccagttataggtcttgatgaagttggtagaggacctctagcagggccagtgataagttgtggatgttactttaaagattataaatttataaataaaaataatgaatttattaatgactccaaaaagcttaatacaaaaaaaagattaattgcatttaattatctaaaaaaacttaaaagagaaaaaattcttgattacaaattaggtatagcaactgtagatgaaattgataaaattaatattttaaatgctactaaactttctatgaaaagggttattgaaaaatttcaattaacgaatcctacacttatcatagatggaaatttcaatttaaattacaaaaattataaagaaaaatctataattaaaggtgatcaaatttctttttcaattgcgtcagcatccattattgctaaaatacatagagatagactaatggccatcttatcaaaaaagttttataactttaattggcataaaaatgcaggatatggaacaaaaaaacatattcaagaaataatgaataatggacctactatttatcaccgaaaatcttttgaaccaataaagtcacttatccataataaatgat

SEQ ID NO: 260392 - DNA, 439 bp, Unknown
  Bacterial polypeptide expressing nucleotide sequence isolated from the Sargasso Sea
atgaaaaaagttgatatctatactgatggggcatgcagaggaaatccaggacctggaggctggggcgctttattgatccataatgatgtaaaaaagacaatatatggaggcgaaaaagataccacgaacaatagaatggagatgattgcagttatcgaagcattaaaattaataaaatcagattgcgaaatttcattgtacacagattcaaagtatgtcatggatggtgtcaataagtggttgtcaggctggaaacaaaaaggttggaaaacttcgaataaaaaacccgtcaaaaatcaagatttatgggaatctattgatcagtgcatcacgaaacacaatattgaatggcactgggtaaagggacacgcaggcaatcctggtaacgaattagcggatgagttggcaaacagaggaattgatgagttaataatatagt

SEQ ID NO: 260393 - DNA, 433 bp, Unknown
  Bacterial polypeptide expressing nucleotide sequence isolated from the Sargasso Sea
gatgaaaactgtaattatttacactgatggggcttgcagaggcaatcctggaccaggaggttggggagtgcttattgagtatggtgaatcaagcaaacagctttatggaggagatatttctactaccaataataagatggagctgacagcagccattatggctttaaaagaaattaaagaaccttgtgaaatcattctttatacagactcaaaatatgttcttcagggcatagaagagtggatacataactggaaaaaaagaggttggagaggtgcaaataagaaaccagtaaaaaatattgatctttggaaagaattagatgaacttagagatgaacataatataaaatggaactgggttaagggtcattctggtgatccaggcaatgaaaccgcagatatgctcgcaaatagaggtatagacgaactttaa

SEQ ID NO: 260394 - DNA, 607 bp, Unknown
  Bacterial polypeptide expressing nucleotide sequence isolated from the Sargasso Sea
aatgcaaaaaccgactcttgatctagaaaaagaagcttcaaaaaaaggatttaatttagtcgcaggtcttgacgaagctggaagagggcccctagctgggcctctagtagttgcatgtgtaattttgggaaagagtttgtgtgataatgatactattgacgactcgaagaaaataagcccaaaaaaacgagaagatctttttaagattattacaaacaaagcattagcttttaagattatctctattacaccagaagaaattgatagaataaatatattgcaggccacactttatggaatgtacagatgtttaaaagaaataaaacctattcctgattacgcgctagtagatggtaatcgttttccaaaaacacaaataatgggtaaatctgtaattggtggtgatcgtatttcaaaaagtatagcagctgcctctattttagcaaaagtaactagagacaggtttatgataaattcagcaaagctttatcctgagtggtcttttgaaagacacaaaggttaccctacaaaacaccataaaaatttaattttaaagtatggattaactccgttacacagaaaaacttacaacaaaaaacaaatttaa

SEQ ID NO: 260395 - DNA, 478 bp, Unknown
  Bacterial polypeptide expressing nucleotide sequence isolated from the Sargasso Sea
gatgactgaactaaaactgatccacatcttcaccgatggctcttgcttaggcaaccctggccccggtggctatggcattgtaatgaattataagggccatacaaaggagatgtccgatggttttgccttgacgaccaataatcgcatggaattattagcccccatcgtcgccctcgaggcgttaaaagagccttgcaaggtcattttaaccagcgatagccaatatatgcgccaagggatcaccacctggatccatggttggaagaaaaaaggctggatgacctcgaatcgtacaccggtgaaaaatgttgacctctggaaacggttagacaaagctgctcagctgcatcaaattgattggcgttgggtgaaaggccacgccggacacgctgaaaacgagcgctgcgatcaactcgcccgcaccgccgctgaagccagccctacccaagtcgatgaaggctatcagcctgagtcctaa

SEQ ID NO: 260396 - DNA, 556 bp, Unknown
  Bacterial polypeptide expressing nucleotide sequence isolated from the Sargasso Sea
ttgaaaaaaaatcttattgcaggcaccgatgaagttggtagaggttgtctagcaggacctgttgttgctgcagcagtgatcttgaaaaataaagtagataatctagatgattcaaaaaaattatctacgaaaaaaagagatttattatcaaaaaaagttcttgaaaattcttactatgggtttggaatagtttccaataatgaaattgataaaattaatattctgaatgcttctttattggcaatgaaaagagctatactaaacttaccaataaaacctgctttggttttagtcgatggcatatataaacctgatttaaatattcctatgaagactattattggaggtgattctattgaggatgcaattagtgcagcttcaataattgctaaagtatacagagataaccttatgattgaatacaataaaaaatatcctgattataattttaaaaaaaataaaggatatggaactaaggagcatttttttgcaattcaacaaaaggggatttgcacaattcatagaaaatctttcaagggtgttttgaataaatgac

SEQ ID NO: 260397 - DNA, 739 bp, Unknown
  Bacterial polypeptide expressing nucleotide sequence isolated from the Sargasso Sea
catgcttgcacggcacataggggtggacgaggccggaaggggccccgccattgggccactagttgtttcagcgctaaatattcctgagagggacagatcgattctcagagatttgggagtcgatgattcgaagaatctgagtaaaaagaataggaatcgcctgtataaggagattttatcatacactgaatcattagactggaccattggtttggtaatttgtgatgcaagaagaatagacgagtggatggatgacgggaatctgaattcattagaggtgctcctcttttccgaagcaataggagatgctgctgaacccggggagaatctagagatttttctcgatgcatgtgacgttgatgcagagaggttcggcaggatggtgtccaagtctcttggagatgattgggatgattgcaagatttattcagagcataagatggattccagagatgaagtcgttgcagcggcaagcatcattgccaaagtaagtagggactcagcaatggaagagctgtcacaggaattgaatattgatctaggttctggatatccctcggaccccaagaccaggggggccctagagatattgtgtaaggaagaagttcttgcggattgtatcagaagaaaatgggcgaatgtaaagagaacctggagcaggagccacaatcgtcccattcaaacaagagcgaatgaacgaaacggggtgtttcaatcggctctagatgaatgggaataa

SEQ ID NO: 260398 - DNA, 934 bp, Unknown
  Bacterial polypeptide expressing nucleotide sequence isolated from the Sargasso Sea
tatgatgatcatagcaggtgttgatgaagtaggtagaggcccgctagcagggccagtggtcgcagctgctgtgatccttcccaaagatcatacaattgagggcttaagggattcaaaaaagatatccaaaaaaaggcgcgaatctttattcccattaatatacgaacaggcaatagatatagggactggcgaagttgatgtaaaaacgattgataagataaacattcgagaagctacattcaaggcgatgaaaatggcgctagatgatctttctactattccagacagagccttgatagatgggcacccgctaaatgatcaatccattccaaatgaagggattattggcggcgatgataaagttgattccataaaagcggcatcgatcattgcaaaagtgaccagagatcgtatcatgaaagaatactcaataatctttccagaatatggttttgaaaaccatagtggttacggaacaaaaatccatatagaagcgcttgaaaaatatagagcaactcctattcaccggagatcttttaaaccggttaaaaacctaatgccaacctttaaatggctggtagaccatgatcgaatttcatggatgggaaaaaaaatagcagctctacacttaaaaaaaagtggaatgagtgttatggatttagactgggaagggatttcaaataattctatagatattgtcgcaaaagataatgaccatttgatctttgtagatgtaaatacttactataaaaatcaagatgatttgaaaaaggataatgaagtagataggttaaaaaaaaccatgcttccagctatgaatttgtatctaagtgacaaattagcagtatcaaattttagaattgattctatttcagtaatattgagcagcaataatcccgaaatattgcacaataaggatattaaaatagactaa

SEQ ID NO: 260399 - DNA, 445 bp, Unknown
  Bacterial polypeptide expressing nucleotide sequence isolated from the Sargasso Sea
atgaaaagaatcgagatatataccgatggagcatgcagaggcaatcctggtcctggtggctggggcgctttactcaaatttgataatcacgaaaaagaaatttctggcggagaggacaacacaacgaataatcgcatggagctcatggcagcaatcaaggctcttgaaacggtgaaagagatgtgcgagatcgatttatacacagattctaaatatgtgaagcagggcatcaccgagtggattatcaagtggaaagtaaatggatttaaaaattcaaaaaagaaacctgtagtcaatgctgatctttgggttcaattggatgatctcaccagtaaacataaaatcaattggttctgggttaaggggcatgcggggcatgaattcaatgagagagctgatttacttgccaataagggcttggatgacatgttggagagctcatgag

SEQ ID NO: 260400 - DNA, 571 bp, Unknown
  Bacterial polypeptide expressing nucleotide sequence isolated from the Sargasso Sea
ctggtggcgggtgtcgatgaggtgggtcgggggccgttggcgggtgatgtcgtcgcggcagcggtgattctcgcggaatctcctctcgagggcgtcaccgattcaaaaatgttgaccccggagcgacgggaagccctagctgaacgcattcgcgacgaggccgtgagctgggcgctaggacgcgccgcagtggccgagattgacgagctgaatatcttgcaggcgtcgctgctggcgatgcgccgggcagtcgaggcgctacccatacagccttcgttggtcttggtagacgggaatcgcttgcccaagtggccctatgaagcgcgtgccatcgtcaaaggcgacctatcgcaacccagcattgctgccgcatccattcttgccaaagtgcagcgcgacgcagagatgcaggcgctgcacgagcattacccggcatacgggtttgaccggcataagggctatccgacgaaggcgcatttggcggcgctagagaccgtgggtgtctctccggtgcaccggcggagctttggtccggtcagacgcttgctggcagaccccgaggtgggatagc

SEQ ID NO: 260401 - DNA, 631 bp, Unknown
  Bacterial polypeptide expressing nucleotide sequence isolated from the Sargasso Sea
aatggcggtatttaagacgctgaccgacaccgatatcgccaccttctcaacaggtttagtggcgggtgtggatgaagttggccgtggtcccctcgttggcgatgtcgtcaccgctgcggtgatcctcgatcctaatcgacctatttggggcttaaatgactctaaaaagctcagcgagaagcgccgcgaggcattattcgatgagatttgtgaaaaagccttaagctttcatgtggggcgggcaagtcctgcggaaattgatgagctgaatatcctgcatgccactatgcttgccatgcagcgcgcggtggcagggcttgcacgtgcgcccgagttagttttagtcgatggtaatcgcagcccggcgtttactcaccaagggctgtctttggcgagccatagcatagtcaagggtgatggcctgattgccagcatcagtgcagcctcgattattgccaaagtgacccgcgatcgggagatggatgccctcgatgccgcttatccacagtatggatttgctaagcataagggctatccaacgaaggcgcattttgacgccatcgccgagcatggtgtgttcgatcaatatcgtaaaagtttcaaacccgtcaaggcattactggagcgttaa

SEQ ID NO: 260402 - DNA, 436 bp, Unknown
  Bacterial polypeptide expressing nucleotide sequence isolated from the Sargasso Sea
atgtctattaaagtatatacagatggtgcttgtaaaggtaaccctggaccgggaggttggggagctttaattatagatggagattctagaaaagaactttatgctggaaatccagacacaacaaacaatcaaatggaaatgcaggcggctattgaagcactaaaatatttaaaaggaacttcagaaattatagaactgtatacagattctaattatttaagacagggtattaccgaatggattgttaattggaaatcaaataattggagaacagcatccaaaaaacctgtagccaatagagagctttggatagaagtagatgaactatcaaacactttaaatgttgagtggcactgggtaaaaggacatgacggagatccaggcaatgaaagggcagattatttagctaatttaggagcagatagtgtcagctaga

SEQ ID NO: 260403 - DNA, 442 bp, Unknown
  Bacterial polypeptide expressing nucleotide sequence isolated from the Sargasso Sea
aatgaaggtatacagagtatatacagatggagcatgtagcggaaaccctgggccaggagggtggggagttgtaattgttcataataatcagatagataaacttgatggttatgatcctcagacaaccaataacagaatggagcttttagcggctataaaaggtataaaagaaactccagataattcagaagttttgctttatacagactctaaatatgtcaaagatggaattacaaattggataacaaaatggaaaaaaaatgaatgggttacaagctcaaagacttcagttaaaaataaagatttatggattatacttgatgaattgaatagttcgcgtaaagtctcgtggcattgggtaaagggacatcaagacagcaagacagacgatagcttatataacaatttagcggatgaactagcaaggagcgcaattaaatga

SEQ ID NO: 260404 - DNA, 436 bp, Unknown
  Bacterial polypeptide expressing nucleotide sequence isolated from the Sargasso Sea
tatgtcttctccagtaataatctataccgatggcgcatgtaggggaaaccccggaccaggtggttggggagttctaattatcgaaaataataacgaaattacactttttggtggagaaaaaaatactacaaacaatcaaatggaaatgaccgcagctatagagggactgagctactttgaagaaagaacacatatagaaatttatactgactctaactatttgaaagacggaatagaatcttggattcactcttggaaaaaaaatggatggaaaactgcctcaaaaaaacctgttaaaaatcaagaattatggatgaaagttgatgaattaaatcaatttcataatgtatcctggagttgggttaaaggacatagtggaaatagagaaaatgatatagctgacatgcttgctaataaaggaatagacgaaatataa

SEQ ID NO: 260405 - DNA, 409 bp, Unknown
  Bacterial polypeptide expressing nucleotide sequence isolated from the Sargasso Sea
aatggctgtcccgctatggattcatggaagccgccggcgaccgctggtggccaatttttggcgccacctacatgatcaaggcgatcaagcgcgtgcgcggcatgcgcctcgtcggcccgctgaaagtgaagaaaccggtccttgccgcgggcctcgcgcccgccaccccgaacacacgcaaccacactcaatgacttccgacatcatcgatatttataccgacggcgcctgcaagggcaaccccggccccggcggctggggcgcactgctgcgctttggcgaccaggaaaaggaactgttcggcggtgaacccaacaccaccaacaaccgcatggaactgatgggggtgatcgccgcgctcgaggcgctcaagcgcccctgcaaagccgtcgtgcataccgattcgcag

SEQ ID NO: 260406 - DNA, 433 bp, Unknown
  Bacterial polypeptide expressing nucleotide sequence isolated from the Sargasso Sea
atgaaatacaaaatatatacagatggagcatgttcgggtaatcctggtcctggtggttgggcggttataattctggcgaataatgaaataaaagaaatgttttctggaagtgaaaaaaatacaaccaataaccaaatggaacttctggctcctattaaagcaattcaaaaatttaaaaaaaaatcagaaatttcagtttttactgactctacttatgtaaaagatgggatgacaacctggattaaacagtgggaaaaaaatggatggaaaactgcttcaaaaaagcctgtaaaaaataaagatttgtggaaaaaattaaaaaacctatcttccaagcattctataaaatggatttgggtaaaaggccatgcccaggacaaatataataatcttgttgacgagcttgctcaaggagctataaaaaataaatgat

SEQ ID NO: 260407 - DNA, 598 bp, Unknown
  Bacterial polypeptide expressing nucleotide sequence isolated from the Sargasso Sea
atgagaaaattttcaaaaattgaaagtgagctattactaaaggaagaattaactgttggtatagatgaggttggaagaggttctttaattggtccagttgttgcatgtgcttttcagcttgattcaatcattaaaaatattgaattaaatgattcaaaaatgctgtctgagaataaaagaatatctaaagttttagaactattaattaataattccgtatttgctctaggttattcgagtaaccaggaaattgatgaaatcaatattttaaatgcaaccaagcttgcaatgaaaagagctgtaaaaaatttaaatgctaagcccgctactctattaatagatggaaatcatgatattggcactggattgaaagagatatgtattatcaaaggtgataagacctgtaaatcgatagctgctgcatcaattatagcgaaattcaccagagattttatcctaaaaaaaatctctagaatctatccgtattacagattagaaaaaaataagggatatggaactcaagaacatgtagactcattaagaaaatatggtccaagcccatttcatagaaaaacttttagaatcaaacaaaattgac

SEQ ID NO: 260408 - DNA, 544 bp, Unknown
  Bacterial polypeptide expressing nucleotide sequence isolated from the Sargasso Sea
atgattgcaggcactgatgaggtagggagaggttgtctggcaggaccagtcgttgcagcagctgtaattttgaaagaagatataccaggattaactgattcaaagaagctttctcctaaaaaaagacaatttttggctgatttaattttaaaaaaatctttttttgcttatggagtagtttccaataataagatcgataaaattaatattctgaatgcttctttattggcaatgaaaagagctatacttaagttgcctgttaggccttctatggttttagttgatggtacttttaaacctgatttagatattccaatgagggcaattataggtggcgattcatctgagaatgcaataagcgcagcatcaataattgctaaagtgtatagagataatttaatgattaaatatgattctatttttcctgtttatgacctaaagggtaataaagggtatggaacaaaaaaacatttggaagctttaaagaattatggacattgcgaaatccataggacaacatttaatggcgtagttattaaatgag

SEQ ID NO: 260409 - DNA, 391 bp, Unknown
  Bacterial polypeptide expressing nucleotide sequence isolated from the Sargasso Sea
ttgaataataatataatagcaggaactgatgaggtaggcagaggctgcttagcaggaccagtagttgctgcagcagttattttaaagcaagaaattgctggtttaaaagattctaagaaactatctcctagcaaaagagttcttctagctgaagaaatattaaaaaattcttattacggatatggcattgttgataacaagaaaatagatgaaattaatattcttaaagcttctttattggcgatgaaaggagctatactaaacttaccagtaaagcccaatttggttttagtcgatggtatgtataaaccagatctagatatcccaatgaggacaattattggtggtgattcttctgaggatgtgattagtgcagcttcaatagttgcaa

SEQ ID NO: 260410 - DNA, 430 bp, Unknown
  Bacterial polypeptide expressing nucleotide sequence isolated from the Sargasso Sea
aatgaaatataaaatatatacagatggagcttgttctggaaatcctggtcctggcggatgggctgccataattataattgacgataaaattaaggataaaatttcaggtagtgaaaaaaatactactaataacaaaatggagttattagctccgatcaaggcaattcagaaatttaaaaaaaaatcagaaattttgatttttactgactctacttatgtgaaagacggtattacaacttggattaagaaatgggaaaaaaatggatggaaaacggcctcaaaaaaaccagtcaaaaatgtagaattgtggaaaaaattaaaaaatttatcatcaaaccactctattaaatggatttgggtaaaaggtcatgctcaaaacaaatataataatcttgttgatgaactcgctcaaggagctataaaaagataa

SEQ ID NO: 260411 - DNA, 430 bp, Unknown
  Bacterial polypeptide expressing nucleotide sequence isolated from the Sargasso Sea
atgaaatacaaaatttatactgacggtgcatgctcaggaaatccaggtcctggtggatgggctgcaataataatagtagatgataaaataagagatgagatctcaggtagtgaaaaaaacacaacaaataacaaaatggagttattagcaccaattagagctatacaaaaatttaaaaaaaaatctgaaattttaatttacacagactctacttacgtaaaagatggtattacaacttggataaaaaaatgggaaaaaaacgggtggaaaactgcttcaaaaaaaccagttaaaaatatcgaactatggaaaaagttaaaaaatttatcctcaaaacattccataaaatggatatgggtaaagggtcatgctcaaaataggtacaataatcttgttgatgaaattgcacaaggagctataaaaagataaa

SEQ ID NO: 260412 - DNA, 437 bp, Unknown
  Bacterial polypeptide expressing nucleotide sequence isolated from the Sargasso Sea
tatgacaaaaaacataaaatgtggtgatcaacccttagaagcgggagtcgatgaagcgggtagaggccctcttgctggtcctgtttctgcagcagccgttattttagatcctaaacaaaaaattgaaggtcttaatgattcaaagaagttatccgctaagaaaagagagattttgtctgatgagataaaaagaaaagctctttcctggaatatagttttaatacatcgagagactattgataaaataaacatattacaagcgtccctattagccatgaaagaagcagttgaagggttgacaattaagccagaaataattttagttgatggagaaaatgatatagatgtaaatcagccttgcaggccaatagttaatggcgatcagcaagttgaaagtataatggcagcatctatactcgcaaaagtcagacgtgatg

SEQ ID NO: 260413 - DNA, 571 bp, Unknown
  Bacterial polypeptide expressing nucleotide sequence isolated from the Sargasso Sea
tatgaaaaaggtagctggagttgatgaagttggaagggggagtttagttggtccagtatatgctgctgcagtaatatttaaaaaaaatatagataaaagtaagatcaaagattctaaaaaactttcaaaagaaaaaagaaatattttagaaaaatatattaaaaaaaactctatctggggcattggatctgtctctttaaaagagattgaaaaattaaatattttaaatgcatctttattggctatgaaaagatcaattaaaaaacttaaaataaaacctacatcaacattaattgatggaaataaattaccaaaaatgaaaggttacaaacttaagtctgtaattagaggagaccaaaaaatatctgaaatatcggcagcatctataattgctaaggttgcaagagatcggttaattacaaatatgtccaaaaaatttaaagaatatgcttgggataaaaatgcaggatatggaactaaagaacatctaaaagccattaagaaatttggtataacgaagcatcatcgaaaaaactttaggcctatacacaatatattgagtcaaaactaa

SEQ ID NO: 260414 - DNA, 445 bp, Unknown
  Bacterial polypeptide expressing nucleotide sequence isolated from the Sargasso Sea
gatgaaacgtatcgagatatacacagacggagcatgcagaggcaatcctgggcctggcggttggggcgctttgctgaaatttgataatcacgaaaaagagatctctggaggggaggacaatacaacgaataatcgaatggagcttttggcagcaatcaaggcaattgagtctgttaaagaaacgtgtgagatcgatttgtatacggattctaaatacgtcaaacagggcattactgagtggatcatcaaatggaaaactaatggattcaaaaactcaaaaaagaaacccgtggtcaatgcagatctatgggttcaattggatgatttaacgaataaacataaaatcaattggttttgggtcaaaggccatgcgggtcacgagttcaatgaaagagctgatatgcttgccaacaagggcttggatgatatgttggagaattcatga

SEQ ID NO: 260415 - DNA, 428 bp, Unknown
  Bacterial polypeptide expressing nucleotide sequence isolated from the Sargasso Sea
ttatcaattacaagcaacaaaaaaaattaaatttagcttaggaatggctagtgtaaaagaaattgatgaattaaatattttagaggctactaaattatcaatgaaaagagctgttataaaactcaaccgccctcctttacctttaataattgatggtaagatagatcttaaattaaggaattatcccagtcatgggattatcaaaggagatcaaaaatctttaagtattgctactgcatcaattatagcaaaagttcatcgtgacagatatatgcaatttttatcttatacttttccttattacaattggtcctctaatgctggatatggaacaaaaaaacatattgaacaaatatgcaaaaaaggaatcactattcatcatcgtaaaagttttgagcctataaagtcgcttatccataacaaatgat

SEQ ID NO: 260416 - DNA, 534 bp, Unknown
  Bacterial polypeptide expressing nucleotide sequence isolated from the Sargasso Sea
aatgaaagctggagtagatgaggctgggagagggcctcttgcaggaccagtctttgcagctgcagttatcctagatgaaactataaaaattgatggactgaatgattcaaaaaaaatctctgaaacaaaaagactggaacttgcagatgaaatcaaattaaaagcaatctcttggtcagttcaatcttgcagtgctttggagatagataaaacgaatatacttaaagccacgttggaagccatgaaaaaagctattgaagggttgtgttccagacctaaattagtcttggttgacggtcttcactctcccaagataaatgtgcctgttagaactattgttaagggagatcagttagagaaaaccataatggcagcctctattttggcaaaagtgcatagagataaatatatgaaaaaggttgatatcctttatccaaattatggatttaaacatcataaaggttatcctaccaagatccatcttgaggcattaaaatcttatggtataacagaagaacataggttaacttttaa

SEQ ID NO: 260417 - DNA, 544 bp, Unknown
  Bacterial polypeptide expressing nucleotide sequence isolated from the Sargasso Sea
actggtggcaggcacagatgaggtgggaagaggttgcttggctggaccggttgttgctgctgctgtaattttaaaaacaaaaatagataatctaaaggattcaaaaaaacttactgaaaaaaaaagagagttattatcaaaaattattctcgaaaattcattttttggatttggtattgtttcaaatttagaaatcgacaatataaatatactgaatgcttctttattagcaatgaaaagagctatacttaacttagaatcaaagccagctttagttttgattgatggtatacataaacctgatttagacgtgccaatgcaaacaattattggcggagattcgattgaacctgcaataagcgctgcttcaataattgcaaaggtttacagagataatttaatgaccgtgtacgacaaaaaatatcctgaatttaattttaaaaagaataaaggatatggaacaaaagaacattttcaagcaattgccttaaatggtatttgttgcattcatagaaaatcattcaaaggtgttgaaataagataa

SEQ ID NO: 260418 - DNA, 463 bp, Unknown
  Bacterial polypeptide expressing nucleotide sequence isolated from the Sargasso Sea
atgtccaaaacaaaagtagagatttacacagacggagcatgttctcctaatcctggagttggaggatggggagctattttaatttccagcaaacacaaaattcgtacagaaatttcaggtgctgaaggtgattccactaataaccgtatggagatgactgctgcaataaaggctctggaagcactaaagaaaccatgtgtcgttgatctctatacagactcaagttatctgaaaaatgcctttgaacaaaagtggataaataactggaagaacaaagggtggaggacaaagggaggggaccctgttgcgaacaaggacctttggcttcgcctccttgaagtaagccaaaaccataaagtttcatggtactgggttaaagggcactcaggacatccagaaaatgaacgctgtgacgaacttgctgttaaagctagaaaggaatggtcaaaatcagtaaaataag

SEQ ID NO: 260419 - DNA, 445 bp, Unknown
  Bacterial polypeptide expressing nucleotide sequence isolated from the Sargasso Sea
catgactaccgatacgatcgacatctataccgacggcgcctgcaagggcaaccccggccccggcggctggggcgcactgatgcgctacggcgacaaggagaaggagctgttcggcggcgagcccaacacgaccaacaaccgcatggagctgatgggcgtgatcgccgcgctcgaagcgctgaagcggccgtgccaggtgatcgtgcataccgactcgcaatacgtgcagaaaggcatcagcgagtggatccacggctggaagaagaaaggctgggtcaccgcggcgaagacgcccgtgaagaacgccgacctgtggaagcggctcgacgcgctcgtcgcgcagcatgaggtcgagtggcgctgggtcaagggtcacgcgggccatcccgaaaacgagcgcgcggacgcactcgcgaatcgcggcgtcgaatcgctcacggcctga

SEQ ID NO: 260420 - DNA, 343 bp, Unknown
  Bacterial polypeptide expressing nucleotide sequence isolated from the Sargasso Sea
aatgaaaagcaaattacttgctctttccaaaaatgaggaatttcaaaatttaattaaaaagaaaaaaatttcaaataagtatgcaacaattttttttggaattttagataataaaaatacaaataaactaaatatcagttttgtaacaaagaaaaaaataggaaatgcggtcgtaagaaataaaataaaaaggagacttcgaaacatactaaatgatgcagtcaaaaaaataccaataaaatttgattattcatatcttgttattgccaagccaaccatgttaaacagttcatttaaagatataaaagaaactttgtttcaagaatttaaaaaaattaaataa

SEQ ID NO: 260421 - DNA, 343 bp, Unknown
  Bacterial polypeptide expressing nucleotide sequence isolated from the Sargasso Sea
aatgaaaaacaagattgttagcctttctaaaaatgaggattttaagtctattctgagtggaaaaaaagtttctaataaatacttaacaattttctttaaaaaactttctgataaaaataataatagattaaatattagttttgtagccaaaaagaaaattggaaatgcagtaactagaaacaaaattaaaagaagactaagaaatataatgaatgaagctgtgaaatcaattaatattaatcttaattactgttatttattgattgcaagaatatctgttagcaaagatccttatgaagcaataaaaaaaacaacactagaagactttaaaaaaattaaatga

SEQ ID NO: 260422 - DNA, 343 bp, Unknown
  Bacterial polypeptide expressing nucleotide sequence isolated from the Sargasso Sea
atgagtatcaaattattgagtctatcaaagaatcaagattttaagtcactgctagcaggtaaaaaaatatctaataaatatattactattttcttcaaaaatctttctaataaaagtaataagtatttaaatataagttttgtcacacaaaaaaaaataggtaatgcagttaaaagaaataaagtaaaaagaagattaaaaaatataatgagccaaattttaaaaatatcaaaagtaaattgcaataattcttatttattcatcgcaaaaaaatcaattataaatgcaaaatttattgatattaaagaaactataataaaagattataaaaaaattaaataat

SEQ ID NO: 260423 - DNA, 343 bp, Unknown
  Bacterial polypeptide expressing nucleotide sequence isolated from the Sargasso Sea
atgaaaaacaagattgttagtctttctaaaaatgaggattttaaatctatcctgagtggaaaaaaaatttctaacaaatacttaacaattttctttaaaaaactttctgataaaaataataatagattaaatattagttttgtagccaaaaagaaaattggaaatgcagtaacaagaaacagaattaaaagaaggctaagaaatattatgaacgaagctgtaaaatcaattaacattaatcttaactactgttacttattgattgcaagaatatctgttagcaaagatccttacgaaacaataaaaaatgcaacactagaagactttaaaaaaattaaatgac

SEQ ID NO: 260424 - DNA, 343 bp, Unknown
  Bacterial polypeptide expressing nucleotide sequence isolated from the Sargasso Sea
atgagaagcaagatagttagcctttcgaaaaatgaagattttaaatcaatactcaacggtagaaaaatctcaaacaaatattctactattttttttaaaaaactttctaaaaaagatattaaaaaattaaatataagttttataactaaaaaaaaaattggaaatgctgttacaagaaataaaattaaaagaagactgagaaatataatgaatgaagcatcaaaaaaaataagtttaaaatataattattgttatcttattttagcgaaaagacttattttaaatgataaatatgaaattattaaggagactttgttctctgattttaaaaaaataaaataat

SEQ ID NO: 260425 - DNA, 343 bp, Unknown
  Bacterial polypeptide expressing nucleotide sequence isolated from the Sargasso Sea
atgaaaaacaagattgttagcctttctaaaaatgaggattttaagtctattctgagcggaaaaaaaatttctaacaaatacttaacaattttctttaaaaaactttctgataaaaataataatagattaaatattagttttgtagccaaaaagaaaattgggaatgcagtaacaagaaacagaattaaaagaagactaagaaatattatgaatgaagctgtgaaatcaattaacattaatcttaattactgttacttattgatcgcaagaatatctgttagcaaagatccttatgaaacaataaaaaatgcaacattagaagactttaaaaaaattaaatgac

SEQ ID NO: 260426 - DNA, 376 bp, Unknown
  Bacterial polypeptide expressing nucleotide sequence isolated from the Sargasso Sea
aatgagaactattccttcacgtgctatatttcttgcggctcgaacaaacggcgagaaagctctttcacggggtctggttatccaggccattgagaacgaagaacggcattggcggatcggctttacagctaccaaaaaaataggcaatgccgtaacgcgtaatcgggcgcgtcgcaggatgcgtgcgcttgctcgtaactatcttgtgccactcgcacagcccggcaccgattatgtactaatcgcgcggtatgataccgttaatgcagattggcaggacatggcaaaagggctacaaaaagcaattcgctacctgcatcgcagtatcaatcgaagtgggacaagacagaccgttaaggtatcggatcagaaatga

SEQ ID NO: 260427 - DNA, 262 bp, Unknown
  Bacterial polypeptide expressing nucleotide sequence isolated from the Sargasso Sea
atgaaaaacaagattgttagcctttctaaaaatgaggattttgagtctatcctgagtggaaaaaaaatttcaaacaaatacttaacaattttctttaaaaaactttctgataaaaataataatagattgaatattagttttgtagccaaaaaaaaaattggaaatgcagtaaccagaaatagaattaaaagaagactaagaaatattatgaatgaagcagtgaaatctatcaacgttaatcttaactactgttatttattga

SEQ ID NO: 260428 - DNA, 343 bp, Unknown
  Bacterial polypeptide expressing nucleotide sequence isolated from the Sargasso Sea
atgaaaaacaagattgttagcctttctaaaaacgaggattttaagtctattctgagcggaaaaaaaatttctaataaatacttaacaattttctttaaaaaactttctgataaaaataataatagattaaatattagttttgttgccaaaaagaaaattgggaatgcagtaacaaggaacaaaattaaaagaagactaagaaatattatgaacgaagctgtgaaatcaattaacattaattttaattattgttatttattgatcgcaagaatttctgttagcaaagatccttatgaagcaataaaaaacgcaacactagaagactttaaaaaaattaaatgac

SEQ ID NO: 260429 - DNA, 343 bp, Unknown
  Bacterial polypeptide expressing nucleotide sequence isolated from the Sargasso Sea
atgaaaaacaagattgttagcctttctaaaaatgaggattttaagtctattctgagcggaaaaaaaatttctaataaatacttaacaattttctttaaaaaactttctgataaaaataataataggttaaatattagttttgtagccaaaaagaaaattggaaatgcagtaacaagaaacagaattaaaagaagactaagaaatattatgaacgaagctgtgaaatcaattaacattaatcttaattactgttacttattgattgcaaggatatctgttagcaaagatccttatgaaacaataaaaaacgcaacactagaagactttaaaaaaattaaatgac

SEQ ID NO: 260430 - DNA, 358 bp, Unknown
  Bacterial polypeptide expressing nucleotide sequence isolated from the Sargasso Sea
taaacaaaaaaaattattaaaaactacagattttaatgatgttagaaaaagaggtagaagctggtcagatagaaatttaattttagttgtagctaagcgtgaatcatttaactcaaatgagcatactagaattggttttatagtatccaagaaaattggaaatgctgttgtaagaaataaatgtaaaagaagattaagagaacttctctcaaaaatagaaattgcttatggatttgatttagtttttatatgtagaaaatccatggttgcatcaaagtatgaagaaattcaattttcagtgttatccttattgagcagagctcaattaattaagtctatggcaacaaatgttgattag

SEQ ID NO: 260431 - DNA, 343 bp, Unknown
  Bacterial polypeptide expressing nucleotide sequence isolated from the Sargasso Sea
atgaaaaagaagattgttagcctttctaaaaatgaggattttaagtctattctgagtggaaaaaaaatttcaaataaatactcaacaattttctttaaaaaactttctgataaaaataataatagattaaatattagttttgtagccaaaaagaaaatcggaaatgcagtaactagaaatagaataaaaagaagacttagaaatattatgaatgaagctgtgaaatcaataaacattaaccttaattactgttatttattgattgcaagaatatctgttagcaaagatccttatgaaacaataaaaaacgcaacattagaagactttaaaaaaattaaatgac

SEQ ID NO: 260432 - DNA, 358 bp, Unknown
  Bacterial polypeptide expressing nucleotide sequence isolated from the Sargasso Sea
gttgactagctatacctttacgcgggagttacgcttgctaactcccgcgcaatttaaatctgtattttccaatcccatcaaagcatcttctgctgaaataaccttgcttgccattcctaattcggaacaacatccgcgtctgggtcttactgttgctaaacgctacgtaaaacgtgccaatcagcgaaatcgcattaagcgagtgatcagagatagttttcgcctcaatcaacacaatattcctcatcttgatattgttgtgctggttagaaatggggtgatggaaatggaaaatgccgaactcaacaagttgatagaaaagctatggcgcaaactcagtcgccgctacaatggctag

SEQ ID NO: 260433 - DNA, 358 bp, Unknown
  Bacterial polypeptide expressing nucleotide sequence isolated from the Sargasso Sea
gttgactagctatacctttacgcgggagttacgcttgctaactcccgcgcaatttaaatctgtattctccaatcccatcaaagcttcttctgctgaaatcactctgcttgccattcctaattcggaacaacatccgcgtttgggtcttactgtagctaaacgctatgtaaaacgcgccaatcagcgtaatcgcattaagcgagttatcagagatagttttcgcctcaatcaacacgacatccctcaccttgatattgttgtgctggtcagaaacggggtgatggaaatggaaaatgcagagatcaacaagttgatagaaaagctatggcgcaaactcagtcgccgctacaatggctag

SEQ ID NO: 260434 - DNA, 391 bp, Unknown
  Bacterial polypeptide expressing nucleotide sequence isolated from the Sargasso Sea
ttcagccgggaaaagcgactgctgaccccccggcaattcaaggcagtcttcgactccccaagcggtaaagctccgggcaaaagtgtcctgctgctagcgcgcgataaccagcttgatcatccccgcctaggtttggtgatcggcaagaagagcgtcaagctcgccgtcgagcgcaaccgcatcaagcgtcaaatccgcgagtcctttcgcctcaatcaggacaacctgacaggctgggacatcgtggtggtcgcccgcaaagggctaggtgatctggagaatggcgaacttgctcagcagttcggcaaactctggaaacgcttggcccgaagccggcccagtcgcgacgcagacttatcccccgggacaagcgacaatccccatgcgtaaa

SEQ ID NO: 260435 - DNA, 361 bp, Unknown
  Bacterial polypeptide expressing nucleotide sequence isolated from the Sargasso Sea
aatgcctacccagcacgccttttctcgggagttacgtctgttaactcccgaacacttcaaacgcgttttcgccgagcctgtccgggccgcttctccgcaaattacgcttctcgcctgtcccaataccctcgaacatcctcgccttggtctcgctgtgcccaaaaaagcactcaagcgtgccgtctggcgcaaccgtgtaaaacgggtggttcgggaaagtttccgcctcaatcaggccaatctgcccgctatcgacatcgtcgtgatcgccaaggccggtgtgaaagagatggataacgaggaactgttcaagttactggaaaagctatggcgcactctgtcacgccgttgcaatgggtag

SEQ ID NO: 260436 - DNA, 349 bp, Unknown
  Bacterial polypeptide expressing nucleotide sequence isolated from the Sargasso Sea
ctgattaaagaaaaaggacaatggtcaattcatggattgtggcctcagattggaacaaccgcgtatccaactttttgtcggaaagtcacctatgaccataatctattacaaccaattcttgccgatcttcacgaatgttggcattctaaccgaggttctgatgatactttctggaaacacgaatgggaaaaacatggaagttgtatgtatacagaaatgaccgaattagaatactttcaaaaaacacttactttatttgaatggtgtgtgaatgaaaattgtatttgggattatgcaacaggaacaaaagcattaattccctttgacttagacttcaaactaatgaaag

SEQ ID NO: 260437 - DNA, 388 bp, Unknown
  Bacterial polypeptide expressing nucleotide sequence isolated from the Sargasso Sea
tatgtcaaataataaattttattatttatctcttatttttgaaaatagttgttggaatatacatggattatggccccaatttaataaaacaagctatccacaatattgtaagaatgtaacctttaatccatccttattaaatcctattaaatcagatttagaaaaatattggagttctgatagagaaagtgataataaattttgggaacatgaatggaaaaaacatggtagttgtatgtttacaaatatgaatgaatttaattattttaataaagcattaactttatttaaaaaagtaagttctatgggtataattgaaaaatatagacaagatgataaagctatgattcctttcgatctcaattttaaaattattaataaactataa

SEQ ID NO: 260438 - DNA, 1147 bp, Unknown
  Bacterial polypeptide expressing nucleotide sequence isolated from the Sargasso Sea
atgacagctttattttctcttcccctccacaaccgcgcaggtatttgtcgccattgctatggcttgctggggctgttattgatagctttaacgcccatagcccttcaggcggtgcccgcctcgggagagtttgtcgccaacaagcgctgcgaactgtttcagtctaaaaataaacaaaccaatcccgatgattggcagagcaatattggcgagcgttatcccgtcgccgaaattctaggtaatagcactaatcccgattggctcagggtgcgcaccaatgctaccagttcgccactgcgttggataaaaggtgattgcgggcaatataatgcaagttcagcagtaacgggggcttatcaaccagcctcgaatgccgaacctgcgcaaacgacgaccgcatcagatataaaagccatcgatagtgaaagcttaaaagaacaaggaataccagagaagcgccaaggcaatatgtgccaaatcgaggataactacgattccaatgtgctcgccctaagttggcagagcaccttttgcgaactctatggcagccgtaaagccgagtgccgcatcttaagccaaacgagtgatgcgcctcagtggcaacactttagcctgcatggcctgtggccgaatcgccagcaatgtggcacccgttacggcttttgcagcagcgtgaaacaacaaccgagtgatttttgtgattatcccgaggtgcagctcaatgcctctgtccaaaaaaatctcgaggaagtgatgccaagtgcccgctacggcagctgtttagagcgccatgaatggtggaaacatgggacctgtcgcaaccaagaccctaatgactactttttactggcgactcagctgacgcaggaagtgaatgcctcggcatgggtacaacaatttatccatgacagaatcggtaaaaaagtgactcaacaggagctaaatcaaagctttgatgccagctttggccaaggtgcacacactaaggtcaccctagactgtgccaaaggactcttgagtgaaatccgcatcagcctacctcaggtcatcaacagctccgactctttgcctagtctgctcgctaaggcgccgaaggcgaaaaagactaattgcccagatctgttattaattgatatgccaaactaac

SEQ ID NO: 260439 - DNA, 1075 bp, Unknown
  Bacterial polypeptide expressing nucleotide sequence isolated from the Sargasso Sea
gctgttgttgataggttttacgcccatcgcccttcaggcggcccctgcctcgggggagtttgtcgccaacaagcgctgcgaactgtttcagtctaaaaataaacaaaccaatcccgatgattggcaaagcaatattggcgagcgttatcccgttgccgaaattttaggtaatagcactaatcccgattggctcagggtgcgcactaatgccaacagctcgccactgcgttggataaaaggtgattgcgggcaatacaatgcaagttcagcagtaacggggacttatgaagcagcctcgaatgccgaaccagcacaaacgacgaccgcatcagatataaaagccatcaatagtgaaagcttaaaagaacaaggtacaccagagaagcgccaaggcaatatgtgccaaatcgaggataactacgactccaatgtgctcgccctgagttggcagagcaccttttgcgaactctatggcagtcgtaaagccgagtgccgcgccttaagccaaacgagtaatgcgcctcagtggcaacactttagcctgcatggcctgtggccgaatcgccagcaatgtggctcccgttacggcttttgcagcagcgtgaaacaacaaccgagtgatttttgtgattatcccgaggtgccgctcaatgcctctgtccaaaaaaatctcgaggaagtgatgccaagtgcccgctacggcagctgtttagaacgccatgaatggtggaaacatggcacctgtcgcaaccaagaccctaatgactactttttactggcgactcagctgacgcaggaagtgaatgcctcggcatgggtacaacaatttatccatgaaagaatcggtaaaaaagtgactcaacaggagctaaatcaaagctttgatgccagctttggccaaggtgcacacactaaggtcaccctagactgtgccaaaggactcttgagtgaaatccgcatcagcctacctcaggtcatcaacagctccgattctttgccgagcctactcgcgaaggcgccgaaggcgaaaaagactaattgcccagccacactgttaatcgacaatccaaactaa

SEQ ID NO: 260440 - DNA, 649 bp, Unknown
  Bacterial polypeptide expressing nucleotide sequence isolated from the Sargasso Sea
atgaagaagattgttgtgctgctcggcatgctgctggccccctggttctcctccgccgttcaggccaaaggggaggctggcgaatttgactattacgccatggcgctctcctggtcaccggagcattgcgccatcaagccggccgaccgagaccaatgttcccgccagctgggattcgtgctgcacgggctctggccccagtaccagcgcggctatccgagcagctgtagccgcgagcggcttgatccggcgatggagctgcagtttgccggcctctatcccagccgcttcctctatcgccatgagtgggagaagcacggtacttgctcaggtctgagccagcgcggttttcatcagctggccagcgacctgcgccagaaggtgaagatcccggccgcctatcagtcttccgccgagccgctgcgcaagagccgcttccagctcaaggcagatctggccagtgccaacgactggttggccccggacagcatcacggtggcctgcgccgacggtggccgcttcctgcgggaggtctatatctgcatcaacaaggaggggacggcagccgtcacctgttccgacgagatgcaaaagcgcgagttgcgctcctgcggtcagccggacttcctgctgcgcagcgtacgttgac

SEQ ID NO: 260441 - DNA, 1060 bp, Unknown
  Bacterial polypeptide expressing nucleotide sequence isolated from the Sargasso Sea
catgtctgcagcacccgcatatgccgtccccgccacaggggagtttattgccaataaacgctgtgagttgtttcagtctaaaaataaacaaaccaatcccgatgattggcagagcaatatcggtgaacgttatcccgttactgagattttaggaaacagcgtcaatcctgactggattcgcgtccgcaccaatgccatcagttcaccgttacgctggattaaaggtgattgtggacaatacaataccaatgtagcggcggcagagacttatcagccaaactcaaccaaagagcctgcgcaaaccactacagcatctgatatcaaagccatcaatcgtgaaagcctaaaagaacgaggtacgccagagaaacgccaaggccatgtgtgtcaaatcgaagataattatgactcccatgtgcttgccttaagttggcaaagcaccttttgtgaactctatggcggtcgtaaagccgaatgccgcgccttaagccaaaccagagatgcgcctcaatggcaacactttagcctgcatggcctctggcctaatcgccagcaatgtggcactcgttacggcttttgcagtagcgtaaaacaacaaccgagtgatttttgcgattatcctgaagtaccgctcaatgcctctgtgcaaaagaatctggaagaagtgatgccaagtgctcgctacagcacctgtttagaacgccatgaatggtggaagcacggtacctgtcgtaatcaagaccccaatgactattttttactggcgactcagctgacgcaggaagttaatgcctcgacatgggtacaacaatttatccatgaaagaattggtaaaaaagtcacacaacaagagttgaatcaaagctttgatactagcttcggtaaaggtgcacacactaagatcacgcttgattgcgccaagggactcttaagcgaaatccggattaatcttccacaagagatcaagctatcagactcaattccgagcctacttgctaaagcacccaaggcgaaaaagactaactgtccggacccactctctatcgacaaaccaaactaa

SEQ ID NO: 260442 - DNA, 544 bp, Unknown
  Bacterial polypeptide expressing nucleotide sequence isolated from the Sargasso Sea
atgtatatatttagtatgtgtttttattatttatcaagatttatagactacattaatccttttaaagaatgtcctattaatatttttgataaaaaaaataatttttattatttagcattaaaaagagaaaatactgatcatagttggtctatacacggtttgtggcctcaatataatgataaaacatatccaaaatactgtcaaaatattaaatttgatccatcaaaaattgaacttattgtagatgaattaaataaattctggtattcaaccgaagaaaagaacgaacaattctggtgtcatgagtgggaaaaacacggaacatgtatgttcgatcaaagcgatgaatttgattatttcaaaaaagccttatcactttttgtcgaagtacatcaatcaggatgtataaaagattatccacttgaaaaagatggtcttcaagttaaaattccttttgacaacgaatataatattattaaacctgataaagacttagaaaatgataattcagatattgaattagatatggttaaaatagtttaat

SEQ ID NO: 260443 - DNA, 373 bp, Unknown
  Bacterial polypeptide expressing nucleotide sequence isolated from the Sargasso Sea
attgatccttgaagaagataattcctggagtattcatggattatggccacaatattctataaatagatatcctaaattttgtagagatatagattttaatgtgaagaagattgaacctataaaagcggatttagaaaaatattggtattctaataaaggaacagacgacaatttttggaaacatgagtatttaaaacatggtacatgtaattttaatgatcttaatgaattagaatatttcaaaactacactcgatttatatttaaatgtaattgatttaaactatcctgaacgtttttacaatgaaaacacgaaaaaatgtttaatacccataaatagaagtcttaaagtatttgaaattgattttgattaa

SEQ ID NO: 260444 - DNA, 658 bp, Unknown
  Bacterial polypeptide expressing nucleotide sequence isolated from the Sargasso Sea
atgaattataggctaaaaaaaatatcaggagatgcatcttttagggaattttatagattaaaaaaaggaaatagaacttcaattatagtaaaagcaaacaaagaaaaatataaaaatttaattgcttacaccataataaataaaattcttaagcaaaacataattatcgcacctaaactcttaaacaattactatcagcataatatgatcgaaatttcagacttaggacaaaaaactttttttgatatgatattgaaaaagaaaaaaaaattaaattactacaaaaatttaataaaaattatatttaaacttcaaaaaataaaaattaaaaaaaaatatttttttgaaaaatacaaatttaaatttcaaaaatattctttaaaaaatcttcataaagagtctgatttattttttgattggtatttaaagtttagttcaaaaaatttgaaaattaacaaaattaaaaaaattttaaaatttgaactaaataaaatgtacaaaaaactttattttaataataatacttttgttcatagagattttcatgcatcaaatattatgattaacaaaaaaacttttggtttgattgacagtcaggacgcgataaaaggtaatcctctttatgatgtggtttcgttaattgacgatgtaaggatta

SEQ ID NO: 260445 - DNA, 693 bp, Unknown
  Bacterial polypeptide expressing nucleotide sequence isolated from the Sargasso Sea
aatgaaatataaattaaaaaaaatttcaggggatgcttcctacagagaattttatagattaaaaaaaaacaacaaaacctcaataattgttactgctaaaaaagaaaaatttaaaaaccttgcggtatatgcagtgattaataatgttcttaataataacaggattaatgctccgaaattattaagcaatcattataaaaatgatatgatcgaaatatctgatttaggggaaaaatctttctacgattacgtaatctcaaaaaaaaacaaactaaatagttataaatcattgataaaattaataatcaagatacaaaaaattaaagtaaaaaaactttataaatttaaaaattttaaaattacaataccaaaatatacattatccaatcttcataaagagtccgatttgttttttgattggtacttaaaatatgctcttaaaaataaaaaaattactaatataaaaaaaatatttaaatctgaattaaataaagtttataaaaaactaaattatcaaaataatactttcgtacatagagattttcatatttcaaatataatgattaataaaaaaaaattaggaataattgatagccaagatgctattattggaaatcccttgtatgatgtagcatctttagttgacgatgtaagaataaaattaccgcaccaattacaaaataaattattaga

SEQ ID NO: 260446 - DNA, 526 bp, Unknown
  Bacterial polypeptide expressing nucleotide sequence isolated from the Sargasso Sea
atgttaggcacacctaaaaattttttatttctttttttatttatatttaataacttaacagcaaatgaattatcagatgatcaagatttaagagatgctcataataaatctttaaaagctttaaaagaatttgatcaagccattgaaaataatccatataattttatagattctaatgcacaacaaatggttttagttctaacaaaaaatgcagaactatttgagtctgatagagaagcctatgaaaacaaaattaaggatatttttgaaccgatgattgattttagaagagttgctgcaagcgtaatgggcaaaaaatattatcttcttgcaacaaaagaacaaagagctgaatttgtagaaatttttaaagattcacttcttgatacttatgcagaaactcttgctcaatggggagattcgactatatcaacaaaatttgaagaggattattcatttatagaaaaaaacgctgttgaagtaaaacagactcttgatactggaagcagtaaatatcccatttaaa

SEQ ID NO: 260447 - DNA, 817 bp, Unknown
  Bacterial polypeptide expressing nucleotide sequence isolated from the Sargasso Sea
aatgaattataaattaaaaaaaatttcaggagatgcatcttttagagaattttatagactgaaaaaaggaaataaaacttcaataatagttcaagctaataaagaaaagtttaaaaatttaatcacttatgtaattataaataatattcttaacaagaacaagattaatgcgcctaaactcattagcaatcattataaacacaatatgattgaaatttcagacttaggaaaaaaaactttttttgacataataataaaaaaaaaaaataaattaaattactataaagatttaattaaaattattttaaaattacaaaaaataagattaaaaaaaaaatataatctaggaaaatataaaattacgtttcaaaaatatactttacaaaatcttcacaaagagtcagacttattttttaattggtatctaaagtttaactcaaaaaatttagaaattagaaaaataaaaaaaattttaaaaaaagagcttaacatgatttacaaaaatctttatttcaaaaataatacttttgttcatagagattttcatgcatcaaatattatgataaataaaaaaacttttggcttagttgatagtcaagatgcaataattgggaatcctctttatgatgtagtctcattaattgatgacgtacgaattaaattacctattagtttacaaaataagctacttaagttttattattcaaaatctaaattaaagagagaaagttataataatttaaagaatgactacgatattttatctgttcaaagaaacttaaaaattttagggatattcgttagattaagtaaaaga

SEQ ID NO: 260448 - DNA, 697 bp, Unknown
  Bacterial polypeptide expressing nucleotide sequence isolated from the Sargasso Sea
aatgttagatttaaaaaatgtctatctttatttattttctgtaaaaaaaataactcttaaaacacttaaagaatttttttttttaacaagaatatataataaaaccttaaattctgagataccctctaaactattttttcagcctaatccgtatttattatcacctttatttaatcatgagagttttgtattcaaaatttcacaacaaagtatttacaatttttggaataagaaacttagtttaagggagaaaaatagtatccacaattttttatggttaaatctaattgatagaaaaaatgaaaaggaaattattcaaagtattattaaagattggattcaaaaatataataattataagaaagatatttggactgaaaatataattcctaaaagaataatagcttggttatcaaactcagatataattcttagtagtaaaaaaaaagattttgaaagagattttttgaattgcttaattagacagataaattttgtaaaaaaaaatttaaatacatttgttcatgaagctaataaaatttcatctgtaagtgctattattttgtcagggcttgtttttaaagagtattacacgaattatttgtttggacttaaagaattaaaaaaaataattgagaactcctttgataatgatggatttccaaaaaatagaaacccagagaatcttgttactttt

SEQ ID NO: 260449 - DNA, 925 bp, Unknown
  Bacterial polypeptide expressing nucleotide sequence isolated from the Sargasso Sea
ttttagagaattttatagattaaaaaaaaataataaaacctcaatcatagtttctgctaaaaaggaaaaatttaaaaatcttgcggtatacacagtaataaataatattcttaatagtaataggattaatgctccaaaattattaagcaaccattataaaaatgagatgatcgagatatctgatttaggagaaaaatctttctacgatcatgtaatttcaaaaaaaaataaacttaatagctacaaactagtagtaaaattattaataaagatacaaaaaataaaagtaaaaaaactatatagatttgaaaagctaaaaattacaataccaaaatacacattatccaatcttcataaagaatctgatttattttttgattggtatttaaaatatgttctgaaaaataaaaaaattactaatattaaaaaaattttaaggcatgaattaaataaagtttataaaaaacttaattatcaaaataatacttttgtacatagagattttcatatttcaaatataatgattcataaaaaaaaattaggaataattgatagtcaagatgctattattggaaaccctttgtatgacatagcatctttaattgacgatgtaagaataaaattaccgagtcaattacaaaataaactatttgatttttatcataagaattcaaaacttaaaaacgatcatattcaaaaattaaaaaatgactttgatattttatcagtccaaagaaatttaaaaatattaggaatattcgtacgtttatttaaaagagataacaaaaatcattatcttaaatttttaccttacacttggatgcttatagaaaaaagattacaaaatcctgtgcttaaaaatttcaaattattattttataaacacttacctattaaaaatcttaagaaaataaataaaatatga

SEQ ID NO: 260450 - DNA, 625 bp, Unknown
  Bacterial polypeptide expressing nucleotide sequence isolated from the Sargasso Sea
aatgttaagcacacctaaaaattttttatttctttttttatttgtatttaataatttaacagcaaatgaattctcagatgatcaagatttaagagacgctcttaatgaatctttaaaagctttaaaagaatttaatcaagccattgaaaataatccatataactttatagattctaatgcacaacaaatggttttagtccttacaaaagatgcacaactatttgagtctgacagagaagcttatgaaaacaaaattaaggatatttttgaaccgatgattgattttagaagagttgctgcaagcgtaatgggcagaaaatattatcttcttgcaacaaaagaacaaagagctgaatttgttgaaatttttaaagattcacttctcgatacttatgcagaaactcttgctcaatggggagattcgaccatatcaaccaaatttgaagaggattattcatttgcagaaaaaaacactgttgaagtaaaacagactcttgatacagggagcagtaaatatcctatttcatataaattaagaaaacacgaagaaggttggaagattattaatattattataaatggcgtaaatttgggtttaacctttagaaatcaatttcaagctctt

SEQ ID NO: 260451 - DNA, 753 bp, Unknown
  Bacterial polypeptide expressing nucleotide sequence isolated from the Sargasso Sea
aatgaaatataatttgaaaaaaatttcaggagatgcttcttttagagaattttatagattaaaaaaaaataacaaaacttcaatcattgtctcggctaaaaaggaaaaatttaaaaatcttgcggtatatgcagtgattaataatgtgcttaacaataacatgattaatgctccaaaattattaagcaatcactataaaaatgatatgatagaaatttctgatttaggagaaaaatctttctacgatcatgtaatttcaaaaaaaaataaacttaacagctataaattactgataaatttattaataaagatacaaaaaataaaagttaaaaaatattacaaatttgaaaaacttaaaatcaaaataccaaaatatacaatatcaaatcttcataaagagtcagatttgttctttgattggtacttaaaatattttataagcaataaaaaaattagtaaaattaaaaaaattctaagatctgaattaaataaagtttacaaaaaacttagttataaaaataatacttttgtgcatagagattttcatatttcaaatgtaatgattaataaaaataagttaggaataattgatagccaagatgcaattattggaaatcctttgtacgatgtatcatctttaattgatgatgtgaggataaaattatcaaataaacttcaaaatcaactttttaatttttatcataagaattcaaaattgaaggacgatcaaattaaaaaattaaaaaatgactt

SEQ ID NO: 260452 - DNA, 211 bp, Unknown
  Bacterial polypeptide expressing nucleotide sequence isolated from the Sargasso Sea
tctgaatactggaagcagtaaatatcctatttcatataaattaagaaaaagtcaagaaggatggaagattgttaatattattataaatggtgttaacttaggattaacgtttaggaatcaattcgaagcccttgcaatttctaataatgacgatattgaatccactttaaataattgggtatctgatgcaggcgatgcaggtatttcttaa

SEQ ID NO: 260453 - DNA, 1432 bp, Unknown
  Bacterial polypeptide expressing nucleotide sequence isolated from the Sargasso Sea
tatgaaagaagtaaagtttcggtgggttgaccgttatctcattcacctcacgatcagcgaaaaatttctcatcaccttctggtgcccgctgctgttcatcgcctttctcagctggtatctgctggcagacggtcaccagcaacagatgcagctgcgcctggatcagctcaagcagcgggtcgaactcagtgcccagctatcaagccagcacgccggtctcaccctgccggccgagctcaccctgagcccgaccggcagcacagggttaacccagcagggcgacatctatcgatacggtgccagcgccggccaggccgggatcgtcaccggcaccctggatgcctcccgctactccatgtgggatggtcagggcaccacgctcaccatcatcgccgtgctggctgccctgctggcgctggtcacccactacctgatgacctttgtctccggtgcgctctactccaccaacaaggcgttgcagaccgtggcggatggcgatctcaccttccgcctcaacttcttcccggtgcgcgacgaattctccattctggcgggcagcatcgacagattcaccgaccgccaacacaagatagtgcaactggtagaagagtccgccgaggcgctcaccctggccgccgacgagtttcgcgatcacgccagcgagggtgagagcatggcccgctcccagcgccagcacatggactccctggccgccgccatggagcagatgtccgccgccatccgtgaagtggcccgcaacgccaacgacaccctgcagcagacccgtcagtcgagtgaagaggcggccaacggcgccgcccgggtatctcgtaccatcgccgccatccgcaccctggccgacgagatcggcaacgcctccggcgcggtagaacggctgacccacaacgccaaccgcatcaacgaagtggtcaacgtcatcaatgccatctcccagcagaccaacctgctggccctcaatgccgccatcgaggccgcccgtgccggcgaacagggtcgcggcttcgcggtggtggccgacgaggtacgcaccctcgccagccgcacccagcaggccacggtggagatccagcagatgatcgaagagctgcaggccggcaccggcgcgctgaacgacatcatggagaaaaccgtaggccgcgccgccagcagccaggccttgatcagcgaagtggggctcgacatcggcaagctcagcaaccacagcgatgcggtgctggagatgagcacccagatcgccacctccagcgaacagcagagctcggtggccgaggagatcacccgcaatctggatcaggtgcgccacgaagcaggtcaggtagaagagtccgccagcgcctcggtggctggcaccgccggcctcaaggccaccgccaccgagctggcacaggcattgaaggggctaaaaatctaa

SEQ ID NO: 260454 - DNA, 954 bp, Unknown
  Bacterial polypeptide expressing nucleotide sequence isolated from the Sargasso Sea
atcaaatttaaagttagattcagaaggtgagtctgtcataagccaaactagcgaatctagcgaatctagcgaatctagtgaatctttacaggtggatcagactgtagaattaacgactaaacaggaatcagttgcttcacaatcttttgaaatagacacggttaatgatttagatcatgaatcaaaaagcagtgaggctgttacaaaaaacacattagaatcagatgatctagatagcagtgaaaatgattttagtaatatgcttgaggcttcggttaaggactataaagaaggtgatatcgtaaaaggtattgtcagaggaatagaaaaaacaggtgttttagtagatataaaatataaatcagatggcttcattacaaatacagaatttagccatgatccagatgaaacaccaaagaaagtactaaatttaggtgatgagattgatgtgtatatagagagattagagagtaaagaaggctatattattctttctagaaaacgtgctcaatacgagcttgcttggactgaattacataaatttgcaaaaattaatgaagaagtagacgttagaattacatcaaaagtaggcggcggattagtagtagattattttggtataaaaggatttatgcctgcatctcaagtagtagatggaaaagatgaagctaatttagagtcttatattaatacaaagatgaaagtgtcagtattaaaagcagatagaagaagacgcaaagttatatttacgaataaatctataggtgcaggtccatccaatgatatgagatctaagttaattgaagaattagaggtaggtcaaataagagaaggtaaagtaacaagcataaaagattttggagtatttattgatttaggtggtattgaagggcttgttcatatttcagagatttcttggacgagggtgcaacatccttcagatatcctaaatat

SEQ ID NO: 260455 - DNA, 826 bp, Unknown
  Bacterial polypeptide expressing nucleotide sequence isolated from the Sargasso Sea
tatgtcaattattaatcttaatgatgcgaggatattaattacaaatgatgatggaatatctgcagagggtattaaaatactaagaggtattgccaatgaattttcaaatgatgtatgggtcgttgcccctgaatttgaaaaaagtggcgcatcacatgctttgtctttccaaaacgaattaacattaaaaaagtacgaagagaagtcatattcccttaatggcactccaagtgattgtgttgcaattggtattagcaatgttttaaaagataaaaggccagatttaattctttcaggtatcaatagtggctgcaatgttggagaggatgttacatattcaggtacaattgctgcagcaatggaaggattaattagacaaattccatcaattgcaatcagtcaaaattatgaagctggcaaaaaaaatcagatatcttgggattcttcaaaaacttatttgaaagatttacttgttgatttaacaaaaaatggatggggcaagaatgtttttatgaatataaatttcccctattgttcagcagatctggtagaaagcattcaaatcacgacacaaggcaaccgagaatcggatgatttaattattagagaggttgagaagtcaaagtttaggtttggcttaagaaggaggcttgaagataatgccaaactaactattgctccaataaatgaagttatcgaaggatacatgagtgatgttgaggctatagccaataaacacatttcagtcacaccccttcatcttgatttaaccgaccacaagagccttgaagtcttaaaaaaaggtttaaaattaaacctaaactaa

SEQ ID NO: 260456 - DNA, 826 bp, Unknown
  Bacterial polypeptide expressing nucleotide sequence isolated from the Sargasso Sea
atgtcatttattaatcttaatgaagcgagaatattaattacaaatgatgatggaatatctgcagagggtattaaaatactaatatctattgccaatgaattttcagaagatgtctgggtcgtagcacctgaatttgaaaaaagtggcgcatcacacgctttgtcttttcaaagtgaattaacacttaaaaagtatgaagagaagacattttccgttaatggtactcctagcgactgtgttgcaattggtattagcagtgttttaaaagataaaaggccagatttaattttgtcaggtatcaatagtggctgcaatgttggagaggatgttacatattcaggtacaattgctgcagcaatggaaggcttaattagacgaattccatcaattgcaatcagtcaaaattatgaagctggcaaaaaaaatcaaatatcttgggattcttcaaaaacttatttgaaagatttacttgttgatttaacaaaaaatggatggggcaagaatgtttttatgaatataaatttcccctattgttcagcagatctggtagaaagcattcaaatcacgacacaaggcaacagagaatcggatgatttgattattagagaggttgagaagtcaaagtttaggtttggcttaagaaggaggcttgaagacaatgccaaactaactattgctccaataaatgaagttatcgaaggatacatgagtgatgttgaggctatagccaataaacacatttcagtcacaccccttcatcttgatttaacccaccacaagagccttgaagtcttaaaaaaaggtttaaaattaaacctaaactaat

SEQ ID NO: 260457 - DNA, 298 bp, Unknown
  Bacterial polypeptide expressing nucleotide sequence isolated from the Sargasso Sea
atgcggcgtcgaacgcgaacggtgacgcgtcggaagacgcgtgcggtgccgtcggacgcgtcggtggcgtcgacgacggcgtcggaatcgtcggaatcgtcggaatcgtcgttcgattggtttcaggcgtggtatccgctgcgaccgacgagttttttagacgccgacgaaccgaacgaggtgcgcgtgctggggaagaaactggtggcgtacctcgataaaacgcgcggtgagtggtgcgtgttggaggacagttgtccgcacagacgagcgccgttgagtctgggatacggcaaaa

SEQ ID NO: 260458 - DNA, 649 bp, Unknown
  Bacterial polypeptide expressing nucleotide sequence isolated from the Sargasso Sea
tatgagatacaaaaacaataaaaacctctgcttatttttcacactacttcttctaactgttcctatttctgcgcaggagacagctgaatcctggtatgaggaaggtagagcagttgtcgaacgcaatctttcataccgttatcccaatgcggaaattcctatcgctaagaacgtaatactttttgtaggagatgggatgggagtttcaactgttacagcagcaaggatattagaaggccaaatcaacggcaattacggagaggaaaatgagcttttctttgagacctttcccaacgttgcgctttcaaaaacatacaataccgatgcacaagtccccgactctgcaggaacaatgtccgcaatggtcaccgggataaaaactgatcgcggagtattaagtgttaatcaacaagtaacaaggagcaactgtaactcctctctgggaaatgaagtgcctaccttcctggaaatagccgagcagaaaggcatgtccacagggatagtcagtacggccaggattactcatgcaacacccgcagccaattatgctcattcagtcgaacgcgaccacgaggatgatcgagacgcgacccgtcttacaaatccagaaaactgtagggatattgcatcacaactaatcgagttaaat

SEQ ID NO: 260459 - DNA, 1435 bp, Unknown
  Bacterial polypeptide expressing nucleotide sequence isolated from the Sargasso Sea
atgaatcgaatcaaactggcggcgctgctgtgtgcaggcgcctttgcactggccggatgcggcagcgacgacggcccgaccagcacggcgcccggccccgtgcaggcggcggcgcgcaacgtgatcttcttcctcggcgacggcatggggatcacgacgatgacggccgcgcgcatctatgcggtcggtgaagacggcgcgctcacgatcgacacgctgcccgaaaccgcgttcgtgaagacctattccaacgatgcgcaggtgacggacagcgcgccgtcgatgtcggcgtacatgaccggcgtcaagaccaacaacgaagtgatctcgatgacgcccgacacgaaggcgatcgagccgaccgcgagcctcaccggcaactgcggcgcgaacaacggcaaatcggcgacgacgctgctcgagatcgcgaaggcgaaggggctggctaccggtgtcgtgacgaccacgcgcgtcacgcatgccacgcccgccgcaacgtacgcacacgtgtgccatcgcgacgccgagaacgacatcgccgcgcagctcgtgccgggcggcgcgggctacaacggcgcgctgggcgacggcgtcgacgtcgtgctcggcggcggcacgcaattcttcgtgccgaaggatggcggcggcaagcgcaccgacgggcgcaacctcgtcaacgagctgaaggcgaagggctatgcggtcgcgcagaaccgcgacgacctgctggccgccgatgcgacgaagggcggcaagctggtcggcctgttctcgtcgagccacatgagctacgacctcgatcgcggcgcgaccaaggagccgagcctcaccgacatggcgacgcgcgcgctcgacgtgctgcagaagaacccgaacggctatttcctgatggtcgaaggcggccggatcgaccacgcgctgcacgacaccaatgcgaagcgcgcgctgcaggacacggtggcgttcgacaacgcgatcaaggccacgatcgacaaggtgcgccagaccgatcctgacctgaagaacacgctgatcgtcgtcacggccgatcacgaccacacgctggtgctgaacggctatgcggcgcgcaccggcaagaccgaggcgggcaagcccggcgtgctcggcgtgctgcgcagctaccagaccggctcggtcgcgaaggatgcggacggcgcgccgtacacgatcatcggcttcggcaacggcgagaaccgcgtgcagggcagccgcgcgggcacggcgctcaccgacgcggtgacgggcgccgacgactatcgccaggaggcggtcgtgcgcatggacaagggcagcgagacgcacggcggcaccgatgtgttcctaggtgcgatcggccgcggcgcggatgcgttccacggcgtgatcgagaacaacaaggtcttcgagctggtgcgcaacgcggtgcagctgtgag

SEQ ID NO: 260460 - DNA, 1498 bp, Unknown
  Bacterial polypeptide expressing nucleotide sequence isolated from the Sargasso Sea
atgaaacataatatcaatagaaacctctactcatttttcacagcgcttgtcataactgttcctatttccgcacaagagacagctgaatcctggtatgaggaaggtagagcagttgtcgaacgtaatctttcataccgttatcccaatgcggatattcctatcgccaagaacgtaatactttttgtaggagatgggatgggagtctcaactgttacagcagcaaggatattagaaggccaaatcaacggcgattacggtgaggaaaatgagcttttctttgaaacctttcccaacgttgcgctttcaaaaacatacaataccgatgcacaagtccccgactcagcaggaacaatgtccgcaatggtcaccgggataaaaactgatcgcggagtattaagtgttaatcaacaagtaacaaggagcaactgtaactcctctctgggaaatgaagtgcctaccttcctggaaatagccgagcagaaaggcatgtccacagggatagtcagtacggccaggattactcatgcaacacccgcagccaattatgctcattcagtcgaacgcgaccacgaggatgatcgagacgtagctcgtcttacaaatccagaaaactgtagggatattgcatcacaactaatcgagttaaatgcaaacattactaatagcgatggcttagaagtagcgttaggcggaggtaggagaagttttttacaaagaatagatggggctgatccggaaacgggagagcaaggagagagactcgatggtcgcgatttaactcaagagtggctagatgctcatcaaaatagtgcttacgtatggaacaaacgcgattttgaaaatatagacattaatgcaactgatcaccttcttggattatttcagccgtcccatatgcaatatgcctatgacaatcaatcggacaaagggggtgaaccgaccctgagcgagatgacttcgaaggccattgacttacttagtaaaaatgacaaaggattctatttgaatgttgaaggcggtcgcatcgatcatgctcaccatgcattaaacccctttagggcactgatggatactatcgagttttcaaaagcggttaaaactgcttttgaaaaagtagatctgtcagagacactaatcattgttaccgctgatcatagccacactctaacaatcgcaggttatccggcccgtggaaaccctatcctaggcaaagttaacgccggcgacgaacctaggctagcgggagatgggctaccttacactacactgggttacatcaatggaagaggacagcgtaccgacctgactgatgtggataccgctgacgagagctaccgatcagaagcacttattcccctgggaagcgaaactcacggcggagaggatgttcctatatatgcagctggggcgggttccgatttagtaaggggcgtgatggaacagcatgtcattttccatgtcatgatggaggcgtcaaaaatgacgactcgcgaataaa

SEQ ID NO: 260461 - DNA, 1606 bp, Unknown
  Bacterial polypeptide expressing nucleotide sequence isolated from the Sargasso Sea
atgctgggtttagccgcatgcggtagcgatggtgacaacggcgcggcaggtacgccgggttcgaatggttctaacggttccaatggcagcgacggtaaagactggaccgcagtcaaccaatggtatgtcgatgctcaagcacgtgtgactaaggccgatggcctgagcgtgaacaacgatgtgggcgcggcgaaaaacgtgatcctgtttgttggcgatggcatgggcgtctcgactatcactgcggcgcgtattttagaaggccaattaaagggcaagacgggtgaagaaaactctttatctttcgaaacgctgccttacgtcggtttatctaagacctataacgtcgatggtcaaacaccagactctgcgggcactatgtcggcgatgatgactggggtgaaaaccgatgtgggcgtgatttcacaggccgaaggcgtagtgcgtgctaactgcgcatcgactaaagatcaaaacttagtgacatcactggaactggccgccatggcgggcatgtctactggtgtggtcaccacagcgcgtttaacccacgcaacacctgcggcaacctatgcccacgtgcctgagcgtgactgggaagccgactcaaacttgccagccgaagccgtgaccaatggctgtaaagatatcgccgcgcaaatgctcgactttaactatggcaatggcttaaacgtgatgatgggcggtggtcgtcgcagctttattccaaaaaccttaattgatccagaaggtaaagcgggcaagcgtaatgatggtcgcgatctgactgccgaatggttagctaagtacactaatgcggcctacgttcaggacagagatgctttcctcaatgtggatgttgccagcactgaccatttattgggtctgttcaactcatcccatatggaatacgactatgaccgcaccgaagcgggcgtgaagggcgagccatcacttgctgagatgacagccaagtcgattgatattctgaagaaaaacaccaaaggctatgtgctgattgtcgaagcgggtcgtatcgaccatgcgcaccatgcgggtaacgccgctcgtgccctgtacgacacagttgcgctttcagaagcagtccgtgttgcgatggaaaaaacctcggccaacgacactctgttaatggtgacggctgaccacagccatgtgttcaccatcgcaggttatccaacccgtggtaacccaatcctaggtctggtgaagagtaacgatgctaacggtatcgccgaagtgactaactcaaccgacgctaacggtttaccttacacaacagttggttatgccaacggcatggggtatgcgtcattaacaacgggtggcgatgagcgttataacttcccagtggatgctggccgtaaggacttgaactttgtagatacccaagatgttggattccatcaagaagccctagtgccattaagcgatgaaacccatgcgggtgaagacgtggcgatttttgcccgtggcccaagctcggatctggttcaaggtacggttgaacaaaaccatatcttccacgtgatgaaccgtgcggcgaacttagtcgcgaaagcggaagctgcaatggcggcgaagtaag

SEQ ID NO: 260462 - DNA, 736 bp, Unknown
  Bacterial polypeptide expressing nucleotide sequence isolated from the Sargasso Sea
catgcccctcgccccttccgtcctctccgcgttcacgccgaccggcaagctgcgcgcgtcgatcaacctcggcaaccggatcctcgcgaaccgcgacccggcgacgggcgaaccgttcggcgtgtcgatcgatctcgcgcgcgcgttcaccgagcgcctgtcggccgagctggaactggtcgtgttcgacaccgccggacagtcggtgcaggcactgaccgacgagcgtgccgatttcggcttcttcgcggtcgatccgctgcgcggcgaaacggtcgcgttcacggcgccgtacgtgctgatcgaggggttctatctggtgcgcgacgcttcgccgatccgcacgaacgcggacgtcgaccggccggacaaccgcgtgaccgtcggcaagggcagcgcctacgacctgttcctcacgcgcgaactgaaggccgcgcagatcgtgcgcgcgcccacgtcgcaagccgtcgtgcagaccttcctcgaacagcaactggaagtggccgcaggcgtgaagcagcagctcgaggccgacgccgccaaaacgcccggcctgcgcctgctctacgagcggttcatggtgatccggcaggccatgggcgtgccgaagagccgcggtgaagcggccgcggcggctctcaatgccttcgtcgaggaaatgaaggcgtcgggcttcgtcgcggattcgctgcggcggcatggcatctctggcgcatccgtcgcgccgcaagcgtga

SEQ ID NO: 260463 - DNA, 993 bp, Unknown
  Bacterial polypeptide expressing nucleotide sequence isolated from the Sargasso Sea
aagatttagattcagatcttgtgaaaacagttgacaactttgctaaagtagcttgtcatttatcttatctcatctctattggatcattatcttcagttagttcaaataaaaatacttccacaaattctgatggtgacgagcagaaagcattagatgtttatgcggatgaatcctatttagctgaattcaaaaattctccagtaaaattttatgcatctgaagaacaggacgaagtaattgacctagaaagtgatggaagattagcactagccatagaccctctagatggttcatcaaatatagatacaaatgtatcaataggttccattttttcaattcgtagtattccaaataagcaaactcgagataaaaaagacatttttttggctgctggatcggaacaaattgcagctggttatattatttttggtcctcaaactatgtttgttgcaacgtttggtaatggagtaaagtcatatatactagatagaaataaaaatttatttattgatgcaaaaatagaaacttctatacctgcagatactagagagtatgctgtcaatgcttccaatgccaggcattgggaaaaaagaatgaaaaattatattgatgatagtatagcaggaaagtctggcccaagaggaattgattttaatatgagatgggtggcatctctggttgctgaaactcatagaattttatctagaggtggtatttttatttatccggcagattcaagaaaaggatatgaaaaaggaagattaagaatggtttatgaatgtgccccaattgcttttttaattgagcaagctggtggtgcagcaaccgatagtttcaatagaattctagatttagaagttgatgaacttcatcaaagaacaccttttgcttttggctcaaaaaatgagatcgcaagattacaagcttacaatgatctacctgaggctgaagtttcaccattatttggcaaacgtggattatttagtaattaat

SEQ ID NO: 260464 - DNA, 514 bp, Unknown
  Bacterial polypeptide expressing nucleotide sequence isolated from the Sargasso Sea
ccatgatgaaacgatcgccgaaatgcaaaaactgggcgtgcgcgtcttcgctattccagacggcgacgttgcggcctccattctgacctgcatgccagacagtgaagttgacgtgctgtacggcattggcggcgcacctgaaggtgtggtttccgcagctgtgatccgcgcactggacggcgacatgcagggccgtttgctggcgcgtcatgacgtcaaaggcgacagcgaagagaaccgtcgcattggcgaacaagaactggctcgttgcgccgccatgggcattgaagcgggcaaagcgctgcgcctcgatgaaatggcgcgtagcgacaacgtcattttctccgccaccggcatcaccaaaggtgatttgctggaagggattagccgcaaaggtaatatcgcgaccaccgaaacgctgctgatccgcggcaaatcacgtacgatccgtcgcattcagtcgattcactacctcgatcgtaaagatcccgatgtgcaggcgcacatcctgtaa

SEQ ID NO: 260465 - DNA, 493 bp, Unknown
  Bacterial polypeptide expressing nucleotide sequence isolated from the Sargasso Sea
atgaaaaatgttacggtaggtgagtttatagttgatactcaaaataattttccaggatcttcaggagaactttcaaaaatattaagcgctattaaattagcatcaaaaattgttagtcatgagatcaataaagctggattagctgctgatattattggttctgttggtaatgaaaatgtgcagggcgaagagcaacaaaaactagatttatatgccaacgataaatttataaatgctctttctgcaagaggggttatttgtggagttgcttcagaagaaaacgaatcttacatagcgtttaatagcgaagttaacagtacggcaaaatatgtagttttaatagaccctttagacggctcatctaatattgatgttaatgtttccgttggaacaatttttagtgttttcaaaagaaaaacacacgaatcggaacctgtagatatttcagactttttacaaaagggagatgaacaggttgcctcaggatatatta

SEQ ID NO: 260466 - DNA, 318 bp, Unknown
  Bacterial polypeptide expressing nucleotide sequence isolated from the Sargasso Sea
tatgaataaaaaccctatagggcctgctgtcaaaagcactattctttgtcttagtgatgcttcaaaaataatagcccactctctctctaaaaatggtttaccaaataatcaaatgggaactcgggtcggggatctaaattctgacggagactctcagaaggtgttagatttaatcgcggaccaagcgattataaatgcaataactaacaagcatgttgccgcttatttctctgaagagcaagaaaaagtattattgctcgaaccagacggaaatcttattggttgcgctgacccgctggacgggtcatctaatatcga

SEQ ID NO: 260467 - DNA, 597 bp, Unknown
  Bacterial polypeptide expressing nucleotide sequence isolated from the Sargasso Sea
catggcaaaaagcatcagcctgacccgctacctctttgagcagcaacgggtggacggactcatcccctcgcagctgcgcctgctgctcgaagtggtggcccgcgcttgcaaaagcatcagccacgccgtgaacaaaggtgcgctgggcggcgtgctgggtacggccagcagcgaaaacgtgcagggcgagatccagaaaaagctcgacatcatcgccaacgaggtgctgatcgaagccaacgaatggggcggtcacctggcggccatggcgtccgaagaaatggacggcatctacctggtgcccaaccgctacccacagggtgaatatctgctgctgttcgaccccctggatggctccagcaacatcgacgtgaacgtgagcatcggcaccatcttcagcgtgctgaagaagcccgatggcgaccgtggcgtagaggaaggcgacttcctccagcccggcacgcagcaagtggccgctggctattgcatctacggcccgcagaccacgctggtgctcaccgtgggcgacggcgtggcgatgttcacgctcgaccgcgaacaaggctccttcgtgctgaccgaagagaacatccgcat

SEQ ID NO: 260468 - DNA, 637 bp, Unknown
  Bacterial polypeptide expressing nucleotide sequence isolated from the Sargasso Sea
atgatacctgtaacaattgaacgtcattttcttgataaggtggatcaaagcccaaaaataaatcaagatattgctaatatcctatatgatattaatgttgctgctaaattaattcgacagcaagtcattcgatcaggccttaccgatgctgctttaaaaggatcttcaggaacaacaaatacatctggagaagatgttcaagccttggacttatacgcaaataacataattaaagatatcttaacctcccatcagagattttcataccttggttcagaagaagagcctgatgttgtccaaacagacacgtatgaaacaagcgattatgtcatattatttgatcccttagatgggtcttcaaacatagatgttaatgttagtgttggaaccattttttcaattttcaaaaaaaataaagatgctaaaacgttagctgatcattgttgtcagaaaggctcagaacaggttgttgctggctatgtaatttatggatcatctgttgtaatggtatatacagctggaaatggggttcatggcttcacttatgatcctacgattggcgaattcttattatcacatgaaaatatacggattccatctaatccaatgtattactcggttaatgagtccctatata

SEQ ID NO: 260469 - DNA, 395 bp, Unknown
  Bacterial polypeptide expressing nucleotide sequence isolated from the Sargasso Sea
gatgcttcagtcaattgccgaggaaagcacagagcgagctgccgctgcgtctgcggtagaggctcttgcattggctgcggtcgatattacgactgtgatccgtcaatctaactcgaatgttgcacttagtgctgtgtgtgggagcgccaataaagatggcgatgagcagaaagcgctggacgttcttgctgatcagaaaatcctaaatgccctccgtaatgtgtctgcagtagcatcttatctctccgaagagcaagatgaagaagtttcctttcacgatgacggaattataatagtcgcaagcgatcctttagatggatcatccaatatagataccaacgtgtctgttggaacaatcttctctattttgcctgcggcaggtgggttgttgcaac

SEQ ID NO: 260470 - DNA, 472 bp, Unknown
  Bacterial polypeptide expressing nucleotide sequence isolated from the Sargasso Sea
atgcgtcgattggctccggccctgcgtctagatggtgcagatgcagacctgatagatctgattaaaagtatcgtagctgcctgcaaagaaatttcgtttcgggttggccagggtgaactctcagatgtattgggctccactctgaatgaaaacgttcagggcgaaacccagaagaaactcgatatcatctcaaacgagctgctcaaagatctcattcttgaaactggctctgtcatggcaatctcttctgaagaagaagaaagtacagtggcaggcaatcctcaaggtaaatatctggtcacctttgacccgctggatggttcatccaacacagatatcaatagcttaattggcactatcttttctattctgccagcccccaaaggcgcagaccctgctgatccgtctattttcctgcagccaggcacagcacagatagctgcaggttacatattgtatggcccttcaaccc

SEQ ID NO: 260471 - DNA, 607 bp, Unknown
  Bacterial polypeptide expressing nucleotide sequence isolated from the Sargasso Sea
aatgcatctagaaaaatatttagaacttcaatataaggacaagaaaaatactttaaattataattcaaataatttaattcaaatttttaatttgctttcaatttcagcaattgaaatatcaaaaatcatttcaaatcctgaaaaaagttacctgtcaaataaatgtggtgccattaattctgatggagatgaaactaaaaatttagacttaaaagctgatagcattattaggcaaaatttatcatcaagtgatataaaatggtatgcatcagaagaagaaaaagattgtgtatttttaaataaaaatggcagttttacaatatgcatcgaccccttagatggttcttctaatattgagaccaatgcgccaattggaacgatttttggaatttataaatctagaaataaacctaatgagacaattcttcaaagtggtgataatttaattgcttctggtttttttatttatgggccaaggttaaagttgatattttcagttggaaatggaacttcagtttttcaattaaatcaaagtgatgaatttgttctctttcaagaggccattaaaattcctcagaatgcgaacgaattatctataaatttttca

SEQ ID NO: 260472 - DNA, 408 bp, Unknown
  Bacterial polypeptide expressing nucleotide sequence isolated from the Sargasso Sea
aatgaatctagaaaaatttttagaacttcaatataaagacaagaaaaataattttaattataattcaaataatttaattcaaatttttaatttgctttcaatttcagctattgaaatatcaaaaatcatttcaaatcctgaacaaagtgaactttcaaataaaagtggcactactaattcagacggagatgaaactaaaaacttagacttaaaagctgatagtattattaggcaaaatctatcatcagctgatataaaatggtatgcttcagaagaagaaaaagattttgtgtttttaaataaaaacggtagtttttcaatatgtgtcgaccccttagatggttcttcaaatattgagacgaatgcgccaattggaacagtttttggaatttttaagtccaagaaaac

SEQ ID NO: 260473 - DNA, 741 bp, Unknown
  Bacterial polypeptide expressing nucleotide sequence isolated from the Sargasso Sea
tttggaaatttcaaaatttttaaacacttattcaaataataaaaaaattaataagattatcttaaaactctgtaaatctgcaaagttaataagtaaaactataaaatataaaattaaaaacactaaagattttacaaatattacaaataaaaatgctgatggagatattcagaaacccatagatcttttttctgatgaggtcttattaaaatatttaaatataccagaagtctctgcgtattgttctgaggagcaaaaaggtattgtaaaatttaataatgatggggattttatagttttatcggaccctctggatggatcttcaaacatagaagctaacgtttccgttggaacaattttttcaataatgcccagaaataattttaaaattgaagacgctatttttcaaataggtgaaaatcaaatttcatcgggtttttttgtttatggtcctgtaacatcgttattttttacgtttaggaaaggtactcattatttttatttaaatgaatctggtttttttgaattaatttcaaaagatcttaaaattccatcaaaaaccaatgaatactcgattaattcatcctatagacgcttctggacaaaaaaaactaaaaattacataataaactgtgaacaggggaaaaaaggtccaataaaaagggatttcaatatgagatgggtaggatctctggtcgcggacgcaagtagaatttttaatcgtggaggaatttttcttta

SEQ ID NO: 260474 - DNA, 575 bp, Unknown
  Bacterial polypeptide expressing nucleotide sequence isolated from the Sargasso Sea
aattggaaaccaagcaaatattgaagattttttacaaaaagggaatgcccaagttgctgctggttatgtaatctatggttcttcaacaatgctggtatataccacaggaaatggtgtcaatggatttacgctggacccatcgattggcgaattttgtctttctcacccagacatccaagttcctgaaaatgggagcatctattctatcaatgagggaaatttagaggcttttccagatgcaataagatcttatgttgcacattgcaaagaaacccacgatgataaaaaaccatattcgcttcgatatattggttccatggttgcagacttgcacagaaacttaatcaaaggtggcatctttatttatccatctagtgcgttagccccaaatggcaaattaagattgctttatgaatgcaatcccatggcattcattgttgaacaagcaggaggtattgcctctgatggtgcaatgcctattatggaggcagaactcaacagtctgcaccagcgcattccagtaattatgggatcaaaaaagatggtagaaaaagcattgtccttcaactcttgag

SEQ ID NO: 260475 - DNA, 574 bp, Unknown
  Bacterial polypeptide expressing nucleotide sequence isolated from the Sargasso Sea
catgaaaagtgttactgtaggcgaatttatagttgaaacacaaaacacctttccaggatcttctggagagttgtcaaaaatattaagtgccataaaattggcatctaaaatagttagtcaccacataaataaagccggcttagctaaagaaattttaggatcttcaggagctgaaaatattcagggagaagatcaacaaaaattacatgtttttgctaacgatactttcattaatgcgctttcacctagaggagtaatatgcggtgttgcttcagaagaaaatgattcctacattgcttttgatgacagggttaatgatgaagcaaaatatattgttttaattgatcctctagatggttcttctaatatagatgttaatgtttcagtggggaccatttttagtgtttttagaaggaaaacgtccaaaggtgacccagtacaattagaagattttctgcagaaaggagccgaacaagtagccgctggatatttaatttacggttcatctactatgttggtttatactactggaaatggtgtaaatggatttacttttgatccagggattggcgtt

SEQ ID NO: 260476 - DNA, 427 bp, Unknown
  Bacterial polypeptide expressing nucleotide sequence isolated from the Sargasso Sea
aatgcaaaatccaaacacagatcttatacgattagaagaacatataatctcttcaggtgtcgaagatgagatagtgcaaattctttcagaaattgcactatcttcaaagatgataaattctaaaattttaaaagcaggtttgaatgatatattaggtgcaaccggtcaaaaaaacgttcaaggagaagaagtacagaaactggatgaatttgctaattccttattaaaagataaatttgaagcaaaagaattagttggagcaattgctagtgaagaaatggataatattcatcctatagcgaaagataaaaattacctgcttttattcgatcctctcgacggttcttctaatattgatgtaaacgttagtataggtactattttttcaattttaaaaagagaatcaactcaaagatctgtctctctc

SEQ ID NO: 260477 - DNA, 973 bp, Unknown
  Bacterial polypeptide expressing nucleotide sequence isolated from the Sargasso Sea
atgcgtcgattggctccggccctgcgtcttgatggtgcagatgcagacctgatagatctgattaaaagcatcgtagctgcctgtaaagaaatttctttccgggtcggacaaggtgaactctcagatgtgttgggctccactctgaacgaaaacgttcaaggcgaaacccagaaaaaactcgatgtgatctccaacgagctgctcaaagatctgatccttgaaacaggttcggtgatggccatttcttctgaagaagaagacagcactgtagctggtaacccgcaaggtaaatacctggttactttcgatccgctggatggttcgtccaacaccgacatcaacagcttaattggcactatcttttctattctgccagcacccaaaggtgcggacccagccgaccctgctattttcctgcagcctggcacagctcagatcgccgcaggttacattttgtatggcccctcgaccatgatggccttgaccacaggtaaaggcaccagaatgtatacgctggataaaacctacggtggtttcctgctaacacaggaaaaagtcacagttccgggcgtaacagctgaatttgctattaatatgtcgaaccagcgctattggcaggcaccgatgcaaaactacgtggctgatttgcttaaaggtaaagaaggcccacggggtaaaaactttaatatgcgctggattgccgctatggtcggtgacgtacatagaattttatgccgtggtggtatttttgcttatccgcgggatctgaaagatccaaccaaaccagacaaacttcgattaatgtacgaagccaatccaatgagttttctggtagaacaagcaggcggagccagtacaacaggattcgagcgcattatggacattcagcctgtggatattcaccagcgcgtggctgtgattttaggctcgaaacacgaagtggaaagctgcctgcagtatcatcaggcgtagg

SEQ ID NO: 260478 - DNA, 725 bp, Unknown
  Bacterial polypeptide expressing nucleotide sequence isolated from the Sargasso Sea
tatgtcacgattaataacaattgaacgtcatttaatgggtttgcctgaagacatgcttgcatcttcgggagatatcacccgtattttatatgatatcagtgttgcagctaaaatgatacgcagacaagtagttgttgcaggttttgagactgaacgtgaggcaggtattacaaatgttcatggagaagatgttgctacattggatgtttttgcaaatacatgtataaaagaaattttaagttcacatggccggttttcatatttaggttcagaagaagaagaagaaattattacagttgatacagcaaaaacagatgggtatgctattttttttgatccattagatggatcctctaatatagatgtgaatgtaagtgtggggactattttttctatctataaaacagatgagacttggaaatcttctaaggttaggccaggagcagagcaagtggcgtcggggtatgttatttatgggtcatcagtgatgatggtatatacaatgggcaatggtgttcatgggtttacctatgatcctagtattggggaatttttattgtcacattatgatattaagattccagataaacctaaatattattcgatgaatgaaagtttatatccacgtctagatgcggatgcaagaaacatatgggctaactttaagaaggaaaatgaggatttatcgttgcgttatgtagggtcactggttgcagattttcatc

SEQ ID NO: 260479 - DNA, 1048 bp, Unknown
  Bacterial polypeptide expressing nucleotide sequence isolated from the Sargasso Sea
tatgtctgctccgaaatttagtgaagtaatagatcttccaaaatcgattgaaggtgatgtgtccaaagctatagtttcaatagcagaagtggcaattatgatgtctgaaattataagcttgggggacattcaaagtaatctcggtagagaggttggtgaaaattcggatggtgataatcaaaaggctctagatgtattagctgatgaggcctttatgaagaaactttattcttcatctgtgagttggtacgcttctgaagagcaggaagaagtggttgaattaaataaaaatggttcagtattattggctattgatcctcttgatggttcatcgaatattagtattaatgtgtcaataggaactatattttcgttgagatctgcaaggggtgttcattccaaaaagcacgcgagggaggcacttttatctcctggcgaaaatcaattagctgctggatatgtgatttatggacctcagactactattgtattgacggcgggttctggtgtttctgaatatatcttggacaaaaaagcaaaagcttttactctatctaaatctaatattaatatccctaaagattcttctgagtactccataaattcttcaaactataggcattggtcaaagcctatgaaagcttacgttgacgatcttaatctcggcatcgaagggcctgctggtaaaaattttaacatgaggtgggtagcatctttagttgcagaaacacacaggattttatcaagaggagggatttttatttatccgggggataatcgtaaagggtatgagaagggtagacttaggatggtctacgaatgtgcgccaattgcctttataatagctcaggcaggaggaggcgctacagatatatacaataatattctctcagtagaagttgaggatttacatggaaggacaccctttgtttttggttcaataaatgaagtgaatagggtcaaagtctaccatgatctgccaggcagcgaagtgtctccgctgtttggtaagagaggcttatttagtgcgcagggaggtgtagaatga

SEQ ID NO: 260480 - DNA, 835 bp, Unknown
  Bacterial polypeptide expressing nucleotide sequence isolated from the Sargasso Sea
tatgcgtcgattggctccggccctgcgtctagatggcgcagatgcagaactgatagatctgattaaaagtatcgtagctgcctgcaaagaaatttcatttcgggtaggtcaaggtgaactctccgatgtattgggttccactttgaatgaaaatgttcagggcgaaactcagaagaaactcgatgttatctccaatgagctgctgaaagatctgatccttgaaacaggttctgtgatggccatttcttctgaagaagaagaaagtactgtggcaggtaaccctgaaggcagatatctggtcaccttcgacccactggatggttcgtccaacacagatatcaatagcttaattggcactattttttcaattctgccggcccctaaaggcgcagaccctgctgatcctgctattttcctgcaacctggcactgctcagattgcagcgggttacattttgtatggcccttcaaccctgatggctttgaccacaggtaaaggcaccaaaatgtatacgttggataaaacctatggcggtttcctgctcaccacagagcaggtcactattcccggtgtcaccgctgaatttgccattaatatgtcgaatcaacgctactggcagcctgctatgcagagctacattgccgacctgctcaaaggcaaagaaggcccccgcggtaagaattttaacatgcgttggatagccgctatggtcggtgacgtccacagaatattatgccgtggtggtatttttgcttatccacgggatgtaaaagacccaagcaaaccagacaaactgcgcctgatgtacgaagccaatccaatgagctttctggtc

SEQ ID NO: 260481 - DNA, 373 bp, Unknown
  Bacterial polypeptide expressing nucleotide sequence isolated from the Sargasso Sea
aatgaatctagaaaaatttttagaaattcaatataaagataagaaaaataatcttaattataactcaaataatttaattcaaatttttaatttgctctcaatttcagctattgaaatatcaaaaatcatttcaaatcctgaacaaagtgaactttcaaataaaagtggtgctactaattctgacggagatgaaactaataatttagatttaaaagctgacagtattattaggaaaaatctatcgtcaactgatataaaatggtacgcgtcagaagaagaaaaagattttgtatttttaaataaaaacggcagttttacaatatgtatcgaccccttagatggttcgtcaaatattgagacaaatgcgccaatg

SEQ ID NO: 260482 - DNA, 391 bp, Unknown
  Bacterial polypeptide expressing nucleotide sequence isolated from the Sargasso Sea
tatggttaataaaaatcaaaacttaagtgaatatcttaacaatttagatatagaatcagacttaaaaaaaatcatctccgttatttcttcaacttgctatgaaatttctgaagcaattagattatcaaatattaataatttagtaggtaagacaggcgaaataaacattcaaggagagcaagtcgaaaagctagatgagctagctaataatcttcttataaaaaacttatctgaaacaggtaaagtttttcttatgggatctgaagaaatagaatctgttattattccaaacccaaataataaaaatgcagaattcatcgttgtttttgatccactagatggttcttcaaatattgatgtgtctgtaactattggtacaatctttgctatt

SEQ ID NO: 260483 - DNA, 745 bp, Unknown
  Bacterial polypeptide expressing nucleotide sequence isolated from the Sargasso Sea
ttgagtttcttaaacgaattttcaaaagatcaaaatttaaacaacgtaattttaaaattatgtagttcagctataaaaattagtaaaagtattcatgacgatgattatgagattgaaaaaacttcgcttaatgaggatggtgatgttcaaaaaccactagatattttttcagataaaactttgttagataaacttcgaacacctgaagtagctgcatattgttctgaagagcaaaaaggaatagtaaatctagatgaaaacggaaactttattgttttaactgatcctctcgatggttcatcaaatattgaagcaaatgtttctattggaactattttttcaattattccaaaaaatgggaaatgtgttaatgaagcaatttttcaaaatggtaataaacaagcttgtgcaggcttttttgtttttggcccgagaacaactttatttttaacatataaaaatggaactcattcttttttccttaataataaatctaatacttttgaattattacaaaagaatatttcgataccagaatatacttcagaatatgctataaattcatcatatcgacgcttttggcataaaaatgttttgaattacattgaaaactgtcttaaaggcaaggatgggccaaggaaaaaagattttaatatgagatgggtaggatctctggttgctgatgcaagccgaatttttactagagggggtatatttctttacccagacgacaaaagaaaaaaaa

SEQ ID NO: 260484 - DNA, 499 bp, Unknown
  Bacterial polypeptide expressing nucleotide sequence isolated from the Sargasso Sea
ttggtttacaccacaggcaatggggtaaacggatttacttttgaccctggaattggtgtgttctttttatctcatccaaatatgaaaatcccagcatctggaagattatattctgtgaatgaaggaaatctaaacgaatttaaagatggggttaaaaaatatataagttattgtcagtcagaaagcgaaaaagacaataaaaaaccatattcatctagatatataggctctttagtggctgatttccatagaaacctaattaagggtggaatttacatgtatccctcaacaaaaagcgcaccaaatgggaaattgcgtttattgtatgaatgtgctcctttggcttttataattgaacaagctggtggaaaagcaatttcagaatcaggaagaattatggatattataccaaaagaattacatgaaagaatacctatttttattggatcaagtaatatggtagatactattgagcaattgatgaatagtgaaggttgat

SEQ ID NO: 260485 - DNA, 868 bp, Unknown
  Bacterial polypeptide expressing nucleotide sequence isolated from the Sargasso Sea
tatggataaaaaaaataaattacttgatgactatctagatgatcttgatctagatgataatttaaaaaaaatactttctgttatatcaaatacttgctacaaaatatctgaagcaattagatcttcaaatataaataatttagttggtaaaaccggagaaataaacgtacaaggagaacaggtagaaaaacttgatgaattttcaaatgatttactcataaaaaatctttctgaatcaggaaaagtttttctaatgggatcagaagaaatagagtccgtaatagtgcctaatccaaataacaaagatgctgattatatagttgtatttgacccattagacggatcttcaaatattgatgtagctgttacaattggaacgatttttgcaatatataaaaaaattaataatgaccaaagcgatgaatcaaatttacttcaaaaaggtagtaatgcaattgtcgctggatatacggtttacggatcttcatcagtaatgtgtatttcttctaaagaagacacatctatgttttcatttgataagaatggaaaagctttagttactaatgaaaaaatcatacatggaaattcaaaagtttactcagtaaatgaatcaaattggaataaatttacagataaagataaaagatggattgaatctctaagatctggagaaaatggaaaatatactgcaagatatgttggttcacttgtagcagattttcatagaaatttattaaaaggtggggtttttgcatatcctgcagacccaaaaactgggcaagggcgcctaagacttatctatgaatgtaatcctctatcatttattgcagagaatacaggtggagatgcaaatgatggagaaaacaag

SEQ ID NO: 260486 - DNA, 851 bp, Unknown
  Bacterial polypeptide expressing nucleotide sequence isolated from the Sargasso Sea
aatgaatctagaaaaatttttagaacttcaatataaaaacaagaaaaataatattaattataattcaaataatttaattcaaatttttaatttgctctcaatttcagctgttgaaatatcaaaaatcatttcaaatcctgaacaaagtgaactttcaaataaaagtggtgttactaattctgacggagatgaaactaaaaacttagatttaaaggctgatagcattattaggcaaaatctatcatcaactgatataaaatggtatgcgtcagaagaagaaaaagattttgtatttttaaataaaaacggcagttttacaatatgcatcgacccattagatggttcatctaatattgagacaaatgcaccaattggaacaatttttggaatttataaatctagaattaatccaaatgagacaattcttcaaagtggagataatttaattgcttctggtttttttatttatggaccaaggctaaaattaatattctcaattggaaacggaacttcagtttttcaattaaatcaaagtgatgaatttgtccttatgcaagaagcgattaaaattccagagaatgcaaaagaattatctatcaatttttcaaattatgctttttggccaagttacataaaaagttacgttcaagaacgcataaatttatataaatctaatggccaaaataattataatatgagatggataggctctcttgtagctgattgttatcggatattggctagaggaggtatatttttatatccacaggataaaagaaaaggttatgaaaaagggagactaagaatagtatatgaggctaatccagtagctttcttaattgagcagtctg

SEQ ID NO: 260487 - DNA, 919 bp, Unknown
  Bacterial polypeptide expressing nucleotide sequence isolated from the Sargasso Sea
aaacactattctgtcttaagcaacgccgcgaagaagatatcaaaatctcttgctaaaaacgggttaccagaaaatcaacttgggacacaggtcggtgaaataaattcagatggcgacactcaaaaagctttagacctgatcgcagatgagaacattgttactgcattaaaaaataaaaatgttgttgcttatttttcagaggaacgagaatctgctttattgcttgacccagaggggaatttaatagtttgtgctgacccgttggacggttcatccaatattgataataatatgtccgttggtactattttttcaattcttccaagaaagactgaagtgtttgaagcagatcagttacttcgtgatgctcttcagtctgggataaatcagctcgctagtggtttttttgtttatggtcctcaaacaagtttaattctaacaactggaaaaggtgctgccgcgttccttctggacgaggaagagttttttaaaatggaatgggaaccaaatttaccaaccaaaggtagtcaatttgccataaacatttctaatatgaggttttggtcacaatgcacacgcagttacattcagagttgcgtagatggcacagaaggcacgtttgctaaaaattataatatgagatggtgtgggtcattagttgccgatgcatggaggattttcagggaaggaggaatttttctttatcctgaagataaaagagataattataaagagggaaggttaaggttggtttatgaggcgaatccaatagcttttattgcagagcaagcaggtggtcgtgctactaatggtaatacagatatattattcatcaaaccaggctctttgcatcagagagtaccattgatttttgggtctaaggaagaagttattaaatatgagtcacttaataaataaa

SEQ ID NO: 260488 - DNA, 747 bp, Unknown
  Bacterial polypeptide expressing nucleotide sequence isolated from the Sargasso Sea
gatgtcgagccaatcttccattattaccgtgcagcagcacattatgcgtgaacagaaacgctttcccggagcatccggtgaattttcctttttgttatcgggaattactcttgctaccaaaatgatccaggcacaggtccgtcgtgcgggactgactgatgtgcttggcgaaattggtgatatcaatgttcagggtgaaattcagcaaaaactcgatgttctttcgaacgaagccttggtgcattgtctgagttcaagggaaagtattggagttttggcatcggaagagaacgaaaaccctatgattgttcatgaaggttcagaggaagcaaaatatgccgtagtttttgatccactcgacgggtcttccaatattgatgtaaatgtcagtgtaggcacaaccttctccatattgcgtaagccggatgaagtgactggtgacaacccggaggcatgggtgcttcaacctgggagcaagcaaattgcagcaggttatgtggtttacggttcctccaccattctggtttacagtgccggacatggggtacatggcttcactttggatccagcaattggtgcgtatgttttaagtcatgagaatatgactatgcctgagcaggggaaatattattcagtgaatgaagcgtaccgggacggatttcccacacgatatggtgagtacattgatcgcttgagatcaggaattttaggggtcaattactcctctcgttacattggatctatggt

SEQ ID NO: 260489 - DNA, 754 bp, Unknown
  Bacterial polypeptide expressing nucleotide sequence isolated from the Sargasso Sea
cctggttcaaaaggcgggcatctccggcatgaccggcgcggccggcgccgtgaacgtccagggcgaggaccagaagaagctcgacgtcgtcagcaacgagatcttctgcgaggttctgcgaacctccgggaggaccggcgtgatcgcgtccgaggaggaggacacgccggtggcggtcgaggagacgtacaacggcaactacgtcgttgtcttcgaccccctcgacggctcctccaacatcgacgccgcggtgtccaccggttccatcttcggcgtgtactcatccgatcagtcgtgcgtccccgactggggcgccgacgacgagggcgtggtgcaggagaagtgcatcacgaacgtgtgccagccgggtaacaacctcctcgccgccgggtactgcatgtacagttcgtcctgcatcctcatgctcaccgtcggccacggcgtctacggcttcaccctggacccgtccatcggcgagttcgtcttgtcccacgaggacgtcaagatcccggagaaggggaagatctactccttcaacgagggcaactacgtcaactgggagcccggactcaaggagtacatggacgcgctgaaaaaaggcgggcacaccgaggacggcaagccctactccgcgaggtacatcggaagcctcgtgggcgactttcaccgcacgatgctctacggcggcatctacgggtaccccggcgacgcgaaaaacgcaaacggcaagctgcgcttactgtacgagtgcgcc

SEQ ID NO: 260490 - DNA, 505 bp, Unknown
  Bacterial polypeptide expressing nucleotide sequence isolated from the Sargasso Sea
gctgtcctgcccccgcagaaatccggtgcttgtgcccttctcgtatccgaagaacaggaggacccgatcgtagttccgcccgaactccgtggcagcctctgctgcgccttcgaccccctggatgggtcctccaacatcgactgcaacgtgtccaccggcaccatcttcagtgttttcaagaagaccactggggacgacgtcgagcccgctgcctcggacatcctgaagcccggcacggagatggtggccgcgggctactgcatgtacggctccgccatcgacatggtcatgaccttcggcacgggcgtccatcgtttcaccctcgatgactctctgggcgagttcgtgcacatcggccccatgaatttccccgcgaagaataaaaccatttacagctgtaacgaggggaactaccagctttgggaccctcagatccagcaggttacccccaactctctctctctctctctctctctctctctctctctctctctctctctctctc

SEQ ID NO: 260491 - DNA, 709 bp, Unknown
  Bacterial polypeptide expressing nucleotide sequence isolated from the Sargasso Sea
aatgcgaaacatgatcaccatgggcgagttcatcgtcaaaaagcaggcggattaccccaccgcgaccggcgagctgacctcgctgctcagctccatccgcctggccgccaaggtggtgaaccgggagatcaacaaggcggggctggcggacatcatcggctccatgggcgctgaaaacgtgcagggcgaagtgcagcagaagctggacgtctacgccaacgagcgcttcaaggcggcgctggaagcccgtggcgaagtgtgcggcatggcctccgaagaggaggaagacttcgtctccttcgattccgagctctcccgtcactccaagtacgtggtattgatcgaccccctcgatggctcctccaacatcgacgtcaacgtctccgtcggcaccatcttctccatctaccgccgggtcagcaagccgggcgccggcgtcaccctggaagacttcctgcagccgggcaaccgccaggtcgccgccggttatgtggtctacggctcctcgaccatgctggtctacaccaccggctttggcgtcaacggctttacctacgacccctccatcggctgcttctgcctctcccacgagaacatccgcattccggaggagggcaagatctactccatcaacgagggcaactacatcaagttcccggacggggtgaagaagtacctgaaatatgtcaggagcgggacgaggcgaccc

SEQ ID NO: 260492 - DNA, 820 bp, Unknown
  Bacterial polypeptide expressing nucleotide sequence isolated from the Sargasso Sea
ttgctctcaatttcagctattgaaatatcaaaaatcatttcaaatcctgaacaaagtgaactttcaaataaaagtggtaccattaattcagatggcgatgaaactaagaacttagacttaaaagctgatagcattattcggcaaaatctattatcaactgatatacaatggtatgcgtcagaagaagaacaagattttgtatttttaaataaaaacggcagttttacaatatgcgtcgatcccttagatggttcgtctaatattgagacaaatgcgccaattggaacaatttttggaatttacaagtctagaattaatccaaatgagacaattcttcaaagtggagataatttaattgcttctggtttttttatttatggtccaaggctaaagttaatattttcaattggaaatggaacttcagttttccaattaaataaaaatgatgaatttgttctcattcaagaggcgattaaaatccctcaggacacaaacgaattatctattaatttttcaaactatgctttttggccaagatacatcaaaagttatactgaagaatgcataaacttatataaatctaatagcctaagtaagtataatatgagatggataggttctcttgtagctgattgttatcgaatattggttagaggaggtgtatttttatatccacaggatacaagaaaagattatgaaagaggaagactaagaatagtatatgaggctaatccggtagccttcttaattgaacaatctgggggctttgcaacagatggacagaaaagaatattatctttaaagcctaaagcatcacgaa

SEQ ID NO: 260493 - DNA, 1018 bp, Unknown
  Bacterial polypeptide expressing nucleotide sequence isolated from the Sargasso Sea
aatggctttgcaacgtcgtaccactctcacaaagtacctgatcgagcagcagcgcgagaccaacaacctgccggccgacctgcgccttctgatcgaagtcgtcgcgcgcgcatgcaaggcgatcagctaccacgtcagcaagggcgcgctgggcgacgcactcggcacggctggcagcgagaatgttcagggcgaggtgcagaagaaactcgacatcctgtcgaacgaaatcctgctcgaagcgaatgaatggggcggcaacctcgcgggcatggcgtccgaggaaatggaacagttcttcccgatcccggccaactacccgaagggcgaatacctgctggtgttcgatccgctcgacggctcgtcgaacatcgacgtcaacgtgtcgattggcacgatcttctcggtgctgcgctgcccggacggccagcaacccaccgaacaatcgttcctgcaacccggcacacagcaggtcgcggcaggctatgcggtttatggcccgcaaacggtgctggtgctgaccaccggcaacggcgtgaactgcttcacgctcgaccgcgaattgggttcgtgggtgctcacgcaaagcgatatgcgcattccggtcgagacgcgtgaatacgcgatcaacgcatcgaacgagcgccactggtatcccccggtcgagaaatacatcggcgagttgaaggcgggtaaggaaggtccgcgccagagcgacttcaacatgcgctggatcgcgtcgatggtggccgatgtgcaccgtatcctgaaccgcggcggcatcttcatgtacccggccgacaagcgcacgccggacaagccgggcaagctgcgcctgatgtatgaagcgaacccgatggcattcatcgtcgagcaggcgggcggcgccgcgaccaacggcgagaagcgcattctggacatccagccgaagagcctgcacgagcgtgtggcggtattcctcggctcgaagaacgaagtcgaccgtgtcacccgttaccatctggaagcaaaaaagtaa

SEQ ID NO: 260494 - DNA, 865 bp, Unknown
  Bacterial polypeptide expressing nucleotide sequence isolated from the Sargasso Sea
ccttggcagcatgggcaccgagaacgtgcagggtgaagtgcagaaaaagctggatgtgatttccaacgagatcctgctggaagccaacgagtggggcggccacctggccggcatggcctccgaagagatggatcatgcctaccagattcctgggcagtaccccaagggtgcctatctgctggtattcgatccgctggacggctccagcaacatcgatgttaacgtctccgtcggcactatcttctctgtgctgcgttgtcccgacaagtatgtagagcagtccggtagtctggacgagcatgccttcctgcagccgggtaccgagcaggtggccgccggttacgccatctacggtccgcaaaccatgctgattctgaccctgggggacggcgtcatgggctttaccctggaccgtgaaatgggcagctttgtgctgacccacgagaacatgaaagtgccgaccagcaccgccgagttcgccatcaatatgtccaaccagcgccactgggaagagccggtcaagcgctacgtgtctgagctgctggctggtgaagaagggccgctggagaagaactacaacatgcgctggatcgcctccatggtggccgatgtgcatcgcatcctgacccgtggcgggctgttcatgtatccgcgtgacgctcgtgaacccgaaaagccgggcaagctgcgtctgatgtacgaggccaatccgatgtcgatgctgatcgagcaggctggcggcgccgccaccaacggcagtcagcgcattctcgatatccagcccgaatcgctgcaccagcgtgttgccgtgttcctgggctcgaaggaagaggtcgagcgcgtcaccggttatcaccagggctga

SEQ ID NO: 260495 - DNA, 952 bp, Unknown
  Bacterial polypeptide expressing nucleotide sequence isolated from the Sargasso Sea
aatggatctaaatgattacttattaaaaaattctaaggatgatcaaatttcatcaatcgtcaaatcattagctgatgctgcaattagaatatctaatactataagaagtcttaaaccatatgaaagtatttcaaagagtgatacaaaattaaattatgatggtgatatacaaaagccattagatataatttcagatgaaataatactaaattttctaaaaacatcacctgctgctgggtatgcctccgaagagcaagaaggatatattgactttaaaaataataataattttattgttttcgctgatccacttgatggctcaagtaacattgatgtaaatgtttcaataggcactattttttcgataatgtctaaaaataagctatccttagaaaaagcatttattcaaaacggaagtcatcaaaaatcatcaggttttttcgtttacggaccacaaacaaccttatttattacagttggtgttggaacatctttatttgcattagacgaaattcaaggtaaatttattttaatcaaggataatatcaccataccagaaacaacaactgaatttgcaataaatgctgcatatagaagattttgggacagtaccacattaaaatatattacagaatgccagaaaggagaaagtggatcgagaaagaaaaattttggaatgagatgggtaggttcattagttgcagatgctagtagaatttttaatagaggaggtgtttttttatacccctctgatacgagagaaaaatataaaaatggaagattacgtttaacttatgaagcaaatccaattgcttttctagtagaacaagctaatggtgtagctactgatggacataaaaatatattagatctagaagtcaacgaattgcaccaaagatcaccattaatttttggatctaaagaggaggttttagaatataaaaaatcttaa

SEQ ID NO: 260496 - DNA, 856 bp, Unknown
  Bacterial polypeptide expressing nucleotide sequence isolated from the Sargasso Sea
tatgaatggcagcatttttgatgaagatgcgatcggaggaaaccaggctgtaaagtcggtcgtattaaaaatagcagaagtagctatctatctgtcagaagtaatatccttaggcgagttacgagggtctctggtcaagtccaccggaattaacgctgacggcgatgatcagaaagaattggacgtaattgctgacaaagcatatctacaggcgttgcaaaaatcagaagtgaggttttatgcgtcagaagagcaagacgaagtcctagagttgaactcatcgggagtggtggcccttgccattgatccgttggatgggtcttctaatattgatacgaatgtatctatagggtctattttttctttacggaatgtgagtccaagttctgattctgaagttagttatacgcaaaggcagttttttggccctggcactgagcagatcgcagcgggctatattatttttggtcctcaaacgctactggttttaacaactggggacggtgtgaaacagttcgtcttagatagaaataaaaatactttcttgttggcaagagagtcgctaaaaatccccactaacacccatgaatacgcggtaaatgcgtcgaattaccggcactggtcaaagccggttcgtcaatacattgaggatagcaatgcgggcgaagttggcccgcggggatcaaacttcaatatgcgctggattgcctctttagttgcagagacacatcggatacttacaaggggtgggatttttatatatccgtctgatagtaggaagaattatcgatcaggacgcttaagaatggtttatgaatgtgctccaattgcgttcttggtagagcaagcaaatgga

SEQ ID NO: 260497 - DNA, 979 bp, Unknown
  Bacterial polypeptide expressing nucleotide sequence isolated from the Sargasso Sea
aatgaaacgtttaaattcccaattgcaacaagacggtgcaccgcttgagttaattttactcattcgtacactgctagcgggctgtaaagaaatctctttccgcgtgagtcaaggcgcacttgctggcgtgctcggttcaaccctttcagaaaacgtacagggcgaaacacagaaaaagctcgacgtgatctctaaccacattttaaaagacacgctaagggaatctggctacgtaaaagccatttcgtctgaagaagaagatgacgttgtgccgtgtaatccagacggtaattacttagtaagcttcgacccgctagatgggtcgtcaaacactgaaattaacagcctaatcggtactattttctctattacccatgcgcctcagtggatgaaaccagatgatccgtctgctttcttacagcctggaacgcagatggtagctgcaggctatgtgctgtatggcccgtctactatgctggcgttgacgacgggtcgcggcacgcacatttatacgcttgataaaacccacggtggtttcctgcttactcaccctaatattcaagtacctgagcaaacgtcagagttttcgattaatgcgtcgaaccagcgtcattgggaacctgcaatgcaggcatacattgccgaccttctagcaggtaaagatggccctagaggcaaaaactttaatatgcgctgggtagcggcaatggtgggtgatatccatcgtttgctttgtcgcggtggcatctttatgtatccattcgataacagggacccgtctaagccaggtaagttacgcttgctttacgaagccaacccgatggcgttcttaatggagcaagcaggtggaaaagcagaaactggcactggtcgaattctggaagttatgcctgaagaaattcatcaacgtgtaccgtgcattatcggctctaaagaagaagttgagatgtgcttgagctacaacgacaacgcgaaatag

SEQ ID NO: 260498 - DNA, 979 bp, Unknown
  Bacterial polypeptide expressing nucleotide sequence isolated from the Sargasso Sea
ttgaaagaaaaacttgccggagataaaaatagagaattaattgcccttttaaaggacctaaaacttgcaggaagacaagttagtaaagagcttaatacaggagctctaactggttcacttggtgacaacacaggttcaaaaaatacccacggcgaaaaagtaaaaaaattagaccttatagctaatgatttatttattaaatcattagaaaatggaggaaattgtgctggaatagtgtctgaagaaaatgaaaaaatactaattttcaataatccaaattctaaaaatgcgaactatttagttcttatagatccattagatggatcatccaatatagatgtaaatgttcctgttggaacaattttctctgttctaaaaaagcctaaaacatcaaaaaaaatatctgtaaaagattttctccaagagggcaaaaagcaagttgccgctggatacataatatatggctcttctacgatttatgttttaactgtcggtaaaggtgtagatgcttttactttagatccacatgttaacgaattttatgtatcacagacaaatatacaaatacctgaaaaagctagaatgtactcagtaaatcaagggaatttttttgaatttcctcttgcattacaagaatatataagatggtgcgaacaaaaggaccctaaaactggtagaccttattctctccgctatgttggatcaatggtagccgaccttcatagaagtctattcaaaggaggattgtttatatactcccaagcaaaaaatgcgcctgaaggaaaactaagattaatgtatgaatgcaatccgatggcttatataatcgaacaagcaggtggtcttgctacagatggaaggaaaagtattttaactattaaaccaaaatctattcaccaaaaatcaccaatttttattggatcttctgaaatggtaaaactagtagataaatatttaaagagcaagttgttttcttagg

SEQ ID NO: 260499 - DNA, 1015 bp, Unknown
  Bacterial polypeptide expressing nucleotide sequence isolated from the Sargasso Sea
atgtccattgcccgccgcaccacgctgtcgaagttcctgatcgaacagcaacgtgagaccaacaacctccccgccgacctgcgcctgctgatcgaagtcgtcgcacgcgcgtgcaaggcgatcagctacaacgtgtcgaagggcgcgctcggcgaagcgctcggcaccgccggcagcgagaacgtccagggcgaagtgcagaagaagctcgacatcctgtcgaacgaaatcctgctcgacgcgaacgaatggggcggcaacctcgccgcgatggcatcggaagaaatggaaacgttcttcccgatccccgcgaactacccgcgcggcgagtacctgctcgtgttcgatccgctcgacggctcgtcgaacatcgacgtgaacgtgtcgatcggcacgatcttctcggtgctgcgctgcccggacggcaagcaggccaccgaggaatcgttcctgcagcccggcacgcagcaggttgcggccggttacgccgtgtacggcccgcagacggtgttcgtgctgacgaccggcaacggcgtgaactgcttcacgctcgaccgcgaagtcggctcgtgggtgctcacgcagagcaacatgcagatcccggccgacacgcgcgaatacgcgatcaacgcatcgaacgcgcgccactggtacgacccggtcaagcgctatatcgacgaactgaacgccggcaagaacggcccgcgcggcgacaacttcaacatgcgctggatcgcatcgatggtggccgacgtgcaccggatcctgaaccgcggcggcatcttcatgtacccggccgacaagcgcacgcccgaccgtccgggcaagctgcgcctgatgtacgaagcgaacccgatgtcgttcatcgtcgaacaggcgggcggcgccgcgacgaccggcacgcagcgcatcatggaagtgcagccgacgggcctgcatcagcgcgtcccggtgttcctcggttcgaagaacgaagtcgagcgcgtgacgggctaccaccaggaaaaggaataaa

SEQ ID NO: 260500 - DNA, 994 bp, Unknown
  Bacterial polypeptide expressing nucleotide sequence isolated from the Sargasso Sea
catgcagactcttgcccagcacttaacctcaaaggcagtgaacgaatccctcgcgcaactgattttgaccttagccgacacctccaaagccatcagccatgccgtgcgtcacggtgccttagccggtgtgttaggcgcgaccgaacaggaaaacgtgcaaggtgaaacccagaaaaaactggatatcatcaccaacgatatgctcaaagatgcattaaaagccgacggtacagtgcgcggcttagcctcagaggaagaagatcatgtggttgaagtcagcgccaatggtcaatatctggtgtgtttcgaccctttagatggttcatcgaatatcgatatcaactcactggtcggcaccattttctcagtcctgcccgcccctgctggcgagctgactgaaacaagctttttgcaatcgggccgccatcagttagccgcaggttatgtgctctacggcccatcaaccatgctcgccctcaccacaggccaaggcgtgcaactctttaccctgcacccagaaaccaacgaatttttactgaccaacgcggccatgagcatcagcccagacacccaagaattcgccattaacatgtcgaaccagcgtttttgggaagcgccaatgcagacctacatcgccgatttactgctaggcaaaattggcccgcgcgaaaaatccttcaacatgcgctggattgccgccatggtgggtgacgtgcaccgcgtgttatctcgcggcggtatctttacttacccaaccgacaataaagatccgaaaaagccatacaagctgcgtttaatgtacgaagccaacccaatggccttgttagtcgagcaagctggcggtaaagcctctaccggttatgaaaccattttggatattcaaccaacgcaaattcaccaacgcgtagcggttatccttggtagcgccaatgaagtggatgcttgcctaagctaccatggtatcgattacagtgaagaacccagtctggactaa

SEQ ID NO: 260501 - DNA, 1012 bp, Unknown
  Bacterial polypeptide expressing nucleotide sequence isolated from the Sargasso Sea
atgagacgtgaactggcaatcgagttttcccgagtgacggaagcggctgcactggctggctacaagtggctcggacgtggtgacaagaatatcgccgatggggcggccgttgcggccatgcgccatatcctcaatcagatccagatcgatggtgagattgtgatcggcgagggtgaaattgacgaagcccccatgctctacatcggcgagaaggtgggcacgggtctgggcgacgcggtggacatcgcggtcgatcccatcgagggtacccgcatgaccgccatgggccaggccaatgccctggccgtgctggccgtcggcgacaagggttccttcctcaaggcccccgacatgtacatggagaagctgattgtgggtcccaaggccaagggtgccatcgacctcgatcaggcgctcgagctgaacctcaaggccgtggccaaggcgctcggcaagccgctctcccgcctgaccgtgatcaccctggccaagccgcgtcacgacaaggcgatcaaggagatgcaggggctgggggtgcgggtgttcgccattcccgacggcgacgtagctgcctccatccttacctgtctgccggacagcgaagtggacatgctgtatggcatcggtggcgcgccggaaggggtgatctcggcggcggtgatccgtgcgctggacggtgacatgcaggcccgcctggtgccccgtcaccaggtcaagggcgacagcccggaagtgcgtgcgctgggcgagcaggaaattgcccgctgcgaggcactcggcatcgacgtgagcaaggtgctcaagctggaagacctggccaagaatgacaacgtcatcttctcggccaccggcatcaccaagggtgatctgctggacggcatcaccagcgacggcgtcatggcgaccaccgagaccctgctgatccgtggcaaatcgcggaccatccgccgcatcaagtcgattcacttcctggatcgcaaagacagcgtggtgcgggacatcatcctctaat

SEQ ID NO: 260502 - DNA, 994 bp, Unknown
  Bacterial polypeptide expressing nucleotide sequence isolated from the Sargasso Sea
atgcagactcttgcccagcacttaacctcaaaggcagtgaacgaatccctctcgcaactgattttgaccttagccgacacctccaaagccatcagccatgcagtgcgccacggtgccttagctggcgtgttaggcgcgaccgaacaggaaaacgtgcaaggtgaaacccagaaaaaactggatatcatcaccaacgatatgctcaaagatgcattaaaagccgacggaacagtgcgcggcttagcctctgaggaagaagatcatgtggttgaagtcagcgccaatggtcaatatctggtatgtttcgaccctctagatggttcatcaaatatcgatatcaactcgctagtcggcacgattttctctgttttacctgcaccacagggtgagttaactgaaacaagctttttgcaatctggccgcaatcagttagccgcaggttatgtgctctacggcccatcaaccatgctcgccctcaccacaggccaaggcgtgcaactctttaccctgcacccagaaactaacgaatttttactgaccaacgcggccatgagcatcagccctgacacacaagagttcgccatcaacatgtcgaaccaacgtttttgggaagcgccaatgcagacctatatcgccgatttactgctaggcaaaattggcccacgcgaaaaatccttcaacatgcgctggattgccgccatggtgggtgacgtgcaccgcgtactttctcgcggcggtatctttacttatccaaccgacaataaagatccgaaaaagccatacaagctgcgtttaatgtacgaagctaacccaatggccttattagtcgagcaagccggcggtaaagcctctacgggttatgaaaccattttggatattcaaccaacgcaaattcaccaacgtgtagcagttatcctcggtagcgccaatgaagtggacgcttgcctaagctaccatggtatcgattacagcgaagaaccaagtctagactaag

SEQ ID NO: 260503 - DNA, 961 bp, Unknown
  Bacterial polypeptide expressing nucleotide sequence isolated from the Sargasso Sea
cggtgaactcgccgtggtgttgtcgtccatcggcttggcgtgcaagcaaatcgcgagcttggtgcaacgcgcgggtctcgcgggcatgacgggtttggctggcgaacaaaacgtgcagggtgaggaccaaaagaagcttgatgtcatctctaacgatgtcttttgcgatgttttgcgtcaatctggccgtacgggcgtcatcgcgtccgaagaagaggacgtcccggtcgccgtcgaggagacgtacggcggcaactacgtcgtcgtcttcgatccgctcgatgggtcctccaacatcgacgccgccgtgtccacgggttccatctggggtatctacgagtccgactcctcgtgcatcccggatttctccgcggaagattccgccaagattgaagaaaagtgcgtcatgaacgtctgccaaccgggtaacaacttgttgtgcgcgggctactgcatgtactcgtcctccaccattctcgtcttgaccatcggccaaggcgtgtacgggttcaccctcgacccgacggtcggtgaattcatcatgtcccacgacaacatcaaggttccggaatccggtaagatttactccttcaacgagggcaactacggcatgtggtccgaaggcttgaagaagtacatggactcgctcaaggatggcggcaaggaagccggttccaagccgtacagcgcccgttacatcggttccctcgtcggtgatttccacagaaccatcttgtacggaggcatctacggttacccgggtgactccaagaacccgaacggtaagcttcgtctcttgtacgagtgcgcgccgatgtccatgatcgtcgaacaagccggcggcaagggttccaccggtacggagcgcgtcctcgacattgtcccggacaaggtgcaccagcgcgtgccgttcttcgtcggttcgaagaacgaggtcgactatttggagagcttcatgtga

SEQ ID NO: 260504 - DNA, 913 bp, Unknown
  Bacterial polypeptide expressing nucleotide sequence isolated from the Sargasso Sea
attaatccgaactattttagcggcatgtaaagaaatatcgtttcgtgttggccaaggcgcactttcaggcgtattaggctcaacacttgatgaaaacattcaaggcgaaactcaaaaaaagctcgatgtattatctaatcagctattaaaagatattttactggagtcgggcacagttaaagccattgcctctgaagaagaagactacaccgttgcaggaaaccccgacgctaaatatattgtggcatttgatccacttgatggttcgtcaaacaccgatattaactcgctggtagggactatattctcaattatggaagcgcctgaaggctcagatgcagcagacgaaagtatttttatgcaacctggccacaagcaagttgcggcaggttatgtactttacggcccatcaacaatgttagcgcttagtacaggtaaaggcacacgtatgttcacccttgataaaacccaagggagctttttactaacagaagactttgccactatacctgcagatacaaacgagtttgcaattaatgcgtctaatcagcgtcattggcaacccgctatgcaaaactacataaatgatttgttagaaggcgataccggcccgcgcgctaaaaactttaatatgcgctggattgcggccatggtaggcgatgttcatcgcgtactaagtcgaggcggtgtatttacttacccaactgatactaaagatcctaataaacctaataaattgcgcctgctttacgaagcaaacccaatggctatgctagtagaacaagccggtggcattgcctcaacagggtctgaacgtattatggatattcagccagacgctatccaccagcgtgtagcggttattttaggatctaaaaacgaagtagaaacctgcttggaatatcataagtaa

SEQ ID NO: 260505 - DNA, 258 bp, Unknown
  Bacterial polypeptide expressing nucleotide sequence isolated from the Sargasso Sea
gatggatgtcgagcggcagatcgagacgctcaagcaatgcaagatcatccccgaggcggatgtgacggccctgtgcgtgaaggccaaggagatacttatggaggaggagaatgtgcaccacgtgcccatccccgccacggtggtgggcgatatccacgggcagttctacgatcttctcgagctcttcgacgtcggagggcaggtccccagcgtcaactacgtcttcatgggcgactttgtcgaccgcggctactactc

SEQ ID NO: 260506 - DNA, 640 bp, Unknown
  Bacterial polypeptide expressing nucleotide sequence isolated from the Sargasso Sea
gggacgacctgacaatatctatcaacgaatcgacggtacgcagtggcgtcacgtctgggtggttggggatatccacggctgcttctcgatactgatggctaaactgcgccagtaccgttttgatccctggcaggatctgctggtttcagtgggggatgttattgaccgtggaccagacagtttgcgttgcctgaaattattgcgtaaacgctggattgtcgcggtcagggggaatcatgaacagatggcgctggacgcgctggcgacgggggatcaattcatgtggttaatgaatggtggctcgtggtttgcgcaggcggagcaaccggcagcgaaattcgctcttgaagagtgttggcaattaccctggattctggagctgcactgtcaaaacggcatacacgttattgctcatgccgattacccggatgatgattatcagtggctaaaaaagatcgatttacagcgtgtgctgtgggatcgttcgagactaatgaacaacggttgtgggattcgcggtgcggatcacttctggtttggccacacgccgttgcgccatcggctggatcgcgagaatctgcattatattgataccggtgctgtatttggcggcgagttaacgctggtacaactgcaataa

SEQ ID NO: 260507 - DNA, 631 bp, Unknown
  Bacterial polypeptide expressing nucleotide sequence isolated from the Sargasso Sea
atgccaagccccgttaccgccgggaatccgtcgacgagaaaccccgtcgcaaatttctgggtttgttctgacagcacgagccatgttgatcagacttccagggctcaatcttgtcttgtgaaagagacacccctacgccactgggtgatcggtgatgtccacggatgccacacctctcttctggaccttttggcggtgctgccagtccaggaccacttgattttctgtggcgacgtgatctgccgtcgtggcggcatcgacgcctgcatgcacctgatctgggatctggtttgttgcggacgggccacgtggttacggggcaatcacgaacaggcgttgatccatgccttacaagacattggcgaaggttcgcaaacagcttcgacccggcagtggttgcatcgcctcaatcagttgccgctgctctatcgcgctgacggatggtgtgcgacccatgccggcttcaacagcgacggtgatccggatctgtcgattcgtgagccgttctgggagacctacgacggtcgctatggccgcgtggtgatcggtcacaccccgcggcctgcggtggagcgtcatcagcgaattgtcctgatcgacacgggagcggtgtacggcgggctgctctcgg

SEQ ID NO: 260508 - DNA, 742 bp, Unknown
  Bacterial polypeptide expressing nucleotide sequence isolated from the Sargasso Sea
gttgggggattatattgatcggggtaattatgacatcgaagggctccttatccccctgctgcgcttcttgctccacgatccgatgcattttgtgatgctccgaggaaatcatgaggcagtttcgactgcgacaggctatgggctgatggacgagattgcgggtcgcggcagctgtggagagtctgaaaccatcgacgccaaaaaagttctggcagagaatttcggtccggttttcgccgcactgcctctggtggcgggactcgaaagtaaccaaccgcatatcgaacccgtatggggcggttttgatccctttccctctgtgcccgcgggtcaagaacagacaacgacgtatacgcccacgaaaacctactccgtcgtttttctgcacgcggggcatcctgcgtcggcgccgaacatgcaacaattcctcgaacaaccgttcagcagactctatagtttcgacctctgggaaaattcccaatcatggatgaaagatgcaggtggatggtctatgaatataagacaaaggcagcgcatcgcaaccagcactgatgccgagcccctgcaacagataatttggaatgactacagggaaggggctactacggagggaccgggtctagtcacggcccggagtcatcgtaacattggaatggttgtgggaagaccaaaggtcgacgagttctttcggaacaaccctgggttgctgttggtggtgcgtggacacgatccgctgagcgga

SEQ ID NO: 260509 - DNA, 831 bp, Unknown
  Bacterial polypeptide expressing nucleotide sequence isolated from the Sargasso Sea
gctggatcgctttaattctattactgatccagataatcttcaacccgctgttactaattatttcacaccagatacgaattattccgttgtcgaccaataccataaatttggatttggtaattatacctatgactccgaaggaaatattgttttcgataccaatgataatggtatatacgcagatgactggggatcaaatggtttagatgatgatgatgattgggggccattcaaagatgatcttggaaatgcatatgatattccctttgaaccttttgtagacctaaatgggaatggagtatatgacagtgacgtagctgagggctatgcagaaatctttggtacatttgtgttattggattttggtctagatggcataccagccgatgacgcaaatggtgatggtgattatgatgatgaaggcgatattgcaccagattatggagagggaaatggtgtttgggatggagaaacatttgaaaacttaaatggaaattccgaaataattgatggagttagcaccccaatttgggacacctttgttaacaatgaccttgatggagatggtaggcctagtcttggtgagaatggtgttgatgagtttgatgaaaaagatttttcgttaaactatggaggacttagcagagcatataaagatgcaaatgatgatggcatagaagactatccagaatttaatgttcgtaattataggtatgatctaagattagattgggaaccaaactctgatatttcatttaatttatcacatggttttgcttgggccagaaacataaacataactggaattgctagatatctagctgatggttg

SEQ ID NO: 260510 - DNA, 679 bp, Unknown
  Bacterial polypeptide expressing nucleotide sequence isolated from the Sargasso Sea
tttgccagccccgcgtcagcaccactgggtcatcggtgatgttcacggctgcgatcgatccctggtgtccttgctggaggtgttgccctctgacgatcatctggtcttctgcggggatgtgatcaatcgaggtggggggatcgaagccgcgatggatctggtgtggaccctggtgaggctggggcgtgctacctggctgcgcggcaatcatgaacaggacctgatcgatgcgctggagtcgagcggcgacggctccgctgaagccctgttcagccaggacaccgtctgccagctcggggagcgacgcacccgctcctggctcgatcgccttcaacagttgccgttgaaatacagcgctgaaggctggagtgccacgcatgccggtttcaacagcgacgggcagcccgatctgtcgatccgggagcccttctgggagtcctatgacggccgccacgggcgggtggtgatcggccacactccacggccaacagtggagcgccatcagcgcatcgtccttgtcgacaccggtgcggtctacggaggcctcctctcggcttactgcccggagaccgatgccgtggtgcaggtgcagggatccggagacggatgcctcttgccacggcctgatgatccgcatcgcgttacggacatcatggccggggatgccaccagttgctga

SEQ ID NO: 260511 - DNA, 589 bp, Unknown
  Bacterial polypeptide expressing nucleotide sequence isolated from the Sargasso Sea
atgactaaatggacagagtcggaagcttttacatggtataaaaaccaagactggatagttggatgcaactatctacccagtaatgcaataaatcagctggaaatgtttcaaccagaaacatttgatattgaaataaataaaagggaattgtcttgggcaaatgatttaggatttaactcagttagggtttatctgcatgacttactttggagtgatccagaaacttttaaaaatatcttagatcaatttctagatatttgtgcccaaaataagataaggccaatgttagttttatttgatgactgtcacagaccctatccaaaacttggagtacaacccaaaccagttaaaggtgttcataattcaggttggaagcagagcccgggtatggctcttgtaagtgaaattcatgataatgatagtcatccagaaatacctagacttaagagttttgttcaagagatactagggcactttagcagtgatcagagaattcttctttgggatatttacaatgaacccggtcaatttgggataggtgacaaatctttggccttattaaaattggtttgggaatgggcactggagg

SEQ ID NO: 260512 - DNA, 1072 bp, Unknown
  Bacterial polypeptide expressing nucleotide sequence isolated from the Sargasso Sea
tgcccaagctcaagagcgttctgctgatcgcggtgatgctgcgcttcatggacagtttcatgatctacaccgagccgttcgtgctcaccggcggagggccgggcaacgccaccaccttcctcagccagaccctgacgcaaatggccatcggccagttcgatctgggcccggccgcggcgttctcgctggtgtacttcctgatcatcctgctggtgtcctggttgttctacaccgccatgacccacgacgacaaaacccgctgaggccgaccatgacgctacgcaaacgcctggtactgctgatctatttcctgttcctgctggtgccgatctactggctgctgaacatgtcgttcaagagcaataccgagatcctcggtggcctcagcctgtggccgcagagcttcaccctggacaactaccgggtgatcttcaccgaccgcagctggtacgagggctacctcaactcgctgtactacgtcagcctcaacaccctgatatcgctcagcgtggcgctgccggcggcctatgccttctcgcgctatcgcttcctcggcgacaagcacctgttcttctggctgctgaccaaccgcatggcgccaccggcggtgttcctgctgccgttcttccagctctattcgtccatcggcctgttcgacacccatatcgccgtggcactggctcactgtctgttcaatgtgccgctggcggtgtggattctcgaaggcttcatgtccagcgtgccgaaggaaatcgacgagacggcctatatcgacggctacagcttcccgaaattcttcgtgaagatcttcatcccgctgatccgctccggcattggcgtcaccgccttcttctgcttcatgttctcctgggtcgagttgctgctggcgcgcaccctgacctcggtggacgccaagcccatcgcggcggtgatgacccgtaccgtgtccgcctcgggcatcgactggggcgtgctggctgctgccggggtactgaccatccttccggggatgctggtgatctggttcgttcgcaaccatgtggccaagggcttcgccctcggtcgcgtgtaa

SEQ ID NO: 260513 - DNA, 238 bp, Unknown
  Bacterial polypeptide expressing nucleotide sequence isolated from the Sargasso Sea
atgggggcctttttagagaagcccaaaacggagaagtataacgagtctcgttcaggggctggacttcgatatggcctcagttcgatgcaaggttggaggttagaaatggaggacgctcattccgccgttataggtataccagatatcgccgataatgtaagttggtttgcagtttttgacggccatgctggatctcgagtgtcttatcattgttcacaccacttattgaaagtataag

SEQ ID NO: 260514 - DNA, 307 bp, Unknown
  Bacterial polypeptide expressing nucleotide sequence isolated from the Sargasso Sea
gctgcagagcatcgagacggtggggctgctcatggcgctgcggctcaagtacccggcgtcggtgttcttgctgcgcggcaaccacgagtgcgcgtcgatcaaccgcatgtacggcttcttcgacgagtgcaagcgccggtactcggtcaagctgtacaaggccttcatcaacgcgttcaactgcatgcccgccgcggcggtcgtcggcgagaaggtcttctgctgccacggcggcctgagccccgagatggacaaagtgaagcaggtgctcgccatcaagcgcccgtccgaggtgcccgagaagggc

SEQ ID NO: 260515 - DNA, 238 bp, Unknown
  Bacterial polypeptide expressing nucleotide sequence isolated from the Sargasso Sea
ttaaatttgatttgtagagcgcaccagttggttcaggaggggttgaagtacatgttcccggataaaaacttggtcacggtttggagcgcgccgaattattgctatcgctgcgggaacgtggcctccatcctagcctttgacgataacctcgatcgcgaggttaagtatttcacggaaaccaccgaaaacagcaccatgatggcgcctcgcgcgtcgttgcccggttattttctgtaaa

SEQ ID NO: 260516 - DNA, 976 bp, Unknown
  Bacterial polypeptide expressing nucleotide sequence isolated from the Sargasso Sea
gttgtgcgacgccgcggagcactgcttcaaaagtgaagagacagtgttgcgagtgaacggtccagcgaaaatttttggcgatttacacggccaattcggtgacttgatgcgtttgtttgcagagtacggcgcgccctccacggcgggcgacatcgcgtacatcgactacgttttcttgggtgattacgttgatcgcggcgcgtattcgttggagacgatttcacttctcctcgcgttgaaaattgagcacccgaatgcggtgcatttactgcgcggtaaccacgaagagccggacattaacgcgctcttcggcttccgcatcgagtgcgtcgaacgtctcggcgaaaccgcgggtgacgcggtgtggcgacgtttcaacgatttgttcgagtggttacccctcgcagccgtcatcgaagaccgcatctgctgcatgcacggcggcatcggtcgaagtttgacgcacatttcccagattaacgatttgaagcgtccgctcaacatggaaaacggcggcgtcgagttgatggacattttatggagcgatccgaccgaaaacgacggcgtcgagggcttgcgtccgaacgcgcgaggacccggtctcgtcacctttggccccgatcgcgtcaaggcgttctgcgagacgaacggcattcatatgatcattcgcgcgcacgagtgcgtcatggacggtttcgagcgtttcgcccagggacagttgctcacggttttcagcgccacaaactattgcggcaccgcaaacaacgccggcgcaatcttggtcttagggcgcgacctcacgctctatcccaagctcattcacccgctccctccgatcgccatggagtctctatcgccctcggatcgcatcgacgacaacctttggttacaagacgtcaaccgagacagaccgcccacgcctccgcgcggtcgtctgggccagacccaacccatcggcctcatcaacccgacgtga

SEQ ID NO: 260517 - DNA, 599 bp, Unknown
  Bacterial polypeptide expressing nucleotide sequence isolated from the Sargasso Sea
catgagcaacgtcgaagcccatatcgaaacactcaagcagtgcaagacgatcaccgaggctgaggtcgtcagtctctgccagaaggcgaaggacattctcttcgaggaggagaatgtgcaccatgttccgatcccggcgacggtggtaggcgacattcacgggcagttttgggaccttctcgagctcttcgacgtcggggggcaggtccccgacgtgaactatgtcttcatgggcgacttcgtcgaccgcgggtactattccgtggagacattcttgctgttgctggcgctcaaggtccgttaccccaagcgggtgacgctgatccggggcaaccacgagtcgcggcagatcacgcaggtctacggcttctacgacgagtgcctgaaaaagtacggcacgacaacggtgtggaagtcctgcgtcgaggtcttcgactgcttgtgcctctgcgcggttgtcgacaactcggtgctgtgcgtgcacggcggcctctcgccatcgcttgacactgtcgaccaggtgcaggacctgaaccgcgtgcaggagccgccgcacgagggcccgatgtgcgatctcatgtggtccgatccggacgacg

SEQ ID NO: 260518 - DNA, 358 bp, Unknown
  Bacterial polypeptide expressing nucleotide sequence isolated from the Sargasso Sea
catgtgcgacttgctgtggtccgaccccgacgatcggtgcggctggggtatctcgccgcggggcgcggggtacacgttcggccaggacatctcggagcagttcaaccacgcgaacgggctggacctgatcgccagggcgcaccagctcgtgcaggacgggtacgagtgggcgcacgaccgatccgtcgtcaccgtcttctccgcgccgaattactgctaccggtgcggaaaccggggggccatcatggaggtggacgaaaacaggcggagggcgtttttgcagtacgaacagtacaggagggcggtgaacccggaggcgaggaggaacatggtcaagacgcccgactacttcttgtga

SEQ ID NO: 260519 - DNA, 329 bp, Unknown
  Bacterial polypeptide expressing nucleotide sequence isolated from the Sargasso Sea
aatggaagaaatccaattatatgcttttgatttagacggaacccttctagacacagctcatgatttcttttatgcagtaaataaacttagagaattgaatggattggagcctggagattttcttcaagtgcgatgcagagtatcccaaggtgccgctagccttgcccgttatgctttagatattgatgaaaatcagaaagaagaaatagaaaaagctagattggaattattaaaaatctatgaaaactgttgccttggtgcaaaaccttttgaaggggtacatgagttgttactcaacattaaagaaagaaataaaaattggggaatct

SEQ ID NO: 260520 - DNA, 366 bp, Unknown
  Bacterial polypeptide expressing nucleotide sequence isolated from the Sargasso Sea
tttgaaaattgaactcttcgcattcgacttagatggaactcttcttgatactgcacctgattttctatatgcggtaaatttactcagaaaaaagtataaatttggtgaagcagattatgagcaagtacgatcaagggtttcacaaggagcagcgagtcttgctacatatgcactcaacctacaaggcgagtcaaatcagataattgaatctcatagacaagagttactagatatatacgaagactgctgcctgacaaacaccaaaatgtttgatggagttgaagaaatactaaatgaactaaatgaaaaaaaaattaagtggggaattgttactaataaacccgagaagattttgccgaaagtatt

SEQ ID NO: 260521 - DNA, 445 bp, Unknown
  Bacterial polypeptide expressing nucleotide sequence isolated from the Sargasso Sea
atggctgatccgctgcggttggtggcttttgatcttgatgggacattaatcgatagcgccgactctatagtaaatggcgttcttgcttgttgggaggcgtgcggatttccggccccggaaaaggagaatattcgaaggataattggcctgccctgggaggagtcgatatgtgagcttttgcccggtgctggtaaaacagaatttgacaagataaaggcgtatcatgcggaagtggcgagtgggaagcggccgcggccttcccgaaaggaggatttatttccaggaattaacgatgtccttaatcaggttgaagatgctggctatctgctgtcgattatcaccagccgttcttctggccgtctccaagaattgttagaagctaatggaattggaagacgttttgtaaccctcaaaaccaccgataatggaccagggaaacccaatc

SEQ ID NO: 260522 - DNA, 419 bp, Unknown
  Bacterial polypeptide expressing nucleotide sequence isolated from the Sargasso Sea
aatgaataaaaacgtaaatatactaattgcatttgatttagatgggactttaattgactctgctagagatttccataactgcttaaatcttttaacaaaaaagcataacgaagaagaaatagagtatagagaagtaagagaaagagtttcagaaggttcttttagtcttataaaacacgcctttaaaggggctagcgaaaaaagaacaaaccttctgagagaagagcttcttgatctttatgaagaaaattgtttacttaaaaccattaagtttgaaggaacagataacttgatccaatatcttgaatcagaaaaaataaagtggtgcatagttaccaataaacctagaagatttgcagaaagaatagttaaatatttctttccttccctggatcataaaaaaatgctcttctgtccag

SEQ ID NO: 260523 - DNA, 259 bp, Unknown
  Bacterial polypeptide expressing nucleotide sequence isolated from the Sargasso Sea
atggaatataaaaaagtttttaaaattgctgcatttgacttagatggaactctcttggatagcgcagatgatttaattgactctctaaatcttcttttgaaagaaaaaaatcaatctcctatgaaaaaaagtaatgtttacagattagtaggaaacggagcattagcaatgataagggaagcttataaattgaataataataatgaaaaagatattgactggaaattcttacaaaaaagatttttagaaatatataaaa

SEQ ID NO: 260524 - DNA, 420 bp, Unknown
  Bacterial polypeptide expressing nucleotide sequence isolated from the Sargasso Sea
aatgggtcattgggcaaatattaaagccatcgcgtttgatttagacgggacgttaattgatagtgtgcccgacttagctgccgcgacaaatgcgacgctagtcgagtttaatttaccgccagtgtcagaggatttggtcagaagctgggttggaaatggcgcacaaatattaatgcaacgggcgttaagctttgtgtgtgcacaagcacaagacagccaagagattcaggtaaagcttgagcaaaccatgccaaggtttatgcatcattacggtgaacatttacagcaacatagccttttatattctgatgttttagccgtattacaacaacttaaacaagctggttataagctggcggttgtcacaaacaagccctatcgttttaccattccactattacattcttttggcttagatgg

SEQ ID NO: 260525 - DNA, 664 bp, Unknown
  Bacterial polypeptide expressing nucleotide sequence isolated from the Sargasso Sea
tttgaaaagtattgaactatttgcttttgatctagatggaactcttcttgatacagctccagactttctacatgcagtgaatgtattgagggaaagatataatcttgaagaggctgattctgatcaggttaggtcaagagtatcgcaaggtgcagcaagcctagcctcctacgctttagggcttgaatcagaatcagatgaaaagattgagtttcatagacaagaattacttgatatctacgaagattgctgcctcaaaaataccagagtattcgatggcatagaggacgttctcgataaactcaattcaaccaaaatcaaatggggaattattaccaataagcctcgaagattcgcagaagtcatcgttcaagataaattaaataaattcagaactccttttctaatttgtcccgatgatgttggagttcgaaagccagatccagatggattaaatcttgctctaaaagtatctgaatctaatcctaagaacagcatttatattggagatcataaaatagatataaaggctggtgaacaagcaaacatgatgacaggtgcggcagcttacggttatgtgcctatggaagatgctgctgaagaatgggaagcagattttatcttctaccatcctagggatattaataatctgctagatcagtga

SEQ ID NO: 260526 - DNA, 667 bp, Unknown
  Bacterial polypeptide expressing nucleotide sequence isolated from the Sargasso Sea
atgaataaaaatgtaacaacattagttgcatttgatctagatggaactttaattgattctgctaaagattttcataattgcttaaatcttctaacaaaaaagcataacgaagaggaaatagagtatacagaagtaagagaaagagtttcagaaggttcctttagtctcataaagcatgccttcaaaggatctagcgagaaaagaacaaaccttctaagagaagagcttcttgatctttatgaagagaattgtttagttaagaccattaagtttgaaggggcagatagcttgatccaatatcttgagtcagaaaaaataaagtggtgcatagttacaaataaacctagaaggtttgctgaaaaaatagttaaacatttctttccgtccctggatcataaaaaaatgctcttctgtccagatgagtttattgagcctaagcctagtcctagaggactaaatttagcatgtaaaaatacaaattctgatccaagttcttctttctttgttggtgatcatgcaatagatatagaggcaggaagaagagctggcattcacacaatagcagtagattatggttatagaaaaattgatgaccttgtagaaaattggaatgcaaactttacagtaggtaatttgtgtgaaatcaaaaatttaatacatgaatgaa

SEQ ID NO: 260527 - DNA, 664 bp, Unknown
  Bacterial polypeptide expressing nucleotide sequence isolated from the Sargasso Sea
aatggaagaaattcaattatatgcttttgatttagatggaacattgttagacaccgctccagattttttttctgctgtcaataaactaagaaaagcaaatggattagaatctggtgatttcttgcaagtaagatcaagggtttctcaaggtgcggctagtcttgctcgttattccttaaacttgaaagaaaatcaaaaggaagaaatagagaaatctagacttgagttgctagcaatctatgaaaagtgttgtttgaatgcaaaactatttgaaggaataaaccaagttttggattcactcaatgaaaaaaataaaaattggggaatagtaactaacaaacctagaaggtttgcagagagaattgtaaatgagaaattttcttcacttaaacctgatttcttaatttgtcctgatgatgtaggtgtgaggaagcctagtcctaaaggtttaaaattagcttgcaaattagtaaaagtatcatcaaaaaactccatatacataggtgatcattttattgatataaattctggtaaatctgcaaaaatgagaacagctgcagcagcctatggatacataccagaaggagatattgtttcaaactggggtgcagacttcattatcaatcatcctcgtgaaattaataggattatagaaagttattaa

SEQ ID NO: 260528 - DNA, 685 bp, Unknown
  Bacterial polypeptide expressing nucleotide sequence isolated from the Sargasso Sea
aatgcgggaacagattaaagcgattgcctttgatctcgacggcacactgattgacagtgtgcccgatcttgcggtcgcgacccaggcggcacttgccgaattaggtttagcaacgtgtaccgaggcacaggtgagaacttgggtgggcaatggggccgagatgctgatgcgccgcgccatgagccacgctctaggcacagacgttgagcaaacggcattggatgcggctatgcccatctttatgcatcactatcaagaaaatcttgagaagcacagtgcactctatgccgatgtgcatcaagtgctgcaaatcctgtttgatgcgggatttaagctggcggtggtgaccaataaaccttatcgctttaccttgcctttgcttgaagcctttaagattaatgacttctttagcttagtgcttggtggtgattcgctggcgaagatgaagccagacccattaccgctacagcatctattagccgaatggcaactcgataaaagtgagttgttgatggtgggcgattctaaaaatgacattttagcggcgaaagcggcgggtgttgcatcaatcggcttgacctatggctacaactacggtgaagatattgggctcactggccctgacgctgtatgcgagcagtttgccgagatcctgcgctggctaaatctcgctcagccagtttaa

SEQ ID NO: 260529 - DNA, 445 bp, Unknown
  Bacterial polypeptide expressing nucleotide sequence isolated from the Sargasso Sea
tagatcaaatgcgtgcagaactggccggagtgaattagtgcggcctttccagttcatagcttttgatttagatggcactttggtcgacagtgcccccgatattttacccgctttaaatcagatgttggcaaagctcggtaaagagcaagtcagtctgacgcaggttcagcattggctgggtaacggtatggccatgttgattaaaagagcactaacaggcgagctgcatccggctcaatgggatgcagtactgtttgagcaggctcagcagttatttattggtttttaccaacaaagcaacggctgtgcgacccgcttgtttgatcaggttcctgaagtgttagcgcagttaagtcagttttatccattggctctggtcaccaataaaccccggcaattcacagaacctttgttgcagcacttgggtattaagcatctttttaac

SEQ ID NO: 260530 - DNA, 685 bp, Unknown
  Bacterial polypeptide expressing nucleotide sequence isolated from the Sargasso Sea
atgcggaaacagattaaggcgattgcctttgatctcgacggcacactgattgacagtgtgcccgatcttgcggtcgcgacacaggcggcactcgccgagttaggtttggcaacgtgtaccgaggcacaggtgagaacttgggtgggtaatggggctgaaatgcttatgcgccgtgccatgagccacgctttaggcgtagacgttgagcaaacggcattagatgcggctatgccgatttttatgcatcactatcaagaaaatcttgagaagcacagtgcactttatgccgatgtgcaccaagtgctacaaactctgtttgacgctggatttaagctggcagtggtgacaaacaaaccctaccgctttactttgccgctgcttgaggcctttaagattaatgatttctttagcttagtgcttggcggcgattcgctggcgaagatgaagccggatccattaccgctagagcatttattagcgcaatggcaactcgataaaagtgagttgttgatggtaggcgattctaaaaatgacattttagcggcgaaagcagcaggtgttgcatcaatcggcttgacctatggctacaactacggtgaagatattgggctcactggccctgacgcggtgtgcgagcagtttgccgagatccttagctggctaaatgtcggccaggcagtttaat

SEQ ID NO: 260531 - DNA, 685 bp, Unknown
  Bacterial polypeptide expressing nucleotide sequence isolated from the Sargasso Sea
atgcgggaacagattaaagcgattgcctttgatctcgacggcacactgattgacagtgtgcccgatcttgcggtcgcgacccaggcggcactcgccgaattaggtttagcaaggtgtaccgaggcacaggtgagaacttgggtgggcaatggcgctgaaatgctgatgcgccgtgccatgagccacgctttaggcacagatgttgagcaaacggcattggatgcggctatgcccatctttatgcatcactatcaagaaaatcttgagaagcacagtgcactctatgccgatgtgcatcaagtgctacaaatcctgtttgatgcaggatttaagctggctgtggtgaccaataagccttatcgctttaccttgcctttgcttgaagcctttaagattaatggcttctttagcctagtgcttggtggcgattcgctggcgaagatgaagccagacccattaccgctacagcatctattagccgaatggcaactcgataaaagtgagttgttgatggtaggtgattctaaaaatgacattttagcggcgaaagcggcgggtgttgcatcaatcggcttgacctatggctacaactacggtgaagatattgggctcactggccctgacgctgtatgcgagcagtttgccgagatcctgcgctggctaaatctcgctcagccagtttaat

SEQ ID NO: 260532 - DNA, 607 bp, Unknown
  Bacterial polypeptide expressing nucleotide sequence isolated from the Sargasso Sea
cctgttttgtggcgggtttcacggtttccggtgtcggcatggggcaggatcggccccctgtttccttcatgtcacgagccgtatcatgtccttatccccccgttttgccctgcttgcctccctggtcgccgccagcctgaccctgcccgccgtggcggtcgaagccccggccagccccgccggtgtcactgcggtgaccctggcccaacaggcccccattcactgggtgtcggtgacgcagattgccaggagcttggatgggttgccgccgatggcggtaggtttcgacatcgacgacaccctgctcttctccagcccggggttctatcgcggcaagcaggagttctcccccaatgacgagagctacctgaagaacccggccttctgggagaagatgaacaacggctgggatgcgttcagcgtgccgaaagaggtgggcaaggcgctcatcgccatgcacctccagcgcggcgatcacatctacttcgtcactggccgctcggccaccaagactgagaccgtgagcaaaaccctgcagcagaccatgaatattccggccgaccagctcaacccggtgatcttcgccggcgatcagccgggccaaaac

SEQ ID NO: 260533 - DNA, 886 bp, Unknown
  Bacterial polypeptide expressing nucleotide sequence isolated from the Sargasso Sea
catgggccgcgccgctggcatgcgctccatcggtgtcggcgtgggctggaacagcaacctcatttgcggcgacatgagcatccagaccacgctgcgcaaccagctcaacggcatcacccaaggtttccagcagatcatgagcaatgtgatccagagcgccaccagcgcggtggcgtccctgcctgcgctgatcatccagcgggccgacccggggctgtacaacttgttgaccaacggtgtgctgcaggcccgtttggacttcgaccgctccaagctaacgtgccgcgccatggccgagaagatggccgagacggcgggcggccagctcggatggagccaactcgccgagggcatggcgctgcgccaggccgtatcgagcacggatgctgtttctgctgtccaacaggcggagaacaaccgcggcaacaacggcgtgccctgggtgggcggcagcaatgccggcggcgtgggccagacggccatccgggtggtcggggacgtgacccgggcgggctacaacctggtcaacggccgcggcgtgaccgacacgtcatccattgcggcggccagttgcgcgagcctgtcctgccagacctggaccgcgccgcagcaggcggtcgaatgggccacgcgggtcctgggcgagaaggtacagcgtacctgcgattcctgcaccaagaccgagacggtgcccggcgtggggctcacgccactgatccaggaggagtacgaggccaagctggaagccctgcaggagctgatctcagggacgcgcaacaccacgttcgagaacctgcgtggggctggcagcacctcgctgcccatcacgcgcggcgtgatcgaggcgctgcgcgacgaaccggaccaggacctgctggcgcggcgc

SEQ ID NO: 260534 - DNA, 565 bp, Unknown
  Bacterial polypeptide expressing nucleotide sequence isolated from the Sargasso Sea
catggacgatctaaatccgtatcttgaattggctctgaaggctgtggataaagcctcggcattcattcggcaggaatctgagaaaactctggaagtgggttataaaggtgataccgatctggtgacccatgtggacctgggttcggaaaagatcatcaaagagcttttgaaatcaaagtttccggagcaccagatccttgctgaagaaggcggagtggagcaggggaaatcagaattcctctgggtcatcgatcccctggacgggaccacgaattttgtccatggttacccgttttatgccgtttcgattgcgctctatcgggaaaatctcccgttggtcggggtggtgagtcacatcaccagcaaagaggtatacaccgccacctcaggcggcggggctttctgtaatgggaaagccctgaaggtttccaaaaccaaggatctcggacaatctctgttggccactggtttcccctacacccacgacgaactctggtcccgtaacatcgaacatttcaaacttctcaccgaccgcacccagggagtgcgcagggctggtgcggcc

SEQ ID NO: 260535 - DNA, 613 bp, Unknown
  Bacterial polypeptide expressing nucleotide sequence isolated from the Sargasso Sea
tatgattcaaagtcctaagaatgaattcttggacacagcactaaaagcagcaaaatcagccgcacatttaatacagaattccacagaaaattatgtaacaaattataaatcgaaaacagatctcgtaactaagacagatattaagtctgagagaattatatcggatgtaataaaatctaaattcccttatcatggaatcctcgctgaagagtctggtttagatgatgataaaaccacagattatgtttgggtaatagacccactcgatgggacaacgaattttgtgcataattatccatcatatggggtttcaatcgcccttctagaaaaaggggcgcccataataggagttgtcgtagaattaccagccatgaatgtctatcacgccacggttgatacagactcctattgtaatggcgaaaaaattcatgtttcaagtaataaagaacttattcattcattgcttgttactggttttggttacgagcatggttctaattgggaaaaaaacatgagactatttcaagaattcacagatattactcagggtgttaggagacttggtgctgcagcggtagatctatgccacgttgcttgcggtaaagtggatggt

SEQ ID NO: 260536 - DNA, 765 bp, Unknown
  Bacterial polypeptide expressing nucleotide sequence isolated from the Sargasso Sea
tatgcatcctatgctgaatattgcggtgcgcgcagcgcgtgcggctggcacaattattgttcgtggtttcgaaaaacacaacgaagtagcaactgaatcaaaaggcgctaacgatttcgttacgcaaattgataaagaagctgagcaagctattattgctaaaattcagcaatcatttccaaatcactgctttatgggtgaagagtctggcgaaactgccggcgcagatactgactttcagtggattattgacccattagatggcaccaccaatttcattaaaggcattcctcactttgccgtatctattgcattacttcacaaaggtcgtttagaccaagctgttgtatttgatcctatccgtagcgaattattcacagctagccgcggacaaggcgcccagttaaatggttatcgtattcgtgcgtctaagccgcgtgatttaaccgagactattctagccaccggtatgccgtttaaaaacaaagctaagtttggcgagtatgcactaagccttaataaaattttccatgagtgtggcgacatccgccgtgctggtagtgcagcgttagatttagcatacgttgctgctggtcgtcatgatggctactgggaacgtggtattaaaacgtgggatatcgcagctggagaacttattgttcgtgaagctggcggcttagtcaccgactttaaaggcggcaacgatccactttatagcggcgaaatcgtggcaggtagtgccaaagtagttcaaggcttagttaa

SEQ ID NO: 260537 - DNA, 718 bp, Unknown
  Bacterial polypeptide expressing nucleotide sequence isolated from the Sargasso Sea
tgagaaaactttggaagtgggttataaaggggataccgatctggtaacccatgtggacctgggttcggaaaaaatcatcaaagagcttttgaaatcaaagtttcctgagcaccagatccttgccgaagaaggcggagcggagcaggggaaatcagaatacctctgggtcatcgatcccctggacgggaccacgaattttgtccatggttaccagttttatgcagtttcgattgcgctctatcgggaaaacctcccgttggtcggggtggtgagtcacatcaccagcaaagaggtatacaccgccacttcaggcggcggagctttctgtaatgggaaagccctgaaagtttccaaaactgaggatctcgggaaatccctattggccaccggtttcccctatacccacgacgaactctggtcccgtaacatcgaacatttcaagcttctcaccgaccgcacccagggagtgcgcagggcaggtgcagccgcattggatttctgtcatgtcgcccggggatggctggatggattctgggaactggaacttggtgcctgggacatggcggccggcgtgttgattgtcgaagaagccggagggcaggtgagcaagctgaacaacgaccctttcagcctgatggaacgcgaggtggttgccagcaacggcctgatccatcaaccattgctggaactgcttaaccgcgagggggattctccctga

SEQ ID NO: 260538 - DNA, 725 bp, Unknown
  Bacterial polypeptide expressing nucleotide sequence isolated from the Sargasso Sea
tatgattcaaagtcctaacaatgaattcttggacacagctctaaaagcagcaaaatcagctgcacatctaatacagcattccacaaaaaattatgtaacaaattataaatcggaaacagatctggttacgaagacagatattgagtctgagaagattatatcggatataataagatctaaattccccggtcatggaatcctcgctgaagaatctggtttagatgatgataaaacaacaaattatgtctgggtaatagacccacttgatggcacaacgaattttgtgcataattatccatcatacggcgtatcaattgctcttttagaaaaaaacataccaatagtaggagttgtcgtagaactaccaactatgaatgtctattacgctacggttgatacagactcctattgtaatggcgaaaaaattcatgtttcaagtaataaagaacttattcattcattgcttgttactggctttggttacgagcatgggtctaactggaaaaaaaacatgagactatttcaagaatttacagatattactcagggtgttagaaggcttggtgctgcagcggtggacttatgtcacgttgcttgcggtaaagttgatggtttttgggagtttgacctaaatccgtgggacgtatcagctggaattttaattgtagaacgagcaggtggaaagataagaaaaatgaatggggataaatacgctatatatgata

SEQ ID NO: 260539 - DNA, 730 bp, Unknown
  Bacterial polypeptide expressing nucleotide sequence isolated from the Sargasso Sea
aaacttgagtcaattaataataaatcatccaaaattgatttagtaagcaaagctgatattgaatcgaatcaatatatagtaagcgagatacaaaaaaaatatccgcaacactcaatattatctgaagaaatgggtgaatattcaggaaattctaattaccaatgggtcatagaccctttagatggaactactaattttgttcacaatctgccaatctttgcctgttcaatcggtctgaggaaggataaccaaacaatactaggagtagtttataatccagctgcagaaaaatgcttttatgccgagaaagacaaaggtgcatttttaaataacaaacaaatatcttcaacctcatgtaaaactttaagtgaatctctgttagctactggttttccttacgaacatgatgataaatatgatatgtcattcagaatatttaaagaattttatgataaaactcgtgggcttagaaggcttggtgctgcttctttagatttatgttttgttgggatgggtagatttgatgggttctacgaatacggcttaaagccttgggatatctgtgcagggaaaattattgcaaaggagtctggtgcgattgttacagactgggataaagaaaaagatgctcctcaaagtggaattagaattttagctgcaaataaacatatacataaatatatggttgagattttaactaaagaagaatatagtatttttattgattaaa

SEQ ID NO: 260540 - DNA, 520 bp, Unknown
  Bacterial polypeptide expressing nucleotide sequence isolated from the Sargasso Sea
atggacgatctaaatcagtatcttgatctggctctggaggctgcggataaagcctcggcattcattcggcaggaatctgagaaaactttggaagtgggttataaaggtgataccgatctggtaacccatgtggacctgggttcggaaaagatcatcaaagagatgttgaaatcaaagtttccggagcaccagatccttgccgaagaaggcggagcggagcaggggaaatcagaatacctttgggtcatcgatcccctggacgggaccacgaattttgtccatggttacccgttttatgccgtttcgattgcgctctatcgggaaaacctcccgctggtcggggtggtgagtcacatcaccagtaaagaggtatacaccgccacctcaggcggcggggctttctgtaatgggaaagccctgaaggtttccaaaacagaggatctcgggaaatccctattggccaccggtttcccctacacccacgacgaactctggtcccgtaacatcgaacatttcaagc

SEQ ID NO: 260541 - DNA, 598 bp, Unknown
  Bacterial polypeptide expressing nucleotide sequence isolated from the Sargasso Sea
tgccgaagaaggtggagaggagcaggggaaatcagaattcctctgggtcatcgatcccctggacgggaccacgaattttgtccatggttacccgttttatgccgtttcgattgcgctctatcgggaaaatctgccgctggtaggggtggtgagtcacatcaccagtaaagaggtatacaccgccacctcaggcggtggagctttctataatgggaaagccctgaaggtttccaaaaccaaggatctcggaaaatctcttttggccaccggtttcccctatacccacgacgaactctggtcccgtaacattgaacatttcaagcatttcaccgaccgcacccagggagtgcgcagggcaggtgcggccgcattggatttttgtcatctcgcccggggatggctggatggattctgggaactagaacttggtgcctgggacatggcggctggggtgttgatcgtcgaagaagccggagggcaggtgagcaaactgaacaacgaccctttcaacctgatggaacgcgaggtggttgccagcaacggcctgatccatcagccattgctggaacagcttaaccgcgagggggattctccctga

SEQ ID NO: 260542 - DNA, 490 bp, Unknown
  Bacterial polypeptide expressing nucleotide sequence isolated from the Sargasso Sea
cttgcacaccgccgcgcgcgagatggcggacgcggtggattacgacctgtgtctctccgaggcgctcgccgcggcgacggccgccggcgaggagatcctctcggcttggcacgccgagcgcgacgtggagtacaagggcgcggtggatctcgtcacggcgacggataagaagtgcgaggacatcatcttcgaccgcctccgcgctgcgttcccgacgcacgacttcgtcggcgaggagtccgtcgcggccaacgacgggacgatcccgcccctcacggaccgcccgacgtggttcgtggaccccctcgacggcacgacgaacttcgtccacggtttccccttcacctgcgtcagcgtcggcctcgccgtgaaccagatcccggtcgtcggcgtcgtcctgaacccgacgctcaaggagaccttcgcggcggcgcgggggcggggcgcgaccctgaacggcgccccgatccgcgcgagcgacgtcgcggac

SEQ ID NO: 260543 - DNA, 655 bp, Unknown
  Bacterial polypeptide expressing nucleotide sequence isolated from the Sargasso Sea
catgcagcctatgctgaatatcgccctgcgcgccgctcgcagcgccagtgaactgattttccgctccatcgaacgcctggatagcatcaaggtcgatgagaaagaggccaaggactacgtttccgaagtcgatcgcgccgccgagcaaagcatcgtcaacgccctgcgcaaggcctacccgaaccactccatccagggcgaggaaaccggcctgcacgcgggtagcggcgaagaaggcaaggattacctgtggatcatcgatccgctggacggcaccaccaacttcctgcgcggcatcccgcacttcgccgtcagcatcgcctgcaaataccgcggccgccttgagcacgccgtgatcgtggatccggttcgccaggaagaattcactgccagccgcggccgtggcgcccaactcaatggccgccgcctgcgcgtcagctcgcgcacaagcctggaaggcgccctgctgggcaccggcttcccgttccgtgatggccagatggcggacatggacaactacctgggtatgctccgcgccttgaccggccagaccgccggcatccgccgcgccggctccgccagcctggacctggcctatgtggctgctggccgcttcgacgccttctgggagtcgggcctatccgaatgggacatg

SEQ ID NO: 260544 - DNA, 631 bp, Unknown
  Bacterial polypeptide expressing nucleotide sequence isolated from the Sargasso Sea
agccattattcgttcattttacaaggatcatactattctcgcagaagagaccggacaggatacgaatgtttctgattatctttggatcattgatcccttggatggcaccacgaattttgtacatggatacccttcgtttgccatttctataggattattctataagaatgaaccactagttgcagttgtagtagaaatgcctaatatgaggatgtataccgctataaagggtcaaggtgcatggtgtgaaggtaaagagatcaattgttccgataccaagacattagaaagatctttactggtgacaggatttgggtatgaacatggagagaattgggataataatatgaatttattcaaacaattcaccgatgatacacaaggcgtgagaagattaggagctgccgcagttgatatttgtcatgttgctaaaggagcagcagatggtttttgggaatatgaccttaagccctgggacacagccgcaggtatattgatcgcaaaagaagctggatgtatggttacggacctttccgggaatcaatttgatatcaatgacaataatattctaataacaaatgggcatattcaccaaaatatggtcaataatatagaacgttatttgaactga

SEQ ID NO: 260545 - DNA, 583 bp, Unknown
  Bacterial polypeptide expressing nucleotide sequence isolated from the Sargasso Sea
caacaatagcgattaccagtggatcatcgacccgcttgatggcaccacaaactttatcaaaggcattcctcactttgctgtatccatagctctgcgtcatcagggcaagctggatcaagccgttgtatttgacccattacgtggtgaagtattcacagcatcccgtggtgcaggcgctcagttaaacggccgtcgtatccgtactaccaatttacctgatttaggcggcgctattctggcgacaggttttccgtttaaacacaaacaccatttagacgcgtacaccgaaacctttaaaactctgatgattcaagcagcagacgtgcgccgcactggttcagcagcgctggatttatgttatgtcgcagcaggtcgttttgatggtttctgggaaattggtttaaagccatgggattttgctgcaggcgagctgatcttacgtgaagccggtggcttaatcagtgacttcgctggtggtaacaactacctgcgcagcggcaacattgttgcagccagtccaaaagtattaggtgccatgttaaaaggcatgcgcccacatttaacagaatctctgttgaagtaa

SEQ ID NO: 260546 - DNA, 805 bp, Unknown
  Bacterial polypeptide expressing nucleotide sequence isolated from the Sargasso Sea
atgcatccgatgttaaacatcgcggttcgcgctgcccgtagcgcgggtaacgtgatcgcccgtgcctgtggccagcttgatatggttcagaaacaacaaaaaggcactaacgactttgtcaccaatgtagacaaagaagctgaacaggcgattgttcaggtactgaaaaaatcgttcccgactcacggtattgtcggcgaagagcatggcgattacggcaacaacgacagcgagtttcaatggattattgatccgctggacggcaccaccaactttattaaaggcattccgcatttcgcggtgtctatcgctttaaaacatcagggtaaacttgatcaggcagtggtttttgacccgctgcgtggtgagctattcactgcttcacgtggtcgcggcgcgcagttaaatggcacccgtatccgcgtaaacaacctgcctgatatgggcggcactatactggcaaccggttttccgtttaaaaacaaaacccatatcccggcgcacagcgctatgctgacaggcttactggctgaagcggctgatattcgccgtaccggttctgctgcgttagatttagcctatgttgctgcaggacgttttgacggtttcttcgaaattggcttaaagccgtgggatatcgctgccggtgagctgattgtgcgtgaagctggcggcctggtgtgtgattttgttggcggcaacaaccacctgcgcagtggtaacgttgtggcagcggcaccaaaagtattagccggtatgttaaaaggcattcgcccacatctgacagaatcgctgtctcgttaaa

SEQ ID NO: 260547 - DNA, 772 bp, Unknown
  Bacterial polypeptide expressing nucleotide sequence isolated from the Sargasso Sea
tatgcacccgatgctcaacatagctattcgagcagcaagagctgctggcgactctattgtacgtgaaatggatcgtgcctgtgatataccaattgaagataaaggtaaaaatgattttgttactgaagtggataaaaacgctgaggagataatcattagcaccatacaaaaatcatacccagatcacgcgtttcttgctgaagaatcaggccaaagaggggaaagtgattacttatgggtaatcgatcctctagatggcacgactaattttttacatagctttcctcatttcgcagtctcaatagcattaaagcagaaaggcattctaaatcaggcagtagtttacgacccattgaaacaagaattatttactgcgacaaaaggtaaaggtgcacagcttaataatagaaaaatcagagtgagttcaaaaaaggaactagacggagcgttactcggtacaggctttccctatagcgatgaaaaagccatgttaaaatttattgagagttataaggcattattcccaaaagttgctgggataagacgtgccggcgttgcatctctagatcttgcctacgttgcttctgggcgtcttgatggattctgggaattcaatttaaaaccatgggatattgcggcaggtgtcttgcttattcaggaagcaggaggcataagtgcagaactatcgggtgggcttgattacttagaaagtggaaatatcatctctgcaaatcctaaactgctaaaagctatgttgaagatagtcagttga

SEQ ID NO: 260548 - DNA, 610 bp, Unknown
  Bacterial polypeptide expressing nucleotide sequence isolated from the Sargasso Sea
atgaaaaaagaattggctagctttgcagaaaatatcgcattatctgctggaaaaattattcttgaatcaataaataatatagaagttgattttaaaggcaaaactgacctgattaccaatattgatcttgaatccgaaagatccataattgataaaattattaattcatatccctctcataatatattatctgaagagcatggattaacaaataataattctgattatttatgggttattgatcctttagatggaacaacaaatttcgttcacaactatccatcttatggagtttctataggattgctatataaaaacaatcctgaaataggagtggtacttgaattaccttcaaaaaacttatactctgcaataaaaggttctggagcatacaaaaatggtcaaaaaataagtgtttctaaagtcccaaaattaaccaatagcttacatgtgactggatttggatatgagcatggtgaaaaatgggaaataaatatgaaattatttaaacattttacagatataactcaaggagttagaagactaggtgcagcatcaatagacctttgtcatctagcaagtggagtagttgacggattttgggaataag

SEQ ID NO: 260549 - DNA, 760 bp, Unknown
  Bacterial polypeptide expressing nucleotide sequence isolated from the Sargasso Sea
ggaggctgcagaaaaagcctcggcattcattcggcaggaatctgagaaaactttggaagtgggttataaaggggataccgatctggtgactcatgtggacctgggttcggaaaagatcatcaaagaacttttgaaatcaaagtttccagagcaccagatccttgccgaagaaggcggagcggagcagggcaaatcagaatacctttgggtcatcgaccccctggacgggaccacgaattttgtccatggttacccgttttatgccgtttcgattgcgctctatcgggaaatcctcccgttggtcggggtggtaagtcacatcaccagtaaagaggtatacaccgccacctcaggcggcggagctttctgtaatgggaaagccctgaaagtttccaaaacagagcatcttgggaaatctttgttggccaccggtttcccatacacccacgacgaactctggtcccgtaacatcgaacatttcaagcttctcaccgaccgcacccagggagtgcgcagggctggtgcggccgcattggatttctgtcatgtcgcccggggctggctggatggattctgggaactggaacttggtgcctgggacatggcggccggggtgttgatcgtcgaagaagccggagggctggtgagcaaactgaacaacgatcctttcaacctgatggaacgtgaggtggtagccagcaacggcccgattcatcagccattgctagatcagcttaaccgcgagggggattccccctga

SEQ ID NO: 260550 - DNA, 703 bp, Unknown
  Bacterial polypeptide expressing nucleotide sequence isolated from the Sargasso Sea
atggacgatttaaatcagtaccttgaactggctctggaggctgcagaaaaagcctcggcattcatttggcaggaatctgaaaaaactctggaagtgggttataaaggcgataccgatctggtgacccatgttgacctgggatcggaaaagatcatcaaagagcttttgaaatcaaagtttccggagcaccagatccttgccgaagaaggcggagcggagcaggggaaatcagaattcctctgggtcatcgatcctctggacgggaccacgaattttgtccatggttacccgttttatgccgtttcgattgcgctctatcgggaaaatctgccgctggtcggggtggtgagtcacatcaccagcaaagaggtatacaccgctacctcaagcggcgggactttctgcaatgggaaagccctgaaggtttccaaaactgaggatctcggacaatccctattggccaccggtttcccctacacccacgacgaactctggtcccgtaacatcgaacatttcaagcttctcaccgaccgcacccagggagtgcgcagggcaggtgcggccgcattggatttctgtcatgtcgcccggggatggctggatggattctgggaactggaacttggtgcctgggacatggcggccggtgtgttgatcgtccaagaagccggagggcaggtgagcaagctgaacaacgatcctt

SEQ ID NO: 260551 - DNA, 631 bp, Unknown
  Bacterial polypeptide expressing nucleotide sequence isolated from the Sargasso Sea
tttgaatcaaaaggataaagatgaatttttaaaaactgctatctatgcagctaatgaagcctcaaaggttatattgagatctaatcaaaaaacagtaaagacatacaaagccaaaacagaccttgttacatcaacagatcatgaatctgaagaagtaataattgatatcataagatcaaaatatcctgaccacagcgttctagccgaagaatctggtaattttaaaaaacacttagattataattggataattgatccacttgatggaacaacaaattttgtccacagttatcctttatttggtgtttcaatcgcattgtcgcacaaagataaaatcatagtaggcgttgttatggaattaccatcattgaatgtttattcagctatccaaaatgggcctgcttattgtaatgataaaattataaaagtctctaataataataaattaatagatagtttattggttactggctttggatatgagcatggctacctatgggaagataatatgaagttatttaaaatatttacggatctaactcagggtgtacggcgctctggagctgctgcaatagatatatgtcatgcagcatcgggcaagacagatgcgtattgggaatttgatataaag

SEQ ID NO: 260552 - DNA, 512 bp, Unknown
  Bacterial polypeptide expressing nucleotide sequence isolated from the Sargasso Sea
gatgctatcagttgctaaagctgcagccagagacgcatcggacttaatattatatgcaaatgaaactgatcgaaaatcatcaaataaatcaaccataacagaccttgttactgaaacagataaaaaagctgaacaagtaattatagatgatattttagcaaagttccccgatcataatattcttgcagaagaaaccggagaaacaacatcaaattctgaatatctttgggttattgatccattagatggtaccacaaattttgtgcatggactttcaccctattgtgtctcaattgcattgttaaaaaatgataaaccattcttatctgtcatatcagaacttcctagtgaaaatttattttgggcaataaaaggacatggtgcattttgtaatggagataaaatatctgtttctaaacgatcatcaatccgagattcactattaattactgggttcccttatcaacatgattccaaatgggaaacaaatatgaaattatttaaacatttta

SEQ ID NO: 260553 - DNA, 706 bp, Unknown
  Bacterial polypeptide expressing nucleotide sequence isolated from the Sargasso Sea
tcctaaagttagttccaaaaaaggaaaaacagatctggttactgaaacagacctgctttctgaaaaagttattaaatctaccatacgttctgaatttgatgatcattcaattatggcagaagaatcaggcaaggagcttacacagtcagactatctttggattattgatcctctagatggaactacaaattttgttcatggttacccatcctatggtatttccatcggactctactacaaaaggaaaccactactaggaattgtgatggaaatgcccaatgttaaactatataccgctgttataggtagtggcgcattttgcgagggtcaaaaaattaacccatcagagactgaaaccttaaatgagtcacttttggttacaggatttggatatgagcaccttgaaaattgggagaggaatatgaaactcttcaaacattttacagatattactcaaggtgttcgaaggttaggagcagctgcaattgatatttgccatgttgcatctggacttgttgatggatattgggaatatgacctaaaacaatgggatatggcagcaggactcattatagcctctgaagctgggtgtagagttactgatattaggggaaaaaaacaccaattagaggttgataatgtggttgttactaataagctcattcacgacgaacttatatccgagtcttcctcttacttaaattga

SEQ ID NO: 260554 - DNA, 421 bp, Unknown
  Bacterial polypeptide expressing nucleotide sequence isolated from the Sargasso Sea
gatgcatccgatgctgaccatcgccgtgcgcgcagcgcgcaaggcgggtaatgtaattgccaaacactacgaaaccccagactctgtagaaaccagccagaaaggcagcaatgatttcgtgactaacgtcgataaagccgccgaagcgattattatcgaaactattcgcaaatcttacccacagcacaccatcatcaccgaagaaagcggtgagcacgcaggtgaagatcaggatgttcaatgggttatcgatccactggatggtactaccaacttcgtaaaacgtctgccgcacttcgcggtatctatcgcagtacgcattaaaggccgtactgaagtcgccgttgtttacgatccaatgcgtaacgaactgttcaccgccactcgcggccagggcgcacagctgaacggctatcgtctg

SEQ ID NO: 260555 - DNA, 784 bp, Unknown
  Bacterial polypeptide expressing nucleotide sequence isolated from the Sargasso Sea
atgattcaaagtcctaagaatgaattcttggacacagctctaaaagcagcaaaatcagctgcacatctaattcagcattccacaaaaaattatgtaacaaattataaatcggaaacagatctggttacgaagacggatattgattctgagaagattatatcggatataataagatctaaattccctggccatggaatcctcgctgaagaatctggtttagatgataataaaactacaaattatgtttgggtaatagacccacttgatgggacaacgaattttgtgcataattatccatcatacggggtctcaatcgcccttctagaaaaaggttcgccaatagtaggcgttgtcgtagaattaccagcaatgaatatctatcacgctacgtttgatacagactcctattgtaatggcgaaaaaattcatgtttcaagtaacaaaaaacttattaagtcactgcttgttactggttttggttacgagcatggccctaattggaaaaaaaacatgagactatttcaagaattcacagatatcactcagggtgttagaagacttggtgctgcagcggtggacctatgccacgttgcttgcggtaaagttgatggtttttgggagtttgacctaaacccgtgggacgtatcagctggaattttaattgtagaaaaagcaggtggaaagataagaaaaatgaacggggacaaatactctatatatgataatcagataatggcggctaacggtcatatcgatgaagaaatgattaaggtttcaaagatat

SEQ ID NO: 260556 - DNA, 793 bp, Unknown
  Bacterial polypeptide expressing nucleotide sequence isolated from the Sargasso Sea
atgattcaaagtcctaagaatgactttttggacacagctctaaaagcagcaaaatcagctgcacatctaatacagcattccacaaaaaattatgtaacaaattataaatcggaaacagatctagttacgaagacagatattgaatctgagaagattatatcagatataataagatctaaattccctggacatggaatcctcgctgaagaatctggtttagatgatgataaaaccacagattttgtttgggtagtagacccacttgatgggacaacgaattttgtgcataattatccatcatacggggtgtcaatcgctcttctagaaaaagggtcgccgataataggcgttgtcgtagaattaccggcaatgaatgtctatcacgctactgatgaaacgcactcatattgcaatgatgaaaaaatccatgtttcaactaacaaaaaactaattcagtcactgcttgttactggttttggttacgagcatggctctaattggaagaaaaacatgagactatttcaagaattcacagatgttactcagggtgttagaagacttggtgctgcagcggtggacctatgtcacgttgcttgcggtaaagttgatggtttttgggagtttgacctaaacccgtgggacgtatcagctggaattttaattgtagaaagagcaggtggaaagataagaaaaatgaacggggacaaatattctatatatgataatcagataatggcggctaacagtcatatcgatgaagaaatgattaaggttttcaaagatattatttaaa

SEQ ID NO: 260557 - DNA, 796 bp, Unknown
  Bacterial polypeptide expressing nucleotide sequence isolated from the Sargasso Sea
atgtcccctatcaacaaagatgaacttttaaatgttgctatagaagctgcacttgcagcttccaatttggtcatggaagccagtgatagaccaagagtggctaatcataaaggtattactgacctagtgacagagacagatctaaaatctgagaagaccataaaagccatcattcgttcattttataaggatcatactattctcgcagaagagaccggacaggatacgaatatttctgattatctttggatcattgatcccttggatggcaccacgaattttgtacatggatacccttcgtttgccatttctataggattattctataagaatgaaccactagttgcagttgtagtagaaatgcctaatatgaggatgtatactgctataaagggtcaaggtgcatggtgcgaaggaaaaaatatcaattgttcagataccaagtcattagaaaggtccttactggtgacaggctttgggtatgaacatggggagaattgggataataatatgaatttatttaaacaattcaccgatgatacacaaggcgtgaggagattaggagcggcagcagttgatatttgtcatgttgctaaaggagtagcagatggtttttgggaatatgaccttaaaccctgggacacagccgcaggtatattgatcgcaaaagaagctggatgtatggtcacggacctatctgggaatcaatttgatatcaataacaacaatattctaataacaaatgggcatattcaccaaaatatggtcaataatatagaacgttatttgaactgat

SEQ ID NO: 260558 - DNA, 592 bp, Unknown
  Bacterial polypeptide expressing nucleotide sequence isolated from the Sargasso Sea
atgcttgacggtaaaaattattatgctagtatgtgtcctactccagatgaattctatttattttggacacttattatagaaagaaagattgaaaccatagttaatttaacggggtttgtagaaaaaacaatacaaaaatgtcataaatatttttctacagaaaaaaaaaatatgcctattaaagacccatcaaataatgcctccgaacaaataaatataaaaacaattaaaattaaaagtattaaaatggaaaatagtgaagaataccaaaagtatggtacggaatatacaattgaaatatataaaaataatcaattacatacattgaaaataatacattgcgatacatggcctgatcatggtgtacctacacctgaatctaatttattatataatatttatgaactgttaatgaaaaataaaaaaaaaaatatattagtacattgttctgctggcataggaagaactggtacattactttcttatataactaccagaaatgttatacaaaaacaagtagaaaaatataacaatattacttatgaacacatgttaaaaatatgtaatatttgttttcaagtcattagaagtt

SEQ ID NO: 260559 - DNA, 619 bp, Unknown
  Bacterial polypeptide expressing nucleotide sequence isolated from the Sargasso Sea
atgaaaatacttttaacaaatgatgatggttatgatgcaccaaatattgtttccctatataagaagttatctaagaagcatgatgtttggattgttgctcctgaaaaaaattgtagtggcatgagtgctgcaatatcttttcttaaggaaatagaagtcagaaaggttgctgataaaatatttgctgttgatggaacgccagcagattgcacatatttaggattattaagcattgttgattttgaatttgatattgttatttcaggagtaaatcatggagcaaatatcggaaatgatgtcatttattctggaacagttggcgcagctgttgggggaagaaaattaaagtatcctcccattgcaatttctgtagcatcttattcgactttaaatatagattttattgtaaataaatcttccgaacttatcgataaaataattaaactgcctgctatcttcgatggtaaagtttttaatataaattttcctgatttgaatgagaaaaaatgtaaaggcattaaggttacaggggttgcaaaaagagatattcctgcaaaaccgattgaagttgaatcagagaatgataacaaaagatatagatataacctttctggcaaac

SEQ ID NO: 260560 - DNA, 622 bp, Unknown
  Bacterial polypeptide expressing nucleotide sequence isolated from the Sargasso Sea
aggctagctaagaatcgttatagcattaatggaactccgactgattgcgtggtgatggctattaataaaatcatccaagataaaccgccagatattgttctttctggaataaacaatggttcaaatattggcgaagatcttacatattctggaacgatagcggtagcgatcgaggctactttagctggtattccagcgattgcacttagccaaggatgtaatgaaaaagatccaaattccaaaatagattggtcagcggcagaaatccacgcagggaatataataaaaaggttactttccacggcctggcctaaaaatgttttaataaatgttaactttccacctgtacctagtaaacgtgtaaaaggtattgagattactcgcatggggtatcgaaaaatcggtgatgagattatcgagggtagtgatccaaaaggtaagtcatatttctggataggtgctcagaagctctctaataacaacccccccgggacagatttaggggctattcaaaatgatttaatttctataagccctctctctataaatttgactcaccaagcgatgatgagaaaactaagagaggcttttaaggagcaggggtttagtcaagatggttaaa

SEQ ID NO: 260561 - DNA, 310 bp, Unknown
  Bacterial polypeptide expressing nucleotide sequence isolated from the Sargasso Sea
ttggataaaaaaagaccattaatcttagttactaatgacgacggaataacagcacccggaattagatgtcttattgatgtaatgaatgaaataggagaagtggttgttattgcacctgacagtccacaatccgctatgggacatgctataacaattaactcaaccctacattgccaaaaagtggttatggacactggtccacaaattgaatattcatgttctggtacccctgcagattgtgtaaaacttggtatcaatgaaattttagaccgaaaacctgacttgtgtgtctcaggtgttaatcatgggt

SEQ ID NO: 260562 - DNA, 420 bp, Unknown
  Bacterial polypeptide expressing nucleotide sequence isolated from the Sargasso Sea
atattgctgatatcaggaataaatgaaggagtaaatttaggatatgatttattatattctggaacagtagctgttgcaagagaaggagccttaaataatataaaatctatagctatatcaattgataaaagtaataaaaaaataaactggaacgcattagagtattttgccccaaaaattttccatgaatttattaaaattaaactatcaaacaatcttttttttaatgtaaactttccaagctgtgataaagagcaaataaaaggaataaaaatcgttaaaatgagtaagagaaagcttggtaaattaaaaaaaatagataataacaattatataatgccttcagagagaaaaataataagaagtgctaaacctaatgaagatgaatttgaattaaggcaaggatttattactattaca

SEQ ID NO: 260563 - DNA, 262 bp, Unknown
  Bacterial polypeptide expressing nucleotide sequence isolated from the Sargasso Sea
atgcgaattttaataactaacgatgatggaataaatgcacctggtcttaaagtagctaaaaaaattgcaaaatcaataattggaaataataaaggtgaaattactattatcgcaccatcatctgaaaaatctggcgtatctcatagtatatcttttgtaagaccttcattaatacaaaaaattaataaaagtaaatattctttagaaggaacaccagcagactgtatattagcagggattaaattatgttatgaaaaataag

SEQ ID NO: 260564 - DNA, 517 bp, Unknown
  Bacterial polypeptide expressing nucleotide sequence isolated from the Sargasso Sea
ctgaaagaccgcaatattgatctggttgtcagtggcatcaaccacggtagcaacacgtccatcagcgtactttactccggaaccatgtcggcggctatcgagggagcaatagagggtactcctgcaattgggttttcactttgtgacttcaacccaaaggctgacttatcacatgtggatgaatatgtagagaagattgcctctgaggcattgatcaaaggtttgcctaaagcaaccgctttgaatgtcaatattccacacaagcaaaatgagtcaatccaaggcatcaagatttgccgtcaggctaatgcacgttgggaagaggaatttgaccagcgcagagatcccaatggaagagactatttctggatggtcggcaactttgtgaatcatgataagggtgaggataatgacgagtgggctatcgcaaataattatgtttcgattgtgccttgtcaatttgatcttaccgcacaccatgccatcactagattgaatgatgagtgggatttttgat

SEQ ID NO: 260565 - DNA, 215 bp, Unknown
  Bacterial polypeptide expressing nucleotide sequence isolated from the Sargasso Sea
tcgccaccgggcggagtcggtgatccgcaccgaggacccccgtggtcagcccgtctactggattggcccccccggcaaccagcaggatgcgggagagggaacggactttgccgccatcgagcagggttatgtctccatcactcccctgaccatcgacatgacggcctacggcagtctgtcgaccctgggcgcgtggctggatctgcagggatgac

SEQ ID NO: 260566 - DNA, 680 bp, Unknown
  Bacterial polypeptide expressing nucleotide sequence isolated from the Sargasso Sea
tgaaactacagtagttgcaccaaaatcagagcacagtggagcaggtcatgccattactatttcacgtccgcttcaatcagagaatataagtctttcgtgtggtctttcaggatatgccgtaaatgggactcctgcagattctgtgaaatttgctatgagtgtagttatgaagactaaacctgatatcttagtttctggaattaatccaggctctaatgtaggccaaagtattttgtattccggaacagtctctgctgccagggaaggaacatttcgcgggattaattctattgctttaagcattgatggcgacagtcaatttaattatcagggagcgaaagaggtttcaaagacactagttaattctgttataaataacaatctcccaaatcatattttattgaatgtgaacataccaaacattcctttgtcatcaattaaaggctataaaatcactaagcaaggctctatgagttttaatgataaatttgagaaatttaataattctaggggatcttcatattattggcttacagcggagcaagaagaccctgacaaaacaaataagtctgatagaattgctgtaaaaaatggatttgtaagtataacaccaattcactcagtacaaacagatttcgaattcatggatgaattaaatagttggaaaattgatcagtagc

SEQ ID NO: 260567 - DNA, 415 bp, Unknown
  Bacterial polypeptide expressing nucleotide sequence isolated from the Sargasso Sea
tatgcgaatacttataacaaacgatgacggaattaacgccccaggccttaaaattttaacaaaaatagcactccaattaactgatgaagttaatgttttcacagttgcaccaagcagcgaaagatcgggggttgggcattgtataagctatacaagcccaatgatgattagtgaaattgagcagaaccgcttcagtgtagatggatatccagccgactgtgtgctagccggtatatatcatgtatttgatggtcaaaagccagatttagtcctttccggggtaaaccgagggaataattctgctgaaaatgttttgtattcaggaactataggagcggccctagagggcgctctgcagggaataaaatctattgccttatcgcaatattacggtccacagaatttaaatctagaa

SEQ ID NO: 260568 - DNA, 124 bp, Unknown
  Bacterial polypeptide expressing nucleotide sequence isolated from the Sargasso Sea
caacgcgattcggtacacatcgcgttgacggggatggccgaagccagcccggacctcgtcgtttccgggatcaacaacggccagaacatgggcgaagacacgctctattcggggacagtgcggc

SEQ ID NO: 260569 - DNA, 919 bp, Unknown
  Bacterial polypeptide expressing nucleotide sequence isolated from the Sargasso Sea
tatcaaaaatacccatttgaatggattattggagtagatttttctcaattaaaagagtcgaatttaacaaatgacgatggaatttatggagatccttcagacctatatagtccttatataagtaaatcttcaattttaagaaattataagtctaaaaatttatcaatttttggaaatgtagattattttttaaatgagcaatacaaattagcatttggaatgagatgggaaaactggaattcaaaatacaatgactcaaacaatgaatcatttaatccttcaaactatatgaacggaggaaagctctcactaataaaaaatatgaatacgaaatcaaatatgtttttatcaatagcgcatggatataaacatggtggatttaatttagggttagatgcattagataattctataaataaaaatttaatatatgatccggaatttttgactaactatgaatttggaataaattctacatttaataaccgagatttgaatttatcagcagtgatattttattcaaaaagaaaagatcaacaagttttgatttcaagacaagtagacccagcagatccaaataccttttcatatttaactcaaaatgcagctgatggaaagaattacggatttgaaattaattctaattttttattaagagatcgcatgttgctttatttaaatttagggattcttaaaacacaaataaataattgggaatcgagagaagatttggagaatcgagcgcaagctcatgcaccagaaagaacactctctgcaggaataaattttgatatgaatcataataagtattttaaaattgaaataaatggaaaaagtgatttctattattctgagtctcacaataataaatcaaaaagctatcaattaataaacctcactttggaaaaaataaaggcac

SEQ ID NO: 260570 - DNA, 388 bp, Unknown
  Bacterial polypeptide expressing nucleotide sequence isolated from the Sargasso Sea
gttcaagaaattgaaagggaaaatggatttaaggggtatgcagttagtggtactccagcagattgtgcaaagattgcaattaggtcattaatgattcttcaaccagacatattgatttcaggaataaatcaaggtgcaaatttaggaactacccttatttattccggtacggtttcagcagcagctgagggtgctatgctagggatttcatctatagcaattagcttagcctcttttatttcagatgattatggaactgctaaaaaagtagcaactgatgttgtgaaacatgtaatgaaaaataatttaccgagaggaactttacttaatgtaaatgtaccagattgtaatgaaaaaatgataaatggatttcgaattactagacaag

SEQ ID NO: 260571 - DNA, 517 bp, Unknown
  Bacterial polypeptide expressing nucleotide sequence isolated from the Sargasso Sea
tatgatatttgcattaaacaaaatttttactaacaaacctccagattttattttttctggtattaataacggtaccaatattggtgatgagatatcttattctggaacagttgctgctgctttcgagggggctttgagaggaattccaagtatagctttaagtctggctagaaataataataatcaaaaaaattttaaagtagttgaaaagttttttcctcaagtcatgtcaaagataaatgaaattagatttttagatagtagtttttttaatgtaaattttccaaattgtgatattaaaaaagttaaagaaattattgttactaaaatttgtcatactaaaatttcagatgaaattcatgtgaatatgaaaaataattattttgagataggaaaaatgaatgttaaaaccacacatgatattaattctgatttttatgctattaaacaaaattttatttcaataacaccaattagtacaaatatgacaaataataaatattttgatgatatttaa

SEQ ID NO: 260572 - DNA, 174 bp, Unknown
  Bacterial polypeptide expressing nucleotide sequence isolated from the Sargasso Sea
aatgaaaccgttaaatatattaattagcaatgatgatggtgttttcgcagcagggattagagcgttagcaaaatccgcccaaaaaagaggacataaggtaaaagtagtatgtccagatcaagaaagatcagctactggtcatggtcttactttacaatccccattaagagtgga

SEQ ID NO: 260573 - DNA, 373 bp, Unknown
  Bacterial polypeptide expressing nucleotide sequence isolated from the Sargasso Sea
atgcgtattctaataactaatgatgacggcattaatgctgctggcatcaagtctttgaagaagatcgctctggaaatgtcgacaaaagaaaatgtttttgttgttgctccctccgcaaatcaatcagcaaaaggtaggtctatttcatacaaaacaacttttgagattataaaaaaaaatgttaatgaatattccgttaatggaactcctaccgattgcataatatttgcgcttgaacatctcatgaaaaacaagaaaccggatattgttttatcaggaataaattggggatataatctttctgaggacctgttttattcgggaacaatagcggccgctttggaaagtgctgacagaggtatatgtcgatagc

SEQ ID NO: 260574 - DNA, 685 bp, Unknown
  Bacterial polypeptide expressing nucleotide sequence isolated from the Sargasso Sea
tgttgttgcccctgaaataaataatagcggagcaggatgttcgataacaacaaataagcctttaaaagttactcatcatgaaaatgggttcatgtctgtaaacggaaaacctgcagactgcgtacatcttggaatacatgaattaacaccttggaaaccagatttggttataagcggcattaatctgggagcaaatatgggagaggatttgctttattcaggtactgttggagctgcacttgagggtaggggtttaaaatatccatctatagctatctcagcagcagcttttaaacaaccaggttctgaaaactcgttagagcccaataatcagacagccgcattggttattaaagaaataatcgaaaactatgaatctatagaattagattcatccgtaatcctcaatataaatacaccaaatgtagaatattcagattcattaaacaaaaggataactattatagggagctggggtaaaagaaaccctcccaataagaaaataaagagcaatggaacagaggagttttggacgtctcatcgagataaatttcttttaaatgacgaaaatacagatataaattgtcttttagataaagaggtatccatttcacctataattcctaatttttctaatcaagataatttagcagaagtcactaagtggattgagcaatggaattag

SEQ ID NO: 260575 - DNA, 385 bp, Unknown
  Bacterial polypeptide expressing nucleotide sequence isolated from the Sargasso Sea
atgcgaatacttataacaaacgatgacggaattaatgctcctggccttaaaatcctaacaaatatagcgcttcaattaaccgatgaagagagtgtgttcacagttgcacctagcagtgaaagatcgggagttggacactgtataagctatacaagcccaatgatgattactgaaattgagaaaaacctcttcagtgtagatggatatccagccgactgcgtacttgctggtatatatcatgtatttgatggtcgaaagccagatttagttctttcgggggtaaaccgaggcaataattctgctgaaaatgttttatattcaggaactataggagcggccctagagggtgctcttcaaggtataaaatctattgctttatcacaat

SEQ ID NO: 260576 - DNA, 592 bp, Unknown
  Bacterial polypeptide expressing nucleotide sequence isolated from the Sargasso Sea
ctttttctctgtacgtggcagacctgcagactgcgtttatcttggaataaatgagttagctccatggaaaccagatattgtgattagcggtataaaccttggtgcaaatatgggagaagacctgctttattctggaacagtcggtgctgcattagaagcaagaggcttagattatccttctatagctatatctgctgctgcatttcatcaacctggctctgaaaatttcatggaacctaattatcaaacttctgctgatgtaattctagatctcctaaaaaattatgaattagatgcaattgatccatctctagttttaaatatcaatacacctaatgttgacttttcaaaggaccttggatacgtaattacttcagttggaacatggggagcaagaaatcctcctggcgtagagagagatctaaaaggtaataaaacttactggacgacccatagagataaatttccacagaatataaagaattccgacatagcaacattacaagatagtaaagtctctatttccccaattaatcccagtttcactattgacgaagtatcgacaggaagctttactttgaagatgaaatga

SEQ ID NO: 260577 - DNA, 436 bp, Unknown
  Bacterial polypeptide expressing nucleotide sequence isolated from the Sargasso Sea
aatgttccatcaatggcaattagtgttgcgagttttaaatggaaaaattttgaatttgctagtgaaattgcaatgaatattgctgaacaagcaataaatgatagttggccaaagtctcttcttctgaacttgaacatacctccgtgtgaaagaaataaaataaaggaattatcctggacaagattatcaatccgaaaatataaaaaccaattttctaaaagggaagatccaagaggcgatgattattattggttagcaggtgaggctgttttagatcttaaatcaaaaggtgatggccccaagaattggcctagtgatgtctctcaaatacaagaaaataaaatttctcttacacctgtagaaccagacttgttttggagaggaagtttagacgtgttgccaaaaatcaatgcttcatttataaatgcttcttagc

SEQ ID NO: 260578 - DNA, 728 bp, Unknown
  Bacterial polypeptide expressing nucleotide sequence isolated from the Sargasso Sea
tatgcgtatacttttaactaatgacgatggaattaacgcacctggcttgcaagtcttggaagcaatagccaggaatttaacgaacgaagaaaatattttcataatcgctccaaatagcgaaagatcaggagttgggcattgtgttagttacaatgcgcccacacagattgagagaatttcagacaaccgctattcagtttccggatatcccgccgattgcgtaattgctggaatacatcatgtaatgaaggatgatccaccttctttaattctatcaggagtaaatagaggaaataactctgctgaaaatgtactctactccggcacaatcggagcagccctcgaaggtgctcttcaaagcattacctctattgcgctctcgcaatatttgggtcctgagtcaaaaaaaatgtcaaacccatttaatccatcaatcactcatgggctaaatgttattcaaaaaatacttgataacgacaagcatactaatggtggctataaagtcttttacaacgtaaactttcctcctactgaaaatataaagggagtagctgttgttcctcagggattgcggcctaatacgacttttggcgtaaacccatttacgacaccgaatggaaaagagtttttatttatcaaaggcggaaatcaacacattcaggtttctcaaaagtcagatgttgcagccaatttatcgggatatataatctttaacgccaatgagagcg

SEQ ID NO: 260579 - DNA, 535 bp, Unknown
  Bacterial polypeptide expressing nucleotide sequence isolated from the Sargasso Sea
tatgatatttgctctcaattatttatttaaaaaaaacaagcccgatttgatccttagtggaataaatgctggaagtaatattggtgatgaagtttcatattcaggaacagtagcagcagcatgggaaggggcagttaggggcatagattcaattgcattaagccagcatggaggtgataataaaataaattcttatgaatgctcaaaaactaatggttttaaaattattaattatctattgaacattaacgcaaaaatgccaaaattttataacgtgaattttccctatataatttcaactagtttcaaaaatgttagaagttcatttacaattttagcatctcagaaaattgcagatgaaattttttttgatgatgatttcagttcctttactattggacgaatgattaatgatcacagatcttcaattaatacagatttagaatgtttacagaaaaataaaatttctataacgcctttatctttaaatttaagtaataatgaagtttttaataaaataaatcatgatatttga

SEQ ID NO: 260580 - DNA, 727 bp, Unknown
  Bacterial polypeptide expressing nucleotide sequence isolated from the Sargasso Sea
atgtctacacctacaattctaatagtcaatgatgatagtattttttcaagtggcataaaagccttatgggaagctatgtctgaaataggcaatacaactgttgtagcacctaagtctgaacatagtggcgctggacatgcaattacaatttcacaaccattagacgctgaaaaaatcgatttaaaatgtggcttatcaggatacggggttaatggaacacctgctgactctgtaaaatttgctgttaatctattaatggacaaaaagccagatattttagtttcaggaataaactctggttctaatgttggacaaagtatactttattcaggcaccgtttcagttgcaagagaaggaactttcaggggcattagctctgttgcaataagccttgatggagatagtgaaaatgattatacaccatcaaaaattatttcacaagaaattgttaaatctgtactaaaatatggactgccaaacgatacccttcttaatgtaaatattcctaatttgccaaagaaagaaatcaagggatttaaaataacaaaacaaggctcaatgtatttttcagatatttttaagaagattgaaaacaatagaagccttgaaggttattggttaacagctaagcataatgaccctgacctctcaaatgataatgatagtatagcagttaaagatggatatgtaagcgtaacccctcttcattgtgagcaaactaattttt

SEQ ID NO: 260581 - DNA, 250 bp, Unknown
  Bacterial polypeptide expressing nucleotide sequence isolated from the Sargasso Sea
atgaatattcttcttacaaatgatgatggttttgatgctgatggaattcaggccattagaactgcattagaaaagagtcacaatgtctatgttgtagctccagaaaaaaattgcagcggccttagtgcatctatctcgtacatgaaagaaattgaaatcaagaaggaatcggaaagactttacattgttaaaggaactccggctgattgtgcatatattggcttattaaatcttcttaatgatgagatag

SEQ ID NO: 260582 - DNA, 665 bp, Unknown
  Bacterial polypeptide expressing nucleotide sequence isolated from the Sargasso Sea
tttggagtttataaatgtttatccgtggctatctgtcttaactcaattcaatagtaagacttttgaaaaagaaattatattatttagtataagagatagaagcacaatcaagtcaattagcttacaaccaaatgcacaaatactctttattgatgcttcagacattaactatgaatcttatttagatgatgatatttctcaaaggataagagattacgaattttcagtatttaccagagatggtgaaataaattttccagtttatggatccttcaagccttcagatttattaagatttagtggaattgatcttgaaaattacagcaatttagggatttattcatccccttatgaggatttgattataaaaaaagagatttctcaactatccttatctgccaaaagaagtaactctttaaccttactggcagaaaaagaaaagacaatttcagttaagatccttggtgctgttgaatatcccggtgaatttgaagtttcctcaaactcatcaatccaagatttttattctcttattggcggttttcaaaaagatgcagacctagatgcagttgttcttcaaaggaaaaatataaaagagagacagattgctgccttaaataaagcaagagatgaattgaataatctaattgttacaaattcaatta

SEQ ID NO: 260583 - DNA, 769 bp, Unknown
  Bacterial polypeptide expressing nucleotide sequence isolated from the Sargasso Sea
aatgaaaattctactttcaaatgatgatggatatgatgctccaggactagaagtgctttttgagacgctcaaggattttgcagaactttgtgtcgtagctccggaagaaaataacagcggagcaggatgttccataacaactaataaacctatgcatgtaaccaaacaaaaaaatggttttttctctgttagtggcagacccgcagactgcgtttatcttggaataaatgagttagctccgtggaaaccagatattgtgattagtggtataaaccttggtgcaaatatgggagaagacctactttattctggaacagtaggtgctgcattagaagctaggggcttagagtatccttcaatagctatatctgccgctgcgtttcatcaaccaggctctgaagatttcatggaacctaattatcaaacttctgcaaatgtaattctagatctccttcaaaattatgaattagctaaaattgatccatctctagttttaaatatcaatacacctaatgttgaattttcaaaggatcttggatacgtaattacctcagtagggacatggggagcaagaaatcctcctagtgtagagagagatttaaaaggtaatcaaacttactggaccactcatagggataaatttccagagaatataaagaattccgatatagcaacattacaagatagtaaagtctctatttccccaattaatcccagtttcactcttgacgaagaatcgaatggaagcttcactttgaaaatgaaatga

SEQ ID NO: 260584 - DNA, 232 bp, Unknown
  Bacterial polypeptide expressing nucleotide sequence isolated from the Sargasso Sea
atgaagatattactgacaaatgacgatggctatttttctaaaggcatcgtgatgcttgatgaaatgctcagtgaggttggtgatgtaacaatcgttgcacctgaaaacaatcacagtggagccagtagctcactgacgctgaaaaatccattgaggattagaaaatataaggacaatggtttttatgtaaatggaacaccagcagactgcgtattcatggcgcttactagaa

SEQ ID NO: 260585 - DNA, 592 bp, Unknown
  Bacterial polypeptide expressing nucleotide sequence isolated from the Sargasso Sea
ttgacgtttgaagaattaaacaaagatacatttgttatatcaggtactccagcagactgttcatactttggtttgcatgggtcaaaaaaatttgattttaagcagctagtctcaggtataaatttaggatctaatttaggtactgatattttttattctggcactgttggagcagcaattgctggactgaagcttaggtatccaccaattgctttttctgttgcatcttatcagccaaaggatctagattttattgcaaaaaagtgtgttgaaatttgtttatatgtaagaaatacaaatattgcaaatagataccttgtaaatgttaattttcctgatatcaatgaaaataattatattggtagtaaattgacaacccttgctgagagagaaaaacctgaatcaccaatagaaaataattcagatggattgaagtttagatttaatgcctcaggcaaaatgaaagaagatcagctgtcttcagacattgatgcgattaataatggatttgtatctattagcctatttgattatgacttaacaagaaacatagacttaaaaaaaataaattggaatattgatggagcataaa

SEQ ID NO: 260586 - DNA, 431 bp, Unknown
  Bacterial polypeptide expressing nucleotide sequence isolated from the Sargasso Sea
tttgagaatattagtcactaatgatgatgggatagatagtgagggcatgcatgcgctcgctcgaagtgcgagaagtttgggtcatgaggtaactattgttgcgccaaattttgatgcttccggaacgggggcttctctaggaccgttatccagaaaagaggatattgtttatgaaacgcatgagattccagattttgacggtgatgcttattccatcaatggaccgcccgcactctgcgttatcgttagtcatctagaagcttttggcccagttcctgatctagtgctctccggcgtaaacccgggtttgaatactggtcgatcgaccttgcacagcggtacggtcggagcagtgctgaccgcacagaatttcgggacgaaaggtattgccgtgagtttgcacagtgaagatgaatcgctcccttggctct

SEQ ID NO: 260587 - DNA, 706 bp, Unknown
  Bacterial polypeptide expressing nucleotide sequence isolated from the Sargasso Sea
tatgcgtatacttttaactaatgacgatggaattaacgcccctggcttgcaagtcttggaagcaatagccaggaatttaacgaacgaaaaaaatattttcataatcgctccaaatggcgaaagatcaggagttgggcattgtgttagttacaatgcgcccacacagattgagagaatttcagaaaaccgctattcgatttccggatatcccgccgattgcgtgcttgctggaatacatcatgtcatgaaggatgatccaccttctttaattctatcaggagtaaatagaggaaataactctgctgaaaatgtactctactccggcacaatcggagcagcgctcgagggtgctcttcaaagcattacctctattgcgctctcacaatatttgggccctgagtcaaaaaaaatgtcaaacccatttaatccatcaattactcatgggctaaatgttattcaaaaaatacttgataacgacaagcatactgatggtggctataaagtcttttacaacgtaaactttcctcctactgaaaatataaacggggtagctgttgttcctcagggattgcggccaaatacgaattttggcgtaaacccatttacgacgcaaaatggaaaagagtttttattcatcaaaggcggaaatcaacacgttcaggtttcccagaagtcagatgttgcagccaatttatcggggtatata

SEQ ID NO: 260588 - DNA, 667 bp, Unknown
  Bacterial polypeptide expressing nucleotide sequence isolated from the Sargasso Sea
agcggagcaggatcttctttaactgcaaatcagccaatacaaatatccgaaaaagagaatggattttatgctgtttcaggaactcctgtagattgtgtttttttaggagtaagagagttatgtccattcaagccagatatggtagtttctggcattaacaagggagctaatatggcagaagatctccgttattctggaacggtaggagctgcctttgaaggagaagaattagatttaccttctatagcagtatcagctgctattttaaaaggaggagaagggcccgaacaggaaccaaattatgaatcagctgctttagtagccagaaacttagtcctaaaaataagagatcttaaaatagactctaaactaactttaaacgttaatgttcctaacttgccctacgatcaaatcaaagggataaaaacaacttctatcggaacctggggcccaagaaatcctcctgagcgaactgaaaaccctcaagaatatttagtgactcatagagacaagagaccatttaatgacgaaagtacagatattgctacggtttatagaggagaagtctctatttctgccattaaacccaatttcctacatagggaggaaatagaaaaagagcaaaataaattcgatttagaaatttcaaggtggttggagaaataga

SEQ ID NO: 260589 - DNA, 584 bp, Unknown
  Bacterial polypeptide expressing nucleotide sequence isolated from the Sargasso Sea
ttcaaaaaatattttttcagttgatggaactcctgcggactgttcatacctcggattgttgtcagtgattccagattctatcgagatgattgtttcaggaattaatttaggagcaaatctaggcgaagatattttttattctggtacagttggagcagcaatagcaggccgcaggcttagttatgctcctgtagccttttcagtaactgcctttaatccaaaaaacctatcattcatttcagagcaagctagtttaattgttaaccaagtgagcaagctcccaaatgataagaacataattgtaaatgttaattttcccgatctttcttcttctgagcttaatggaacaaagcttaccatgctgggaaaaaggggtactcccgatactcccgatttaataggatctaataactcttcaaaattttatagttttggtccctcaggaaaacttcttcctaaccaagtagatactgatattcaagcaattgatgataattatatttctatatcaattttagactataaccttagcgttgatgccagcaattggaatttttatagagaggtttttaattgtgagtagt

SEQ ID NO: 260590 - DNA, 928 bp, Unknown
  Bacterial polypeptide expressing nucleotide sequence isolated from the Sargasso Sea
catgtcaaggttcccgattctacttaccaatgacgacggcattaactctcccggactacagcatctggcatcttcattacactctcttggacacccgatagccatactagccccccttacagagcaatcggcggtagggatgaagctcaccctaagggatgacatggccttcgaagagcacaccgatatcgctgaaaaaatcaggaccgacgagacagtccccctgcgcgcgttctccctcgatgggtctccctgcgactgcgtcatcgttgctattgacgggggactgaggtcctgggcaccagagataaggccgtggctctgcatttccggcatcaaccgagggccaaacctatctgtggacgttcttcactccggaactgtttccgctgctcgcgaggcgtctctgtatggcctgccatcgctttccgtaagcctagccacctactctcaccaagactactcgcaatccatagaggcaacactggctctggtggaaagactatccgaactggtcacagtagaaccgagcaatatcctgaggccagagggttcgaggaccaggccgattgagggaactggccctaactccctcagatcatggttcatgcaggggaacatgttcctgaacctaaacatccctgaagactggaacggaacattccagacggtacccctaggtgctagatggtaccataacgctactgacatgatagatcagaaatccatgggagtggcctttgaggtcggggcagccagaatcgtcgacgaggaaatcgaaatgaccgactgccatgcaatagcttctgggagcgcctcgattacccctttggcaagctggccccagaatcacccgctcggagtcccgcaatccataatgcaagcttctaccgtgatggatgtcgatgggatgccttcatggatctag

SEQ ID NO: 260591 - DNA, 769 bp, Unknown
  Bacterial polypeptide expressing nucleotide sequence isolated from the Sargasso Sea
atgaataaaccaaatattctaataacaaacgatgatggtatttattctgaagggatatatgctttatgggaagcgatgggtgaagtagggaatccttttgtagtagcacctaatacagagcagagtggttcaggacatggaataactttgaataatccattgcgagtgaacaagattacaagattgaatggattcaaaggttatgcggttactggtagccctgcagactgcacaaagattggcattaggtcattaatgaagagcgatccggatatattaatatctggaattaatcaaggtgcaaacctaggaacaaaccttatttattcaggtacagtttcggcagctacagagggagctgtattaggtataccttccatagcaattagtttagcatcattcaaaacaagtgattttgatctagctaaaactgtggcaatcgatactgtaaagcacgttcttcggtatagtttgccaaaggggacattgcttaatgtaaatgttccatgctgtgataaagatcaaattaatggaacacgtattactaagcaaggcaaccaatattttgtagatgaatatgaaaagcgaactgatccaagccataaggattattattggatcaagggtgagataatagatgatgatagttcaatagattatgatggcaaagctatctctgaaaactatattagtattacgccaattcattttaagttaacaaatgaacaatatttaaaagaacttgtgtcacagttcacagatgaatgat

SEQ ID NO: 260592 - DNA, 170 bp, Unknown
  Bacterial polypeptide expressing nucleotide sequence isolated from the Sargasso Sea
aatgaaaccgttaaatatattaattagcaatgatgatggtgttttcgccgcagggataagagctcttgcaaaatcagcccaaaaaagaggacataatgtaaaagtggtatgtcctgaccaagaaagatcggctactggtcatggtcttactttacaatctccattaagag

SEQ ID NO: 260593 - DNA, 1309 bp, Unknown
  Bacterial polypeptide expressing nucleotide sequence isolated from the Sargasso Sea
ttgggtgggccaacaaaaaataaaaatcttaaatatcgttttgttattagaacagattatgcagacgggtttagaaaaaatatttttttgaacaaaaaagatacatcaagaaaagatgagcttacattaagatataaattagattgggatatagataacgcaactaagattaaatttttagtttctcaagttgacataaatgaccctgcagatatttggactattgatggaagtttaaatactttatctgaccgaccaggtatggattcacaaaaaacaaatacctatggaataaaaatatttaaaaattataaaaactttgatttgcaaagttatacgagcacaacaaaaacagatgttatttttagttatgatgcagattggggcaatcaagactcgcattttccatatacatatgattatttctcagaaactttacgaaatagggatacttttagccaagaaatacgttttttgtctaaaaatggtagttttttatcaaaaatgccacttgaatgggttattggagtagattttactcaattaaaagagacaaatttaacaaatgacgatgggatttatggagatccttcagatttatatagtccatatgtaagtaaatcttcaattttaagaaattataagtctcaaaatttatcaatttttggaaatatagattattttttaaataagcaatacaaattagcaattggaatgagatgggaaaattgggattcaaaatacaatgactcaaacaatgaatcatttaatccttcaaactatatgaatggaggcaagctctcactaataaaaaatatgaatacgaaatcaaatatgtatttatcaatagcacgaggatataaacaaggtggatttaatttagggctagatgcattggataattcattaaataaaaatttaatatatgatccagaatttttgactaattatgaatttggtatgaattctaaatttgataacaaagatctaaatttatcagcagtgatatttttctcaaaaagaaaagatcaacaggttttgatttcaagacaagtagatccagctgatccaaataccttttcatacttaactcaaaatgcagctaatggaaaaaattatgggtttgaatttaattctaattttttattaaaagaacgcatattgatttatttaaatttagggatccttaaaacacaaattaataattgggaatcaagagaggatttagagaatagatcgcaagctcatgcaccagaaagaacattctcagcaggaataaattttgatatgagtaataataaatattaag

SEQ ID NO: 260594 - DNA, 232 bp, Unknown
  Bacterial polypeptide expressing nucleotide sequence isolated from the Sargasso Sea
atgaaaccgttaaatatactaattagcaatgatgatggtgtttttgcagcgggaataagagcattagcaaaatcagcgcaaaaaagagggcataaggtaaaagtagtatgtcctgaccaagaaaggtcagctacaggccacggccttactttacagtctccattaagagtagaaagaaaagacgagttattcgaggagggaattgaagcttggggatgttcaggcacccctg

SEQ ID NO: 260595 - DNA, 325 bp, Unknown
  Bacterial polypeptide expressing nucleotide sequence isolated from the Sargasso Sea
atgaaaatcctcctaacaaatgatgatggctttgaagcacctggaatcctgcagttatacgaatctttaaaagataaatacgaagtattttttttagcaccaaaagaaaatatgagcggaaaaggatcggcaattacagtttgggatcagccatcttttcaaaatcatggaaatggaattcacagtttaaatggtactccagtagattgcgtgaaatacgctataaatttttactgtccatttactcccgatttggttgtctcaggtataaaccacagggcccaaaccttggaacagatatcttattttcagggactatggagca

SEQ ID NO: 260596 - DNA, 1220 bp, Unknown
  Bacterial polypeptide expressing nucleotide sequence isolated from the Sargasso Sea
tacagatgtagtatttagttatgatgcagactggggtaatccagagtcacattatccttatacatatgattatttttctgaaacatttagaaaaagagacactttgagacaagaattaagaattttgtctaaaagtaaagatttttcatcaaaaagtcgacttaaatgggtatttggcgttgattttaataatttaaaggaaacaaatttaactaatgatgatggtatttatggagatccctcagatccatttagcccatatttaagtgaatcgtcaatttcaagagattatgaagctgataatttttctttatttggaaatatcgattattttttaagtgaaaattatctttttacttttggcctgagacgagaaaattgggattcaaaatataatgattcaaataaggaatcatttaacccatccgatagtatgaatggaggcaaggcgtcattaattaaaaattatgatgatagttcaaatatttatttttctattgcaagaggatataaacaaggtggttttaatttgaatcttgatgcgctagatattgattcaaataattctctcatttatgatccagaatttttaacaaattatgagattggatttaattcaaatataaatttgtctttaaattattcagctattttatttttttcccaaagggatgaccaacaagtattaatttcaagacaagtagatccaaatgatccaaatacattttcttttcttactcaaaatgctgctgagggagaaaattatggttttgaatttagttctaaatttatgtttacgaacgatataatattatttgcaaatctagggttattaaaaacaaaaattaaaaattgggaatcaaggccagatctagagggaagggctcaagctcattcacctgaaagatcctactcgatcggcatgaatgctaatttaacacctaacattaattttaaaattaattttaatggtaaaagtagtttttattattctgactctcatgataacaaatcagatagttacgttcttactaatataactttaagttataaaaaacagaatagctcaatcaatatttgggcgcgaaatatattcaataaatattattcgacaagaggattttatttcgggaatgaggcaccaaattttgttgatactctttataaaagacaaggcgatccaaaaattgttggtatatccataagacataatttttaaa

SEQ ID NO: 260597 - DNA, 874 bp, Unknown
  Bacterial polypeptide expressing nucleotide sequence isolated from the Sargasso Sea
aatgagagcatcatccaaattaaaagtatttttaattattttctttattgctatttttgcaattattgctgcaagacattttattggtttacactttaaaaaaaaatttagtgtaaggcctgcgccaggagtaattgttgaaaaagttgaacgatctctgttttacaaaagtatagaaacttttggaacagcattagcgcaaaattcaaaaacttatagaataaaaactaatgaagttgctggaaaattaaacattgataatagatttgtaaaaaaaggtgaaataatccttaggcttacaagcggagaagaggttattgcagattttgcgggtaaattggggaaaagagaaattgcccaaggagttttgggttcagagagtttaatagtaaccttagatgacttaaaaaaaatagtaatagatataaaagttccagagaattatgtaagtgtacttaaaccaggattaaaagcagaaataacaagttcagcatttaaaaaagcttttaagggaaaaattcaaacaattagctcaagaatagatccttctacaagatcgattttatccagagttttggttgataattctaattttgaaatcattccaggacaactaatgacagtaaaaatcatatatgatgaaatcaatcaaattggtgttcctgaaagtgctgtaactattcaaggtagtacagcttttgtttacacggtaagagatgaaactgctgaaaaaaagaacattgaaattggtaaaaggaattttggaaaagtttccgttgtatcaggaataaatgaaggtgatcttgttattatagaaggagtctcgaaagtaagaaacaatgctaaaatcaaaattataaatccaaataattaa

SEQ ID NO: 260598 - DNA, 757 bp, Unknown
  Bacterial polypeptide expressing nucleotide sequence isolated from the Sargasso Sea
atgaggatactattaacaaatgatgatggttatgatgctgataatcttaagaatttatatgaaaaattatctaaaaatcatgaagtttggatagttgcaccaaagaataattgtagtgggatgagcgcagctatttcctaccttaaagaaatagaggttataaagatagatgaaagaatatatgcagttgatggaactccagcagattgttcctatttaggtttattaagtattgttgattttgaattcgatatagttatttctgggattaaccatggagctaatattggtaacgatgttatatattcaggtactgttggagctgctgttggtggaaggaatctaaaatatcctcctatagcaatttcagttgcatcttatgacgcaaaagacattgattttattagcaaaaaatcaattgaaataataaataaaatagttacttttcatgacagttttaaaggcaaagttataaatataaattttccagatatttctgaaaatgaatttaagggcattagagcaaccgggatgtcaaagagagatgtacctgcaagaccaataaaattagaaaatacctcagaaaatgaaaatgtatcaaaatatagatatgcctattcaggtgagcctattaaagataattttataaccgacgcagaggctattaaagatgggtatgtatcggtatcagttttagattacagtctcaattcaaaagaattcatcaatgatttatcagatttaataaatgagtaac

SEQ ID NO: 260599 - DNA, 739 bp, Unknown
  Bacterial polypeptide expressing nucleotide sequence isolated from the Sargasso Sea
atgaatattcttcttacaaatgatgatggttttgatgctgatggaattaaggccattagaactgcattagaaaagagtcataatgtctatgttgtagctccagaaaaaaattgcagtggccttagtgcatctatctcgtacatgaaagaaattgaaatcaagaaggaatcagaaagactttacattgttaaaggaactccagctgattgcgcatatattggcttattaaatcttctaaatgatgaaatagatgtgcttgtatcaggtatcaatcttggagcaaacattgggaatgatgttttgtattctggaactgtaggagctgcgcttggaggaagaaagctgaagtatccgccaattgcaatttcttcatgtgagtacaagcccaaatctcttgagtttatagcaaataagtcatgtgaattagttgaattaataacttcttttgaaaaacaggaaattttaaataaagttgtaaatataaactttcctgatattgatgaaaaatcttataagggcattaaagtggttccaattgctaaaagagatgttccaccaactcctgatattctaaaaaataattctgacattcaatcatttaagtatgcggcatctggagcgccaataaaggaagattttcttaccgatgcggaggctgtgaaacttgggtatgtatctatatcaattttagattatgaattactagatcctaattttaatagtcttgagtttgagaact

SEQ ID NO: 260600 - DNA, 733 bp, Unknown
  Bacterial polypeptide expressing nucleotide sequence isolated from the Sargasso Sea
atgaaaaggccacttattttagttacaaatgatgatggaataaatgcccctgggataagaactttaatatctgtaattaaagatttaggagacgttattgttgtagctccggatagtccacaatctggaatgggacatgccataacaataaattcaactttacattcttctagaatcaccccaaaaaattctgaaattactgagtatagttgttctggaacacctgctgattgcgtaaaattggccattaatgaattaatgcctaggaaacctgatttatgtgtatctggaattaatcatggctccaactcttcaatcaatgtaatatattccggaacaatgagcgctgctattgaagctggaattgaaggagttcctgctataggtttttctcttttagattacagttggaatgcagattttagtcaatctaaagattttattaaaaagattaccttaaatgctttaaacaatggaattcctaaaggagttgttttaaatgctaacattcctgcagtaaagaaatctgatatcaaaggtgttaaaatttgtcgacaagcaaatgcatattgggttgaagagttcgataagagaaaaaatcctctaggtcaagaatactattggttaactggaaagtttgttaacaaagatcaaggagaagatacagatgaatgggctataaagaataattatatttcaattgtaccagttgaatttgatttaactgctcacc

SEQ ID NO: 260601 - DNA, 373 bp, Unknown
  Bacterial polypeptide expressing nucleotide sequence isolated from the Sargasso Sea
catgaaaatattgcttacaaatgatgatggatataaagcccataatattcagtgcatgtatgacgaactatcaaaagatcatgatgtgtggatagtcgctccaaaaaataattgcagtggtatgagtgctgctatttcttacctaagtgagattgaggtcatgaaagttgatgataagatctatgcagtagatggaaccccggctgattgcacatatttaggattattaagtatagtagattttgaatttgatattgttatatcaggtattaatcatggagccaatattggtaatgacgttttatattcaggaacagttggagctgctgttggaggaaggaatttaaagtatccaccaattgctatatctgtt

SEQ ID NO: 260602 - DNA, 421 bp, Unknown
  Bacterial polypeptide expressing nucleotide sequence isolated from the Sargasso Sea
atgaaaaggccacttattttagttacaaatgatgatggaataaatgctccaggaataagaactttaatatctgtaattaaggatattggtgatgttattgttgtagctccagatagtccgcaatctggaatgggacatgccataacaataaattcaacattacattcttctagaattaccccaaaaaattctgaaattattgagtatagttgttctggaacacctgctgattgcgtaaaattggctattaatgaattaatgcctagaaaacctgatttatgtgtatctggaatcaatcatggctccaactcttcaatcaatgtaatatattccggaacaatgagtgctgctattgaagctggaattgaaggagttcctgctgtaggtttttctcttttagattacagttggaatgcagatt

SEQ ID NO: 260603 - DNA, 313 bp, Unknown
  Bacterial polypeptide expressing nucleotide sequence isolated from the Sargasso Sea
atgaaaatattattaacaaatgacgatggaattgagtcagagataactagagctttatttgaatcacttaaagaaaaacatgaagttactttaattgctcctgaaaaagataaaagtggacagggtgcagccataacactaagaacttctgtcggagtgaataaattagatgacaatgtatattcagttggaggcactcctgctgattgtatttttatggggctaatggcaattatgaaggagcttccagatatggttatttctggaattaataagggcgcaaatatgggggatgatgttattcactcaggaa

SEQ ID NO: 260604 - DNA, 698 bp, Unknown
  Bacterial polypeptide expressing nucleotide sequence isolated from the Sargasso Sea
catgtttgccctgctttcgaatgatgatggaatctacgcgccagggcttgccgctttggaggacatcgtaaaagatgagtttcagaccctggttgttgcaccatcaacggagcagagtggcgttggtcacggtattacatttctttcaccacttacggcaaaagaggtttttcgaggtgagaagcgtcggggatgggcagttgatggtagtcctgcagacgccgtgaaactcggtgtttcagaaatatgcccacagcgaccagacctcatcataagcggcattaatgctggtctgaatgccggtatcaacgttctctattccgggacagttgcggcagctatcgaaggctcattctttggaatcacgagtattgctgtatcgctggaatgggatgagcacatgaacttcgaacaggcggcagcgatggcgggtggacttgtcaaagggttggtttcactgcacccacctgctggtagcctctttaatatcaatatcccaacggcagccctcgttggaagacctgatgtacgagtggttcctatgagtattgaccgatatggcgaggcctttgaacgacgtgtcgacccgcggggaagaattattattgggcgagtaacgatccaccgccaccaccatcttttcgaagaagcgatgtcacagcactcgctgagggtgcattacgattactccgcttcat

SEQ ID NO: 260605 - DNA, 679 bp, Unknown
  Bacterial polypeptide expressing nucleotide sequence isolated from the Sargasso Sea
atggcaaaaccgctaatattagtaacaaatgatgacggaataaatgcaccgggaataagaacattaattaatgtaatgaaagatgttggggatatcattgttgttgctccagatagccctcaatcaggtatgggacatgccataacaataaattctactcttcactcttcaaggatcactccaaaggatagtgaaattattgaatatagctgttcaggaactcctgcagactgtgttaaattggcaataaatgaacttatgccaagaaagcctgatttatgtgtatcaggtattaatcatggttcaaattcatcaattaatgttatatattcaggtactatgagtgctgctattgaagcaggcattgaaggtgtaccagcaattgggttttctttacttgattatagatggaatgcgaattttagtgaatctaaagattttataaaaaaaattactgaaaacgcattaaaaaatggtattcctaaaggagttgtattaaatgtaaatatcccttcagtggaaaaatcaaagattaaaggggtaaaagtttgcagacaagctaatgcttcttgggtagaagagtttgataaaaggaagaacccactaggacaagaatattattggttaactggaaagtttgtaaataaagataatggagaagatactgatgagtgggcac

SEQ ID NO: 260606 - DNA, 286 bp, Unknown
  Bacterial polypeptide expressing nucleotide sequence isolated from the Sargasso Sea
aatgaaaccgttaaatatattaattagcaatgatgatggtgtttttgcagcgggaataagagccttagcaaaatcagcacaaaaaagaggacacaaggtaaaagtagtatgccctgaccaagaaaggtcagctactggccatggccttactttacaatctccattgagggtggaaagagcgaacgaattatttgaggaaggaattgaagcttggggatgttctggcacgcctgctgattgcgtcaaattagcgctatctgaactcttggatataaacctgatctag

SEQ ID NO: 260607 - DNA, 346 bp, Unknown
  Bacterial polypeptide expressing nucleotide sequence isolated from the Sargasso Sea
gcggctgtgtatgcgcggcggatcgtgcaggggctgttagcgcatccaattgcgagcgatcagatcctcaatatcaatgtgccggatttaccgctcgatgagattaaagggattcgggtgacgcgcctgggtgcacggcataaggccgaaggcatagtgcgaacgcaggatcctgcggggaaagagattttttggcttggcccaccgggtgtagaacaagatgcgagtgaaggaacggatttccatgcggtagcccatggttatgtgtcgatcactcccttaaccgtggacttgaccgcgtatagacaattatcggtattgcaagattgggtagataaaatatgac

SEQ ID NO: 260608 - DNA, 451 bp, Unknown
  Bacterial polypeptide expressing nucleotide sequence isolated from the Sargasso Sea
catgtcatggatacttctaacgaatgatgatgggatagatgcaacaagtttgcagatacttgtagacaggttgcacgaaagaggtcacaaattgatagtattcgctcccagcgaaaacaactcggcagtaagtatgaaaatttcactaggaatacctctgactgtggtcaatagaaaagatccacgagaaaatgtacaccagtatgagattggtggaacaccttgtgattgtgtaattgcagcattagatggtggattaaagaaattacttccaggaataatccctaaattggttgtcagtggaatcaaccttggaccaaatatgagtcaagatgcctatcacagtggaaccatggctgcagcaagagaggctggtatgtatggagtacctacaatagcctcctcttggtcttcatttgaccccgaggggtatggaaatatcagtagatgc

SEQ ID NO: 260609 - DNA, 496 bp, Unknown
  Bacterial polypeptide expressing nucleotide sequence isolated from the Sargasso Sea
atgaaaaaaataaaaaaaattttaataacaaatgacgatggctttgatgctataggtttagaaattttaaaagatatagcgaacatgttttcagaagttgtttatactgtctctccaaaaaataatcagtcagctaaatcaaagtcaataactataaataaagaaattcattttgataaaataactgattatatatgggttgttgatggtactcccacagattgtataatctttgctttaaatcatataatgaaaactgataaaccagacctaattttaagtggtattaatgctggcagtaatgttggagatgaagtttcttattctggaactgttgcagctgcatgggaaggtgctgtcagaggaattaattctatttcattgagtcaatacggaggtgataatacaattgaatcttacacatgttcaaaaaattattcttttgacataatcaatcatcttattaatttgaaaactcattcaccattttttttta

SEQ ID NO: 260610 - DNA, 712 bp, Unknown
  Bacterial polypeptide expressing nucleotide sequence isolated from the Sargasso Sea
atgaatattcttcttacaaatgatgatggttttgatgctgttggaattaaggcaattagaactgcattagaaaagagtcacaatgtctacgttgtagctccagaaaaaaattgcagcggccttagtgcatctatctcgtacatgaaagaaattgaaatcaagaaggaatcggaaagactttacattgttaaaggaactcctgctgattgcgcatacattggcttattaaatcttcttaatgatgaaatagatgtgcttgtatcaggcatcaatcttggagcaaatattgggaatgatgttttgtattctggtactgtaggagctgcgcttggaggaagaaagctaaagtttccgccaattgcaatttcttcatgtgagtataagcctaagtgtcttgagtttatagcaaataagtcatgtgaattagttgaattaataacttcttttgaaaaacaggaaattttaaataaagttgtaaatataaactttcctgatattgatgaaaaatcttataagggcattaaagtagttccaattgctaaaagagatgttccaccaactcccgatattctaaaagataattctgacattcaatcatttaggtatgcagcatctggagagccaataaaggaagattttcttaccgatgccgaggctgtgaaacttgggtatgtatctgtatcaattttagattatgaattactagatccta

SEQ ID NO: 260611 - DNA, 605 bp, Unknown
  Bacterial polypeptide expressing nucleotide sequence isolated from the Sargasso Sea
aatgttaaatattcttataagcaatgatgatggagtcttagctgaaggcttaaaattactagtaaatgctcttcaagaaattcccgaagtaaatgtagatgttatagctcctgaaataaatgcaagcggcttaagtaacgcgataactctacgcacaccattaagggcaaaacaattagataatggcttttggtatatcaacggcactcctactgattgcataaaactaggtcttagcaatttttttgatcatacacatgacttagtaatatctggaataaatcatggtccaaatttaggagatgatgtaatttactccggcacagttggcgctgcagctgaaggacgatatttaaaacaccctcctattgcaatatcatctatcggtacagacacaaacagcctaaagcaagccgcaaaagttgcagctaatcttattaaaaacttaatacaaaaacctattacacataaagctgaatctccttatatattaaatattaatgtcccagaaagcttaactgatccaagcgcgccttatgcaataacacaacaaggaatgcgctatttcgcaccagctttaccgccaattagtgaccctaaaggca

SEQ ID NO: 260612 - DNA, 574 bp, Unknown
  Bacterial polypeptide expressing nucleotide sequence isolated from the Sargasso Sea
attgagtatagttgttctggaacacccgctgattgtgttaaactagccattaatgagttaatgcctaggaaacctgatttatgtgtatctggaattaatcatggctccaactcttcaattaatgttatatattcaggtactatgagtgctgccattgaagctgggatagaaggagttccttcaattgggttttcccttttagactatcgatggaatgcagattttagtcaatctacagattttataagtaagatcacccttaataccctaaataatggaattccaaaaggagttgttttaaacgtgaatattccatcagtaaaaaagtctaacattatgggtattaagatttgtagacaagcaaaggcttattgggttgaagagtttgataaaagaaaaaatccttttggtcaagaatactactggttaactggcaagtttatcaatgaagatcaaggagaagatactgatgaatgggctcttaacaataattatatttcaattgtaccagttaaatttgatttaactgctcacgatgcaattcaaggactaaacgagtgggattttaaatgaa

SEQ ID NO: 260613 - DNA, 739 bp, Unknown
  Bacterial polypeptide expressing nucleotide sequence isolated from the Sargasso Sea
atggctaaacgtcctcttattcttgttacaaatgacgatggcataagtgcccctggtctaaagtatctcgttaactttatgtctatgattggagatgttataattgtagctcctgattctccaaaatctgcaactagtcaggcaataacaataaattctccattgtatgtttctagatcttataatcattctaatgctaaattggagtaccaattatcagggacacctgctgattgtgtaaaatttggtattaatgaaattttaaaaaaaaaacctgacatatgtgtttcaggaattaatcatggatcaaattcttcagtaaatgtactttattctggaacagtgggtgctgcaattgaagctgggattaaaggcgtaccatccattggcttttcagttcttgattatagatggaatgcaaaatttgatcacatcgaaaagtttattatatccattactcttaatgttattaaaaacaaacttcctagtgacattgtgcttaatgtaaactttccaaaatcaaaagtaaatggagtaaaagtgtgcaggcaagcaaatacacattgggaagaaaaattctgcaaaagagaaaatccaatgggaaaagaatactattggttaactggagattttattgataatgacaaatcaaatgaaacagacgagtatgcacttaaaaaaggttatgcttcaatagttccaatcaagtttgatttaaccgcaaaggaattatattaaa

SEQ ID NO: 260614 - DNA, 766 bp, Unknown
  Bacterial polypeptide expressing nucleotide sequence isolated from the Sargasso Sea
catgaaacctagaatactaattgttaatgatgatggaatatactcaccaggtataaaggctctttctgatgcaatgatacagattggggaagttactattgtagcaccagacaaagaacaaagtgctaaaagtcattctatctcattaacaaatccaattcgtataaaatcagtaaaattaaaaaatggattagaaggatggtcagtggatggaacacctgctgattgtacaaaaattgctttacaagaattattgaatcaaaaacctgacttgataatttctggaattaatcaaggtgctaaccttggccataatttagtttattcgggaacgatatcagctgcatatgagggttctatccttgatattccctcggcagcaataagtttggatactttagaaggaaaaaatttttcaggatcaaagtatgtagcaactactattgctaagcatttattaaatcatgcccctcctaaaggaactatgctgaatgttaatgtaccaaatgttagtaaaaaagatcttaaaggttttgttataactagacaaggtaatcaaatttttaaagatacttttgaaaaaaggattgatcctaggggccatgattatttctggataaagggagagatggtcaatcaagattcatccattgattatgatggaaaggcagtttccagtggatatgttagtattactcccattcactataatattactaataaatccttcctagatgatttaagactccaatttttagatgcatag

SEQ ID NO: 260615 - DNA, 580 bp, Unknown
  Bacterial polypeptide expressing nucleotide sequence isolated from the Sargasso Sea
atgtcaaaaaacttttggattgttgatggcacacctactgattgtatgatatttgctctcaatcatttatttaacaaaaacaaacctgatttaattcttagtggtataaatgcaggaagtaatattggagacgaagtttcttattcaggtactgttgctgctgcatgggagggtgcagtgaggggaatagattcaattgcgttaagtcaatacggtggtgatgataaaattaattcttatgagtgttcaatagccaaaggttttgacatcataaattatttactaaaaatcaaatcacaaactcctagattttataatgtaaattttccattcataatttcatctaatgtagaaaatgttagaagttcattcacaactttagcatcccaaaaaattgccgatgaaattttatttgatgatgactttagttcattcatgatagggcgaatgattaatgatcacagttcattaatcaacactgatttagaatgtttaaaaaaaaataaaatctcaataacaccattgtccttaaatttaagtaataatgaatttttaaaaaaaatgaaccatgatatttgaa

SEQ ID NO: 260616 - DNA, 739 bp, Unknown
  Bacterial polypeptide expressing nucleotide sequence isolated from the Sargasso Sea
tacgaacgacgatggaatttattcatcaggtatatttgcactttgggatgtcgctaaagaatttggagaggtaaatgtaatagctcctatcaatgaaaaaagtgcagttggccatggcattacaatatcaaatccactatatgtaaaagaaatagaacgcgaggatgggtttaaaggttttgctgtttcaggcacaccagccgattgtgtaaaacttggaatgaagtcgttattaccctttaatccagatttaattttatctggaattaatatcggaagcaatctaggaaataacatcatttattcaggcactgtcgccgcagcaatagagggcgcgacactagatattccatcaattgctataagtattgattcatataaacctgggagtttttcaacatcaaagattgtggtgcgtaaagttatcaattttatggaaaataatactatcccatctggaacgatattaaatgtaaacataccagattgtgaaccaagtgatttaaaagggtataaaataacatcccagggacatcaatattttaacgataattttgagaaacgtactgacccaagaggtcgtgactattattggatgactggagaaatcattgataatgataaagagtttagatatgatggattcgctgtaagcaatggctatgcaagtataactccaatccattttatgatgacaaacacaaattgtttagatgaactagagggatcaattatttaa

SEQ ID NO: 260617 - DNA, 733 bp, Unknown
  Bacterial polypeptide expressing nucleotide sequence isolated from the Sargasso Sea
tatgaaaatattgcttacaaatgatgatggatataaagcccataatattcagaatatgtatgaggaactatcaaaagatcatgatgtgtggatagtcgctccaaaaaataattgcagtggtatgagtgcagctatttcttacctaagtgagattgaggttatgaaagttgatgataagatctatgcagtagatggaaccccggctgattgcacatatttaggattattaagtatagtagattttgaatttgatattgttatatcaggtattaatcatggagccaatattggtaatgacgttttatattcaggaacagttggagctgctgttggaggaaggaatttaaagtatccaccaattgctatatctgttgcttcttatgatgctaaagatataagctttataacaaaaaaatcgcttgagttgattaataaaattattaaatttagtgaaacttattctggaaaagtaattaacataaactttccagatatttctgaagatgaatataaaggagctaaggcaacaggattatctaaaagagacgttccagccaaacctatagagatagaagatcaatccctatcaaaagaaacttacagatatcgatataacctatcaggcgagcctattaaaggtgattatgttactgatgcagaagctgttatggatggatatgtttctatatctgtactcgactatagtctaggctcatctgaatttattgataat

SEQ ID NO: 260618 - DNA, 721 bp, Unknown
  Bacterial polypeptide expressing nucleotide sequence isolated from the Sargasso Sea
atgaatattcttcttacaaatgatgatggttttgatgctgatggaattaaggccattagaactgcattagaaaagagtcataatgtctatgttgtagctccagaaaaaaattgcagtggccttagtgcatctatctcgtacatgaaagaaattgaaatcaagaaggaatcagaaagactttacattgttaaaggaactccagctgattgcgcatatattggcttattaaatcttctaaatgatgaaatagatgtgcttgtatcaggtatcaatcttggagcaaacattgggaatgatgttttgtattctggaactgtaggagctgcgcttggaggaagaaagctgaagtatccaccaattgcaatttcttcatgtgagtacaagcctaaatctcttgagtttatagcaaataagtcatgtgaattagttgaattaataacttcttttgaaaaacaggaaattttaaataaagttgtaaatataaactttcctgatattgatgaaaaatcttataaaggcattaaagtggttccaattgctaaaagagatgttccaccaactcctgatattctaaaaaataattctgacattcaatcatttaagtatgcggcatctggagcgccaataaaggaagattttcttaccgatgcggaggctgtgaaacttgggtatgtatctatatcaattttagattatgaattactagatcctaattttaata

SEQ ID NO: 260619 - DNA, 472 bp, Unknown
  Bacterial polypeptide expressing nucleotide sequence isolated from the Sargasso Sea
cggtgcaaatctcggagaagacatactttattcaggcactgtagctgccgcgattgaggggagagttcttgatatgccttcaattgctgtttcctctttaggaaatacagaaagagattttaaagtagccgctagagttacaattgagcttattcaaagactaaaaaaatacccgttacctaaagacacaatattaaatgtcaacgttccagcaataaattatgatgaaattaatggtttttgtattacaaggctcggcaatcgccatagatcacatccaatcaaaaaggtttccaaagataagtctgagaaagtttttcaaattgggttaccaggaaagggccgtgacgcaggacctggaacagacttttatgcaatacagcacaactctgtctcaatttctcctttgcatatagacatgactcatcatgcaatttttaataacacggaaagatggttgtctaaaaaatga

SEQ ID NO: 260620 - DNA, 590 bp, Unknown
  Bacterial polypeptide expressing nucleotide sequence isolated from the Sargasso Sea
tatggaaaaaccactgattttagttactaatgatgatggcatcaatgccccgggaattagatgcttaatcgatgttatgtctgaaattggtgaggttatagttgtagcaccagatagtcctcaatctggtatgggacatgcaataactataaactcaaccctacactgttcaaaaatttcaccaaagtcttcaaaaagactggaatatagttgttctggaactcctgctgattgtgttaaacttgctgtaaatgaattaatgcccagaaaacctgatttatgtgtttcaggaataaatcacggatctaactcttcaataaatgtaatatattcaggtactatgagtgctgctatagaagctggtattgaaggtatacctgctatcggtttttcacttttagattatagatggaatgctaacttttctgatagtaagaaatttattaaaaaaattactttaaatgcattgaaaaacaagataccaaaagatgtagttctaaatgtgaacatacctactttaaaagagtctgagataaaagggatcaagatatgtagacaggcaaaatcttattgggttgaagagtttgata

SEQ ID NO: 260621 - DNA, 709 bp, Unknown
  Bacterial polypeptide expressing nucleotide sequence isolated from the Sargasso Sea
atgagtaataaaaagccaagaatattacttacaaatgatgatggaatttattccaaaggaatttatgccctttgggaagcaatgtgcgaaattggtgaagttactgttcttgccccaaatacggaaaaaagtgcagtagggcatgctgtaactatttcagacccaattagaatagagccctgttctcgacatggaagctttgaaggttatgctgtaaatggtacgcctgctgactgtgttaagattgcaattggatcttttttagataagaaacctaatattattgtatctggtattaatgctggatcaaatatgggaactaatatattatattcaggaacggtatctgcagccgcggaaggaactatgctaggtgtgcctagtatagcctttagtttaaatacttttaatacagacaattatgatttatcaaaagaagttgcaattaaaatgacaaaaaatgtcttaaatcatggtttgccaacaggaactttgttgaatgttaatataccaaaatgtgaaatttctgaatgtcagggttataaagttactagtcagggtgatgaatattttctagatgatcttgaaaagagagaagaccctagaggaagattttattattggatgagtggtaaaatagtaaataatgacacttctaatgagcaggatggatatgcaattgctaataattgggtaagtgtaacaccca

SEQ ID NO: 260622 - DNA, 388 bp, Unknown
  Bacterial polypeptide expressing nucleotide sequence isolated from the Sargasso Sea
tatggttattttggtcgttaatgatgatggtgtgcatgcgccaggcattggttgtttggctcgttttttagagcccttaggtgaggtttatattgttgccccagatcgagatcgcagtggtgccagtcgctcattgaccttaaatatgccaattcgtttgcgttggttaacccctcgtacctgctcgattcaaggttcgccagctgattgtgttcacctggccatgactggattgctgcctcaaaaaccagatttggttgtgtcgggtatcaatgcgggtgcgaatttaggtcaagatgtagagtattcaggcacagttgctgcggcaattgagggccagctgagtacgtattcgccgattgcagtgtctttaaatagccatgatggt

SEQ ID NO: 260623 - DNA, 681 bp, Unknown
  Bacterial polypeptide expressing nucleotide sequence isolated from the Sargasso Sea
agatctttaaagaagtttgggtgatcgcgccagagaccgagcaaagtgccgccagtcattctctgaccctgcgccgtccgctccgcgttcggcgcctcgccacgcggcgcttcgcggtcgacggcacacccacggacagcgtgcttattggcgtgcaggaggtcatgaaatcggcacgacctgatgtgatcctgtctgggatcaaccggggcggtaacctcggtgaggacataacgtattccggaaccgtcgctgccgccatggagggaacgctcttggggttgccctccctcgctttgtcgcaacattataaagatcgccagaaagtgtcgtggaccacggccgaggcgtggacggcgcgggttctgagaactctgctcaaagaggattggccagccggagtccttatgaacgtgaattttcctgacgtgccacttgacgcggtcaccggcatcgaggtgtctcgacaaggacgacgcaagattggtggcaccttgactgaaggccaggacccccggggcgaaaagtacttctggatcggtccgcagcgagacaaagatgagttcaagaatggaaccgacgttggcgtcgtaacggctggtgggattgccgtgacgccgctgtctttggatctcacccataaatctatgttacaaaaaatgaaagcggccattggatgag

SEQ ID NO: 260624 - DNA, 524 bp, Unknown
  Bacterial polypeptide expressing nucleotide sequence isolated from the Sargasso Sea
tctttctggaataaatcacggtccaaatttagggacagatattttttgttcaggcacagtggctgcagccatggaaggtactttagaaaatgttccctcgatggcaataagtgttgcgagtttcaaatggaagaattttgaatttgcgggagaaatagcaatgaatattgccgaacaagccattaaggatagttggccaacttcacttctattaaatttgaatatccccccttgcgataaaaacaaaataaaagaattatcttggacaagattatcagtaagaaaatataaaaatcaattttccaaaagagaagacccgaggggtgatgattattattggttagcaggtgaggtagttttagatctaaaatcaaaaggttatggccctaagaattggcctagtgatgtatctcaaatacaagaaaataaaatatcgcttacacctgtagaaccagatttattttggaggggcaatttagaagacttacctaacattaataattcatttatagatccttcttaaa

SEQ ID NO: 260625 - DNA, 468 bp, Unknown
  Bacterial polypeptide expressing nucleotide sequence isolated from the Sargasso Sea
tatgaaagaacatttaaattctctaagggtgctattaacaaatgatgatggaatcagcgcttcaggcttggttttgttggaagagttgcttgggccgttagtaaacgagttatgggtagttgctccccaaacagatcaaagtgggaccagtcactctcttacacttcgacaaccgcttagagtaagagaaatgggcagcaaacgtttttccgtatccggcactcccgctgattgtgttttacttgccgttaaccaaataatgaaagactgtaagcctgatttggttatttctggaattaatagggggaaaaacgtcggtgaggatgtaaattattcaggtacaatagcagcggctaaagaagcatctgcttttggtattcctgcgattgctttaagtcaagtaattgatcctgtcgattatttctcggaaaacaaggaggttgatctaatttattctgcgtcaaagac

SEQ ID NO: 260626 - DNA, 535 bp, Unknown
  Bacterial polypeptide expressing nucleotide sequence isolated from the Sargasso Sea
gatgaatcaaaaaaaaatattgataacgaatgatgacggtattaatgctccgggaattgagctcttaattaatgctgcaaaaagaatatcaagtgatataacaattatcgccccagaaagagagcagagcggtagatctcaagcaatgtcattatcagatattattagactgagggagattgatgtaaatatattttctatatctggaacgcctacagattgcgtcatgcttgcaatcaagcaattaatgaaagataacaagccagatctaattctatcaggggttaatagaggtcagaatcttgctgatgatgtaaattattctggaacaattggcgccgcaatggagggtgcaatacacaacattaagtcaatcgcattgagccaagtttttaatatacacaataaagggttggatgcatttcaggcaacaaaaaaaaatctggatcggacattagattttgttttagatttagactatccagataatatcgttttaaatattaattttccagatatagtcgaagataatctg

SEQ ID NO: 260627 - DNA, 412 bp, Unknown
  Bacterial polypeptide expressing nucleotide sequence isolated from the Sargasso Sea
gctatttcatatttaagtgaaatagaggtcacaaagattgaagacagaatttatgcagtcgatggtaccccagcagattgtacatatttgggtttgttaagtattgtagactttgagtttgatattgttatatctggtataaatcatggtgcaaatattggaaatgatgttttatattctggaacagtaggtgctgcaattggaggcagaaatctaaaatttccaccagtagcattatcagtagcttcttatgatgcaaaagatttaaatttcttaacaaaaaaatcagttgagttgattgaaaaagtttttaaatatggtgaaaatttcaagggaaaagttattaatattaactttcctgacatttcagaggaagaatacaaagggtatgttgcatctggctttatctaaa

SEQ ID NO: 260628 - DNA, 766 bp, Unknown
  Bacterial polypeptide expressing nucleotide sequence isolated from the Sargasso Sea
catgaaacccgaaatattaattgttaatgatgacggaattcattcaccaggaattcaagctttggcagacgctatggtgaagattggtaacgttactattattgctcctgataaagaacaaagtggcaaaagtcattctattacattaaataaccctattcgattagaatcagttaatttaaaaaaggggataaaagggtggtcgttaactggaacaccagttgattgtgcaaaagttgcaattaaaaaactttttaataaaaaaccggatttggtgatttcagggatcaatctaggtgccaacttaggaaaaaacttgatctattcgggtacaatttcagcagcatacgagggtactttaataggtatttcttcagcagcaattagtttagattcatttaaaacaagaaattttaaaggtgcaaaatatgtcgcaactttaattgcgaatcatttattacaatataaattacccaaaggaactatgttgaatgtaaatgttcctaatataggtaaaaaagatctaaagggacttattgttaccaagcagggaaatcagagttttagtgatacttttgaaaaaagaattgatccacgaggtaattcatatttttggattaaaggtaaaatgattaataatgataattctattgaatatgatggcgaggcagtttcaaatggatatgttagtattactccaattcattttaatataactaatgaatcatatataaatgacttaaagaagaaaatatcatatgaatag

SEQ ID NO: 260629 - DNA, 370 bp, Unknown
  Bacterial polypeptide expressing nucleotide sequence isolated from the Sargasso Sea
aaggcattaaagcattatcacaccgcggcagtgtatgcgcggcgaattgtgcaggggctgttagcgcatccgattgcgagcgatcagatcctcaatatcaatgtgcccgatttaccgctcgatgagattaaagggatcagggtgacgcgcttgggtgcacggcataaggccgaaggcatagtgcgaacgcaggatcctgcgggaaaagagattttttggcttggcccaccgggtgtagaacaagatgcgagtgaaggaacggacttccatgcggtagcccatggttatgtgtcgatcactcccttaaccgtggacttgaccgcgtatagacaattatcggtattgcaagattgggtagataaaatatgac

SEQ ID NO: 260630 - DNA, 628 bp, Unknown
  Bacterial polypeptide expressing nucleotide sequence isolated from the Sargasso Sea
catgagttctcccaatatattagttacaaatgatgatggaatagattctcctggaatttatgcgctttggcaggcgatgtctgaaattggtagtcctacagtaatagcaccaaacatagaacaaagtgcagcaagtcactctattagtttaaacaaacccttattcattaaacatatttctagaaattgtggctttaaaggatggtctgttgatggaactccagcagattgtactaagattggcataaaaagagttttagatcaaaaacccgatttaattatttctggtataaatagaggagctaacttagggattaatctaatttattcggggacaatatctgctgcttctgagggagcattattaggtattccatctatagcgattagtctggcatcattcaaaactgataactacatggcatcaaaagttatagctattgaaattgcagaatatgtacttgaaaacaatattccaaaaggaaccttacttaatgtaaacgtaccatatggagacccagaagacataaaaggaaaactcataactcgacaaggtaatcaattttttaaagatgatttgaaaagagaaccgatccaagaggaaatacatattattgataagggggag

SEQ ID NO: 260631 - DNA, 719 bp, Unknown
  Bacterial polypeptide expressing nucleotide sequence isolated from the Sargasso Sea
catgagtaataaaaaaccaagaatattactgacaaatgatgatggaatttattccaaaggaatttatgctctttgggaagcaatgtgcgaaattggtgaagttactgttcttgctccaaatacggaaaaaagtgcagtagggcatgctgtaactatttcagacccaattagaatagagccctgttctcgacatggaagctttgaagggtatgctgtaaatggtacacctgctgactgtgttaagattgcaattggttcttttttagataagaaacctaatattattgtatctggaattaatgctggatcaaatatgggaactaatatattatattcaggaacggtatctgcagctgcggaaggaactatgctaggtgtgcctagtattgcttttagtttaaatacttttaatacagataattatgatttatcaaaagaagttgcaattaaaatgacaaaaaatgtcttaaatcatggcttgccaacaggaacgttattgaatgttaatataccaaaatgtgaaatttctgaatgtcagggttataaagttactagtcagggtgatgaatattttctagatgatcttgaaaagagagaagaccctagaggaagattttattattggatgagtggtaaaatagtaaataatgacacatctaatgagcaggatggatatgccattgctaataattgggtaagtgtaacaccaatacagtata

SEQ ID NO: 260632 - DNA, 469 bp, Unknown
  Bacterial polypeptide expressing nucleotide sequence isolated from the Sargasso Sea
aatgaaaaaaaaattaaataacattcttataacaaatgacgatgggtttgatgctattggtataaaaatattattagaaattgcagaaaagcttggaaaaaatgtttatgtgatttctcctaaaaaaaatcaatctgctaaatctaagtctataactattagaaataatatttactataaaaaaatatcaaactatagttggattgtagatggaacaccaacagattgtatgatttttgctttaaatcatatttttaattcggataaacctgatctaattttaagtggaattaatgcaggaagtaatattggagatgaggtatcttattcaggtactgtagctgcagcttgggagggcgcagttagaggtattaactctattgcattaagtcaatttggtggggataatagtaaatattcctataagaattctaaaaataatgctttaaatgttataaattatctactt

SEQ ID NO: 260633 - DNA, 292 bp, Unknown
  Bacterial polypeptide expressing nucleotide sequence isolated from the Sargasso Sea
tatgaaaccgttaaatatattaattagtaatgatgatggtgttttcgcagcggggataagagctttagcaaaatcagcccaaaaaagaggacataaggtaaaagtagtatgtcctgaccaagaaagatcagctactggtcatggtcttactttacaatccccattaagagtggaaaaagctgacgaattatttggagagggtattgaagcttggggatgttccggcacacctgctgattgtgtcaaattagcactatctgaactcttggatcataaacctgatctgatacta

SEQ ID NO: 260634 - DNA, 538 bp, Unknown
  Bacterial polypeptide expressing nucleotide sequence isolated from the Sargasso Sea
ttggagctacctattgatccagctggcaaacgtattttgcttgttaacgacgatggcattactgcgccgggtcttagggtattggagaaaatcgcacggcaattttcaaatgatgtttggatcttcgcccctgaagttgagcatagtggggccggacattctattacgctaaatggtgcgatccgtgttgctaaagtcggacgacaacgctattccgtagcaggaagtccgacagactgcgttttaatagcaattagtgaatttatgaaggatacgcctcccgattttgtattgtccggagttaatctcggtagcaatattgcggaagacgtaacatattctgggactgttgcagctgcgatggaagcagccttacttggatttcctgcaattgctttgagtcaagctgcaggttacggaaagaccgtgcgttggcacgttgcacaaaagtttggtccagacatcgtccgtaaattgttatcgatcggctggcgtaaggacgtatatgtaaatgtgaattttccggaattgtgcgccc

SEQ ID NO: 260635 - DNA, 682 bp, Unknown
  Bacterial polypeptide expressing nucleotide sequence isolated from the Sargasso Sea
gggtgatactcttattgcggcgccaagtgttgaaaaaagtgcctctagtcattcactaacactttctgatcctttaagagtaagcaatatacaaagaaagaatggatttaagggatggtcaataagtggtacgccagttgactgtgtgaagctagcagttcggaaccttatggatgataggcctgatattcttatctctgggataaatcatggtgctaatctcggtagtaatataatgtattctggaactgtttcagcagcagctgagggaatgataatgggaattccttctatagcgatcagtctagcatcctatgaaacagataattataatgtcgcaaagaaattcgtaaaaaaaattgtaaaaaaggttatagttaatggcatacccaaagatattttgttgaatgtaaacgtcccttattgcaatgaagaagaagtaaaaggggttagaattacaaaacagggcagtcaatactttgtagatgaatttgaagaacgtattgatcctagaaatggtaattacttttggataaaaggtgaaatgatagatgaagataaatcaattgaatttgatggtgcggcggtaaaagaaaattatgtaagtattacccctatacattataagttgacacatgaaccatttttaaatgatttaagaaatcaatattctgatgattaa

SEQ ID NO: 260636 - DNA, 529 bp, Unknown
  Bacterial polypeptide expressing nucleotide sequence isolated from the Sargasso Sea
tatgaagatattattgactaatgatgatggttacaagtctcaggggattaaatatcttcataattgtctattaaagtatggcgatgtaatacaagctgccccctcaaagaacatgagcgcctgcagtagttcattgtcagttcatcatagagtccttataagaaatccatccaagaattattatattattaacgggacaccttctgattgtgtacatatagcctctaagggtattttaaataaattacccgatatcgttttctctggaattaattttggtagtaatcttggggatgatgtaatttattcgggtactgttgcaggtgcaatagaaggacgacattgtaaatcatcaccagtttcaatttcaataacatccagagaaccaaaatacttaatggatattaatgataagctagactttattttatcacatatctttcaacagaattataaatctaagaatatttttaacattaacataccagacataccatataacaaaattaaaggaataaaatacacaaaa

SEQ ID NO: 260637 - DNA, 584 bp, Unknown
  Bacterial polypeptide expressing nucleotide sequence isolated from the Sargasso Sea
aaatggatttaaaggatattctgttaatggtacgcctgtagactgtgtaaaaattgctatacgatctctttcaaatacaatgcctgatttaattgtttcaggaattaatcatggtgccaaccttggtagaaatatcatctattcaggaacagtggctgcagcatcagagggaaccattttaggaataccctcaattgctataagccttgcatcatctaagagtcacaaatttgatgcagccaaacaagctgctattgaaatagtagaatatgttatgaaaaatacactaccatctggcactttccttaatgtgaatattccttattgtagcatcaatgagattagaggtaagaaaattacgaaacagggcaatcaatgttttgtggatgaatatgaggagcgtatagacccaagaaaaagattgtattattggataaagggagaaatggtagataaagatatctcaattgattacgatggtaaagcagttagggaaaactatataagcattacacctattcattttaacataacagataaaaagtatattcaaaaaatgaaaaatcattttcctgatgaatagt

SEQ ID NO: 260638 - DNA, 769 bp, Unknown
  Bacterial polypeptide expressing nucleotide sequence isolated from the Sargasso Sea
aatgaaacctttaattttagttacaaatgacgatggaattgattccagaggaataagacatcttgtagaaataattaatttatttggagaagttgttattgtggctccagatagtccccaatcaggaatgggtcatgcaattacagttggagacaaattaagtttagtaaaatcagatatatttaataatgaatcaacatataaatgtagtggaacaccagctgattgtgtaaagattgcaaaacatcatttactaaaaaatagaaaaattgatttgatagttagcggaataaatcatgggagtaattcatcaataagtgttttatattctggtacgatgtcagctgcaatagagggtgcaatagaaaatacaccctctattggattttcattgtgtgattatgatccaaatgctgatttatcccacacaggaccattcataaaaaaaattgttcaaaatgcattagaaaacggaatacctgattcaattgctttaaatgtaaatataccagccatatcaaaagaaaagattaaaggaattaaaatttgtaagcaagccaatgcaatttgggaggagaaatttgataaacgttatgacccatatggtagagaatatttttggatggtcggaaattttgtcaaccatgataatgatccatataatgatgagtcagctataaatagcaactatgtttctatagtaccttgtaaatttgatttgagttcaaagaaaggacaagattaccttaaaaaaaattggaaaatttaa

SEQ ID NO: 260639 - DNA, 637 bp, Unknown
  Bacterial polypeptide expressing nucleotide sequence isolated from the Sargasso Sea
catgcaataactataaactctaccctacactgttcaaaaatttcatcaaagtcttcagaaagactggaatatagttgttctggaactcctgctgattgtgttaaacttgctgttaatgaattaatgcccagaaaacctgatttatgtgtttcaggaataaatcacggatctaactcttcaataaatgtaatatattcagggactatgagtgctgctatagaagctggtattgaaggtatacctgctattgggttttcacttttagattatagatggaatgccaacttttctgatagtaaaaaatttattaaaaaaattactttaaatgcgttgaaaaacaagataccaaaagatgtagttctaaatgtgaatatacctgctttaaaggaatctgagataaaaggaatcaagatatgtagacaagcaaaatcctattggcttgaagaatttgataaaagaaaaaatcctttaggtcaagaatattattggctaactggaaaattcattgacaaagataaaggtgaagatacagatgagtgggctttaaagaatggatttatatctatagttccagttgaatttgatttaactgctcactcagctattaaagatttaaatcaatggaactttaaatgag

SEQ ID NO: 260640 - DNA, 349 bp, Unknown
  Bacterial polypeptide expressing nucleotide sequence isolated from the Sargasso Sea
atgaatattctattaaccaatgatgatggctataaggcatctggcataaaccaattatttaaaaccttatgcactgagcataaggtttttttaattgcacctagagaaaattgtagtggaatgagtgcagcaattagcttacgcaaagaaataaaagttgaagaaatttcagaaaacattttttcggttttaggaacacctgcagattgctcatatcttggtttgttatcagtaattcctgagccaattgaaatgattgtttctggaattaatttaggagcaaatttaggagaagatattttttactccggtaccgtaggcgctgcaattgctggtcgaagactaaatt

SEQ ID NO: 260641 - DNA, 676 bp, Unknown
  Bacterial polypeptide expressing nucleotide sequence isolated from the Sargasso Sea
atgcaaattttaattactaacgatgatggaataaatgcacctggtcttgaagtagctaaaaaaattgcaaaatcgataattgggaataaaaaaggtaaaattactattatcgcaccatcatctgaaaaatctggcgtatctcatagtatatcttttgtgagaccttcattaatacaaaaaattaataaaaataaatattctttggaaggaacaccagcagactgtgtattagcaggagtaaattatgttatgaaacataaaaaaccagatttgattatctctggcgttaatttaggaagaaatatttctgatgatatcttatactctggtacagttggagctgcaatggagggtgctttaaatggaataaagtctattgccttaagtcagcagtattcaaaaaaaacatatgaatctgataacccatttaaatgtgctttgaaatatggaacagatatttgtaataaaattttaaatgataatccattctctaatccaaaatttacgggattttataatgtaaattttccagcatgttcacctaaagaagtaaatggacaaaaaatatgtaatattggacaaaggaaaaaaccaacttttactatggttgcccaatctaatacaaaaggtcgaaattttttatgggtaaaacataatttacaaaaatcagaactct

SEQ ID NO: 260642 - DNA, 719 bp, Unknown
  Bacterial polypeptide expressing nucleotide sequence isolated from the Sargasso Sea
aataagaactttaatatctgtaattaaggatattggtgatgttattgttgtagctccagatagtccgcaatctggaatgggacatgccataacaataaattcaacattacattcttctagaattaccccaaaaaattctgaaattattgagtatagttgttctggaacacctgctgattgcgtaaaattggctattaatgaattaatgcctagaaaacctgatttatgtgtatctggaatcaatcatggctccaactcttcaatcaatgtaatatattccggaacaatgagtgctgctattgaagctggaattgaaggagttcctgctgtaggtttttctcttttagattacagttggaatgcagattttagtcaatctaaagatttaattagaaagattaccttaaatgctttaaataatggaatcccaaaaggagttgttttaaatgtaaacatccctgcagtaaagagatctgatattaaaggtgttaaaatttgtcgacaagcaaaggcatattgggttgaagagtttgataaaagaaaaaatcctcttggtcaagaatactattggttaactggaaagtttgttaataaagatcaaggagaagatacagatgaatgggctttaaagaataattatatttcaattgttccagttgaatttgatttgactgctcaccatgctattcaaggtctaaacgagtgggattttaaatgaa

SEQ ID NO: 260643 - DNA, 778 bp, Unknown
  Bacterial polypeptide expressing nucleotide sequence isolated from the Sargasso Sea
atgtctttaaaaccactgatattagttacaaatgatgatggaataaccgccccaggaattagatcattggttgaaataatgaattctattggtgaagtagttgttgtggctcctgacagccccaaatcagcaatgagtcatgcaataactgttaattccaccctccattgttctagaataaaaattgattcaggtcctcaaaaagaatatagttgttcaggaacccctgcagattgtgtaaaaatagctgtaaatgaattattgagcagaaaacctgatatttgcgtatctggaataaaccatggttcaaattcatctataaatgtaatatattctggaactatgagtgctgcaattgaagctggaattcaaggaatacctagtttaggattttctttacttgattataaatggtctgcaaactttgaaccttttactaattatgttaaatcaattactctgaatgtcttaaaaaataaaatttcaaacaatataattctaaatgtaaatatgcctagagttaattctaatcaagaaattaaaggagtaagaatatgtaggcaagcaaaagcaaactggatcgaaaaatttgataaaagaaaaaatccaattggaaaagaatattactggcttactggtgaatttatcgataaggacacaaaaaatgatacagatgagtgggcattaaaaaacaattatatttcaattgttcccgttcaatttgattttactgcatatgatataattcaagaattaaatacttgggattttgaataaa

SEQ ID NO: 260644 - DNA, 772 bp, Unknown
  Bacterial polypeptide expressing nucleotide sequence isolated from the Sargasso Sea
atggcaaaaaaacccttaatattagttacaaatgacgatgggatatctgcaccaggaattagaactctaatatctgtaatgaatgaaattggagatgtagttgttgtagcacccgacagtcctcaatcagctatgggacacgccataactataaattcaactctacaatgtcacaaaataaaaattgatgatgggccacaagaagaatacacctgctctggaacacctgctgattgtgtaaaattgggaattaatgaaattttaaataggaagccagatttatgtgtttcaggaattaatcatggttctaatgcttcgattaatgtaatttattcagggactatgagtgctgctattgaagccagcgtggaaggagttcctgctattggtttttcattattggactatagttggaaagcaaattttaatcctattaaaaaaattgtaaaaaaaataacattgaaagcactcaaggagggtatccccgaaaggacagctttaaatgttaattttcccaacttaaatgaaaacgaaataaaaggcattaaaatttgtaatcaagctaatacttattggattgaaaaatttgataaacgaactaatcctcagggaagacaatattattggcttacaggtgaattcattaataacgatgaatctaaagaatcagatgaatgggctcttgaaaatggatatgtttctgtggttcctgtgaagcacgatttaaccaattacgaggttattagcaaaattaaatcttggaatctctaaa

SEQ ID NO: 260645 - DNA, 736 bp, Unknown
  Bacterial polypeptide expressing nucleotide sequence isolated from the Sargasso Sea
ttgcttgtcaatgatgacggaattgatgctcctgggtttaaaattttaaaatctatagcagaagaaatttctgatgaaatttgggttttcgcgccaaagaatgataaatctggtgctggcaggtcaataactcttagaaatgatataaaagtaaaaaaaagaagcaatagagaatttgaagtcgatggtacacctactgattgtgtaattttaggtttaaaccattttatgaagggcaatttacctgatctagttttgagtggtgtcaatgctggtagaaatgcagcagatgatgttacatattcaggcactgtgggtgctgcttgggaagctacagttcttggtgttcaggggatagcactcagccaaatgtatgataaaagatttggaatgaatttttctgcatcaaagtcatatggatctagtgttttgaaaaaaattattccaaaaatctctaaattaaattctgtaataaatattaactttcctcctgtagacgaagttaatgtaaaagggctcaagaccgttgaattagactcacacaaattaagtgataatattgagtatagcgaaaacagtgaaaattttagaataggatcaatgataactagagatcatcaagtaaaagggagtgatctatactatcttaaaaagggttatatatcgattacccctttagctcttaatgtaacagattataaagttttaaagcaattgcgagagaatattttatgat

SEQ ID NO: 260646 - DNA, 751 bp, Unknown
  Bacterial polypeptide expressing nucleotide sequence isolated from the Sargasso Sea
tatgaagatattactaacaaatgacgatggctatgaggctgaaaatattaaatatctttatgagaagttatcgcaagaccatgaagtttggattatagcgccaaaagataattgtagtggtatgagtgcagcaatatcatatttgaaagaaatacctgttgataaaatttcagacagagtttatgcggttgatggaaccccagcagattgtagttatcttggtttgctgagtattgtagattttgagttcgatattgtaatttcaggtattaatcatggtgccaatattggtaatgacgtcttgtattcaggaactgtcggtgcagctgtgggtgggagaaatctcaagtatcccccaatagcaatttcagtagcatcatatgatgcaaaagatatagattttatatctttaaagtcaattgaaattatagagagaattattcaaaaatctgatgtatacacaggaaaagtaattaacattaattttccagatattaactcagacgaatttaaaggagttaaagcaactgtgatttcaaaaagagatgtaccgccaaaacctattctggtcagtgaagatggagagaatcaatcgatctatcgttacaattattctggcgaaccattagaagaagattttttaacagatgctatagcggtgcaagagggctacgtttccgtttctgtgcttgattattcattaaacagtaaaatctatattgatcaactaaatcgaatactaaatgaatag

SEQ ID NO: 260647 - DNA, 778 bp, Unknown
  Bacterial polypeptide expressing nucleotide sequence isolated from the Sargasso Sea
atgttaaagattttaatttcaaatgatgatggatatgactccccagggttagaagtattagttgagcatttaaaggaagtagcagaattatttgttgttgctccagaaataaacaatagcggggcagggtgttcaattacaacgaataggcctttaaaagctactattcatgataatggatttgtatctgtcaacggaagacctgcagattgtgttcatttgggaattcatgaactatcaccttggaaaccagacttagttttaagcggtattaatctaggagctaatatgggcgaagatttactttattctggtactgttggagctgcacttgaaggaaggggtttaaaatatccttctatagccgtttcagcagctgcctttaatcagccaggttcggaaaactttttagaacctaacaatctaactgccgctttggtcatcaaagaaataatcgaaaattatgaatctatagaattagattcatctgttgtacttaatgtaaatgttccaaatgtagcatattcaaaatcattaaataaaagagtaactagaataggtagttggggcaaaagaaatcctcctcataaagaaacaaaagataatggaactgaacagttttggacaacgcatagagataaattcccatcgaatgataaaaatacggatatatcttgtcttatggatgaagaggtatctatttcacctatagttcctaatttctctaatcaagctcgctttaaagaagtaataaaatggattgagcaatgggactaga

SEQ ID NO: 260648 - DNA, 702 bp, Unknown
  Bacterial polypeptide expressing nucleotide sequence isolated from the Sargasso Sea
tatgaagatactattaacaaatgatgatggttacgatgctgataatcttaagaacttatatgaaaaattatctaaagatcatgaagtttggatagttgcaccaaagactaattgtagtgggatgagtgcagctatttcctaccttaaagaaatagaggttataaagatagacgaaagaatatatgcagttgatggaactccagcagattgttcctatttaggtttattaagtattgttgattttgaattcgatatagttatttctgggattaaccatggagctaatattggtaacgatgttatatattcaggtactgttggagctgctgttggtggaaggaatctaaaataccctcctatagcaatttcagttgcatcttatgacgcaaaagatatcgattttatcagcaaaaaatcaattgaaataataaataaaatagttacttttcatgacagctttaaaggcaaagttataaatataaattttccagatatttctgaaaatgaatttaagggcattagagcaaccgggatgtcaaagagagatgtacctgcaagaccaataaaattagaaaatacctcagaaaaagaaaatgtatcaaaatttagatatgcctattcaggcgagcctattaaagataattttataactgacgcagaggctattaaagatgggtatgtatcagtatcagttttagatta

SEQ ID NO: 260649 - DNA, 745 bp, Unknown
  Bacterial polypeptide expressing nucleotide sequence isolated from the Sargasso Sea
aatgaaaattttacttacaaatgacgatggaatagagtcaaacattactagagcattatttgataagttgcgagaaaatcatgacgttagtttaattgcacccaaaaaagataaaagcggtcaaggtgctgcgattactctaagaacttcagtacaaattgaaaagcaagatgacaatatttatgcagttgatggaactcctgcagattgtgtatttatggggttaatggccataatgaaagatattccagatattattatttcaggcattaacaaaggagctaatatgggtgatgatgttattcactctggaactttgggagcagcatttactggaagaaaattaaaatatccacctattgcaacttcaatttctggaagatcttttgaacattttgaatcagcagtcttagcaactgaacttatgcttaattatgtttcagataattatcttgaaaatgagcatactggattagtctttaatgtaaacattccaaatttaccttttaatgagattgagggcttcacttttacacgcctaggaaatagaggagttccattagctcctgaatttgatggagatgataaaacagtaagctataagattggaaaatctggtgatcctgatggagacttaactggcacagatttcgaagcaattgcaaataaaaatatttctgtaactccactattttgggacatgacaaatcttgaaaaagtgaaaggcaaattgcctagtgtctaa

SEQ ID NO: 260650 - DNA, 748 bp, Unknown
  Bacterial polypeptide expressing nucleotide sequence isolated from the Sargasso Sea
atgaaaatattgttaacaaatgatgatggttatgatgctgaaaatataaagagtctttgtaaagaattatcaaaaaatcacgaggtttggataattgctcctaaacataactgtagcggaatgagcgctgcaatatcatatttaaatgaaatagaagttactaaattagaggataaaatatatgcagttgacggaacgccggcggactgcagttatttgggattattaagtatcgttgattttgaatttgatattgtaatttctggtataaaccatggtgcaaatattggtaatgatgttttatattctggaactgtaggagctgctattggtggaagaaatctaaattatcctccaattgcgatttcagttgcctcctataatgcaaaagacattaattttatttcaaaaaaatcagttgaattaattgaaaaactaatttcaataaatgcatttgttggcaaagttattaacattaattttcctgatattgatcaaagcgaatttaaaggagttttggctaccggattgtcaaaaagagatgttcccgcaaaaccaatcagggtcgatgattcatcattaaatacatacaggtatagatataatttatctggtgaaccattagaagataaatatatgacagatgctgaagctgttaaaaatgggtatgtatcaatatctgtattagattacagtttaaattctggaaattttattgaagaaataactcaagttttagatgaatagc

SEQ ID NO: 260651 - DNA, 355 bp, Unknown
  Bacterial polypeptide expressing nucleotide sequence isolated from the Sargasso Sea
ctgaatatacttataacaaacgatgacggaataaatgctccaggtctatggacatcagtaaaccatttgaaaaaactagctaatataactgttgtagcaccagatagagaccaaagtggaacgggcacttcaatgactctaagaaatgtagtaagactacatgaaaaacctcacaacgaccctaaagtaaaagtatattctgttgaaggtactcctgcagattgtgtaattctcgcatgtgaaaaattgatgaattcttctcccgatctaattgtttcaggtattaacttaggcgcaaatttagggtttgatgtaatgctatcagggactgtaggagcagccatacatggatatc

SEQ ID NO: 260652 - DNA, 748 bp, Unknown
  Bacterial polypeptide expressing nucleotide sequence isolated from the Sargasso Sea
atgaaggtattgttaacaaacgatgatggttatgatgctgaaaatataaaaagtctttgtaaagaattatcaaaaaatcacgaggtttggatagttgctccaaaaaataattgtagtggaatgagtgctgcaatatcatatttaaatgaaatagaagttactaaattagaggataaaatatatgctgttgacggaacaccagcagactgcagttatttgggattattgagcatcgttgattttgaatttgatattgtaatttccggtataaaccatggcgcaaatattggtaatgatgttttatattcaggtactgttggagctgctattggtggaagaaatctgaagtatcctccaattgcaatttcagttgcctcctataatgcaaaagacataaattttatttctaaaaaatcagttgaattaatcgaaaaactaatttcatcaaatgcatttgtaggcaaagttatcaatattaattttcctgatattaatcaaaacgaattcaaaggagttttagctactggattgtccaaaagagatgttcctgcaaagccaatcagggttgatgattcatcatcaaatatatataggtacaaatataatatatctggtgagcccttagaggataaatatatgacagatgccgaagctgttaaaaatggttatgtatccttaactgtattagattacagtttaaattctggaaattttattgatgaaataactcaagttttgaatgaatagc

SEQ ID NO: 260653 - DNA, 406 bp, Unknown
  Bacterial polypeptide expressing nucleotide sequence isolated from the Sargasso Sea
atgaaaatattgcttacaaatgatgatggatataaagcccataatatacagaacatgtatgaggaactatcaaaagatcatgatgtgtggatagtcgctccaaaaaataattgcagtggtatgagtgcagctatttcttacctaagtgagattgaggttatgaaagttgatgataagatctatgcagtagatggaaccccggctgattgcacatatttaggattattaagtatagtagattttgaatttgatattgttatatcaggtattaatcatggagccaatattggtaatgacgttttatattcaggaacagttggagctgctgttggaggaaggaatttaaagtatccaccaattgctatatctgttgcttcttatgatgctaaagatataagctttataa

SEQ ID NO: 260654 - DNA, 565 bp, Unknown
  Bacterial polypeptide expressing nucleotide sequence isolated from the Sargasso Sea
ggtacaccagcagattgtagtattttaggacttttgagcataattgattttgaatttgacatagttatatctgggattaatcacggtgcaaatattggtaatgacgtgctttattcaggcacagtcggtgctgcagttggcggcagaaatttaaaatatccacccatagctatttcagtatcaacatatgaagcaaaagacatcgagttcatatcaaagaaatcaatagaattgattaatatgattgttaaatcaggggaaatttttatgggtaaaataataaacattaattttccggatattactgaaaatgaatttaaaggctgtcttgccacaggattatcaaaaagggatgtaccagcagaacctattaagatcgatgaaagttcctcacctaaagaatcttataaatatagatataatctttcaggagaaccattgagtgatagctttttaactgacgctgaagcagtaaaagatggctatgtttcaatatccgttcttgattacagcctcggttcgtctagttacatagatgatattaaaaagatactagatgactaat

SEQ ID NO: 260655 - DNA, 793 bp, Unknown
  Bacterial polypeptide expressing nucleotide sequence isolated from the Sargasso Sea
ttgattacaaatgatgatggaatatctgcagagggtattaaaatactaagagctattgctagtgaattttcagatgatgtctgggtcgttgcacctgaacatgaaaaaagtggtgcatcacatgctttgtcttttcaaaacgaattaacacttaaaaagtacgaagagaagacattttcagttaatggtactcctagcgattgtgttgcaattggtataagcaatgttttaaaagataaaagaccagatttaattctgtcaggtatcaatagtggctgcaatgttggagaggatgttacatattcaggtaccattgctgcagcaatggaaggtttaattagacgcattccatcaattgcaatcagtcaaaattatgaagcaggcaaaaaaaatcaaattgtttgggacgcttcaaaaaaatttttaaaaaatattttacttgaacttacaattcttggctggccaaataatgtattcatgaatattaattttccatattgcacagctgatttagttaaaagtatacagataacaacacaaggaaacagggaaactgacgacttgataattaatgaagttcagaagtcaaaattcagatttggtttacgaagacggcttgaagaaaatgttaatctaagtattcctccgctaaatgaaacagttgagggatatatgagtgatgtagaggcacttgcagatcatcacatatcaataacgcctcttcatttagatcttacgcatcacaaaagtcttagtgatttaaaaaaaggtttaaaaactgatctaaattaat

SEQ ID NO: 260656 - DNA, 757 bp, Unknown
  Bacterial polypeptide expressing nucleotide sequence isolated from the Sargasso Sea
catgaaaatattgcttacaaatgatgatggatataaagcccataatattcagaaaatgtatgaagaactatcaaaagatcatgatgtgtggatagtcgctccaaaaaataattgcagtggtatgagtgctgctatttcttacctaagtgagattgaggttacgaaagttgatgataagatctatgcagtagatggaaccccggctgattgcacatatttaggcttattaagtatagttgattttgaattcgatattgttatatcaggtattaatcatggagcaaatattggtaatgacgttttatattctggaacagttggagctgctgttggaggaaggaatttaaagtatccaccaattgctatatctgttgcttcttatgatgctaaagatataagctttataacaaaaaaatcggttgagttaattaataaaattattaaatctagtgaaacttatattggaaaagtaattaacataaactttccagatatttctgaagaggaatataaaggagttaaggcaacaggattatctaaaagagacgttccagccaaacctattaagatagaagatcaatccttgtcaaaagaaacgtacaagtatcgatataacctatcaggagagcctattaaaggtgattatgtaactgatgctgaagcagttgtggatggatatgtttccatatctgtacttgactatagtctaggctcatctaaatttattgagaatctttctgagataataaatgagtaa

SEQ ID NO: 260657 - DNA, 772 bp, Unknown
  Bacterial polypeptide expressing nucleotide sequence isolated from the Sargasso Sea
aatggctgataaacctttaattttagttacaaatgatgatggtataactgctcctggaattagaacattaatttcagtaatgaatgaaattggagacgttgtagttgtagcgcctgacagtcctcaatctgccatgggacatgccataacaataaattcaacattacaatgtcataaaataaaaatcgatgatggacctcaaatagaatattcttgctctggtactcctgctgattgtgttaaactaggaattaatgagattcttcaaaaaaagcctgatttgtgtgtatctggcatcaaccatggctcaaatgcatcaattaatgtaatctattcgggaaccatgagcgcagcaattgaagctagcattgaaggggttcctgctattggtttttcattacttgactatagttggaaagcaaactttgaaaggattaaagatattgccaagaaaataaccatcaaagccttatccgagggtataccatcaagaactgcattaaatgtgaatattcctaatttagaaaagaaagaaataaaaggaataaaagtttgtaatcaagctaatgcttattggattgaaaaatttgataaaagaaccaacccacaaggtagagaatactattggctgacaggtgaatttattaataatgataagtcaacagaatctgatgaatgggctttaaaaaatggtttcgtttctgtcgtacctgttaagtttgatttgaccaactatgaggtaattgataaaattaaatcctggaatctttaa

SEQ ID NO: 260658 - DNA, 754 bp, Unknown
  Bacterial polypeptide expressing nucleotide sequence isolated from the Sargasso Sea
tatgaatattcttcttacaaatgatgatggttttgatgctgatggaattaaggccattagaactacattagaaaagagtcataatgtctatgttgtagctccagaaaaaaattgcagtggcctgagtgcatctatctcgtacatgaaagaaattgaaatcaagaaggaatcagaaagactttacattgttaaaggaactccagctgattgcgcatatattggcttattaaatcttctaaatgatgaaatagatgtgcttgtatcaggcatcaatcttggagcaaatattgggaatgatgttttgtattctgggactgtaggagctgcgcttggaggaagaaagctgaagtatccgccaattgcaatttcttcatgtgagtacaagcctaaatctcttgagtttatagcaaataagtcatgtgaattagttgaattaataacttcttttgaaaaacaggaaattttaaataaagtcgtaaatataaactttcctgatattgatgaaaaatcttataagggcattaaagtggttccaattgctaaaagagatgttccgccaactcctgatattctaaaaaataattctgacattcaatcatttaggtatgcggcatctggagcgccaataaaggaagattttcttaccgatgctgaggctgtgaaacttgggtatgtatctatatcaattttagattatgaattactagatcctaattttaatagtcttgagtttgagaacttcataaatgaataa

SEQ ID NO: 260659 - DNA, 778 bp, Unknown
  Bacterial polypeptide expressing nucleotide sequence isolated from the Sargasso Sea
aatgctaaaggtattagtttcaaatgatgatggatatgatgctccaggtttagaagttcttgtcgagcacttaaaagaagtagcagaaatatttgttgttgctcctgaaataaataatagtggagcaggttgttcaataacgacaaatagacctttagaggtgatccgtcacgataatggatttgtgtctgtgaatggaagacctgctgattgcgttcatctaggaatccatgaattatgtccttggagtcctgatctagttgtaagtggtattaatctaggagctaatatgggtgaggatcttctttattctggcactgttggtgctgcactagaaggcagaggtttaaaatatccatcaatagctatttctgcagctgcttttaatcaacctggatcagaaaattctctagaacctaataatctaactgctgctttgtttatcaaagagattattcaaaactacgattcaataaaattagattcatctgcaatcctaaatataaatgtccctaatgtagaatattcaaattctctggaaaaaaaagtaacaaagatcggaacttggggtgatagaaatcctccaaatatagtaataaagaatgatggaacagaagaatattggacttctcatagggataaatttccctcgaatgatgaaaatacagatatattttgtctaatgaataaagtggtatctattacacctatattgcctgatttttctagagagaatgatttcaaaggtgttgaaaagtggattgaaagatgggattag

SEQ ID NO: 260660 - DNA, 781 bp, Unknown
  Bacterial polypeptide expressing nucleotide sequence isolated from the Sargasso Sea
catgaattctcctacaatacttataacaaacgatgatggcatttattcggcaggaatttttgcactatggagagcaatgaaagaaattggtaatccaattgtggttgccccagataaagaaagaagttccgtgagtcacgcaatcactattacgtcgcctcttcgtttgaaaaaaataaatagagccgagggttttgagggttatgcggtctctgggacccctgctgattgtgtaaaactttctattaagtcattatataaaaaaaaaccaccagatattataatctcgggtatcaaccgaggtggaaatatgggtgaaaacataatttattctggcacagtttctgcggccgctgaaggtgcaaatttcggtatcccctctattgcgattagtttagcatcagataagactgattattttgacctgtcaaaaacttcagcaaaaaaaattgtccgtcatgtcattaaaaatggtatgcctaaagggactcttctaaatgtaaatgtaccatattgtaaacaaaaagaaattttgggttttaaatttactcgtcaaggtaatcagtattttaaggataaatatatagagagagttgatcctcaaaaccagaaatattattggattaaaggcgaagtttacgatgaagatgaatcaatagaacaagatgggaaagctgtttctaaaaattatgtcagcatcagcccaatacattttaaagttacaaatgaggcttacctagctgaattaaaaaataaatttattgatgagcaatttaaataa

SEQ ID NO: 260661 - DNA, 772 bp, Unknown
  Bacterial polypeptide expressing nucleotide sequence isolated from the Sargasso Sea
atggctgataaacctttaattttagttacaaatgatgatggtataactgctcctggaattagaacattaatttcagtaatgaatgaaattggagacgttgtagttgtagcgcctgacagtcctcaatctgccatgggacatgccataacaataaattcaacattacaatgtcataaaataaaagttgataatggacctcaaatagaatattcttgctccggtactcctgctgattgtgttaaactaggaattaatgagattcttcaaaaaaaacctgatttgtgtgtgtctggcatcaaccatggttcaaatgcatcaattaatgtaatctattctggaaccatgagtgcagcaattgaagctagcattgaaggggttcctgctattggtttttcattgcttgactacagttggaaagcaaattttgagaggattaaagacattgtcaagaaaataaccataaaagccttatctgagggtataccatctggaactgcattgaatgtgaatattcctaatttagaaaagaaagaaataaaaggaataaaagtttgtaatcaagcaaatgcctattggattgaaaaatttgataaaagaactaacccacaagggagagaatactattggctgacaggtgaatttattaataatgataagtcaactgaatctgatgaatgggctttgaaaaatgattttgtttctgttgtacctgttaagtttgatttgaccaactatgaggtaattgataaaattaaatcctggaatctttaat

SEQ ID NO: 260662 - DNA, 622 bp, Unknown
  Bacterial polypeptide expressing nucleotide sequence isolated from the Sargasso Sea
ttcttacctaagtgagattgaggttacgaaagttgatgataagatctatgcagtagatggaaccccggctgattgcacatatttaggcttattaagtatagttgattttgaatttgatattgttatatcgggtattaatcatggagcaaatattggtaatgacgttttatattctggaacagttggagctgctgttggaggaaggaatttaaagtatccaccaattgctatatctgttgcttcttatgatgctaaggatataagctttataacaaaaaaatcgcttgagttaattaataaaattattaaatcaagtgaaacttatattggaaaagtaataaacataaactttccagatatttctgaagaggagtataaaggagttaaggcaacaggattatctaaaagagacgttccagccaaacctattaagatagaagatcaatccctatcaaaagaaacttacaggtaccgatataacctatcaggcgagcctattaaaggtgattatgttactgatgcagaagctgttgtggatggatatgtttctatatctgtacttgactatagtctaggctcatctgaatttattgataatctttctgagataataaatgagtaa

SEQ ID NO: 260663 - DNA, 745 bp, Unknown
  Bacterial polypeptide expressing nucleotide sequence isolated from the Sargasso Sea
aatgaaaatattattaacaaatgatgatggaatcgaatcagaaataactagagctttatttgaatcacttaaagaaaaacatgaagtcactttaattgctccagaaaaagataagagtggacagggtgcagccataacactaagaacttctgtcgaagtaaataaattagatgacaatgtatattcggttggtggcactccggctgattgtatttttatggggctaatggcaattatgaaggagcttccagatatcgttgtttctggaattaacaggggtgcaaatatgggtgatgatgttattcactcaggaaccttgggagcagccttaaccgcaagaaaattgagatatccgccgattgctgtttccatatctggtaaatcttttgaaaattttcaatcttcgataatagcaacagaactaatgttggattatattgttcaaaattattcagatgaacatcatggcggattagttttcaatatgaatgtacctaatttagaatttgttgatattgttaacttctcttttacttcactaggaactagaggcatgcctctagcaccagaatttaatggaagtggagataaattaagctataagatcggaaaagctggcaagccagctggagatttaacagggacagattttgaggcaataagagcaaacaagatatctgttactccactatattgggatatgactgatttaagtaaaaagaaaggcaaactacctgatgtctaa

SEQ ID NO: 260664 - DNA, 592 bp, Unknown
  Bacterial polypeptide expressing nucleotide sequence isolated from the Sargasso Sea
aatgaatatattgctcaccaatgacgatggttacaaagcatcaggaattacagagctttataaggctttaagcaaagaacataatgtttttttgattgctccaaaagaaaattgtagtggtatgagcgctgcaattagtctcagaaaagaaatagaagttaaagagatttcaaaaaatattttttcagttgatggaactcctgctgattgttcctatcttggattattgtcggtaattcctgattctatcgagatgattgtttcaggaattaatttaggagcaaatttaggtgaagatatcttttattctggaacagttggggccgcaatagctgggcgaaggctaaattatgttcccgttgctttttcagtgacttcttttaacccaaaaaatttatcatttatttcagaacaagctaatttaattgttaatcaagttagtaagcttcctaatgataagaatttgcttgtgaatgttaatttccctgatctttcaaattctaaactaaatggaacaaaacttacagtcataggcaaaaggggtactcccgatattcctgattttataagatctaataattcttcaaaattt

SEQ ID NO: 260665 - DNA, 751 bp, Unknown
  Bacterial polypeptide expressing nucleotide sequence isolated from the Sargasso Sea
tatgaagatattactaacaaatgacgatggctatgaagctgaaaatattaaaaatctttatgagaagttatcgcaagaccacgaagtttggattatagcgccaaaagataattgtagtggtatgagtgcagcaatatcatatttgaaagaaatacctgttgttaaaatttcagacagagtttatgcggttgatggaactccagcagattgtagttatcttggtttgcttagtattgtagattttgagtttgatattgtaatttcaggtattaatcatggtgcaaacattggtaatgatgtcttgtattcaggaactgtcggtgcagctgtaggtgggagaaatctcaagtatcctccaatagcaatttcagtagcatcatatgatgcaaaagatatagattttatatctttaaagtcaattgaaattatagagacaattattcaaaaatctgatgtatacaaaggaaaagtaattaacattaattttccagatattaactcagacgaatttaaaggagttaaagcaactgtgatttcaaaaagagatgtaccgccaaaacctattctgataagtgaagatggagataatcaatcgatctatcgttacaattattctggcgaaccattagaagaagattttttaaccgatgccatagcggtgcaaaagggctatgtttctgtttctgtgcttgattattcattaaacagtaaaatctttattgatcaactaaatcgcattctaaatgaatag

SEQ ID NO: 260666 - DNA, 754 bp, Unknown
  Bacterial polypeptide expressing nucleotide sequence isolated from the Sargasso Sea
tatgaatattcttcttacaaatgatgatggttttgatgctgatggaattaaggccattagaactgcattagaaaagagtcataatgtctatgttgtagctccagaaaaaaattgcagtggccttagtgcatctatctcgtacatgaaagaaattgaaatcaagaaggaatcagaaagactttatattgttaaaggaactccagctgattgcgcatatattggcttattaaatcttcttaatgatgaaatagatgtgcttgtatcaggcatcaatcttggagcaaatattgggaatgatgttttgtattctgggactgtaggagctgcgcttggaggaagaaagctgaagtttccgccaattgcaatttcttcatgtgagtacaagcctaagtctcttgagtttatagcaaataagtcatgtgaattagttgaattaataacttcttttgaaaaacaggaaattttaaataaagttgtaaatataaactttcctgatattgatgaaaaatcttataagggcattaaagtggttccaattgctaaaagagatgttccaccaactcccgatattctaaaagataattctgacattcaatcatttaggtatgcagcatctggagcgccaataaaggaagattttcttaccgatgcggaggctgtaaaacttgggtatgtatctgtatcaattttagattatgaattactagatcctaattttaatagtcttgagtttgagaacttcataaatgaataa

SEQ ID NO: 260667 - DNA, 745 bp, Unknown
  Bacterial polypeptide expressing nucleotide sequence isolated from the Sargasso Sea
atgaaaatattattaacaaatgacgatggaatcgaatcagagataaccagagctttatttgaatcacttaaagaaaaacatgaagtcactttaattgctccagaaaaagataagagtggacagggtgcagccataacactcagaacttctgtcgaagtgaataaattagatgacaatgtgtattcggttggaggcactccagctgattgtatttttatggggctaatggcaattatgaaggagcttccagatatcgttgtttctggaattaatagaggcgcaaatatgggtgatgatgttattcactcaggaaccttgggagcagcattaactgctagaaaattaaggtacccaccgattgctgtttccatctctggcaaatcttttgaaaattttcaatcttcgataatcgcaacagaactaatgctggattatattgttcaaaattattcagatgaacatcatggtggattagttttcaatatgaatgtacctaatttagaatttgttgatatcgttgacttttcttttacttcattaggaactagaggcatgcctctagcaccagaatttaatggaagtggagataaattaagttataagatcggaaaagctggcaagccggctggagatttagcagggacagattttgaagcaataagagcaaacaagatatctgttactcccctatattgggatatgactaatttaagtaaaaagaaaggtgaactacctgatgtctaat

SEQ ID NO: 260668 - DNA, 679 bp, Unknown
  Bacterial polypeptide expressing nucleotide sequence isolated from the Sargasso Sea
tactggtcatggactttctttacaatcaccattaagagtagaaaaagctgacgaattatttggagaaggaattgaagcctggggatgttccggcacacctgctgattgtgtcaaattagcactatctgaactgttggatcataaacctgatctagtactatctggaataaatcacgggcccaatttagggacagatattttttgttcaggcacagtcgctgcagctatggaaggcactttagaaaatgttccctcaatggcaataagtgttgcaagttttaaatggaagaattttgaatttgctggagaaattgcaatgaacattgccgaacaagctattaacgatagttggccagcttcacttttattaaatttgaatatccccccctgcgaaaaaaacaaaataaaagaattatcctggacaagattatcggtaagaaaatataaaaatcaattttccaaaagagaagacccaaggggtgatgattattattggttagcaggtgaggttgttttagatcttaaatcaaaaggttatggtccaaaaaactggcccagtgacgtatctcaaatacaagaaaataaaatatctcttacacctgtagaaccagatttattttggagaggcaatttaaaaaacttacctaaaattaataattcatttgtaaatccttcttaa

SEQ ID NO: 260669 - DNA, 445 bp, Unknown
  Bacterial polypeptide expressing nucleotide sequence isolated from the Sargasso Sea
atgaaaccgttaaatatattaattagtaatgatgatggtgttttcgcatcggggataagagctttagcaaaatcagcccaaaaaagaggacataaggtaaaagtagtatgtcctgaccaagaaagatcagctactggtcatggtcttactttacaatcaccattaagagtagaaaaagctgacgaattatttggggaaggaattgaagcttggggatgttccggcacacctgctgattgtgtcaaattagcactatctgaactcttggatcataaacctgatctagtactatctggaataaatcacgggcccaatttagggacagatattttttgttcaggcacagtcgctgcagctatggaaggcactttagaaaatgttccctccatggcaataagtgttgctagttttaagtggaagaattttgaatttgctggagaaatgc

SEQ ID NO: 260670 - DNA, 436 bp, Unknown
  Bacterial polypeptide expressing nucleotide sequence isolated from the Sargasso Sea
aatgaaaccgttaaatattttaattagcaatgatgatggtgttttcgcagcggggataagagctttagctaaatcagcccaaaaaagaggacataaggtaaaagtagtatgtcctgaccaagaaagatcagctactggtcatggtcttactttactatccccattaagagtggaaaaagctgacgagttatttggacaaggaattgaagcttggggatgttccggcacacctgctgattgtgtcaaattagcattatctgaactcttggatcataaacctgatctggtactatctggaataaatcacggacccaatttagggacagatattttttgttcaggcacagtcgctgcagctatggaaggcactttagaaaatgttccttccatggcaataagtgttgctagttttaaatggaagaattttgaatttgct

SEQ ID NO: 260671 - DNA, 724 bp, Unknown
  Bacterial polypeptide expressing nucleotide sequence isolated from the Sargasso Sea
gatgacggatatcaagcttctgttatctctatattagcagaagttctaagtgaaatagggaatgtaactgttgtagcaccggacagagaccggagtggcgcaagcaattctctcacattagactcaccgctttatgtaaagcaagataagcgaggtttttattatgttaatgggacgccgagcgattgtgtacatcttgcgataacaggtttattagatgaagagccagatatggtgattagcgggataaatgcgggtgctaatttgggagatgatgtgctttactctggaaccgtagctgctgctatggagggaagatttctcggttgtccagcaattgcattttcacttgccggtgagagttcaaattataaatcggccgttttagtagtaaagaaagttattcaatccttaataaagaacccactagaggagatacttctaaatataaatattcccgatgttaattatgattcaatagagggttatgaagttacacgccttggaaatcgtcataaatcagagcctgctatagaaacacatgacccaaaaggtagaaaggtttactgggtgggtgaagttggagctgagcgagatgcaggaaagggcaccgatttttatgcaatacgtaaaaataaagtgtcaataactccaatgcatatcgatttaacaaaacatcaatttttgtccactatttctaattggattgaggttcttaattaat

SEQ ID NO: 260672 - DNA, 573 bp, Unknown
  Bacterial polypeptide expressing nucleotide sequence isolated from the Sargasso Sea
catgttcgccctgcttacaaatgatgacggaatctacgcgccagggctggccgcacttgaagatgcggtgaacaacgagcttcgtacactcgttgttgcaccatcgaccgagcagagtggtgttggtcacggcattacattcctttcaccgcttacagcaaaggaagtctttcgaggtgagaaacgttgcggatgggccgttgatggcagccctgccgatgccgtgaaacttggtgtttctgaaatctgtccacaacgaccggatctcattatcagtggcatcaatgctggtttgaatgccggcattaacgttctttattcggggacggtggcggcggctattgaaggctctttttttggaattaccagcattgcagtgtcgctggaatgggatgatcagatgaattttgagcgggcagcacagtttgcaagtgggcttatcaaacaattaatttcacttcgtccgcctgctggcagtctttttaatatcaatatccctacggcggctctcgtcgaaacacctgaagtacgagttgttcctatgagcgtcgcccgttacggagaagcatttga

SEQ ID NO: 260673 - DNA, 571 bp, Unknown
  Bacterial polypeptide expressing nucleotide sequence isolated from the Sargasso Sea
aatgcgcattctgatcagcaatgacgatggctaccttgcgccgggactggcggcacttaacgcagctgtttcgtcgatcgccgaaacgtttgtgatcgctcccgaccgtaaccgcagtggtgcgagcaattctctcacgcttacgcggccactcagggtcagtacggcccacaatggcttccgccgtctcgatggcaccccgaccgactgcgtccacgtcgggttgaccgggctgatggatccggagcctgatatggttattgcgggaatcaaccacggtgcaaatctcggtgatgacgttttgtactcaggcaccgtggcggccgcaatggaagggcgctaccttggatttcccgctgttgcgatttcactggctggctcggacgtgcaacacttcgatgccgcggccagaatagcactccaggtgctggaacgaatgcaggcgcaccccttgcctcgcgacagcatccttaatgtgaacgtgccggacctgcctttcgaattgattaagggctttagagcaacgagacttgggtgccgtcataaatctgaccctgttatccgcgcacag

SEQ ID NO: 260674 - DNA, 640 bp, Unknown
  Bacterial polypeptide expressing nucleotide sequence isolated from the Sargasso Sea
ctggacctgccggtgcgggtcaagcggatcgaccactacacctgctcggtggccggcaccccgaccgactgcgtgcacctggccctgaccggcatgctcgagtacgacccggacatcgtggtctcggggatcaacaacgcggccaacctgggcgatgacgtcatctattccggcaccgtctcggcggcgatggaggggcgtttcctcggcctgccagcggtggcgatgtcgctggtctcgcacaaccacgacccgcgcaacttcgaaaccgccgcgcgcgcggcggtcgagatcgtgacccggctcaaggccgacccgctgccggccgacaccatcctcaatgtcaacgtgcccgacctgccgtgggcggaggtgcgtggcttcgaagtcacccgcctgggcaaccgccaccgcgccgaaggctgcatcgcccagcgcgacccgcgtggcaatgaagtgttctggatcggcccggccgggcgcgaacaggactccggcccgggcaccgacttccacgcggtgcgcaacggctacatctcgatcaccccgatccaggtcgacctgacccgctaccaggcgctggaaaaggtcgccagctgggtcggcggcctgaccgccgcgctggaccgcccggcatgag

SEQ ID NO: 260675 - DNA, 812 bp, Unknown
  Bacterial polypeptide expressing nucleotide sequence isolated from the Sargasso Sea
aatgaaccttcgttgttcccggattctggtaacgaatgacgatggcataaacgctcccggtctcagggtccttgaaaaaatcgcgaaatccctttctgacgacgtttgggtcgtggccccagaaagcgagcaaagtgcttcgggccattctcttacgcttacgcttcccttacgggtgcggaaggcgggcgcccgaaaattcgccgtcgacggaacgccgactgacagcgtgcttctaggagtgcggcacattattaacggaaaaaagcccgatctgatgctgtccggcgttaatgccgggggtaatctgggcgaagatatcacctattcgggaaccgtggcggcggcgatggaaggcacgcttctgggtatcccttccatcgcgctcagtcagatgcgggtttatggtgaaaacgtgggctggggccccacggaaaggcacgctgtccatatcatcaaaaaactgaccagggaaacgtggccttcgaatgtactgatgaacgtcaatttccccgacctgccggccgaagatgtggaaaagatcgaagttacggttcagggacggcgaaagatcggagacgccataactaccgggcgtgatccgcgcggctatgactatgtgtggatcggggcggaacgaaacgaggatccatcttttcgcggatcggatttgaaggcggtgaacgagggcagaatatccgtaacgccgctttgcctcgatttaactcacaaacgaagcatgcgccgtttgcgagaatttttcgatgagtccggatcccagtcgcattcggctgatcatggagcttccccgc

SEQ ID NO: 260676 - DNA, 355 bp, Unknown
  Bacterial polypeptide expressing nucleotide sequence isolated from the Sargasso Sea
atgaaaccgttaaatatattaattagcaatgatgatggtgttttcgcagcagggataagagcactagcaaaatcagcccaaaaaagaggacataaggtaaaagtaatatgtcctgaccaagaaagatcagctactggtcatggtcttactttacaatccccattaagagtggaaaaagctgacgagttatttggacaaggaattgaagcttggggatgttccggcacacctgctgattgtgtcaaattagcattatctgaactcttggatcataaacctgatctagtactatccggtataaataacggacccaatttagggacagatatttttgttcaggcacagtcgctgcagc

SEQ ID NO: 260677 - DNA, 571 bp, Unknown
  Bacterial polypeptide expressing nucleotide sequence isolated from the Sargasso Sea
catgaagctggccctgttcgaactggtgaaggacaaacctgatctggtgctctccggcatcaaccacggccccaacctgggcaccgatgtgttctgctccggcaccgtcgctgcagcgatggaaggaaccctggagggcattccatcgatggcgatcagcagcgcctgcttccagtggcggcagttccaggccggcgccgaactggcggtggagatcgccgaacaggccttggcggatcaatggccggagaacctgctgctcaacctcaacatccccccctgcaatcgggacgccatgggcccactgcgctggacccgcttatcgatccgccgctacgacgagcagttcagttcccgggtggacccgcggggtcgggcctattactggctggccggtgaagtggtgaacgacctggagtccgccggtgaaggtccgcgggactggcccagcgatgtggcccagatccatgccaacagtccatccctgaccccgatccaacccgatctgttctggcggggatccctcagtggactgccgcagctgaagctgaaggatcagctggtgcgatag

SEQ ID NO: 260678 - DNA, 502 bp, Unknown
  Bacterial polypeptide expressing nucleotide sequence isolated from the Sargasso Sea
gatgattattttattaagcaatgatgatggctacaatgcgaatggtataaaggttttgtcgaaatctttagatcaaatagcacgtgtaattctttgcgcacctatggagaatcattctgggtcgagtagctctttatcccttcgcaaagatatcagtgtaaagcaaattgaaaaagatgtttttgtttttagcggtactccagcagatactgttcatctgggattatcaggatttctagatgtcactcctgatttagttgtatcaggtatcaatcacggtgcaaatctcggagaagacatactttattcaggcactgtagctgccgcgattgaagggagagttcttgatatgccttcaattgctgtttcctcgttaggagatacagaaagagattttaaagttgctgctagagttacaattgagctaatccaaagactaaaaaaatacccattacctaaagaaacaattttaaatgttaacgtaccagcaataaattatgaa

SEQ ID NO: 260679 - DNA, 385 bp, Unknown
  Bacterial polypeptide expressing nucleotide sequence isolated from the Sargasso Sea
aatgaaaccgttaaatatattaattagcaatgatgatggtgttttcgcagcggggataagagctttagcaaaatcagcccaaaaaagaggacataaggtaaaagtagtatgtcctgaccaagaaagatcagctactggtcatggtcttactttgcaatccccattaagagtggaaaaagctgacgaattatttggagagggtatacaagcttggggatgttccggcacacctgctgattgtgtcaaattagcactatctgaactcttggatcataaacctgatctgatactgtccggaataaatcacggacccaatttagggacagatattttttgttcaggcacagtcgctgcagctatggaaggcactttagaaaatgttcct

SEQ ID NO: 260680 - DNA, 547 bp, Unknown
  Bacterial polypeptide expressing nucleotide sequence isolated from the Sargasso Sea
aatgcgcattctgatcagcaatgacgatggctaccttgcgccgggactgacggcacttaacgcagttgtttcgtcgatcgccgaaacctttgtgatcgctcccgaccgtaaccgcagtggtgcgagcaattctctcacgcttacgcggccactaagggtcagtacggcccacaatggcttccgccgtctcgatggcaccccgaccgactgcgtccacgtcgggttgaccgggctgatggacccggagcctgatatggttattgcgggaatcaaccacggtgcaaacctcggtgatgacgttttgtactcaggcaccgtggcggccgcaatggaagggcggtaccttggatttcccgctgttgcgatttcactcgctggctcgaacgtggaacacttcgatgccgcggccagaatagcactccaggtgctggaacgaatgcaggcgcacccgttgcctcgcgacagtattcttaatgtgaacgtgccggacctgccctttgaactgattaagggttttagagcaacgagactggggtgtcgccataaa

SEQ ID NO: 260681 - DNA, 412 bp, Unknown
  Bacterial polypeptide expressing nucleotide sequence isolated from the Sargasso Sea
catgcgaattctgatttccaacgacgacggggtgaacgcacccggtatcgccgcgttgcaccaggcgctggccgattacgccgagtgcgtggtggttgcgccggccgaagacaagagcggtgccagcagtgcgctgacactcgaccgtccgctgcatccggtggcgctgcccaacggcttcatcagcctcaatggcaccccgaccgactgcgtgcacctgggcatcaacggcctgctcgagcagacgccggagatggtcgtctccggtatcaacctgggggcgaacctgggtgatgacgtgctctattccggcaccgtcgccgctgcgctggaagggcgtttcctggacaagacggcgtttgccttctcgctgctgtcgcgcctgcccgacacttgcccacggctgcctatt

SEQ ID NO: 260682 - DNA, 631 bp, Unknown
  Bacterial polypeptide expressing nucleotide sequence isolated from the Sargasso Sea
agatgaattattcgaagaaggaattgaagcttggggatgttcaggcacgcctgctgattgcgtcaaattagcactatctgaactcttggataaaaaacctgatttagtgctatctggaataaatcacggtcccaatttaggaacagatattttttgttcgggaacagtcgctgcagctatggaaggcactctagaaaatgttccctccatggcgataagtgtggccagttttaaatggaaaaattttgactttgccggagaaattgcaatgaatattgccgagcaagccattaaggatagttggccagcatcacttctattaaatttgaatatccccccttgcgataaaagcaaaataaaagaattatcttggacaagattatcagtaagaaaatataaaaatcaattttccaaaagagaagatccgaggggtgatgattattattggttagcaggtgaggtggttttagatcttaaatcaaaaggttatggtcctaagaattggcctagtgatgtatctcaaattcaagataataaaatatcgcttacacctgtagaaccagatttattttggaggggtaatttagaagacttacctaaaattaataattcatttgtaaatccttcttaa

SEQ ID NO: 260683 - DNA, 739 bp, Unknown
  Bacterial polypeptide expressing nucleotide sequence isolated from the Sargasso Sea
tctggtcagtaatgatgacggtgtgcatgcggagggcataagagccctcagcgaggcgctggctgcctgtggcgaggtcatcgtggtggcgccggatcgcaatcgcagcggggcgagtcattccctgacgctggaagtgccgctgcgggtcacccgcatcgccgaaaccggatatcatgcggtgaagggcacgccgaccgactgcgtgcacctggcggtcaacgagctggtgcgcccggagcccgacatggtggtggccggcatcaaccacggtgccaacctaggggatgatgtcatctactcgggcacggtggcggcggcaaccgagggacgccacctcggcttcccctctctggccatttcgctggtaggcaagacccatttcgccacggctgcccactacgccgcccagctggtgaagggcatgatggtgcacccgctgcccgccgatcagatcctcaacgtcaatgtgccggacctgcccctcgaccagatcaaggggatcagggtgacgcgccttggcaaccgccaccgggcggagtcggtcatatgcagcgaggatccccgtggccagcccatctactggattggcccgcccggcagccagcaagatgcgggcgaaggcacggatttcgccgccatcgagcagggctacgtctcgatcacccccctgaccatcgatatgactgcctacagcagtctggcggggctgggggcttggttggacctgcagggatga

SEQ ID NO: 260684 - DNA, 697 bp, Unknown
  Bacterial polypeptide expressing nucleotide sequence isolated from the Sargasso Sea
ctgaccagaaaagatcagctacagtcatggtcttactttacaatccccgttaagagtgaaaaagctgacgaattatttagagaaggaattgaagcttggggatgttccggcacacctgctgattgtgtcaaattagcactatctgaactcttggatcataaacctgatctggtactatctggaataaatcatgggcccaatttagggacagatattttttgttcaggcacagtcgctgcagctatggaaggcactttagaaaatgttccctccatggcaataagtgttgctagttttaaatggaagaattttgaatttgctggagaaattgcaatgaatattgccgaacaagcaattaaagatagttggccagcatcactattattaaatttaaatatccccccttgcgaaaaaaataaaataaaagaattatcttggacaagattatcggttagaaaatataaaaatcaattttccaaaagggaagacccgaggggtgatgattattattggttagcaggtgaggttgttttagaccttaaatcgaaaggttacggtcctaagaattggcctagtgatgtatcacaaatacaagaaaataaaatatctcttacacctgtagaaccagatttattttggagaggtaatttagatgacttacctaaaattaataattcatttgtaaatccttcttaaa

SEQ ID NO: 260685 - DNA, 634 bp, Unknown
  Bacterial polypeptide expressing nucleotide sequence isolated from the Sargasso Sea
gctgacgaattatttgagaaaggaatggaagcttggggatgttcgggtactcctgctgattgcgtcaaattagcactatctgaactgttggataataaacctgatctacttctatccggaataaatcacggtcccaatttaggaacagatattttttgttctggcacagtcgcagcagctatggaaggcactctagaaaatgttccctccatggcaataagtgtagctagttttcaatggaagaatttcgaatttgctggagaaattgctattaatattgccgaacaagccattaaagataattggccagcttcacttctattaaatttgaatatacccccttgcgagaaaagtaaaataaaagaattaacctggacaagattatcagcaagaaaatataaaaatcaattttctaaaagagaagatcccaggggtgatgattattattggttggcaggtgaggtagttttagatcttaaatcaaaagggcatggtcctaagaattggcctagtgatgtatctcaaatacaagataataaaatatcgcttacacctgtagaaccagatctattttggaggggtaatttagaagacttacccaaaattaataattcatttatatatccttcttaaa

SEQ ID NO: 260686 - DNA, 384 bp, Unknown
  Bacterial polypeptide expressing nucleotide sequence isolated from the Sargasso Sea
aatgaaaccattaaatatattaattagcaatgatgatggtgtttttgcagcggggataagagctttagcaaaatcagcgcaaaaaagaggacataaggtaaaagtagtatgtcctgaccaagaaagatcagctactggtcatggtcttactttacaatctccattaagagtggaaaaagcgaacgaattattcggggaaggaattgaagcttgggggtgttctggcacacctgctgattgcgtcaaattagcactatctgaactcttggataataaacctgatctagttttatctggaataaatcacggtcccaatttagggacagatattttttgttcaggcacagtggctgcagccatggaaggcactttagaaaatgttcc

SEQ ID NO: 260687 - DNA, 871 bp, Unknown
  Bacterial polypeptide expressing nucleotide sequence isolated from the Sargasso Sea
atggcattatcccgaacccgatattctgcaacttgcattcgtcctgccggccgggtgtttcgccaccgtggtggtgcgcgaattgctcgatctggtgccagcagggcagacggatactccatgcgaattctgatttccaacgacgacggggtgaacgcgcccggtatcgctgcgttgcaccaagcgctggccgactatgccgattgcgtggtgatcgcccctgccgaagacaggagcggtgccagcagtgcgctgacgctcgatcgtccgctgcatcccatggccctggccaatggttacatcagcctcaatggtacgccgaccgattgcgtgcacctggggctcaacggtctgctcgagcagaccccggatatggtcgtctccggcatcaacctgggggctaacctcggtgatgacgtgctctattccggcaccgtcgccgccgcgctcgaaggacgtttcctgagcaagccggcgttcgccttttcgctgctgtcgcgcctgcccgacaatctgccgactgcggcctacttcgcccgcaagctggtggaggcgcacgagcgactcgaactgccgccgcgtaccgtactcaacatcaacgtgccgaacctgccgctggaacatattcgtggtgtgcagctgacccgactcggtcatcgcgcgcgtgcggcggcgccggtcaaggtggtcaacccgcgtggcaaggaaggttactggattgccgccgccggtgatgtcgaggatggcagtcagggcaccgattttcatgccgtgatgcaaggttatgtatcgatcacgccgctacggctcgatcgcacgttcaatgaggcccttgaaactatggatggctggctggagggcatcttctgat

SEQ ID NO: 260688 - DNA, 694 bp, Unknown
  Bacterial polypeptide expressing nucleotide sequence isolated from the Sargasso Sea
tatgaaaatattattgtccaatgatgacggatatcatgcaattggtatccaagagcttattaagcaactagagaaggaacatgatatttacgtagctgcaccatctaagaatcacagcgcaggaagtagcgcgctttcagttcgaaaagatataaaaattaataacataaaaaagaatcattatattattgatggtacaccttcagattgtgtgcatatagctcttacatgtttaatcaaggataagattgatatggtagtgtcaggtataaatttaggtgcaaatttgggcgatgatgttatatattctggaacagttgcagctgcattagagggtaggcatttagaaatgtctccaattgcaatatctttagtttctcatgataaattaagtatgagtaaagcagctattgaaagctctaaaattatccaagaaatagtttgtaaagaagaaatagcaaaaaaaactttactcaatattaatattcccgattttgaaagtgagaacctatcatttgaatttactagacttggcaaacgcggtattccattgcctgcctcaaatataaaagacgatttttacaaaattggtgccgcgggtcctcctgaggatgattcagagggaacagatttttattgtataaataaaaataaaatttcaataactccattaacatatgatttaacaaatatt

SEQ ID NO: 260689 - DNA, 751 bp, Unknown
  Bacterial polypeptide expressing nucleotide sequence isolated from the Sargasso Sea
atgatccgcatcctagtcagtaatgatgatggtgtgaatgcgccggggatcaaagccttaaccgaggcgctcgccgaaatcgctactgtgatgacggtcgcgcccgatcgtaattgttccggcgcaagtaactctttaaccttgactaacccattaagaattaataggttagataatggttatatttcggttcacggtacacccacggattgcgttcacttagccatacgtgagctttgtgatggtgagccggatatggtggtgtcgggcatcaatgctggcgcgaatatgggggatgacactttatattcgggcacagttgcggcggcaatggaggggcgttttttaggtttccccgccgttgcgatttcgcttaatggtaaggcattaaagcactatcacaccgcggctgtgtatgcgcggcggatcgtgcaggggctgttagcgcatccaattgcgagcgatcagatcctcaatatcaatgtgccggatttaccgctcgatgagattaaagggattcgggtgacgcgcctgggtgcacggcataaggccgaaggcatagtgcgaacgcaggatcctgcggggaaagagattttttggcttggcccaccgggtgtagaacaagatgcgagtgaaggaacggatttccatgcggtagcccatggttatgtgtcgatcactcccttaaccgtggacttgaccgcgtatagacaattatcggtattgcaagattgggtagataaaatatgac

SEQ ID NO: 260690 - DNA, 739 bp, Unknown
  Bacterial polypeptide expressing nucleotide sequence isolated from the Sargasso Sea
atgaagatattactgacaaatgacgatggctatttttctaaaggcatcgtgatgcttgatgaaatgctcagtgaggttggtgatgtaacaattgttgcacctgaaaacaatcatagtggagccagtagctcactgacgctgaaaaatccattgaggattagaaaatataaggacaatggtttttatgtaaatggaacaccagcagactgcgtattcatggcgcttactagaattttaaagagtccacctgatattttgatcagcggtattaatcacggtgcaaatcttggagacgatgttttgtactcaggaacagttggagcggcaatgggtggtcgatttcatcccttcccatctttggctgtatcaatcactaacttaaaacctgatcacttcactacagcagtagaagttgtgcgtgaaattattgaagaaaaattagacaagcttcccaatccttcatcgatactcaatatcaatgtcccagatatacccattgagcaaatagagggatactctctgacacgtttaggtagaagagaattacctgagaatgacagaatcaatacggatgcatatggaaatgagatacattgggttggtcctccaccagagcctattttgggtgaagagggaactgatttcgatgccatttcaaagaatagagtttcaatcacacctctggaaactgactttactgattttaaatcgatggatgaatttcagaattggttataga

SEQ ID NO: 260691 - DNA, 898 bp, Unknown
  Bacterial polypeptide expressing nucleotide sequence isolated from the Sargasso Sea
atgcggtgttttcccgagcacgcagaacgccgcagcgcaacgcggcggcgcggcgtgtccggggggccgcaaccgtccatccgtagtcgccggactgtcgctctcgcgccatctttcctcggttacaatcgccggatgcgaatcctactcagcaacgacgacggctatctcgcccccggtctcgccgcgctcagcgacgcgctgcagccgctggccgagctcacggtgatcgcgcccgagcagaactgcagcggcgcgtcgaattccctcacgttgtcgcggccgctgtcggtgcagcgcgcggcgagtacgggtttcttctacgtgaacggcacgccgaccgattcggtacacatcgcgttgacggggatggccgaagccagcccggacctcgtcgtttccgggatcaacaacggccagaacatgggcgaagacacgctctattcggggacagttgcggccgccaccgaaggcatcatgttcggcgtgccggccatcgcattctcgctggtcgacaagggctgggcccatctggccgacgccgcgcgcgtcgccgcggagatcgtcgagcactatctcgcgcatccgctgccgggccagccgctgctcaacgtcaatattccgaacctgccgtacgacgaactgaaaggctggaaggtcacgcgcctcggcaagcgtcatccgtcgcagccggtgattcgccagaccgacccgcgcggcgaaccgatctactggatcggcgcggcaggtgaagcgctggacgccagcgacggcaccgattttcacgcagtggcaaacggtttcgtgtcgatcacgccgctgcaactggacctcacgcatacgcagatgctgcccgcgacgcgcgaatgggcgcgcgccggagggcgggcttcatgag

SEQ ID NO: 260692 - DNA, 739 bp, Unknown
  Bacterial polypeptide expressing nucleotide sequence isolated from the Sargasso Sea
tatgaagatattactgacaaatgacgatggctatttttccaaaggcatcgtgatgcttgatgaaatgctcagtgaggttggtgatgtaacaatcgttgcacctgaaaacaaccacagtggagccagtagctcactgacgctgaaaaatccattgaggattagaaaatataaggataatggtttttatgtaaatggaacaccagcagactgcgtattcatggcgcttactagaattttaaagagtccacccgatattttgatcagtggaattaatcacggtgcgaatcttggtgacgatgttttgtattcaggcacagttggagcagcaatgggcggtcgatttcatcccttcccatctttggcggtatcaatcaccaacttaaaacccgatcacttctctacagcggtagaagttgtgcgtgaaattgttgaaaaaaaattagacaagctacccaatccctcatcgatactcaatatcaatgtgccagatatacccattgagcaaatagagggttactcactgacacgtttagggagaagagaattgcctgaaaatgacagaatcaatacggatgcatatggaaatgagatacattgggttggccctccaccagagcctattttgggtgaagagggaacagatttcgatgccatttcaaagaacagagtttcaatcacacctctggaaactgactttactgattttaaatcgatggatgaatttcagaattggttatag

SEQ ID NO: 260693 - DNA, 739 bp, Unknown
  Bacterial polypeptide expressing nucleotide sequence isolated from the Sargasso Sea
gatgagaattttactgacaaatgacgatgggtatttctctaaagggataaccatgcttgatgaaatgctcagtgaaattggggaggttacaattgtggctcctgagaataattatagcggtgccagcagctcattgaccttgaaaaatcctttgaggattaggaaatacaaagacaacggattttacgtgaatggaactcctgcagattgcgttttcatggcacttactagaattttaaaaaatcctccggatatcctgattagcggaatcaatcatggcgcaaatttaggagacgatgttttgtattcgggcacggtcggtgcggcaatgggaggtcgtttccatccgtttccatcaatagccatttctattactaacttaaaaccagatcatctgtctaccgcggtcgaagttttgcgagaaatcattgacaaaaagttggatagacttccaaatccttcatcgattctcaatgtgaatgttccggatataccaattgatgaaattcaaggatactcattgactcgtctgggcagaagagagttgccacagaatgacagaatcaataccgatgcctatggaaatgaaatccattgggttggaccacctcctgagcctgtattaggagatgaagggaccgattttgatgccatttcaaaaaatagagtctcgatcacacctttgaaaactgattttacagattttaaatcaatggaagctctgaaagattggttgtga

SEQ ID NO: 260694 - DNA, 751 bp, Unknown
  Bacterial polypeptide expressing nucleotide sequence isolated from the Sargasso Sea
atgatccgcatccttgtcagcaatgatgatggggtgaatgcgccgggaataaaagccttaacggaggcgcttgccgaaatcgccactgtgatgacggtcgcacctgatcgtaattgttccggtgcaagtaactctttaaccttgactaatccattaagaattaataggttagataatggttatatttcggtgtacggtacaccaacagattgcgtccacttagccatacgggagctctgtgatggtgagccggatatggtggtatcgggcatcaatgctggcgcgaatatgggggatgatactttatattcgggtacggtcgcggcggcaatggaagggcgttttttaggcttccccgcggtagcgatttcgcttaatggcaaagcctttaagcattatcacactgccgccgtttacgcgcggcgaatcgtgcaggggctattagcgcacccgattgccagtgatcagatcctcaatatcaatgtgccggatttaccgttggatgagattaaaggcataagagtgacgcgccttggagcgcggcataaagctgaaggcattgtgcgtacgcaagatcccgcaggacgagaaattttttggctcggcccaccgggtgttgaacaagatgcgagtgaaggtaccgatttccatgccattgctcatggttatgtgtcgatcactccgttaaccgtagacttgaccgcgtataaacaattatcgatattgcaaaattgggtagataaaatatgac

SEQ ID NO: 260695 - DNA, 769 bp, Unknown
  Bacterial polypeptide expressing nucleotide sequence isolated from the Sargasso Sea
atgaagaaacataaaccaagaatattactgacaaatgatgatggtatttactctaaaggtatctatgccttatgggaagcaatgtgtgagattggtgaagtgactgtcatggctccaaatacggaaaaaagtgcagttggacacgcaattactatttcagatcccgttgggatagaaccatgtaatcgacatggagattttaaaggatatgctgtgaatggaactcctgctgactgtgtaaaaattgccataggttcatttttggataaaaaaccaaatattgttgtatctggcattaatgctggtgctaatgtaggaaccaatattttatattctggtacagtatctgcagcagcagaaggaacaatgttaggagtcccaagcgttgcctttagtttaaatacattcaaagcaaataattatgatttgtctaaagaagtggctaaaaaaatgacaacaaatgtattaaaacatggtttaccaaagggaacattattaaatgttaatattcccaaatgcgaaatttctgaatgtaaaggatataaaatcactactcagggtaaagaatattttcttgatgatcttaaaaaaagagaaagtccaagggggcgattatattactggatgagcggcaaaatagtaaataatgatatgtctgatgaacaagatggatatgccgttattaataattgggtaagtgtatcaccaattcaatacaaactaactgaccataaatttttagataatttaaaaagctgggaattataaa

SEQ ID NO: 260696 - DNA, 802 bp, Unknown
  Bacterial polypeptide expressing nucleotide sequence isolated from the Sargasso Sea
catgcgggtcctgatcagcaatgacgacggcgtcttcgccgaaggcatccgtaccctggcggcggcggccgtcgcccgcggccatgaggtcaccgtggtctgcccggaccaggagcgctccgccacaggccatggcctcaccctgcagacccccatccgcgcggaacgggccgatgagctgtttgtccccggcgtgaccgcctgggcctgttccggtacgccggcggactgcatgaagttggccctgttcgaactggtgaagcaaaaacccgatctggtgctgtccggcatcaaccacggcccgaacctgggcaccgatgtgttctgctccggcaccgtcgccgcagcgatggagggaaccctcgagggaattccttccatggcgatcagcagcgcctgtttccagtggcgtcagttccaggccggcgctgaactggcggtcgacgtcgccgaacaggccctggctgatcaatggcaggacaatctgctgctcaacctcaacattcccccctgcgaccgggacgccatggggccgctgcgctggacccgcctctcgattcgccgttacgacgagcagttcagttccagggtggacccgcggggtcgggcttactactggctggccggggaggtggtgaacgacctggagtccgccggtgaaggtccgcgggactggcccagcgatgtggcgcagatccacaacaactgcccatcgctgaccccgatccaacccgatctgttctggcgcggatccctgagtggactgccgcagctgaagctgaaggatcagctggtgcgatag

SEQ ID NO: 260697 - DNA, 760 bp, Unknown
  Bacterial polypeptide expressing nucleotide sequence isolated from the Sargasso Sea
atgaaaatattattaacaaatgatgatggatacgatgccataaatattaaagctatttatgaaaaactatctgaagagcatgaggtatggatagttgctccaaaaggtaattgtagcggtatgagtgctgctatttcatatttaaatgaaattgaagtaaaaaaaattgatgaaaaaattttttctgttgatggtacaccagctgattgttcatatcttgggttattgagtatcgtggactttgagtttgatatggttgtatctggcataaatcatggtgcaaatattggcaatgatgtcttatattctggaacagtaggcgcagcagttggcggaagaaatcttaaatatccaccaattgcaatttcagtagcatcttatgatgcaaaagatatcaactttattgcaaaaaaatcttgtgaaatagttgataagatttttagtgcgaatggattattaaagggaagagtaattaatattaattttcctgatattactgaagatgaatacaagggtattaaatccactgttatttcaaaaagagatattccagctaggccaataaagttagaatctaattctagtgaagatggaatatataaatatagatataacctatctggagagccactcaaagaagacatatttattactgacgcagaagcagttaaaaatggttttgtatctttttcagtgcttgattacagtctgaattcagaaaattttattaatgatgtaacagagcttattgatgtctaac

SEQ ID NO: 260698 - DNA, 811 bp, Unknown
  Bacterial polypeptide expressing nucleotide sequence isolated from the Sargasso Sea
atgaaaccgttaaatatattaattagtaatgatgatggtgtttttgcagcagggataagagccttagccaaatcagcccaaaaaagaggacataaggtaaaagtagtatgtcctgaccaagaaagatcagctactggtcatggtcttaccttacaatccccattaagattagaaaaagctgacgaattatttggagaaggaattgaagcttggggatgttcaggcacacctgctgattgtgtcaaattagcactatctgaactcttggagaataaacctgatctaattctatctggaataaatcacgggcccaatttaggaacagatattttttgttcaggaactgttgcagcagccatggaaggcactttagaaaatgttccttcaatggcaataagtgttgctagttttaaatggaagaattttgaatatgctggagaaattgcaatgaatattgccgaacaagcaattaacgatagttggccagcttcacttctgctaaacttgaatatacccccttgtgagaaaagcaaaataaaagaattatcatggacaagattatcagtaagaaaatataaaaatcaattttccaaaagagaagacccaaggggtgacgattattattggctcgccggtgaggtagttttagatctaaaatcaaaaggttatggtccaaagaaatggccaagtgacgtttcacaaatacaagaaaataaaatatctcttacacccgttgaaccagatttattttggagaggcaatttagacaaattacctaaaattaataattcatttataaatccttcttaaa

SEQ ID NO: 260699 - DNA, 631 bp, Unknown
  Bacterial polypeptide expressing nucleotide sequence isolated from the Sargasso Sea
atgaattattttgggaaaggaattgaagcttggggatgttctggcacacctgctgattgcgtcaaattagcactatctgaactattggatcataaacctgatctagtactatctggaataaatcacgggcccaatttagggacagatattttttgttcaggcacagtcgctgcagctatggaaggcactttagaaaatgttccctcaatggcaataagtgttgctagttttaaatggaagaattttgaatttgctggagaaattgcaatgaatattgctgaacaagcaattaacgatagttggccagcttcacttctattaaacttgaatatacccccttgtgagaaaagcaaaattaaagaattatcctggacaagattatcaatcagaaaatataaaaatcaattttccaaaagagaagacccaaggggggacgattattattggctcgctggtgaggttgttttagatcttaaatcaaaaggttatggtccaaagaaatggccaagtgacgtagcacaaatacaagaaaataaaatatctcttacgcccgttgagccagatttattttggaggggtaatttagacaaattacctaaaattaataattcatttataaatccttcttaaa

SEQ ID NO: 260700 - DNA, 811 bp, Unknown
  Bacterial polypeptide expressing nucleotide sequence isolated from the Sargasso Sea
aatggaatcattaaatattttaataagtaatgacgatggggtttttgctgagggaataagagctttagccaaatccgcattaaaaaaaggtcataaagtaacagtagtatgtccggaccaagaaagatcggcgactggtcatggcctcactttgcagtcacctttgagagttgaaagagcagatgaattatttgataaaggtattaaagcttggggttgttcaggtacccctgctgattgcgttaaactcgcactatcagaattattagataaaaaacctgacttagttctttctggaataaatcatggtccaaatttaggaacagacattttttgttctggaacagtagccgcagctatggaaggtactttagaaaatgttccatcaatggcaataagtgttgcgagttttaaatggaaaaattttgaatttgctagtgaaattgcaatgaatattgctgaacaagcaataaaggatagttggccaaagtctcttcttttaaacttgaacatacccccttgtgaaagaaataaaataaaggaattatcctggacaagattatcaatccgaaaatataaaaaccaattttctaaaagggaagatccaagaggcgatgattattattggttagcaggtgaggctgttttagatcttaaatcgaaaggcgacggacccaagaattggcctagtgacgtctctcaaatacaagaaaataaaatttctcttacacctgtagaaccagacttgttttggagaggaagtttagacgttttgccaaaaatcaacacttcatttataaatgcttcttag

SEQ ID NO: 260701 - DNA, 811 bp, Unknown
  Bacterial polypeptide expressing nucleotide sequence isolated from the Sargasso Sea
aatgaaaccgttaaatatattaattagcaatgatgatggtgttttcgcggcggggataagagctttggcaaaatcagcccaaaaaagaggacataaggtaaaagtagtatgtcctgaccaagaaagatcagctactggtcatggtcttactttgcaatccccattaagagtggaaaaagctgacgaattatttggagagggtatagaagcttggggatgttccggcacacctgctgattgtgtcaaattagcactatctgaactcttggatcataaacctgatctggtactatccggaataaatcacggacccaatttagggacagatattttttgttcaggcacagtcgctgcagctatggaaggcactttagaaaatgttccttccatggcaataagtgttgctagttttaaatggaaaaattttgaatttgctggagaaattgcaatgaatattgccgaacaagcaattaacgatagttggccagcttcacttttattaaatttgaacatacccccctgcgaaaaaaacaagataaaagaattatcctggacaagattatcggtaagaaaatataaaaatcaattttccaaaagggaagacccgaggggtgatgattattattggttagcaggagaagttgttttagatcttaaatcgaaaggttacggtcctaagaattggccaagtgatgtatctcaaatacaagaaaataaaatatctcttacacctgtagaaccagatttattttggagaggtaatttagatgacttacctaaaattaataattcatttgtaaatccttcttaa

SEQ ID NO: 260702 - DNA, 736 bp, Unknown
  Bacterial polypeptide expressing nucleotide sequence isolated from the Sargasso Sea
aacaatattggtgtatcccatgataatttttatagagaaacagacattgtaaataacaatgaagtagaaagtgtaattaaaaaattaaaagatggcaattttgtctacgaaggtaaaataaaagcacccgaaggtgaagataattcaaagtgggtagaaagaaatcaattattatttaaatctactaattttggtgatgataaagatagagcattacaaaaagaagataaaacttggacttatttcgcaggagatgttgcgtatcacaataataaattaaatagaaaatttgatgttcttataaatattcttggcgctgaccattctggttacacaaaaagaataagttctgctgtagaagccttatcaggaaataaaaataaaataatttgcaaagtaagccagcttgtaaaacttattaaaaatggaaaaccttttaaaatgtctaaacgtaaaggtgattatataacagtagaagatttagttaatgaagtgggtaaagatgcaacaagatttataatgcttagcagaagcaatgaatctgaaatggattttgattttgataaggtaaaagaaaaaactaaagacaaccctctctattatgttcaatattgttatgcaagaatttcttcagtttttagaaatattaataaaaaagttactgacggtgtaaaaattaataaatttaattttatttatacagagtctgaaattaaaattttaagaaaaatttctg

SEQ ID NO: 260703 - DNA, 932 bp, Unknown
  Bacterial polypeptide expressing nucleotide sequence isolated from the Sargasso Sea
gctgtgccgctggctgatcacggtgcggaacaactaccgcgacgtcacctaccacaactggcggcacgccttcaacgtcacgcaggcagccttcacgatgatctcatccccgtcgctccggcggtcgctccggccaaaggagcggctggcgatcctggtggccgcgatctgccacgacctcgaccaccgcggcacgaacaacagctacgaggggctgctgggatcgcagctggccaagctctattccaccagcacgatggagcggcaccactttgacacgtgcatcacgattctgtcggcgcccgagaacaacatcctctgcaaccttcccgtcgaggactacaaggaggttgtcaggctgatggagcacgccatcctctcgaccgacctgtcccggtatctggccacgcgcgcgcagtactcggagctggtcgacggccggacgttcgactggaacaacgacgcgcaccggcggctgctccaggcgatgataatgacggcgtccgacctgtccgcggtcgcacgcccgttcaaggttcagcaccaggtggccgagatggtctactccgaattttacgagcagggcgacctcgagcgcgagctcggcgccgcccccggcgagctgtacgaccgcaacaacctgaacaagctgcccaagatgcaggtcggcttcatcgactttatctgcgcgcccgtgtacaactcgctggccaagcagtttcccgatctcgccgagatcgccgaggccgtggcgctgaaccgaaaggagtgggccgccaaagcggccgagatcggcgccagcggcaagccctaccggctctcggttgcggtcaagccgaaaaccacggtgaccaaccccggcaactcgacgattctcaagcggcttggcggccccccggggggtcctgacggccctggcggtcccggcggtc

SEQ ID NO: 260704 - DNA, 874 bp, Unknown
  Bacterial polypeptide expressing nucleotide sequence isolated from the Sargasso Sea
cggggtacgagggaccattgcagatctactcaaccgccgtttacaggagcggcctcccaccgttcgacgcacctccgcaggcttctcgcggctcctctgcgaggaggcgaactcgatcttcgacccgaagcgctccgcgaaggtctatcaggacatgacgaggccgatctcccagtattgggtggccagctcccacaacacctacctcgagggggatcagctcaccgggaactcgagcgtggaccagtatgtcgaggtcttcttgcgcggctgccgctgcgtggagatcgacctctgggacggcgtggacggggagcccgtggtgactcacggccacacgctcacgacgaagatccgcttcgtggacgtgatccgggcctgccgggacttcggcttccaggcctctccctatcctctgatcctctctctggagaaccattgcagcccgccgcagaaggtccggatcggggagatcctcaatcagatcttgggggaccagctgatgcgcctgcctgagggtgggctcgagtcggaagaggcgactctctgctcgccggaggaggcaaagtacaaggtcctcgtgaaggctgggctccacaagatcaaggaggacgaggaggagaaggaagaggaggaggtcatccagggtgaggtggactccagctccgacgaggacgcagcgggtaccgagcatcagaaagagggtggtgcggccgccagcacagggttggggtccgccctactaaatgccctacgtgggggaaagcagccgcaggccgacaacgtggtgaagaagtcaaagaaagattcactcgtcgtgggaggagcggcgagtcgcaagatgagtgtagtgaggaagcccaagggcggcggc

SEQ ID NO: 260705 - DNA, 391 bp, Unknown
  Bacterial polypeptide expressing nucleotide sequence isolated from the Sargasso Sea
catggccaatatcctcgtactcaagtccagcatcctgggccaatattcccaatccaacgccctgatcgacggttttctggccgaccatcagtccgacaccgtcaccgtgcgtgatctggcggccctgaacctgccggtactggatggcgagctggcttctggcctgcgcggtggtgagaacctcaatgagcgtcaactggccgtgctggcccaatccgacgagctggttgccgagttgaaggcaagcgatctggtggtgattgccgcccccatgtacaacttcaacatcccgacccagctgaagaactggatcgatctggtggcccgcgccggcgtcaccttccgttacaccgaaaccggtccggtcggcctggtggaaaacacccgcgcc

SEQ ID NO: 260706 - DNA, 598 bp, Unknown
  Bacterial polypeptide expressing nucleotide sequence isolated from the Sargasso Sea
atgtctaaagtcctagtgttaaaatccagtattcttggcggttattcacaatctgccttgttagttgaccacttgatcggtaaatgggaagaccaaggcgcgaccatcacagttcgcgatttagcgggtaaagatgtgttgccaatggttgatggcgaaattgcctctggcctgcgtggcggcgctgagttaaccgcacgtcagcaagagatgctcgacctgtctaacgccttagttgaagagttaaaagcgaacgacactattgtgatcaccgcgcctatgtacaacttcaacattccaacccagctgaaaaactggattgattttgtggcccgtgcaggtgtgactttcacttataccgaaaacggccctaaaggcttagtggaaggtaaacgcgccgtgttgatcaccacccgtggtggcgcccataaagatggtccaacggatcacattgtacctttcttaaaaactttcctcggctttatcgggatcaccgacgtggaagtagtttatggcgaagcgctgaacatgggtccagaagccaaccaaaaaggtatcagcgaagcgaaacaaagcctcgatgcgttaaccgtttaat

SEQ ID NO: 260707 - DNA, 598 bp, Unknown
  Bacterial polypeptide expressing nucleotide sequence isolated from the Sargasso Sea
atgtctaaagtcctagtgttaaaatccagtattcttggcggttattcacaatctgccttgttagttgaccacctgatcggtaaatgggaaaaccaaggcgcggccatcacagttcgcgatttagcgggtaaagatgtgttgccaatggttgatggcgaaatcgcctctggcctacgtggcggcgctgagttaaccgcacgtcagcaagagatgctcggcctgtcgaacgccttagttgaagagttaaaagcgaacgacacaatcgtgatcaccgcgccgatgtacaacttcaacattccaacccaactgaaaaactggattgattttgtggcccgtgccggtgtgactttcacttataccgaaaacggtcctaaaggtttagtagaaggtaaacgtgctgtgttgatcaccactcgtggtggcgcccataaagatggcccaaccgatcacattgtgcctttcttaaaaaccttcctcggctttatcggtatcactgatgtggaagtggtatatgctgaagcgctgaacatgggcccagaagccaaccaaaaaggtatcagcgaagctaaagccagtatcgataagttagccgtttaat

SEQ ID NO: 260708 - DNA, 610 bp, Unknown
  Bacterial polypeptide expressing nucleotide sequence isolated from the Sargasso Sea
actggagcctgacatgacgaccattctgcaaatcaattccgcggcacgttcgcaaggtgcgcaatccacgctgctggccaacgaactgacggcaaagctgcaacaatcgaaccccggcgcgaacgtcgtggttcgcgacctgctggccgatgcgctgccgcacctcgacgaatcggtgctcggcgcgttcttcacgccggccgacaagcgcaccgcggaacagaatgcgatcgtcgcgaagagcgatgcactgatcgccgagctgcaagcggccgacatcatcgtgatcggcgcaccgatgtacaacttcggcatctcgtcgcaactgaagacgtacttcgactggatcgcccgtgcaggcgtcacgttccgctacaccgagaacggtccggaaggcctgatcaagggcaagaaggttcacgtggtgacggcccgtggcggcaagtacgccggtacgccgaacgacagccagaccccgtacctgcgcacgttcctcggcttcgtcggcatgaccgacgtgaacttcatcttcgcggaaggcctgaacctcggcgcggatgcgcaaagcgcagcgctggccggcgcacgcgaagcgatcgccgccgcgtaa

SEQ ID NO: 260709 - DNA, 607 bp, Unknown
  Bacterial polypeptide expressing nucleotide sequence isolated from the Sargasso Sea
catgagcaaggtattagttcttaaatccagtattctggcagggtactctcagtctggtcagttgtctgattattttgttgaacagtggcgtgaaaagcactctgctgatgaaatcactatccgtgacctggctgcaaatcctgtaccggtactggatggcgaactggtgggtgcgatgcgcccgagcgatacaccgctgacaccgcgtcagcaggaagcgctggcgctgtccgatgagctgattgctgagctgaaagcgcatgatgtgattgttatcgccgcgccgatgtacaacttcaacatccctacgcagttgaaaaactactttgacctgattgcccgcgctggtgtgactttccgttataccgagaaaggcccggaaggtctggtgacgggtaaacgcgctgtggtgctgaccagccgtggtggtatccataaagatacaccaaccgacctgatcacgccgtacctgaacgtattcctgggctttatcggcatcaccgacgtgaatgtcgtctttgctgaaggtattgcttacggcccggaagtggcgtctaaagcacaatccgacgcgaaagccgctatcgacagcgtagttgctgcctga

SEQ ID NO: 260710 - DNA, 703 bp, Unknown
  Bacterial polypeptide expressing nucleotide sequence isolated from the Sargasso Sea
cttgccctcgccctcgcgcctcggcctcgcctcgttctcgtcctcgcctgctccctaccccgtcaaacatactccgcccgcgccgcctccgcaggtgctcgccgcgatcgcccacgatgccgaccacgacgggcgcaacaacgcctttcacgtctccacgggctcggagctcgcgatccggtgtactcccggcgccccaccggcgcccgcccaccccgaagcgccgcgacctcgccgccacgatctcgcgcgatctccccccaggtacaatgacgcgagcgtgctcgagaaccaccacctcgccacgtgctttgcgctgctgagctgcccggagtgtgcgctcctcgccaagctcgctcccgaggccaggcggcggctgcgcagccagatcatctcgctggtgctcgcgacggacctcgcgcacaacttcaccacgatcaacacgtacaagaccatgctcgacgagcatcacatcagccgcccgccgcccgcgccgtggtcgccatccgcgcccgcgacgccgccgggctcagtgcgctcctcgaccccacccgcctcggcgcggagcggcgcatcagtgcgcggcgcgtcggtgcgcggcggcgcggcgctcgcgggcgcgtcccgcgtcgacctgtcttcgcttcggcccgaggaggtcgcagccgcctccgcctccgcctgctcctcctgctcctcctgc

SEQ ID NO: 260711 - DNA, 1783 bp, Unknown
  Bacterial polypeptide expressing nucleotide sequence isolated from the Sargasso Sea
agggaagctactaaagtttctaattttagtagtagcggatcaaacctagtagattcaagtggttcatttgatggaaaccgtatttacgctgatgtttctaataatggtctaatattagacgcttctgtttctggtgattctgcgttggaatggccaaaaggaaccggagttcactcaatttacgcatctgcattatggatgggagccttagtgaatggttcgattcgaacaatcgttggagattatacacaagatatgggtccaggtccatggggtggtgacccgcttgctgcggttcatagaatctataaagtagaaaaaagcatgcttgcttcacctttagactttgctgacttccaagagtggccagtagagtttggtgctccttgggttgatgtagatggagatggagtttatactccgcttccaggtggtacagatcaccctgaattcttaggagaccaagtactttggttcgtaagtaatgatggtgacccagcgtataaacttaattttggtacatctcctatgaatgtagagattcaaacaacaatgtttggatttgatagacctgacgtttttggtgacatggtgttcttgaaacagcttgttattaataaaggttcagatgacctagtcgatacatatatgggactatggtcagaccctgacttaggatatgctggtgacgactttgttggttgtgacgtagcattaggtatgggatatgtatggaatgacggaagtgaccaatattatgatcctttagatactgggacacctgcagcaggatatgacttcttccaaggaccaatggttccttgtgaagatggagattcagaagaggtttgtccaactgagggtgctaaaatgtttggtactcgtcatccaggtatgaaaaaccttaaaatgtcatctttcgcattctacattaatggtgatgcgacttacactgacccgtctgatgaaacagaagggtatttttacttacaaggtttaagaaaagatggtagtgcttacccagctgaaatcgctggagacctatatgatcagagattctgtttctatggtgatccaaatgattctgcaggtcacagtacggctaaccctgttgatggtaactatgcagcatctgctgacagacgtttcctaatgagtgttggtccatttactatggcagcaggcgattcacaagaggttgtgtttggtattttccacgcagccggtggtgacgctttatcatctgtggcatatttaaaagaggttgatgctcttgctcaaacagcatatgacattgactttgcattgccagattctccaccttcaccaaacgtaacagctagtgcgtttgcagaccaagttattttggtttgggatgatacagccgaagattacgtagcaactagtgaggttgatcttgatgcaaacggtaacccaacaagctttgtgtttgaaggttacaatgtgtatcaatatgaaaccgcatctggtgctggtgctaagaaaagattagctacatatgatattgtaaatggagttactgaaatttatgataccgtatttaatgctgagcttggtgagaatattaatattagaacacagtttggttcagatagcggattagcacaattccactcaattactactgatggattaaatggtaattcaaaactgattacaaacagagcatattactatgctgttacagcatatggttataatgcggacggtattccaaagacattggaaagtagtctagtatatttaactgtaagacctgaag

SEQ ID NO: 260712 - DNA, 1045 bp, Unknown
  Bacterial polypeptide expressing nucleotide sequence isolated from the Sargasso Sea
atgaccatcgactttagtaaaaaaataacccccgcgcgtatgtacagaaccacctctaatttacaaatggcgctcgaaagcgaccgtggccgcataatgaacagcgccgctattcgtcgcttgcaacaaaaaacacaagtatttccgcttgagcgaaacgccgctgtgcgttcaaggttaacccactcgcttgaagtacaacaagttggccgatttattgtacaacgtatttttgccaacctaagctttgagcaacaaaaagattatggcttaaccgacctagaacgcccactcgaaagcctagtagaaatggcttgcctaatgcacgatataggcaacccaccgtttggccactttggcgaagctgcaataaaccactggtttaatactaatttaaccagtgtaacgcccgagcgatgccgcgagccaaacaccggcataggcgttatttttaagcacctagcgcaagacatttgcaactttgaaggcaacgcccagggcattcgtattattcactcgttgcaaacccttaacctaacctacagccaaagtgcaggtattttaaaatacacccgcccagcagggcttgatgtaaaagacataccccaaaataaaaactacttaatgaaaaaagtaggctactactacagtgaaaaagcctttattgaagcattacaaaacgagttaaccatagagccatactgtcgccatccggccagttacataatggaagccgccgacgatatatcgtactgcctagccgacatagaagacgccgtagaaaaaggcataataaccattgagctactgtgcaccgtgcttaaaaatcactatcaaaaagtacttataaacctaaccattgacgacaccgaacaccaagactttgttagcaaagcagtaaactacgcactagagcgtggcaaagcacaaccgtataactttaatagcgaattttttatatacctgcgtgtagccctgctgcacccgctggttaatcatgccgcaaaacgctttatagaaaacatagaacccatttatcacggcg

SEQ ID NO: 260713 - DNA, 523 bp, Unknown
  Bacterial polypeptide expressing nucleotide sequence isolated from the Sargasso Sea
atgactaagattgattttcgcaataaaattaactggcgtcggcgctatcgttcaccgcagggtgtcagctccgaacatgagattctgcgcatttttgaaagcgatcgcgggcgcattatcaactcaccggcgatacgtcgcttgcagcagaaaacgcaggtgtttccgctggagcgtaacgcggctgtccgtacccgcctcacgcactcgatggaagtccagcaggtggggcgttacatcgccaaagagatactgagccgcttaaaagagaaaaagctgctggaagtttacgggctggatgacttgaccgggccgtttgaaagtatcgtagagatggcctgcctgatgcacgatatcggcaacccgccgtttggtcattttggtgaagcggcaatcaacgactggtttagccagcgtctggccccgaaagatgcgctgagtcagccattaagccatgatcgctgtgaagttgccgacctgcggttgagaaagggcgaagagacgctcaatacgctgcgcagca

SEQ ID NO: 260714 - DNA, 822 bp, Unknown
  Bacterial polypeptide expressing nucleotide sequence isolated from the Sargasso Sea
catgcgaacaatacttctgaccctattcggtgtgtgggcgatacacgcggctgcggccgcacccaattatgtgcttatcttttgtgacgatctggggtacggcgacttggggtgttatgggtcggcgaagaatcgcacgccgcggattgatgcgatggcgaaggaggggatgcggttcacgagttttctttcgtccagcccggtgtgcacgccgtcgcgggcgagcctgttgactggctgctacgcgcggcgcgtgggaatgcatgaggatttcaccgggcactgggtattgatcccgcggagtcgacgtgggatgcatgccgatgaatggactttgcctgaaatactcaaggccaagggctacgcgacggcgtgtatcggcaaatggcatttgggcgatcagccgccacatctgccaactgcgcacgggtttgatgagtactatggcattccgtactcgaacgacatggccagcgcgcgccgaggcgatccaccgttaccactggttcaggacacaaaggtgattgaggcgccagccaatcaggccacactcacaaaacgttacacgcgtgaggcgattcagtttattgagcgcaataaatcgaagccgttctttctatatctgccgcacacctttccgcatctgccgctctttgcctcgaaggagtttcacggcaagagtgccaatggacggtacggcgattcggttgaggagattgattggtccaccggcaagattctggatgcgctcaagcaacatggcttggacaagaacacgctggtgattttcacctcggacaatggctccaacggtcgtaacgg

SEQ ID NO: 260715 - DNA, 552 bp, Unknown
  Bacterial polypeptide expressing nucleotide sequence isolated from the Sargasso Sea
cttggcacatgagggggttcgttttacacgtgcttacgcacatgccgtgtgttgtccatctcgggcgatgttattgaccggtcgttatccacagcgttgtaacgtcaatatgtggacgcaaggaaatgcaaaaggccccaaggggagaaatcttttgctttcagaggtcacgcttgcagaggctttgcaggcggtcgggtaccagacggccctcttcggcaaatggcaccttggtgcggacaaagatcatggtccgacgaggcaggggtttgacgagttttttggacttcggggaggatttatagacaactacaatcatttttatcttcatgaaaacggttttcatgatctttatgaaggcgcacgagaagtttttgcacagggaaaatattttcctgatctgattacacgtcgggcactgagttttattgacgaaaaccattcatcacctttttttctcctgctggcattcaacacgcctcattatccagaacaatcagatgccagatttgatgatcgttataaggatatgaaaatgcctcgtcagtccta

SEQ ID NO: 260716 - DNA, 1326 bp, Unknown
  Bacterial polypeptide expressing nucleotide sequence isolated from the Sargasso Sea
gatcaacaacgttggatacttctggtttacatggcaatccattatcattgatggagaacttcgatcattatgcagtcgaaggtacacatctttataattcatttacatgccaaccagtttgtggacctgcaagagcttcattacaatcaggaatgtatgcaacaaaaactggatgttttaaaaatagaatacctttaaaaaaaaatattaaaacccttgcaaaatacttatcaaaagaaggttatgccactggatatattggaaaatggcacctcggctcttctgaaccagttaaaaaagaggatagaggtggttacgattattggttaggatcaaatctattagaatttacttctgatgcttatgaaacatatgtttatgatgggcagaataaaaaagtatttcttcctggatatagagttgatgcaataactgatgccgctataaactttataaaactaaatcaaaaaaaaccattttttctctttgtttctctcattgagccacatcatcaaaataatacagatgattatccaccacctattggatacagagaaaaatatacaggtaagtggtcaccaccagatctttcatctctagttggatcctctcctcgacatttaggaggttattatggaatggtgaagagaatagatgaagcttatggcagaatgattgatgttattaaaagtttaaaattatttgatgatagtgcaattatttttacatctgatcatggaaataattttaaaacacgaaataaagaatacaaacgttcatgtcatgaaagttcaatacgggttcctacttctttaattggaaatgtgtttcaacaaggtggacgtataaaagaactaatcaatattttagatattcatgcaacaatattggatttggcaaatgtcaaaaatacctctcattgtgatggtagatcagtattgcctttagtgaataaaatttccaaaaaatgggataacgaaatttttatccaaattagtgaaagtcaattagccagaagtttaagaactgaaaaatggaaatattgtattgctgatcaagattctaatgggagtgataaaccttcatctaatcaatatacggaaacaaatttatacgatcttgatgctgatccgtacgaattaaataacttaattggtattagtacttatgatgaaatagtaaactccttaagaaaaaagattaaaagtaaaattagaaaagttgaaaatattacaactaaaattacaaaagctaaaaatgtaaataatcctggtcaaatgggattaaatcctgattcttttcatagattaaagaaaaaactttaat

SEQ ID NO: 260717 - DNA, 1072 bp, Unknown
  Bacterial polypeptide expressing nucleotide sequence isolated from the Sargasso Sea
atgaaaaaaataatttttctttttttagctattataataagctttattatttggcaaaacagagtaaacgtagtcatatggtccattccaaaaattctaaatattattaaaccgatttcatccgaaggaagctcaaattgggaacaaggtccaattgaaaaaaataattcagatcaaaggccaaatatcatattaatattggctgatgatttaggtttcaatgatatttctttttacaatggaggagctggaagtggatctttaatgactcccaatattgatcaaattgctacggatggagttatttttgaaaatggatatgcagcaaacgcaatgtgcgcccaatcaagagcatctataatgacaggccgttactctacaagatttggttttgaatttactcctttatttcctggagcaaataaattaatggaatggattattaatattgaagatccagaacttaaagtaaaatttcaaaaagacgcctatgcagatttagaaaatgttttttcagctggagtaccatcatcagaaattaccatagctgaagtattaaaaaattctggatattatactgctcatgttggaaaatggcatcttggaagggttgatggaagtcatcctaatgatcaaggttttgatgatagtctattaatggaaggtggattatatcttcctgaaaatgacaaatcagtagttaatgctaaatttgataatcctgtcgataatatggtttgggcaagatctcagttcagcgtatcttttaacaaaggtccaatctttaaacctggaggatatcttactgattactatactgacgaagcaattaaagtaattgaaaaaaacaaaaatcgtccattttttctttatttggcacattgggccgttcataaccctctacaagccttaaaaaaagacgtagatgccataagtcatcatacaaaacctcacaatcttcaagtttattctgctatgattagagctttagataggagcgttggaagaatacttgatacattagatcaaaatgatctttcagaaaatactctgataattctaacaagcgata

SEQ ID NO: 260718 - DNA, 1603 bp, Unknown
  Bacterial polypeptide expressing nucleotide sequence isolated from the Sargasso Sea
tttgctttggcaatttaaggtcaatataatcatttgggctttacccacagtcgttaattttataaatcctgttcaagataacattccaacaaattggccagagggacctttagagagactagatcaaaatgattcgaggccaaatattattttgattttggcagatgacatgggttataacgatatctctttgcataatggtggcgcagcagacggaaccttaaaaactccccatatagattcgttagccaaaaatggtgtttggttcaataagggttatgcggcaaatgctacttgcgctccatctcgagcttctattatgactggcagatatgcaacaagatttggatttgagttcacgccagtacctgatttaggtcaattggttgttcgctggcttgctgaagaagatgatgacgatttaagagcaagaatagataatgagatagcaagaaatctgccctcatttatggatcagggcatgccctcagatcagataactattgcagaaatattaaaatcacaaggctactatacagctcatattggaaagtggcatctaggacattcagctggaatgtcacctcttgatcagggttttgatgattcattgtcattagcaggtgcttattatcttccagaggaccatccagatgttgtgaatgcaaaatttgaaacaagtatagataagatggtttggtctggaagtcagtatgcagcgcgatttaatggcggtgattattttgctccagataaatatgttacagattactacactgatgaggcaattaaagttattgaaaaaaataaaaatagacctttttttctatatttgagtcattgggcaattcacaatcctctccaagctatcagaagtgatgtagaccaaatgagtcatatgtcaggtcacaatttaaaagtttattctggaatgataagggcgcttgatagaagtgtaggagagataattaagacattaaaagaattaaatatttatggcaggactttaatttttttcaccagtgataatggaggggccaattacattgagttacaagatatcaataaaccatttcgtggttggaaaatcagtttctttgagggcggaattagggttccatttattttaagttggccagatcaaattgaccccggattaaaatttgataaaccagttcatcattttgatatcttctcaactattgcttctgctgcaaatgtaaagataccaatggacagaaaaatcgatggagtggatttaatgccttatataaagggagagaaaattgctaatcctcatcaaactcttttttggcgatcaggaaatcatcaagcagttttgcatgagaattggaaatatttagtaagcaaaaaagaaggcacgaaatggttattcaatactgagctagatccattagaaagaaacaatttaattaacatcaatccaaaaaaaacctcgcaaatcgaaaaccttttagtaacatttaattccgaacaagcagaccctttatatccctcaagtaccgagttaccagttttaatagataagtatgatggccaagtcatagaagatgcagatgagtatatctattggtcaaattaa

SEQ ID NO: 260719 - DNA, 369 bp, Unknown
  Bacterial polypeptide expressing nucleotide sequence isolated from the Sargasso Sea
gatgaatcaatcacaacaaagcgcatggtggaaagaatcggttatttatcaggtgtacccaaaaagcttctatgacagcaataacgatggcgttggcgatatcccgggtattatcgctaaactgccgtatctgaaaacgctgggcatcaccctgatttgggtctcgccgttctaccgctcgccgggagcagataacggctacgatatcgcggactactatgcggtgaatcccgatttaggccagatgcaggacgttgataacctgattaaacaggctggcgagctgggcattgaggtaatggtcgacctggtggttaaccataccagcgatgaacacccctggtttcaggccgcgctggccgaccctca

SEQ ID NO: 260720 - DNA, 890 bp, Unknown
  Bacterial polypeptide expressing nucleotide sequence isolated from the Sargasso Sea
gtcgccctatcgcgactactacatatgggccgacgagcccgacgacttcatggagccgattttcccgacggtcgaggacagcatctggacttgggacgaggaagccagccagtactaccgccatctgttctacaagcacgagccggatcttgacctgaccaacccgaaggtcatccacgagatcgagcggatcatgtcgttctggctgcggctgggcgtctccggtttccgtatcgacgcggcggtgcacatggtgcgccaggccggcggcggtgaactggagaagggctactggctactcgaacacatgcgcgacttcgtgaccatgcgccgacccgagaccgtgctgctcggtgagatcgacactgatccggaaaaatacgtcgaatacttcggcgacgaggccgatcgcgtcactctgctgctggatttctggaccaacaatcacctgttcctggccctggcacggcagcaggccgagccgctggtgcacgccctgaacagccaaccgctgccgcccagccattcgcaatacgcgctgtggatccgcaaccacgacgagctgagcctcgaccggctggaggaggatgagcgcaacgaggtgatggagaccttcgcccccgacgagaacatgcgcgcctacaaccgcggcattcgccggcggctcgcgccgatgctcgacggcgacgagcgacgcatcgcggccactcatgcgttgctgttctcgctgcccggcacgccgatcatccgctacggcgaggaaatcggtatgggcgatgacctcgaccgccccgagcgactggccgtacgcacgcccatgcagtggtccaacgaacccaacgccgggttctcctgtaccaaaggtgagctggccgcaccggtgatcgacg

SEQ ID NO: 260721 - DNA, 781 bp, Unknown
  Bacterial polypeptide expressing nucleotide sequence isolated from the Sargasso Sea
ggtgaattcagtgatagtaaatacaatggtaaagggacatatacatatactaatggagagaagtggagcggtaagtggaaagatggagaaaaggtaactggtaaaggagtggttaactacagcgatggttccaagtataaaggatcattagaagatgggaaaagaattggttctggggaattgcatcttatagatggtaaaagatatatcggagagtttgtaaacaatgaatatagcggacaaggagagttgcgctatccagatagttccaagtatgtaggtgaattcagtgatagtaaatacaatggtaaagggacatatacatatactaatggagagaagtggagcggtaagtggaaagatggagaaaaggtaactggtaaaggagtggttaactacagcgatggttccaagtataaaggatcattagaagatgggaaaagaattggttctggggaattgcatcttatagatggtaaaagatatatcggagagtttgtaaacaatgaatatagcggacaaggagagttgcgctatccagatagttccaagtatgtaggtgaattcagtgatagtaaatacaatggtaaagggacatatacatatactaatggagagaagtggagcggtaagtggaaagatggagaaaaggtaactggtaaaggagtggttaactacagcgatggttccaagtataaaggatcattagaagatgggaaaagaattggttctggggaattgcatcttatagatggtaaaagatatatcggagagtttgtaa

SEQ ID NO: 260722 - DNA, 331 bp, Unknown
  Bacterial polypeptide expressing nucleotide sequence isolated from the Sargasso Sea
atgagttttgacgcggtaaaacatcaagaaagaattcaaaaaattgaagaatttgccgcacaaaaaaaagatgtgataaaaaaacatccatggcgagaacattaccattttcaagcacctgttggttggatgaatgatcctcatggtttgatccaatttaatggtaagtatcacctgttttatcaacaccatcctttcagtgggaaatggggcaccatgcattggggtcatgctgtaagtgagaaccttatacattggcagcatttgcctgaagctctagctccaagtgaatcgtatgatggctgggacggtggaggtattttttcctggt

SEQ ID NO: 260723 - DNA, 155 bp, Unknown
  Bacterial polypeptide expressing nucleotide sequence isolated from the Sargasso Sea
tttgcgccctcaagtccattttactccaaaacgcatgtggatgaacgatcctaatggtatgatttttcaaaatgggctctatcatcttttctatcagttccatccagactccatgatttggggggcctatgcattggggtcatgctacaagtcga

SEQ ID NO: 260724 - DNA, 908 bp, Unknown
  Bacterial polypeptide expressing nucleotide sequence isolated from the Sargasso Sea
cgtctcattgcctggactcgcatttttccgaacggtgacgagcagcaccctaacgaggcggggctggcgttttacgaccggttgtttgacgagctggccgcgcacaacatcacgccgctggtgacgctgtcgcactatgaaatgccgtgggggctggtgaagcagtacggcgggtggggcagccgtcagactatcggcttctttgagcgctacgcccgtaccgtgtttgcgcgctacaaagagaaggtcaagctgtggctgaccttcaacgagatcaatatgtctctgcacgcgccgatgaccggcgtcggtctgccggaaaccagcagcaaaggggaggtgtaccaggcgatccaccaccagctggtggccagcgcgctggcggtgaaggcctgccatgagattatcccggatgccagaatcggcaacatgctgctgggcggcctgatgtatcccctgacctgcaagccggaagatgttctggagacgctgcaggaaaaccgcgcgtggcaattctttggcgacgtgcagtgtcgcggcgcctacccggggtatatgcagcgcttcttccgcgacaacggcattcagctagaggtcactgacgccgaccacgaggcgctgaaatcgaccgtcgattttatctccttcagctactacatgacgggctgcgtcaccgcggacgacgccctcaaccagcaggcgcgcggcaatatcctgagcatggtgccaaacccgcatctggccagttccgaatggggctggcagattgaccccatcggcctgcgtactctgctaaacgtgctctgggatcgctatcagaagccgctgtttatcgtggaaaatgggctcggggcgaaggataaaccggacgcagatggcacggtgcaggatgactaccgcatcagcta

SEQ ID NO: 260725 - DNA, 418 bp, Unknown
  Bacterial polypeptide expressing nucleotide sequence isolated from the Sargasso Sea
atgcaaactcgaaaggtcgcaatattcaccggaaatagggcagaatatggacttcaatttcctgtattaaaggcgatagctgaacactcttgcttagattattatttaattgtctccggtgcgcatttagacaaaaaatttgggcaaactcttgaggagatcaaaaccgatggctttcgcatagatgcggaaattaaaatcgaaatggatgcaagttctacttttgcttcaacccaagctatcggttctggtatactggaaattagcaaagtattgggcaagctgaatccggactttaatttagtatatggggaccgttttgaaagtttagctgccgtaattgcttcgagccaaatgaatataccgactgctcacattgaaggtggtgatttgacagaaaggtggggcactggatgac

SEQ ID NO: 260726 - DNA, 469 bp, Unknown
  Bacterial polypeptide expressing nucleotide sequence isolated from the Sargasso Sea
tactcctactcctactcctactcctactcctactactactactactactactactactactactactactactactactactactactactactactactactaccacagtactactactacaatactactactactactgctactgctactgctactgctactgctactgctactgctactgctactgctactgctactgctactgctactgctactgctactgctactgctactgctactgctactgctactgctattgctactgctactgctactgctactgctactgctactgctactgctactgctactgctactgctactgctactgctactgctactgctattgctactgctgctgctgctgctgctgctgctgctgctgctgctgctgctgctgctgctgctgctactactactactactactactactactactactactactactactattggtactag

SEQ ID NO: 260727 - DNA, 964 bp, Unknown
  Bacterial polypeptide expressing nucleotide sequence isolated from the Sargasso Sea
tgatgcttttgtagagtacagctatcacacaagtaaacatcttggagatcgagttaggcattggataacccacaacgaaccctggtgtgtaagccacattggatatgttgccggccataaaccacccggtctgaaaaataactgggcaaaaagcttatccgctgcacatcatttgctactttcccatggtatggctctacctgaaataagaaataatgtggaaaatgcaaatgtagggattacgctgaatttaaatacagcgataccggcttcccccagtgaacaagataaaaaagcctgcaacttttttgataatatgtttaataaactttttttagagcctttgtataacaaagaatatccaacagagctctttgacgaactacaacatcgaagggatattaccaatgaggatttgaattttatcaaaaacggagaccttgaaataattgcacgagagaccgactttttaggcgtcaattattacagcagaggtgtgataagaaatgaagaaataagtgaagatgaaaatatgcaaaaaaatgtagagatggggccaaatactgattttggatgggaggtctatcctcctggcatatatgatcttttaatgaagctgaaaactaaatatggcgttggaactatttatattacagaaaatggatgctcttattcagatgggccggataaagaaaataaaatacatgatcaacgaagaatagactatcatcacacccatttaattgagatacaaaaagctataaacaatggtgtagactgcagaggatattttgcatggtcattgatggacaactttgagtgggcccaggggtttagccaaagatttggactcgtttgggttgactttgattcattggagcgcattccaaaagaaagttaccactggtacaaaaattatatttcaaataataaaataagagaaaatgcaaatgaattcatctaa

SEQ ID NO: 260728 - DNA, 388 bp, Unknown
  Bacterial polypeptide expressing nucleotide sequence isolated from the Sargasso Sea
atgtcactaccatcacgtctgcctgcgattttgcaggccgttatgcagggccagccgcgcgcgctggccgatagccattatccacgctggcaccatgcgccggtgaccgggctgatgaacgaccccaacggctttgtcgagtttgccgggcgctatcatctgttctaccagtggaacccgctcgcctgcgatcataagttcaagtgctgggcgcactggagttcagaggatctgctgcactggcggcatgagcctattgcgctgatgccggatgaagagtacgaccgcaacggctgctactccggcagcgcggtggataacaacggtacgctcaccctgtgctataccggcaacgtgaagtttgacgacggcggccgaaccgcgtggc

SEQ ID NO: 260729 - DNA, 278 bp, Unknown
  Bacterial polypeptide expressing nucleotide sequence isolated from the Sargasso Sea
aatggatgaaatttttccaaaggattttttatggggtactgccacagcaagttatcaaattgaaggagcggcaaatgaagatggaaaaggaaaaagtatatgggatatattttctcatacaccgggtaaaattaaaaataatgaaaatggagatgtagctacagatcattatcacagatataaagaagatatatctctaatgaatgatataaaattaaatgcatatagattttcaattgcttggactagaatatttccaaatggaaaaggtaaagtaa

SEQ ID NO: 260730 - DNA, 490 bp, Unknown
  Bacterial polypeptide expressing nucleotide sequence isolated from the Sargasso Sea
gccaacgccaactccaacgccaactccaactcagggtctgtccctgcttgaacaggctgctgctcagcggcagcaacggcagcaggatcttgacgccagagctctggagcttgagccgacaccaacaccaacaccaatttcaccgccggttcaaaccgctgaggtttccgacgaaccctccctcggtgacttcgatgaggatttcacctggtcagcggaggtgctcgccgcgcagggacggcgtgtggatgacatctcgttggaggagatcgattggctgggtcgactccgccgtggccttgaaaaaacacgacagggattcgtcagcggtctgctggagaacctgggtgacgatcccctcacgccggaggtcctcgatgatctggaaacactgctcctccgcgccgatgccggggttcaggcaacggatcaggtgcttgatgccctgcgtcagcgcatgaacgtggaggtggtggatcctgctgagggc

SEQ ID NO: 260731 - DNA, 445 bp, Unknown
  Bacterial polypeptide expressing nucleotide sequence isolated from the Sargasso Sea
ttgaatcatcaactaaatttcatgaaaaaattccttatatcaatatcactcttacttatctcctgcgcggacacgattaccaccaaaaatttggctctgactaattcaattccaagtaagtggcagcatgatattccaaattcgacagagattgctggtaaatggtgggaagcattcgaggattcaactctaaataatgtttttcaagaatttcattcaaatagtccagatctaaaaagtattgcatcaaggctagaggctgctaaacaagtttacaagataagctcatctacaagactcccatctatgaatctgggcttaactggttcaagccgtaagcaaaatcttaccgcctttgggttatcggaggatttttttggagggggtcaaaacggagaccagaactctggtgagagtgacgttacaagttttagctcccagtaat

SEQ ID NO: 260732 - DNA, 1318 bp, Unknown
  Bacterial polypeptide expressing nucleotide sequence isolated from the Sargasso Sea
gtactgggacgtgacgaacccagaggtgcgcgagtggtgggcgggcaagttttcgctctcatcctacgcgggttcgacgaaggatctgtacatttggaacgacatgaacgaaccgtcagtgtttaacggtccggagataaccatgcaaaaggatttaatccatcacggcggcgtcgaacatcgcgacgttcacaacgccttcggcatgtattaccacatggccaccgccgagggtatcaaacgccgcaatgacaagcgtccgtttgtcctctcgagagccttctttgccggaacgcagcgcgttggacctatctggactggcgacaacgccgcggattggaagcacctcgcagtgagtcttccgatggtgttgacgctcggtgtcagcggcttgacgttcagtggtgccgacgtcggtgggttcttcggtaatccggacgcagaactgatgactcgctggtaccaagtcggcacgtactatccatttttccgcggacacgcgcacttggagacgaagcgtagagaaccgtggctcttcggcgaagagagcacggcgatcattcgcatggcgattcgcgagcgatacgcgctcctgccgtacatttacacgttgtttgaagagtctcacagggtcggcgcaccggtgcttagaccgctgtggtacgagttccccaacgatcagagcgcgttcaagagacaagactctttcatgctgggatccgccattttggttcaaccggtgttaactcaaggcgcgacgtcggtctcggtgtatcttcccgcgggtgtgtggtacgaacaaaagtcgggggcgcgacacgtgggcccgaagacgatgaacgtcgccgtcacgctcgaagacgtcccggtgttcctgagaggcgggacgatttttgtgcgcaaggagcgagctcgacgtagttcgacggcgatgagaggggacccgttgacggtcatagtcgcgcttgatgagaacggtcgcgcctccgggacgtactacgccgacgacggtgagagttacgagtacgcctcggcgcgctcggcgttcgcgcgtcgttctctctcctttgaaaacaatcgcttcgccgtctcgggcgcctccgcggcggacggaggtagcggtaacgcgaaggcattcacggatgactccgtcatcgagcgcgtgtcggtgtacggcttgtcttccaagcacacgggcgcgacgtgctccacgggcgacgagctcgacattgctagaatcggacgcgacgccgcggcgcacattagacagcccaaccaggccatttcgaaagatttcaccatctccgttcgcagataa

SEQ ID NO: 260733 - DNA, 1357 bp, Unknown
  Bacterial polypeptide expressing nucleotide sequence isolated from the Sargasso Sea
tttgactaattcaattccaagtaggtggcagcatgatattccagattcgacagagattgctgggaaatggtgggaagcattcgaggattcaactctaaataaagtttttcaagaatttcattcaaatagtccagatctaaaaagtattgcatcaaggcttgaggctgctaaacaagtatacaaaataagttcatctacaagactcccatctatgaatttgggcttaactggttcaagccggaaacaaaatcttaccgcttttgggttatcggaggatttttttggagggggtcaaaacggagaccaaaactctggtgggagtgacgttacaagttttagctccagtaattttggtttaaatctatcgatgcagtgggagattgacctttggagaagagttttcaatcagacaaaggccactgaaaaagattacgaagctgttaaatatgatctttcttacatcaccttctccatgcaggttcaggtggcgaagttgtacttctcagctgtcgagtcctatgagcaacttaaattagctgaagaaaccctagaaagtgtttctgagcttgcggatatggtatctgcaagatatgaaaaaggtttacggtcatctttagatgtgaggcttactcaatcatcagtttcatcatcgaaagctttattagaaaataggcggctgggccacaccttcttattgagaaggcttgaggcaatgttgggtgagtaccccgatggtaattttttagtcagtagcaatttgccaacaatcattccaacggttcagccaaacattcctgctgacatattggatagaagaccagatattaaatcagccatcgcaaaggcccaggcagccgcatatcgcactgctgaatctattagctcttatttcccgggattgatattaaccagcacggcagggacttcatctagcgatcttaaggatattctaaatgaagactatcaggtatggtcacagggtgttagtcttgggcttccaatatttcaaggtggtagaattagggcaaataaaaaaatgaatgaggagcttcaaaaagttgcagagcaagatataatcaaaataattatcagtgcattttcagaggttgagcagagcctcttttctgagaaatcaaacacagtcctactagaggcttactcagatgcagcagggcaagcagaggcggcatttaaactatctcgcgaacgttatgactcgggcctagtagggttgattgcagttttagacagccagcaaagatggtttcaggcaagatctcaggtgcttatggctaagaaaacaaaaattgacacaaggctgaaccttattctagcgcttggtggtgaattcaaataa

SEQ ID NO: 260734 - DNA, 1351 bp, Unknown
  Bacterial polypeptide expressing nucleotide sequence isolated from the Sargasso Sea
ctggcggcggtcaaccggttgcagatcaatgccggctcccgtcaaccggtggccccgaccccaacgccgaccccaacaccgaccgaggtgcagcaggaggcgcaggcgacagccacggcgaccaaaccggcgcagcagcatgaggtactggccaaggcggccgtggatctcaccggtctgcatggcccccgcccgggcagcaaggccgtgcctgagttcagcagccacttcgacggttcttccatcggcatagagaacgagctgactgggctggtggtggcgctgccgaagaactcggcacagaagtttggttacgtgcacgatgcggcaggcaacccgctgttcatgctgaccaaggacatgaaccagggggggtacaccaatcccgccgggataagcgatgtcaaagggatcaaccagtggcagacccataccatcgagctggtgacctatccaagcgagatgcaggatcagcaggcggtggaagcacgcaaggaggccatgctctggcttgccagagagttcacccagcacatcagccagaccaatcacaccagactgtccgatctcgtgagcgaggatggccgttttactctggtcatctccaatgccaaccacgtgatcgccgccggcaatggcgccgcccgtgacggtcaggggcagaccattggcatgacgccgagcggccagcaggcgaccgtggcggtcagcgccaaggcgtttggtagcggctcttcccaggagatccggctgctggagtccgctccctggtatcaccccgagctgaaggatctgctgttgtccaacacggccaatgtgcagtgggaggatgcggccaccgcacagaatgtgtttgcctacctcacctccatctacggcaagacggccgatctggcccgggaatatggcattcacatcaatgactgggatccgctggcagaagggatcacgcccaacgcccaggggttgaccgatcccaaggtcaagaatgcctgggaaatcctgccgagaaccaagccggtagccatgttggccctgctcagtgcccatgaccgcaagctggtgtccgagcagatcctggcgaccctcaagtcggcctattcagcggcgctggcacagaacatctatgactacttcaagtttggcggcgaagtggccgggcatggcatcaacaatgcgaccacgggggacagcaagcaccccgagccggccatcctgttcgagttccgccaggtaccgaacgagctgagccagtttgtgccgaagtcggaatcgaccgccagggtggaggtgaagaccctcgaccagttcgacccggtcagccgccgcaccatagtggcggcaggaacaa

SEQ ID NO: 260735 - DNA, 1462 bp, Unknown
  Bacterial polypeptide expressing nucleotide sequence isolated from the Sargasso Sea
tttgggttgttcagatactgaaatagaatctacaaatgttgtggaaaataatattttaccaacacaaactccacttgatagagtatcagatatttctgtacctaatgaaattattcctgaaataaaaaagcaagaaaattcacaaaataaaaattttgaaagaaaaattgtaccaacaatagatagatcttccaattcttcaaaatataatgaagaatacgtttataaaacatcaaccccaactgcgacccctgtttcacctgatgtatatattccagatagtagcttagagcagttgattagatttgagattaataaatctgaaggaaatataaccgaaaaagatatgcaaggattgaactatattttatctaaaggagaattagagccaatttcagatttaacaggtttagaatatgcttataatcttacaagcatagagatattagaaggtgcagttgcaaatcttacacctataagtaacttaactaaaatttctagattaaatttatatcaaaataatgtcagatcaattgagccaatatctggattatttaatttagaatatcttgatttaggctctaacatgattagtgatatttcttcacttgaaaacataaattcattagaatttttagatatttctgaaaataagatttctaatatttatccaatatctgacaaacctttattacataccctttatgctgatgataataatataggagatgctaggccaatagttacacttaaagacttaagtttgctgactattcaagataaccccataaacgatataagagccttaggccccatgtgttggtcaggtagagtttcttgcgatattataattcctacgccgactcctaccccaactatgactcccactccaactatgactcctacgccgactcctactagtacccctactcctactgcaactcctactatgactcctacgccgactcctaccccaactatgacccctactccaaagccaaattctacagcaactgctactcctactttagttcctactcctactatgactcctactcctactatgactccaatgattcataattgggcctatactacattttctcagactttactcgatccaagcataggagacacaaatgaatttaacctagaagatggacaccccgtaagagactttgacaatgacggtgacataaatgatgaagtctatgtattcatatgtccagttggaacagatactgaagatattacttggagtaaatcctcatataaatctaatgagaacagctttactacaccttatgaatatggaactaacggtattggatatggatttgctgattgtgaaggaatgagagaagttgatatagatattgtaagtgtggcaaatggtaactcacatgcaaatgctaatatttcacctggttgtaacaataacttttccagaacaagatactga

SEQ ID NO: 260736 - DNA, 2017 bp, Unknown
  Bacterial polypeptide expressing nucleotide sequence isolated from the Sargasso Sea
aagatctgatgttgaagatattcttttaatgaaacaatttaatgttaacccttttcgtacctcgcactatccaaatcatcctaggtggtatgaactatgcaatgagtatggtctctatgtaatggacgaggcaaacctggagtctcatgcgttctggtctaagtttacactagaccccgtttggagacctgcattcgtagatcgagcgaagagaatggtattgagagatgtgaatcacccttcaataatattttggtcacttggcaatgaagcaggatacggtccgaaccatgatgcaatggccgaatggatacgcaactacgatccctctagactgattcactatgaaggaaaggaacccggatatggtcctctgccgaatcattacgatattattgcaaatatgtatgcctccgtggatctcatgaaagagcttcatgatgaaaatccatctaggcctgtaatactctgtgagtattcacatgcaatgggcaatagtaatggaaatatttttaaatactgggacgcgatctacaaatatcctcgcttgcagggtgcctttatctgggactgggtagaccagggtttaactcgcaaggatagccatggggagtattttgtttatggtggtgattttggtgaaaaactacatgatggaaacttttgcttgaatggagttatttctccagatagaaaaccacaccctgcgttgtatgaggtaaaattccaccagcaaaacataaaagttacttgggatggaatagacaaaaatattttcatgatcgagaacaggaatttctttgtagaccttagtcatgtgtatgggaagtgggagttaattgaaaatgggaaaataatatcatcagggagtattaatactgactacataggcccgcagtcaaagcaaatctatgaactaccgccgtttgacctatcccatacgaatagggagtatgctgttaattttagatttgcacttaaaaatgatcactcatgggcagagagcggtcacattgttgcatccgaccaggtcatcattcagagatatgatggtccaagatatcgaaaaggtggtaaacaaaataataaaaaagttcaggttaaagaaaatggcgatagggtagtggtcagtgcagtcggaagagattttgattttgatctttctacggggcaacttgcacaggtaacaaaggcaaatgaatcgttcattgtgaatccgattattcataatatatggcgagctcctactgataatgatgagggcggagatggtaaaagcttcgccagtcgttggcttaagagtggttataatgatttgaaaaggcaggtggtcaatgtcaatagttcattcacagatgatggcctatttcagatatctgtggatgaaaaatactctagtgactctgctaatattttagtaaatctggtttataccattctccaagatggtgaccttcatattaccgggaatacaaatataccagagggccttcctgttgttcctaaaataggtctctcttttcagatagataagaaatactctaatcttcagtggtatggccgaggacctcacgagtcatacattgatcgaaagcacagtgcattttttggaagatatagtggcactgtcagggatcaatattatccgtatataagaccccaggaaaatggaaacaagaccgacataagatgggcatctatcagtgatgacaagggctctggtattcttatttatggactccccacctttaatcttagtgtacatcagtacagccttgataatcttacaaaagctacgcatactcatatgataaaagatgatgggccaacaacagtcaatttagatcatctcgtaatgggacttggaggcgatgacagctggaatccaagaacgcacaaagaatacctcattcctccaggaacctacagctactcttttacattaagatttagtgataatattaaggcggatgaaagaagagtcttggataatagggtgtcaaaattatctagctag

SEQ ID NO: 260737 - DNA, 586 bp, Unknown
  Bacterial polypeptide expressing nucleotide sequence isolated from the Sargasso Sea
aactcctttgccagaacctacttcaactccttcgccagaacctacatcaacacctgcgccagaacctactcctacgccaacacctacgccaactcctgcgacagaacctacatcaactcctttgccagaacctacttcaactccttcgccagaacctacatcaacacctgcgccagaacctactcctacgccaacacctacgccaacaccaatatcttcattagaaaaaataaaaatatctggatttaaatttattgataatgaaatttctataaatgttggatcatctattatttggactaataatgacacatcaatgcacactgccacatcaatagattcaaaatttgactcgggttatttatatgaaaatcaaacatatgagtttaaatttcttaatgctggaatatacacttataggtgcagtctgcattctggaatgataggaaagataaatgtttttgcagaaaacggtttacttatagatccaacccctactccatcaccgacatctacaccaacaccgaaaagtaataatcaaagtgatcagatatccccaccgtcttctcctcgaagctattattag

SEQ ID NO: 260738 - DNA, 724 bp, Unknown
  Bacterial polypeptide expressing nucleotide sequence isolated from the Sargasso Sea
catgaatcaaattagtccacttcccgagaactcgactcttgtggtcgaggccgctcgcaacgaagcttttcgtccccagatccatttctcaccgaaagaaaagtggatgaatgatcccaacggtatgttttatctcgatggcgagtaccatctattctttcagcataatcccgatgcctccacctgggggcctatgcattgggggcacgctgtgagtaaggaccttatgcattgggaggagttaccaatagcgctttaccctgatgagcttggcaccattttctctggaagtgcagtcgtcgatgtcgagaacaccagtggtctgggaagcaaagataatccccctattgttgcgttgtatacctatcacaatgcgtcaatggagaagcagggaaaaattgactaccaaacccaagcactggcttacagcttagataaaggccggacgtgggaaaagtatgtcaataaccctgttattgacaacccgggcataaaagattttcgcgacccaaaggtcatgtggcatgagccgtcaggaaagtgggtgatggtactagcacaaaaagatcatattggtttttacagttcagataacctgattgactggtcgttagaaagtacattcggtgaagaaataggtagtcatggcggtgtgtgggagtgtccggaactgctgctattgcctgtcgaaggaactgatgaatctagatatgtattgttggta

SEQ ID NO: 260739 - DNA, 478 bp, Unknown
  Bacterial polypeptide expressing nucleotide sequence isolated from the Sargasso Sea
ttgctttttgcttgccaacccacatccgagacgacctcatccacgcccgacgtgggagatggagagcgctttcgacccaactttcatttcacgcctccgagcgcctggatgaatgatcctaacgggatggtttattttgagggagagtaccacttgttttatcagcattatcctgatgacaatgtgtggggacccatgcattgggggcatgctgtttccagcgatttggtcacatgggagcactttccgattgcactctacccggacagtctcggatatatctttagcggtagtgccgtggtggactgggacaatacgacaggatttggggacggcaagacgcctccgatggtggcaatttttacccatcacgaatcagagatggaggctgcaggttttgacttgtttcagtaccagagcctggcctattctttggacaaaaaacgtacctgggtgaagtatgatggcaaccctgtat

SEQ ID NO: 260740 - DNA, 736 bp, Unknown
  Bacterial polypeptide expressing nucleotide sequence isolated from the Sargasso Sea
aatgaaaaattttataattattttaattgtattattttcttcttgtaatgcagttgaaaatgatattcaaaattcctacaaagaaaagtacagacctcaatttcatttttctcctccctctggttggatgaatgatccaaatggaatgttttaccttaatggaaattatcatttattttatcaacattaccctgatgataatgtttggggcccaatgcactgggctcatgcagtttcaaaagatttaatacattgggaaaataaaccaatagcgatttatcctgatggaaataactatattttctctggatcagctatagttgataagaataataaatctggattaggagatggaaataatcctcctatattagctttttatacaaatcatgatatgtttttagaaaggatgtggaatgaaacaaaagaagatagatatatacacgttgagactcaacatattgcatatagtcaagatttaggaaaaacctggacaaaatatgataaaaatcctataattgacaatcctgggtttagagattacagagatcctaaagtaacttggtcagaagaatataaaaagtggtttataactctagcagctagagatagaataatattttattcatctgaaaacctaatagattgggaatttatatcagagtttactgggataggtgaaatgaatggcgtttgggaatgccctgacttatttccattggtagatgaagaagga

SEQ ID NO: 260741 - DNA, 128 bp, Unknown
  Bacterial polypeptide expressing nucleotide sequence isolated from the Sargasso Sea
cacacccacacccacacccacactcacacccacacccacacccacacccacacccacacccacacccacactccctcgatccttcgctccttcgttccctccctccattccctccctccctccctccc

SEQ ID NO: 260742 - DNA, 622 bp, Unknown
  Bacterial polypeptide expressing nucleotide sequence isolated from the Sargasso Sea
aatgtttatcaaacaaagcttcagaatatctgcagtagcagcggcacttgtgttagcaggctgtggtggcgacatcaacatcagcgaaggcgacgttatcgacaattcagataactctgtcaataacccagctcctacaccaacacccacaccaacaccgactcctactccaaccgatgcgaacaatccgttcacacaaggtttggcaacagatgtttctgcagagtttccatcaatcactgacaagccagtttaccgtttaaacgatggcactacctttgttgaagacgttactttcacagctgacgcacactgggttttacagggccgcacagcggttggtggcgacaacgtagactctgcagtgctttcaattgaagcaggcactactatcatcggtgaatctggtgaagactttctcgtagtccgtcgcggttcacaaattgaagctgaagggcgtgcggatgctcctatcgtatttacttctgtccaagatgtcactggtcaagaaactgacatcggtcagtggggcggtttagttgttcttggtcgtgctcctgctaatagctgtggcgatccagttggcgaaacacagaagacgaactttgctactgtggtgtag

SEQ ID NO: 260743 - DNA, 481 bp, Unknown
  Bacterial polypeptide expressing nucleotide sequence isolated from the Sargasso Sea
atgtcgacttttccacacgggtttttatggggcggcgcgctggccgcaaaccagtctgaaggggggtatctcgagggcggcaaagggctgaccaccgtggatacgctgccccacggcgcgaaccgcatgccggttaagctcgggctggagaagcgttttcagctgcgtgacgatgaattttacccgagccacgaggccatcgatttttatcatcgctacaaagaagatatcgccctgatggcggagatgggctttagcgtctttcgcacctcaattgcctggagccgcctgtatcccaacggcgatgagctggagccgaatcaagaagggatcgccttttatcgctcgctgtttgaagagtgcaaaaagtacgggattgagccgctggtaaccctttgccacttcgatgtgccgatgcatctggtcattgaatacggttcatggcgcaatcgtaaaatggtggagttctttacccgctacg

SEQ ID NO: 260744 - DNA, 778 bp, Unknown
  Bacterial polypeptide expressing nucleotide sequence isolated from the Sargasso Sea
ccaactccgattccgacacccactcccactcccactccgattccgacccccactcccacgcctacacctactcctataccacctacacctacacctactacctatatctatgttgaacgcttagataaatggatcgactgggctgattgtgaagctgatgacgacactgatggggttgcgaattgtaacgattacttcccaactgaccctgacaagtgggacccgccaacagaagaagcagaagacgttgcgaccacagatgatactcctccagtagaacctactcctgagccggaagctactcctgtgccgactcctgaacctccaactcctaaaaaaaccccaacgcccgaacctgaaccggtgccggaacccgaacccgaaccggaacccgaacccgaacccgaacccgaacccgaacccgaagacgatgaagaggttgctgttgaagaaaaaggcgacggtataggccctgcgacctccgacgatgatggtgacagtggaggtaatggaagcgctatcgctatcggcattctcctcccactctttgctctcctggccatagctgctccggcgattccatggtggaggagattccgttcactattcgcagccttaggtggagctagcgcacccctaaactacgttgcatggaaacctgcatggttctgtcaacactgtgacgccaagtacaccaagaagcaatggaagaagaacttaaaaacctgcaccgaatgtggaggagacctttcggaagaaacaggactagaactcaaac

SEQ ID NO: 260745 - DNA, 940 bp, Unknown
  Bacterial polypeptide expressing nucleotide sequence isolated from the Sargasso Sea
gtcgttgataaagcgagcccgtaccgccagttttatatctggcgcgatggcgaaccgacaacgccgcccaataactggcgttcgaagtttggcggcaacgcctggcagtggcacgcggagagcggacagtactacctgcatctgttcgccgcagagcaggcggatctcaactgggaaaacccggcggtccgtgcggaactcaaaaaggtgtgcgagttctgggccgaccgcggcgtcgacggcctgcgcctcgatgtggtcaacctgatttcgaaagatcaaaccttcccgtcggatacccagggcgatggccgccgtttttataccgacggtccgcgggtccacgagttcctgcaggagatgagccgcgatatctttacgccgcgcaacctgatgacggtcggcgagatgtcctccacctcgctggaacattgccagcaatatgccgcccaggacggccgcgagctgtcgatgacctttaacttccaccatctgaaggtggactatcccggcggcgaaaaatggacccttgcgcgtccggactacgtggcgctgaaagcgctgttcagccactggcagcagggcatgcacaaccgggcgtggaatgcgctgttctggtgtaaccacgatcagccgcgcatcgtgtcgcgttttggcgatgaaggggaataccgggtaccggcggcgaaaatgctggcgatggtcctgcacggcatgcagggcactccctacatttatcagggcgaagagattggcatgaccaatccgcacttctcgcagatcggcgattatcgcgacgtcgagagtcacaacatgtttattgagcgctcggtgcaggggcaggcgcccgatgagctgctggcgattctggcgagtaaatcgcgcgacaacagccgcacgccgatgcagtgggacgctcgcgaccagggcggatttaccg

SEQ ID NO: 260746 - DNA, 958 bp, Unknown
  Bacterial polypeptide expressing nucleotide sequence isolated from the Sargasso Sea
atgagttttgacgcggtaaaacatcaagaaagaattcaaatagttgaagaatttaccgcacaaaaaaaagattcgatcaaaaaacatccatggcgagagcattaccattttcaagcacctgttggttggatgaatgatcctcatggtttgatccaatttaatggtaagtatcacctgttttatcaacatcatcctttcagtgggaaatggggcactatgcattggggtcatgctgtaagtgagaaccttatacattgggagcatttgcctgaagctctagctccaagtgaaacctatgatggctgggacggtggcggtatttttaccggttcagcaattgagcataatagggaattaattcttttttacacaggatgtgctaaagatcgtcaagttcaatgcatggctagttctaaagatggggtgaacttcatcaaatccgatcataatccaatactctccaaggctccaaacggcatcaatcctcatgattttcgtgatcccaaagtttggaaacaaggagaattattttatatggtcactggagtgactgatggagtaagtaatctcatagaaccttcaaattatgatataaatggatttgggaaagtatgtctacaccgttcaacagatctaaaaaattgggaatttgtaaactacctcgtagagagcaaaggtgaacttgggacaatgttggaatgtccaaactttttccctttggatggtaaatgggtacttctctattccccaatgggtctacttgaaagacaagttatctatttaacgggagattttgacgaagtcactggcaaattccattggaccacgatggggtctgtggattggggattcgactattacgcaccacaacattttcaggataatcagggccgtaatttaattatggcttggattggttcatggccatttatgccctggtgccgtggtgaatatgata

SEQ ID NO: 260747 - DNA, 710 bp, Unknown
  Bacterial polypeptide expressing nucleotide sequence isolated from the Sargasso Sea
tatgagcgatgacgcgcaacgctggaaagacaaatacctgagtagcctggagcagcaggaaaagctcgaccgccggtgggagtcgcgcctggatctgctgcgccgtggtctggtgcgcagcagcctggcagccgagggcgcggacaaggcggtcgatcaatgcatgcaggaaatgcgcgaaatccttcgtcgcgacgatatggacgcagcattgggcggcctcattccgcgtctggaaaaggccgtgctggattccgagcagcgccgtcagcagcgcgctggcgaggcggcggctgcgttggctgccttgatcgagcaactgcaacgtctgcagccgccgcgcgaggtgcgcaaggcgctcaaatcgctgggcaaacagctagaggatgccaccactcatcagtatctgctgccggcgctgctcagccagctgagcaacctgcaggggcaggcgctgaccgttctgcaggcaccagtgcaggagcagccgggcctgctccagcgtctgttcggttcgcgcggcgagactagcgaaagcactgcgcaggcgccgggtagtgtcgccgagaccactggcgttaccgaggagcccgcagcagagttgacgccaacgccaacgccaacgccaacgccaacgccaacgcccgtagcggtggcgaacgagccacctcccagtgtctccaacatggccagcgtgccagcccggcatc

SEQ ID NO: 260748 - DNA, 609 bp, Unknown
  Bacterial polypeptide expressing nucleotide sequence isolated from the Sargasso Sea
actgaccgaaaatataatcgtggctcctactcctactcctactcctactcctactcctactcctactcctactcctactcctactcctactcctactcctactccagaaagtagggcggccaccatagcttttacaggggatattctcagccattcgccagtcttcgaagctgcaaagcgttacggcgacaccacaaaggagtataactacttaccaatgttctctgaggtaaatgagttgattcaaggcgcagaccttgcgatctgtcatcttgaaacgcccatttccgctgataataaagaactttctgggtaccccatattcaatgctccgaaagaattagcaaatgacttagcaagcgtgggttacaacggttgttccacagcctctaaccactctcttgacaaagggcccataggggttttctcaacgctcgacgaactagaagctgctggccttaagtgggcaggaatggcaaggaatatgcaagagaagcaggtacctaccttttacttagtgaatgaaattgtgatagcgcatctttcttatacatatggattgaacggtttcttgattccaagcaaactgccatttcttgttgatgtcat

SEQ ID NO: 260749 - DNA, 594 bp, Unknown
  Bacterial polypeptide expressing nucleotide sequence isolated from the Sargasso Sea
attcagtcgttcattcattcgttcattcattcgttcattcatgcgttcactcattcattaattcgttcgttcattcgttcattcattcgttcgttcattcgttcattcattcgttcgttcgttcattcgatcattcaatcgttaattcattcaatcattcacgccacccccacgacacggacacgcccacgcccacgcccacgcccgcgcccgcgcccacgcccacgcccacgcccacgcccacgcccacacctacgcccacgtcccacgcccacgcccacgcccacgcccacgcccacgcccgcgcccgcgcccgcgcccacgcccacgcccgcgacccaccaccgtgcaggaggagcagtaggagaacatgcccccccgcggcaccccggcgtaccggacccattctcgccgcgtacacgcctcttgcagagcatttcccgtttgggcatcccccccctaaactccgatatatgtgtgtgtttgtgtatatgtatattataatatatatatatatatatatatatatgtatgtatgtatgtatgtatacatgtgtagagagagagacacaatgatatttcggatgatatagt

SEQ ID NO: 260750 - DNA, 517 bp, Unknown
  Bacterial polypeptide expressing nucleotide sequence isolated from the Sargasso Sea
aatgctagcactaatactatctggtactagctttaaatctattgcatcagaaggagaagaaggttccgaagcgtttgatgatcctaatgcagaagaagaagctgaaagcactgaggaggcgcctgaagaaactggttcagaagcaggcggaggatctgcagtagctggagcaggagtctgggttgcaattacaggagctattttaggattatttagcggcggaagctcagaatatgtaactccatcaggtaatgatccagtaacacctacgccaacacctacgccaacacctacgcctacgccaacacctacgcctacgcctacgccaacacctacgccaacaacgcctgcaactacggcaactacggcaacgacggcaaccacggcaacgacggcaacgacggcaacgacgggaacgacggcaacgacaacgacgtcaactacttcgacgacgtcttcaacaactggtactactacttcaactagttcaagttccactggtactactggaagttga

SEQ ID NO: 260751 - DNA, 523 bp, Unknown
  Bacterial polypeptide expressing nucleotide sequence isolated from the Sargasso Sea
aatgttaatatttgtactcagcggtacaagttttaaatctatagcatcagagggcgatgaatcttctgaagcttttgatgatcctaatgctagcgaagaagaagcatccgaagatgcagtttccgaaacttcaggaaattcttcaggctcaagctcaggaactggagctggaacaggagtatgggtagccattactggagctgtattagcgcttttctcaggaggaggatcatcatctgatgatgtcccacctcaacctgagccacctgtgacacctacgccaacgccaacgccaacgccaacgccgacgcctacgcctacgcctacgccgacgcctacgcctacgcctacgccaacgcctacgcctacgcctactccaacaacgggtacaaccggaacaactggcacaacgggtacaactggcacaacgggtacaactggcacgactggcacaaccggaacgagtggtacaactggaacgactggcacaaccggaacaacgggtacaactggcacgactggc

SEQ ID NO: 260752 - DNA, 535 bp, Unknown
  Bacterial polypeptide expressing nucleotide sequence isolated from the Sargasso Sea
aatgctagcactaatactatctggtactagctttaaatctattgcatcagaaggagaagaaggttccgaagcgtttgatgatcctaatgcagaagaagaagctgaaagcactgaggaggcgcctgaagaaactggttcagaagcaggcggaggatctgcagtagctggagcaggagtctgggttgcaattacaggagctattttaggattatttagcggcggaagctcagaatatgtaactccatcaggtaatgatccagtaacacctacgccaacacctacgccaacacctacgcctacgccaacacctacgcctacgccaacacctacgcctacgcctacgccaacacctacgccaacaacgcctgcaactacggcaactacggcaacgacggcaaccacggcaacgacggcaacgacggcaacgacgggaacgacggcaacgacaacgacgtcaactacttcgacgacgtcttcaacaactggtactactacttcaactagttcaagttccactggtactactggaagttga

SEQ ID NO: 260753 - DNA, 349 bp, Unknown
  Bacterial polypeptide expressing nucleotide sequence isolated from the Sargasso Sea
agctgttctcgcgctattcggtggtggaggatcagaatatacaactccatctggaaatcctccagtaacgccaacgccaacgccgacgccaacgccgacgccaacgccaacgccaacgccaacgccgacgccgacgccgacgccaacgccaacgccgacgccaacgccaacgccaacaccaacacctgttaccacgactacatctacaggtactacaggtacaacagcatctacaagtactacaagtacaacgggtacaacagcatctacaagtaccacagcatctacaagtacgactggtgtcactactacgacaacatctacgtcttcaagtagttcatcaaactaa

SEQ ID NO: 260754 - DNA, 646 bp, Unknown
  Bacterial polypeptide expressing nucleotide sequence isolated from the Sargasso Sea
gctgactaaggcaaaattcgctatctccgttgccggtttgttactttcagctgcagcggcttttgggctcatagcggtactcacagataatctcccattcctgggtaatcaagctgtacttgaaccaactccaacaattattcctgttgcagcaattgaaccaactccaactccaactccaactccgactccgactccgactccgactccaactctgactccaactccgactccactacctactggtaatcctattccagaagcagttcctcctgctcctcgagctccaatcatcctaccagcccctactccctcaccgactccacaaccaactctccaatacaccctagcaaccaatctgggtgtaactaattcattactcgttattgggcaaaacaaaatccgtctctcatgcgagcatacaggtcttcccttaaaagaatggcgaattgattttcttaataaagaaagtacatcctctaaatccttttccgcaaaaggttctacgccaaattgcgacggacgacttcattttgacaacagaggttcatgggagtgggatactctgacgcttacctctactaacggagtagtaacccaacagcgttccgatggaacgtattcagtaaataaccctagagaagaa

SEQ ID NO: 260755 - DNA, 815 bp, Unknown
  Bacterial polypeptide expressing nucleotide sequence isolated from the Sargasso Sea
gatgagattattaattgcatttctatttgcttcgctagttctggtttcctgcggaggtggcggtggaggcagttctgcttctcctacaaatcctacaggcaatactacaccttcgccaactccttcacctactcctacacctactcctacacctactcctacacctactccaactccttcatcttcaccgactccttcacctacacccacaccaactccagttcctagtaatttaccaatatccggagctatttctctaactaacgattttgagcttgataaagcttcttatgagggctcagaagaatatatggaacaatctggcttagctcttattaatgcttcttctgcctatgcaagaggagcgacaggagtgggttccttgataggtgtcatggattcaggtgtagatatttctcatcaagaattagatggtgcaaataagctaacatcggacagctatctagtctattctgatagatcgccaacaacagatgagaaaaggcatggtactcatgtttccgccattgcattaggtgaaagagacggctctggtatgcatggtgttgcattcgatgctcaattgtttttcatatcaatcaaacttggaaccgctggagaagactatgagccagctcagatagatactacggtagattataccggtgtcgatagtagctggtctcaattagaaggcgtgtttgttgagcgaggtgtgaccgttgtaaatggaagttttggctatcaaggaaatattaacgactatacagaagaagatttaagatatgcctttccaaaactattgaagttatggc

SEQ ID NO: 260756 - DNA, 715 bp, Unknown
  Bacterial polypeptide expressing nucleotide sequence isolated from the Sargasso Sea
ctggctctcgattcgttcggagctcgggggcgcggaacgccgccgacgattacggccaatccggcaacggctgattttaattttccgatttcctccacgggccaatatcaggcgacgaccacccagacatttcagctaaccatcggagggagtagtccggatccaacaatttcactgcaaaacccggtgggattcaccttggctgatgcgacactgaagaatgcctccggcaaaaatatcagcctagcgggatcggcagaagttcctgcaggaacatatgacttgaccatttccgttccggatcctggacaaacccccagcaatgcaagcgtgaccattcagttggactccggccggttggggaaggccacggctgatgtatcaggacgtattggccgtgatttgccgggagcggctccaccaacgccaacgccaacgccaacgccaacgccaacgccaacgccaacgccaacgccaacgccaacgccaacgccaacgccaacgccaacgccaacgccaacgccaacgccaacgccaacgccaacgccaacgccaacgccaacgccaacgccaacgccaacgccaacgccaacgccaacgccaacgccaacgccgccgacgggtgggggaggtggaccgactcaacctcccatcaagattattccgacgccgtggtctggtggcacgactcggatgccggccaaaacgaatcata

SEQ ID NO: 260757 - DNA, 692 bp, Unknown
  Bacterial polypeptide expressing nucleotide sequence isolated from the Sargasso Sea
actgccaattgcactatttgcctgtgccgacccaccaccagtggaggaacagctaccagctgtagtagttgtagagaaacctactgaccatagacctgcttaccatttcacacctagggagggctggatgaatgatccgaatggaatggtctattatgcaggagagtaccatctcttctatcagtactatccttatgccacagtatgggggcctatgcattggggtcatgccgtaagtaaagatttaaccaattgggagcatcttcccatcgctctttcaccagacgaaaatggattgatattttctggaagtgcggtaatagattggaataacacatctgggtttggtcaagattccataccgccaatggtggccatttttacccatcacaatttgttaggggaaaaggtgggtagcgatgattttcaaacacagggaatagcttacagtcttgacagcggcagaacctggacaaagtatgcaaacaatccagtcattgcgaacccaggaattcgagattttcgagacccgaaggtgatctggcatggtggcacgcagcggtggattatggtattggctgctggagatcgcatacaactttacaattcaccggatctcaaagagtggaagcttacatctgaatttggagaaggatcggtgccaaaccttggcgtttgggaatgtccagatt

SEQ ID NO: 260758 - DNA, 466 bp, Unknown
  Bacterial polypeptide expressing nucleotide sequence isolated from the Sargasso Sea
actgagtggtacaagctttaaaaacttcgcttcagaaggggaagaagggtccgaggcatttgatgaccctaatgcagaagcagcagaagcagaagcagctgaatcagcctcaggagctggagcagcagcagcagcaggtgccgcagcagcaggtggagctgcagctggagctaccgtatgggtagccataactggggcaatacttggattgtttagtggtggatcttcagaatacgcaacacctattggtgatgatcctgtgacacctacacctacacctacacctacacctacacctacgcctacgccaacgcctacacctacgcctacacctacgcctacaacgactacaacaacaactggcacaacaactggcacaacaactggcacaacaactggcacaacaactggaaccacaacatccagtacaacatccagtacaactactagttcaacgggcggttaa

SEQ ID NO: 260759 - DNA, 581 bp, Unknown
  Bacterial polypeptide expressing nucleotide sequence isolated from the Sargasso Sea
tatgactgatactgacggaacagtatttgggacacattccttatctgtaccatctataacaatcggcataaattcgcctacaccaacacctacacctacgcctacaccaacacctacgcctacaccaacacctacgcctacgcccacgcccacgcccacgcctactcctactcctacacccgtaccacttggtaattatttaccggtactgcaagaacttagtgtaaacccaacatccttgaatcaaggccaacaacctgccatcaccgtacgagccacagggggaatgccaggctattcaggcaatacaaacgacactcatcatgttgcttctgcatatattagatgggtcgacggtagcaactccgtcaaagccgaatctcattgctcatttacaggtagcagctcatactccacaagctgtaattttaatgagactggaggaggattaagtaatataactactttgcaaatcggagatattcaagtcaaagatcatgcgactcaatggaggacctataagaacagctacgtacatggcgaatcctttatttttgtatggtggcctgggcttttagggg

SEQ ID NO: 260760 - DNA, 721 bp, Unknown
  Bacterial polypeptide expressing nucleotide sequence isolated from the Sargasso Sea
aattatgaagagaatgtagaatgtagtttttattggaatggagataagaattgtaactggattccagtcattacaccaacaccgacaccaacaccgacaccaacgccgacaccaacgcctattccaacacctgtaacatcatggacaacaggagatatagaccagattataggaaatggtgagagtatttctttccaaacagatttactttcaaattctgtgtcatctctgacaattaaatacggattatggaatagtccaaatgttaatttaagaattttacttaatggttcagaagtcgtaaatatgttagtagatacagcatggtttgatatttcaggtcctaaaatatcaacatggaatatatctaattatttaatccctggggtaaacatagttgatgttgaatcttctactggaggagatgcaatgataggatttataagaatcgataatacaataattccaacaccaacaccaacaccaacaccaactcctactccatctcctacgcctacagttacaccaacgccaacaccaataccaacagattatggtgggggcaatattagcaataatcagattatagaatcgtcaattgattttaatggtgatatagatgaatggacttttaatggtaatacattaaataaaattagtgtaacaatgaatttaatacaatctagtaatggtctaaatccttatttagaattaatatctc

SEQ ID NO: 260761 - DNA, 544 bp, Unknown
  Bacterial polypeptide expressing nucleotide sequence isolated from the Sargasso Sea
ctgattttaagcggtacgagctttaaatcttttgcacaagatgaaggagcaaaaggcccaactgaagaatttgatgatcctaatgaggaagctactgatgacgctgcagcaggagcagcatccactagttcatcagctggaacagctacagcaggctctggtgtctgggtagcaataactggagccattcttgggctcttcagtggaggttcttcatctatggatctgccaactggtgaacctcctgtaacgccaacgccaacgccaacgccaacgccaacgcctacgcctacgcctacgcctacgtcaacgccaacgcctacgcctacgccaacgccaacgcctacgcctacgcctacgcctacgccaacgccaacgcctacgccaacgccaacgccaacgccaacgccaacgcctacgccaacgcctacgcctacgcctacgcctacgccaacgtcaactactacaaccactaccactaccacaacggaagaggctgcgactacaaccactaccactaccactaccacaactggcacttagt

SEQ ID NO: 260762 - DNA, 595 bp, Unknown
  Bacterial polypeptide expressing nucleotide sequence isolated from the Sargasso Sea
tatgagaattgctcaaaattcaattttagttttattatttatttgctcattaattataacttcttgtaattcagaagagcctatttcagaaaatattcccgatatagaagctacagttcaagcacgattagatgaagcagttcgaattgcaatactatcaactcctacgcctacaccaattccaactcctactccaactccaactcctacaccaacccctattccaactcctactcctactccaactcccacaccaacccctattccaactcctacaccaacccctattccaacccctacacctacgccgactcctataccaacccctactcctttgcccttaccaactcccacaccaatggtagttgttgttagagcagatcaagcaactatacctgaatttaaccctttatcctcttcagaaatgaaaaaaatgctatcaattatttatgaagaaaatccatctgcttattcaagttcaacttcattttcattagaccttaactctgggaatatggaggcaaatactataactactgactatacagatgaaataacttctatttttaacacaggatattggttagttaccggt

SEQ ID NO: 260763 - DNA, 338 bp, Unknown
  Bacterial polypeptide expressing nucleotide sequence isolated from the Sargasso Sea
tatgaaagatttaataaaaagaattctagctactttaggtactttggcattaattttatttccacaaacagctttaagcgccgaagaaggcgctgcagatgccgctgggaactcagggggttcggctgctggaggaaatgctactggagctgcggttggtggagtgacagcagggactatagccgctgtagttgcgatagctgctgctgctgctgctatatctgatagtggttcaggtggtggggcaattgcaccgactcctactccaacgcctacgcctacaccgacgcctactccaacgcctacgcctactccaacgcctacgcctacaccgactc

SEQ ID NO: 260764 - DNA, 396 bp, Unknown
  Bacterial polypeptide expressing nucleotide sequence isolated from the Sargasso Sea
ggtgttgggttgctatcactggtgctgttttagcgctatttagtggtggtgacagtgagtatactacaccaagtggtgatgcgcctgttacgcttacgccaacgccaactccaacgccaacgccaacgccaacgcctacgcctacgcctacgcctacgcctacgcctacgcctacgccaactccaacgcctacgccaacgccaactgtaacaactacagcaacaacaggaacgactggtacaactggaacaacaggtacaactggaacaactggaacaacaggtacaacaggtacaactggaacgactggaacaacaggtacaactggaacgactggtactacagctacaactggtacaactggtacaacttcatccagctctaccactaactaat

SEQ ID NO: 260765 - DNA, 583 bp, Unknown
  Bacterial polypeptide expressing nucleotide sequence isolated from the Sargasso Sea
tactgctggtacaattgctgctgttgtagccattgctgctgcagctgctgcattatctgatagtggttctggaggtggagcagttgttcctacacctacacctacacctacacctacgccaactcctactcctactcctacgcctacgcctactcctacgcctacgcctacgcctacacctactccgacaatagaagaatatacgtacgtgaagacggtagaggttccagcggttgccggttacacaattactcatggtactgctataagagaaacgggagcagtagctacaagatattcaggagaaacggctacaagagttactggggcaactgcttcaagaacaactggattaacaacttctaatacacttcacaccaacgttgcgaattctgtaacaataggaacagatggaagaggtgatcctatatacgaaattactgaagtttatgacgtagtcgaagattatgagactattgaagagtataacgttgaagaagagtacactcaaacaacagttgtagctccaattgctacatcaacaactactgttacagctacagctactcgagaaagtcaataa

SEQ ID NO: 260766 - DNA, 574 bp, Unknown
  Bacterial polypeptide expressing nucleotide sequence isolated from the Sargasso Sea
atgaaattgtttaaaaaacttggaacatatttttcaatgctaattcttgtactaagtggtacgagttttaaatctattgcttcagagggtgaagaaggctcagaagcatttgatgatcctaattcagcagatgaagaatcatcatcagatgtttcttcagaagcttcaaaaactgctccagcaggaacaggagcagcagcaggtgcaggagcaggagcaggggtttgggttgcaattactggcgctatattaggtctatttagcggaggatcttccgagtacactacaccttctggcaatcctcctgtaacacctccagccccaacgcctacgccaacgccaacgcctacgccaacgcctacgcctacgccaacgccaacgccaacgccaacgcctacgcctacgcctacgcctacgccaacgccaacgcctactccagcaactacgacttcaactggtacaactggcacaactggcacaactggcacaactggtacaactggtacaactggtacaactggtacaacaaccactactactacaactagtacaacaactacgtctacgaattaat

SEQ ID NO: 260767 - DNA, 418 bp, Unknown
  Bacterial polypeptide expressing nucleotide sequence isolated from the Sargasso Sea
ctcatccgatcaacagtctactagcagtggttcttccagtgctggagcaggtgcaggagtatgggttgctattacaggagcaatacttgggttgttcagtggaggttcatctgaatatactactccatcaggaaatgatccagtaacgccaacaccaacaccaacaccaacgcctacgcctacgcctacgcctacgcctacgccaacgcctacgcctacgcctacgcctacgcctacgccaacgcctacgccaacgcctacgccaacagctacaacaactactacaacaacgccagcgacaacgacgacaacgacgccagcgacaacgacgacaacgacgccagcgacaacgacgacaacgacgggaacaactacaactacaacaactactacgacatcaacgacgtctggtacttag

SEQ ID NO: 260768 - DNA, 526 bp, Unknown
  Bacterial polypeptide expressing nucleotide sequence isolated from the Sargasso Sea
atgtacgaccggataaagaatttaaataatattatgaaacgaataatacaaaatatcatagctactgtagggactttgtcttttcttttgtttcctcaaatagctataagtgaagaagaagctgctactggcagcgaaagtggaactggatcagctgcaggaagtaacgctgcaggaacagctgttggtggagtaactgccggaacaatagctgctgtagttgcaatagccgctgctgctgctgcaatttcagatagtggatcaggtggcggagcagtaactcctactcctactcctactcctacgcccactcctacgccgactcctactcctacgccaactcctaccatagaaacttatgtaacagaagtgatagtagatgttcctggggttgcttcttacacacaagctggtcctacagctactagaacaagtggagcaacggctactagaactactggagccacttcaagtaatgtgacacaagcaactgctactagaacaactggagcaactgctactagaa

SEQ ID NO: 260769 - DNA, 568 bp, Unknown
  Bacterial polypeptide expressing nucleotide sequence isolated from the Sargasso Sea
gatgaaattgtttaaaaaactaggaacatatttttcaatgctaatgcttttgctttcaggtacgagctttaaatctattgcttctgaaggcgaagaagatgctgaagcatttgatgatccgaatgctgaagaagaggcaagttctggagaagctggatcagcagcagctggagcagcagctggagcagcagctgggggagcagcagctggagcaggagtttgggtagcaatcacaggcgctatactaggactctttagcggaggttcctcagagtacgtgactccttctggcaatgatccggtaacgccaacgccaacgccaacgcctacgccaacgccaacgcctacgccaacgcctacgccaacgcctacgccaacgcctacgccaacgccaacgcctacgcctacgccaacgcctacgcctacgccagcaacaacaacaactactacaagtactacgagtgctccgacgacaactacaagttctacttcgacgacgtcgactacaactggtactactacgtcgactacaagtactaccactggtactactacaactgggacctaa

SEQ ID NO: 260770 - DNA, 972 bp, Unknown
  Bacterial polypeptide expressing nucleotide sequence isolated from the Sargasso Sea
aatgacgagaaatttgaaacttctaggggttgcggcagcgaccgtactggcatggtttggcgcggaaaacgcgcaggccgcgacgagcaccatcacagtcgcgggacttcagtacaagttgtgcgcgcaagagaatggcacctgcaaattcctcggcacggcttcggtggtgttcggtgccgttccgcccaccgcgccgtcggccatgctgacggcgcccgctacctttagcaacggcgttgggtgttatgtcggcgcggtttcgcagacagatcctgcattcggctatggcaagtcatgctgggtgagggcggttgccgccagcgctacgccgacgccgacgccaacgccaacgccaacgccaacgccaacgccaacgccaacgccaacgccgacgccaacgccgacgccaacgccgacgccaacgccaacgccaacgccgacgccaacgccaacgccaactccgacaccaacgccaacgccaacgccgacgccaacgccaacgccaactccgacaccgactccaaccccaaccccgacgcctggcagttcaaccctctcgtgcggcacgcccacgcacaccgcaggcggaaccgccaacggagtgatcagcgccgacacccccaccaccgacggcctgcgcattttccagaacaacgcaccgttcaagctcacgattacgacgaacgcgccgagcgcggataccgtcgtctggtccgtggcggattcgaatggcgcgatcaagacacagggcagtttcgcggtgagcgccggtgtgcgaaccaactcgatcccgtgtacgtcgacgtggtccggctatggcgcgctgaccgcgacgctgcgctcgaacggcggtactttgcccaacagcggcacgcgtccggtgggcatcgcaaccttcggcgtgctgccgaatctgacgccggtgctgggcaccgtcacatacgcacatcaggatcagcaccgcttcgg

SEQ ID NO: 260771 - DNA, 451 bp, Unknown
  Bacterial polypeptide expressing nucleotide sequence isolated from the Sargasso Sea
atgaaattatttaagaaacttggaacatatttctcaatgctaacacttgtgcttactggtacaagctttaagtcaatcgcatctgaaggcgaagaagatgctgaagcatttgatgatcccaatacctctgaagaagaagactctggagcagaagccgctgcagcagcaactggaacagcagcatcagcaggaactggagctggagtatgggttgcaataacaggagcagtacttgctctcttcagcggtagtgacggcgagtatactacaccaagtggtgacgaacctgtaacaccaacaccaacaccaacaccaacaccaacacctacgccaacgcctacgccaacgcctacgccaacgcctacgccaacgcctacgcctacgcctacgcctacgccaaaaacgccatctacaactactacgactactacaacgagtacaactagtacaa

SEQ ID NO: 260772 - DNA, 437 bp, Unknown
  Bacterial polypeptide expressing nucleotide sequence isolated from the Sargasso Sea
gctggttctcagtggaacgagcttaaaatcaattgcctcagaaggagaagaaaactcagaagcatttgatgatcctaatgcatcagaagaggcttcttcatcagcaagcagcaccggaggaaccggctcaggggtttcttctggagtatgggtagctattactggagcagtattagcactcttcagtggtggatcttctgaatttacaactccaagtggtgcagatcctgtaacgccgacgccaacgccaacgccgacgccaacgccgacgccaacaccaacaccaacgccgacgccaacgccaacgccaacgccaacgccaacgccaacgccaacgccaactactacggcgactgcgactgcgaccacaactggaacttcaacaagtacttctacgtcgacttctacaggaacgtcaacgtctacaagtacatcaa

SEQ ID NO: 260773 - DNA, 334 bp, Unknown
  Bacterial polypeptide expressing nucleotide sequence isolated from the Sargasso Sea
aatggaagcagaagcgtcgacatcagcagcaactggagctggagcgacagcaggtgctggagtttgggttgcgataactggagctgttctcgctctatttagtggaggctcgtctgagtatacaacaccagttggcgcagatcctgttacacctacacctacacctacacctacaccaacgcctacaccaacgcctacgcctacaccaacgcctacacctacacctacacctacaccaacgcctacgccaacgcctacgcctacacctacaccaacagcgacagctacagctacagctacggcgacaagtacctcaaccagcacatcaaccagc

SEQ ID NO: 260774 - DNA, 364 bp, Unknown
  Bacterial polypeptide expressing nucleotide sequence isolated from the Sargasso Sea
tagtggtggtgacagtgagtatactacaccaagtggtgatgcgcctgttacgccaacgccaacgccaacgccaactccaactccaactccaactccaacgccaacgcctacgcctacgccaacgccaacgccaacgccaacgccaacgcctacaccaactccaactgtaacaactacagcaacaactggaacgactggtacaactggaacgactggtacaactggaacgactggtacaactggaacgactggaacgactggaacgactggtacaactggtacaactggtacaactggaacgactggtactacagctacaactggtacaactggaacaacttcatccagctctaccactaactaa

SEQ ID NO: 260775 - DNA, 1867 bp, Unknown
  Bacterial polypeptide expressing nucleotide sequence isolated from the Sargasso Sea
atgaatcgcaatttcaaaatgacgacgatcgccatgtgcgtgtcgtcactgatggttcttcaaggttgtggatcgacattgaccacgaagtcgccgacgcttggcactggttcgggaagcggcgccatcacaggtggaggcggcgggtcgggaggagggtcggggtccggtgcaggttccggatcggggtccggctcaggtaacggcacgcctacgccgacgcctactccgacaccgacgccgacgccgacgcctacaccgacgccgacgccgacgcctacaccgacgcctacaccgacgcctacaccgacgccgacgcctactccgacgccgacgcctacaccgacgccgacgccgacgccgacgcctacaccgacgcctactccgacgccgacgccgacgccgacgccgacgccgacgcctacgccgacgcctacgcctacgcctacgccgacgccaacaccgacaccgacaccgacgccgacgccgacgccgacgccgacgccgacgccgacgccgacgccgacgccgacgccgacgccaacgccaacgccaacgccaacgccgacgccgacgccgacgccgacgccgacgccgacgcctactccgacgccaacgccaacgccaacgccaacgccgacacctacgccaacgagcgccaacccactcggcgtcgtggtgcagaacaccggcaatgtcgtcaccgcgaccggccagactgtctcggccatcggcagccagatcggtctcacgccgatccccggcggcaacaccgcgaccaccacagcgctcggcggtgtggtttcgaatctcggcgccggagtgtcagcactcggcacgggcgctttcaacggtctcggccagctagggaactcgaccgaccctctcggtaccaccctcgccagcagcggcaacctagtctatgacgctggccaggccgtcaatagcgcgggacaactcgtgaccagcctcggcagcggcccgaccgctccgctcagcccgctgacaaacccgctcggtagcacgatctccaccgtgggcacagccgtcagcagcctgggcacgcaactcggctcgacgctcaccaacggcccggtgcagcagctcacgcagaccctaagcactgccatcacgccaatcaccgcgacactcgcgcagaccacccagaccgtcggcgacacgaccggtttgggtaagccgctcgatggactgctgtcgaccatcggccacggcctcgacactgcgggcggccagatcggcagcaccacgggtaatccgatcggcaagaacctgggcaacgtcgtgacacagttgggcaatacggttacctcggtcggcggcctgctgaccgcaggcggctcgggcagcggtaatccgctcggcggcctgaccggcatcctcaatccgggcggcggttcgtccggcaatccgctggcaccgcttaccagcatcctcacttcgctgcccggcacgctgacgggcggactcggcggtattggcggctcgaccaatccactcgcacctctggtcggcacgctgacttcgctgacctcttcattgaccagcgtggtcggaggacccggtagtcctttggcgccgctcaccggcctgaccgtctcggcaggtgtcgcgctgaacggtgcaacaggcagcgccaacaacccgctagcaccagcgacgtcagtagcatcatcgtcgacgggcgcgctacacgcctcaggcggttcaggtgcggccggcacgaccaacctgctcgcgcccgtgacgggcctcgtcaccgccctgacgagcgcgcttgggggcgccagcggaggaacgtccgggtcgtccggcgccgtgcccggtgggctgacagcaaggaagtaac

SEQ ID NO: 260776 - DNA, 1735 bp, Unknown
  Bacterial polypeptide expressing nucleotide sequence isolated from the Sargasso Sea
ctgattccacgcatcagggcgacccgcaggggtcgccctctccctttttcattcgagacaagagcaagacccatgagccaaacaccctggtggcagagcgccgtgatttaccagatttaccccaagagctttcaggattccgctgcccgtggcactggtgatctcaaggggatcatggcccgcctcgactatctcaagaccctcggtgtcgatgccctctggctgaccccggtttacgtctccccgcaggtggacaacggctacgacatcgccgactacttggccatagaccccgcctacggcatcatggccgacttcgaggcgctgctgactgccgcccacgcgcgggacatccgcatcgtgatggatatcgtggtgaaccacacctccactgagcacgcctggttcaagtcggcgctgggggataaaaacagcccctaccgcgactactacatctggcgcgatccggtggacggcggcgtgcccaacaactggcaatccaagtttggcggcagcgcctgggagctggatgagatcaccggtcagtactacctgcacctgtttgcccgtgagcaggcggatctcaactgggagaacccggaggtgcgcgccgaggtgaaaaacatcatccacttctgggccaagaagggggtggacgggttccgcctcgacgtcatcaacctcatctccaaggatcaggcgttcccgaacgacgagattggcgatggccgccgtttctacaccgacgggccgcgtatccacgagttcttgcaggatgtgagccgcgacgtctttgccccggtcggcgccatgacggtgggggagatgtcctctacttcgctggagcactgccagcgctacggcgcgctggatggttccgagctctccatggtgttcaacttccaccacctgaaggtggattaccccaacggcgacaagtggaccaaggcgccgttcgatttcctcgagctcaagcgcatcttcaaccactggcagagcggcatgcacggcaaggggtggtcggcgctgttctggtgcaaccacgatcagccgcgcatcgtctcccgtttcggcgatgagggcgagcatagggtagtggccgccaagatgctggccagcacgctgcacggcctgcaaggcaccccctacatctatcagggggaggagatcggcatgaccaaccccggctatcagcgcatcgatgactatcaggatgtggagagccgcaacatcttcgccatcaagcagaccgaagggatgagcaaggccgagatcctggccattctcggcgccaagtcccgcgacaactcgcgcaccccgatgcagtggagcgccgcggccaatgccggtttcactcaaggaacgccctggctcaagcctgccgccaactacccgctgatcaatgccgaggcggcgctggccgaccagcactcggtgttctggcactaccgggatctgatccgcctgcgcaagactcatcccatcttcacccagggggattatcaggagctgctggctgggcacccgcagatctgggcctatgcccgccgcgccaacggccagacattgctggtggtgagcaacttctacggcgagccggccaccttcgccctgccggacgagctggccaccggcaaggggcgcctgctgcttggcaactacccagatagcccggcccggccgcagtcctgtatgctgcgcccttatgaatccctgatctggctggtggagtagg

SEQ ID NO: 260777 - DNA, 451 bp, Unknown
  Bacterial polypeptide expressing nucleotide sequence isolated from the Sargasso Sea
tcgttcgatgatccaaacgcttcagcagaagactcttcgaatggcggctctgctggtgctgcacaagctacaggagcgggtgcaggagtatgggttgctataactggagccgtattagctctatttagtggtggatcatctgaggatgcaattattgttcctcccacaccaccaacgccagcgcctacgccaacgcctacgccaacgcctacgccaacgcctacgcctacgcctacgcctacgcctacgcctacgcctacgcctacgccaacgcctactacggcaacaacttcgactacagtagcaactacagcaaccactaacactggtgtaactggtactactggaacaggagctactagtggaacaactggtacgacagcaactagtgcaactactgctacaagtacaaattctacgcagccgaacagaataattaacattgactaag

SEQ ID NO: 260778 - DNA, 547 bp, Unknown
  Bacterial polypeptide expressing nucleotide sequence isolated from the Sargasso Sea
tctggaacaagcttcaaatctattgcctcagagggcgatgaagatgatgagtcgttcgatgatccaaatgcttcagcagaagactcttcaaatggcggctctgctggtgctgcacaagctacaggagcgggtgcaggagtatgggttgctataactggagccgtgttagctctatttagtggtggatcatctgaggatgcaattattgttcctcctacaccaccaacgccagcgcctacgcctacgccaacgcctacgccaacgccaacgccaacgccaacgccaacgccaacgccaacgccaacgcctacgccaacgccaacgccaacgccaacgccaacgcctacgcctacgccaacgcctacgccagtaactactggtacaactgcaactagtgctacaacagcaactggtacaacaactggtacaacaggtactactggaacaggagctactactggtacaactggtacgacagcaactagtgcaactactgctacaagtacaaattctacgcagccgaacagaataattaacattgactaag

SEQ ID NO: 260779 - DNA, 661 bp, Unknown
  Bacterial polypeptide expressing nucleotide sequence isolated from the Sargasso Sea
ccaaatggattggtaatgttgctgcctcatggttatgaaggcatggggtccgaacattcttcagcaagaattgaaagatttctacaactctgtgcagaagataattttcaggttgtcaattgtactaatccagctaactattttcatttacttagaagacaaatggtaagatcatttagaaagcctcttattgtatttactccaaaaaaactacttagatatcctagagctgtttcttcaatttctgaaatgtctaatggaaattttcaagaagtaattgatgatgcaaatgccatcccttctaaaataaataaagtagtaatatgttctggtaagttttattatgacttaattgaggaatatgaaaaaaacactttagataatattgcttttgtcagactagaacaactatatccctttccagaaaagcaactaaaatcgattgtaaaaaaatatggacaagactctcattttatttgggctcaagaagaacctgaaaatatggggccatggtcttatatattaagaaagtggaaattatcaaatatcatatgtttttctcgaaatgaatcaggtagtcctgcttcaggatctcctaaagttcatgaaataagacatcaagaaattataaataaagtaatgtcatattctaaaaaataaa

SEQ ID NO: 260780 - DNA, 895 bp, Unknown
  Bacterial polypeptide expressing nucleotide sequence isolated from the Sargasso Sea
cagccggtcagcaactggtgggacaacggcaacaaccagatcgccttcggccgcggtgacaagggcttcgtcgccatcaacaacgagagcagtagcctggtggcctcgctgcagaccgcgctgccggccggtgagtactgcaacctcttgggcggcaatgactactgcagcggcggctatgtcaccgtcgacggcagtggcaaggccagcctgaatgtgcccggcatgaaggcggccgccatcatcgccggttgcaccaaggccagcccctgcggtggttccgccctgccgggcaacaagttcagcagcatgaacctgcgcggtacccacaacgcctggggcaatacccccatgaccgtcgatgccaaccgtgtctggtcagccaccctcaccctgaccggcaacggtgatgccaccggcgcccagcgcttcaagttcgacgtcttcggcaactgggccgaaaactacggcgacaacgaaggggatggcatcgcagacaagggcagcagcaaggacattttggtcagcggggcgggcagctaccgcatcaccctgaacgaaagcgatctgcgttacacggtcacccccctcaccagcaaccaggcgccggtggccgccctctctcccaagaccctcagcgtcaaggcgggtgagagcgtggtgttcgatgcctccgcctcccgcgacgacgagggcgtggtgagctacagctggtccagcggcggtaccgccgccaccgagacggtccggttcgataccccgggcacccataccgtgacggtcaccgtgaccgatgcagaagggttgaccgccagtgccagcgctaccgtgaccgtcaccgacgacaagggcacctacgccagcgtgctgcccaccctgaatttccgcggtactc

SEQ ID NO: 260781 - DNA, 754 bp, Unknown
  Bacterial polypeptide expressing nucleotide sequence isolated from the Sargasso Sea
tgtatatagaaacggatcagtagaagtcaatgatatttatgagatttacaccacttcatccttttggaatgctttccctaggtcgccaatggtaatggatattaattttatgggagaaaattattttttaattaataatcattttaaatgttgcggagatggcataattgatcatgatgatatatctgatgaggaaagtaggagatatattgcaataaatttaattaaagaatatattgacaataatctttcagataagaatgtgattgtattgggtgatttaaatgatgatatagctgagccattgctaaataatgtatttcaggaagttatagatgactcaaataattatcgttttgcagatattgggattgcacaaggcaatagttctgattggtcatttccggattggccatcccacctagatcatatattaattactgatgagttatttaacggtattaatactttagaagttgaaacaataaaaattgatcaatttcttgatggtggttggaacgagtatgatcaaaatatatccgatcatagacctgtagcaataaaatttatctttagtttaacgtcaccttatgatatcaatgatgatgggatagtaaatgattctgatctactaatgctattatcttttattttagaaaatattgaaccaattgatttagtagatattaatcttgatctagaagttaatatttttgatttgttgcttttatcagattatatacaagaattgtag

SEQ ID NO: 260782 - DNA, 337 bp, Unknown
  Bacterial polypeptide expressing nucleotide sequence isolated from the Sargasso Sea
cctagatcacctcatttggctttagatattgcggcacctacaggaactaagattatttcgcctgaatttgggaaagtaattttgcttggagattttttttattcaggtaactatgtggttattgatcatgggcatggtttaataacctcatacagccatttatctaaagttatcgttaaagaaggtcagcttatagacaaaggtcaaaaaattggtgaagttggttcaactggtagagtaactgggccacatcttcattggacagtctatttaaatcaagtaaggattaatcctgaaataacgatagatgaagattatttagatggtattctttagc

SEQ ID NO: 260783 - DNA, 1519 bp, Unknown
  Bacterial polypeptide expressing nucleotide sequence isolated from the Sargasso Sea
aatggctttgactcacaaccaatatgctgttgctgcgattaccgcaactctctgtttggcaggtctatacacggttgtaggggctggtctttccagtaccgatagggggggcttcgaatcagcggtggaagatttggagctaaaagaggggaaccagagagtatgccctccggatgttccaactattggatgtgattgggacggcgatggaatcgcagataggatggagagcacgttatacggcactaattggcaagaggcagacacggacggggacgggctcgatgacggatgggaaatagagaacggactggatccattggatacgggggaaccttgtatcaccataggggaaggacttaccgaagtagaatgcgaggatatcccagttgcaacagtagacaccgagagggaaactggggagcagaatgagacattcccaaatccagacaacggtcctctgggtgaccccgaccgggatggtctgaccaatctagacgaggccgagctagggacaaacccacgcctgaaggataccgatggggacggcctgaatgatcgctgggagtcagagcacacgcacgaagttactactccttctggaattgttgtgcttctagacccactggatggaaactggaactgccctctactgaccccttctgtcaaggccgagatcaagttagacattggggacgatttgtgggaggagatgggctctcagttcgggcactcctgcgatgccatcctcgatttggagcaaccagagccagatactctgaggaacttcgtcgaggaaaaatatgacacaaacccccgcgccgcagacagcgatggagatcttattgatgacttggtcgagatctccacccaccttgtcgacctgaagtccttctgcggtaggcctaccttcggaactctcacccttccagcccctcacctgagggcgttcgcctcggagatcgttttcacagcccaagagctaccaaatggaggagttcaaaccacccttcagaagaagaaccccctggataatccgaactggttcaatgaggatatggatggggatggccggctgaatggtccgggggactgggatacggacggggatggtatgcccgacggattcgaattctgctattccttcaactctgactacaattggttcctgaaccccgccaactctaccgacgcatatggcgacaacgatggagacggactgaacaacgtcgaggaattctccgtttcttacgactgggggccatccaacttcaccaacccgcttgatcacgatacagatcaagacggcatgcctgatgggtgggagttccaaagtgggattcaccccaacgacggaagcaatgccgatgaagacccagatttcgatggttacgatgccgatggggacggcgcggttacctacaaggacatgataggggccactaccatagagaggatcgatgtagagcccgggcagtacgtacaagctaataacacgattttgtgggtccgaaccgtc

SEQ ID NO: 260784 - DNA, 1933 bp, Unknown
  Bacterial polypeptide expressing nucleotide sequence isolated from the Sargasso Sea
atgagtttcagaaagatattaatttcaacctctaggtttaataagaaattgcttgttcttctgaatgattttttctgcatttgtgttgcaagtttatttgcattagtgatcagtgacgtaaattttggttctattcatttcgagcagtttttaagactcatatggctgcctttgttttgtgtaacttccttttggttcttaggagtatatagctctgtcgttaggtatattgatttttcagttgttatcatcattgctagggctatttgtattgtttttttagccaatctcttaattcaatttctatatggtacttttttaaatttttataatttttcttattcagagcctattattagtttaattgggtggctagtaggattagtaaccttttcttttttaataattatttctagattaatagctagtttgtatttatcggagactgattcagaacaaaaagtagttatttatggtgctggctcagctggaattcaattagctagagcattaagagtcagtaaagaaatacaacctgtagcatttattgataataacgtatctttgcatggaacttacttgggaggcattaaggtactgcatcctaaaaaactagagagattagcgtctagaggaaaagtagatgaagttttgattgcgatgccctcagtttcaaggtctgctttgagatcgctgctgaaagagatagaagtatattcagtaagagtaagaatactgccgggactagctgaacttgctcaaggcaaggtccttgtatcggaattaaaagcagtagacacggtagatctcttaggtagatctgaagtagaagctgatccagatcttttacataaaaatatcaagaataaagtcgttctaataactggtgctggcggttcaataggttctgagatagcaagacaagcggtaaaaggtcaacctaatcacttgataatcttagattctaatgagtacgcactttatttattaaagatggaaattgaatctaaaaattatgatgtaaacctgcattcaatcatcgctaacgtaacaaatgaaaagaggattaaagatatatgtaagactttcaaagtagacacaatatatcattcagctgcttataagcatgttccgttagtagaagaaaatccttttgaaggagtatccaacaatatatttggaacaatctcttgtttaagggcggcaatagattctgaagttgaaacctttgttttagtttctacagataaggcagttaggcctacaaatattatgggggctacaaaaagatttgctgaaatgattttacagtcctattctgaagactcggcaagaagaaaaaatactcggatgacgatggtacgatttggcaatgtactaggatcttccggctcagcaatacctttgtttcaagaacaaattagacaaggaggccctgttactgtcactgatcccgaggttacgagatattttatgtcaattcctgaagcagctgaactggtaatacaggctggagccatgggaaaaggtggagacgttttcgttttagatatgggtgaaccggtcaaaatagtagatttagctaagagattgattagcttgagtggcctagagcacctagatgaaaataatccggatggagacattgaaataatttttacaggtttaagaccgggagaaaaactttatgaggagttacttattggagaaaatgtaagtgagacagaccataaacaaatccttagagctgaggaatcctttctatctataaaagaaatagaactttgtgtggagaaattaaaagaagtcaaaaatcaaaacaatgtggttgctttaaagcaaatttttcaagaagtcatagatggttatgaaccagaagaggaagtagttgatgtcataactatgagagaacaagaaaacttagattcataga

SEQ ID NO: 260785 - DNA, 638 bp, Unknown
  Bacterial polypeptide expressing nucleotide sequence isolated from the Sargasso Sea
gcaattcgcggtgggcgagtactgggacgcgttggcgtataacatggacgctcccgattacaatcaagacgcgcatcgtcagcgcatcgtcaattggatgaacgccgcgggtggtctcgccggtgccttcgacgtcacgaccaagggcatcctgcacgccgtgtttgagcgtcaagaatattggcgtctctccgatcaatccggcaaacctccgggcgtcatgggatggtggccgagtcgcgcggtcaccttcattgagaatcatgacaccggctcgacgcaaggacactggcgatttcctcgagggaaagagttgcaagggtacgcgtacattctcacgcatccgggcacgcccaccgtgttttgggatcacctcttcgataacgattggggatacctgcaacaaccgattcaggacatgatacgggtgcggaaacagtgcgggatacactgtcgaagcgaggtgaaaatcgtcaagtgtgaacagagcgtgtacgccgccgtcatcgacgacgtattgctcatgaagatcggtcctggcgagtttcacgccgacggacactgggagtgcgtcttgtcggggcaagattacgcgatttggcgaaagaagggagcgaacgcggcgctcacgcgatgac

SEQ ID NO: 260786 - DNA, 895 bp, Unknown
  Bacterial polypeptide expressing nucleotide sequence isolated from the Sargasso Sea
cagctggcatcgggctcaggcaccgccaccggtggcggcagctacaacgcggggcagtaccaatatccccagttcggctacaacgacttccaccacagcggcgacatcaccaactacggtgacagcaacaacgtctggaacggcgccctctacggcatgccggacctcaatactggctctccctacgtgcaggatcagatcgccacctacatgaagaccctgctcggctggggcgtggcgggctttcgtatcgatgcggccaagcacatggccccgaccgacgtgaaggccatcctcgacaaggcgggcagccccaaggcctacctggaggtgatcggcgcaggcggggagtccgccgacatccagcctggtcgctacacctacatcgataccgtcaccgacttcaaatacggcaccgatctcgccgccaacttcaacggccagatcaagaacctcaagaccctgggcgagagctggggcctgctcccctccgctaaggccttcgtcttcgtggtcaaccacgaccgcgaacgcggccacggcgggggcggcatgctcaccttcatgagcggtgctcgctacgatctggccaacaccttcatgatggcctggccctatggctggaagcaggtgatgtcgggctatcgcttcgaaaacatgagcacctatgaaaccgacaagggggcaccgggcagcacaccttgctcggacagccagtggaactgcgaacagcgccggccgaccatcatgaacatggccctgttccacaaccggaccgaaggccagccggtcagcaactggtgggacaacggcaacaaccagatcgccttcggccgcggtgacaagggcttcgtcgccatcaacaacgagagcggcagcctggtggcctcgctgc

SEQ ID NO: 260787 - DNA, 988 bp, Unknown
  Bacterial polypeptide expressing nucleotide sequence isolated from the Sargasso Sea
tccgagagtctctgcgaacctcatctccaactgcagagaatacgacgtgttgcccgtgctcgacgctgtcttgaaccatcgctgcgcgacgcaccaaggcgccggcggcaagtggaaccgctgggagggcacgggcatggattggggagagtgggcaatcgataacagaaatccagactttgcaggtcagggcagtcacccgacgggagatgaattctcgggcgcgcccaacatcgatcataccaaccagcgcgtgcgggaagatttgtcccagtggttccagtggttgcgaaacgacatcggtttcggcggcgtgcgtttcgatttctccaaagggtacggtggacaattcgccggtgaatacatcaacgccatgggtccagaattcgcggtcggtgagtactgggacacgctcgcgtacggagccggcttggagtacgaccaagacgcgcatcgacaacgcatcgtcgattggatcgacgcctctggtggaaactgtaccgcgtttgatttcacgaccaagggcatcttacaagaggcgtgcggtcgcggagagttctggagactcgtggatggacaaggaagagcgccgggcgtgctcggcttgtggccggcgcgcgcggtgaccttcatcgacaatcacgacaccggttcgacccaatcgcactggcccttcccacacgacaaggtcgccatgggatacgcctacatcctcacgcacccggggactccgtgcgtgttttgggatcactacttcgattggggcgagcacctctcctcgcacatcaagacgttgatgcaaacgcgcgagagctgcggcattcacagccgaagcaagctcgaaatcatcgccgcgaccgacggtttatacgccgccgtcatcgacaaaaaggtggccatcaaactcggaggcgactcgtggtccccccagggcgacggttggtcccacgtgtgcggcgagcacgactggagcgtctggcgtcggtga

SEQ ID NO: 260788 - DNA, 1106 bp, Unknown
  Bacterial polypeptide expressing nucleotide sequence isolated from the Sargasso Sea
cgagcatattacaggcaaccaatggtggactcgctatcaacctgtgagctaccaactgcaaagccgaggcggtaaccgaacgcagtttgtagatatggttaaccgttgtaaaagtgcaggggtcgatatttatgtagataccttaattaatcacatggcggctggcagtggtaatggcgttgcgggtagcacgtttggtaataaacaatacccaatttatagcccacaagactttcatgaaagctgtagtataaatccagaagattacggtaataatcgttaccgcgttcaaaactgcgagttagtaggacttgctgatttgaatacgtcttcaaattacgtgcaaaatactctcgctgcttatattaacgaccttcaggctattggagtaaaaggttttagatttgatgcggctaaacacgtagcagctagcgatattcaaagccttatggctaaaataaatggctcgccgttagtgtttcatgaagtgattgatcagggaacagaagccgttgatgcctctgagtatttaagtacagggctagttaccgagtttaaatacagtacacaactcggtaatacatttagaaacggctcgcttgcatggttaagtaattttggtgaagggtggggctttatgccaagctcgtcagcggtcgtatttgtagataatcatgataatcagcgggggcatggtggtgcgggtaacgtaattacctttgaagatggccgcttatacgacctagctaacgtatttatgttggcgtatccgtatggctatccaaaagtaatgtcgagttacgatttccatggtgataccgatgcgggcgggccgagtgttcccgttcataacagtggtaatttagaatgttttgcaagcaattggaaatgtgagcatcgttggtcatacatagcgggtggcgtcgattttagaaataacaccgccgacaactgggctgtgacaaattggtgggataacactaataatcagatttcatttggccgcggtagctcaggtcatatggccattaacaaagaagacgcagcgctcaatgccactgtgcaaacagacatggcgcctggccaatattgtaatgtattaaaag

SEQ ID NO: 260789 - DNA, 1273 bp, Unknown
  Bacterial polypeptide expressing nucleotide sequence isolated from the Sargasso Sea
ttgattcttcaaggtttcaattgggaatcgtgcgacgagggcgaccgaaatgggaagagctggtaccaagttttgaacgagcgagtgccggacattgcggcggcgggtttcacggcggtgtggatgccgccggcgacgaaatccgtcagtcgacaaggatatttgcccacggatctgtacaatttgaattctttatatggctcggaggatgagctcagatcgtgtgtcgctcgcatgcgagagtacaacatcactcccgtcgccgacatcgtcatcaaccatcggtgcgccgaggcgcgggacgacgcgggtcgatggaacgtgtacacgggacgattagactgggattcgcgcgcgatcacgtgcgaaaatcaggaattcggtggtcgcggttcgcagagcacgggcgaggactatcttcccgccccaaacatcgatcacacgcaagagtttgtgcgcaacgatttgaaggagtggttggcgtggttacgccaagacgtcggtttccgcggttggcgtttcgactttgtcaagggttacagcggtgtattcaccggtgagtacgtcgaagcgacccgtccgttcttgtcgtttggtgaattctgggacgagtgctcgtaccgcgacggggttttggagtacaatcaagatagccatcgccagcgcacgtgcgactgggtcgactccaccggcggcaacacggcggcgttcgatttcaccaccaagggtattttacaggaggcgctcgcgcgaaacgaatattggcgtctgatcgacgcccgtggtcgtccaccggggttctgtggcatgtggccgtcgcgcgctgtcacctttatagaaaatcacgacaccggttcgacgcttcaacactggccgtttccgtcggataaaatcttgcaagggtacgcgtacatcctcacccatccggggactcccacggtgttttacgaccactgggcggaccaaagtcttgtcgaagcaatcaacgacatgctcgcgattcgtaagcgcaacgagatttcatccaaagattgcgcggtgcacattcaagtggcgacggcgggcgtctacgccgcgcacgtcggtcactcgccaaatccgtacacggagggtctcagcatggacgttgacaccacgcgtccatctatttgtatgaagatcggtcacggtgagtggtctcccaactcgaagagtgttggggacttgtcgtggcagtgcaaagcgagcggagacggatgggctatctgggaagataaacgcttcgccgagtgag

SEQ ID NO: 260790 - DNA, 766 bp, Unknown
  Bacterial polypeptide expressing nucleotide sequence isolated from the Sargasso Sea
catgaaaaaattctctgtcgtcattgccggcggtggcagcacctttaccccgggcatcgttctcatgctgctggagaaccagcaccgcttcccgctgcgggagatcaagttctacgacaacgatggcgcccgccaggaggtgatcgccgaagcctgccgcatcctgctgcgggagcaggccccggacatcgccttcagctatggcaccgaccccaaggcggccttcagcggggtagacttcgtgatggcccatatccgggtcggcaagtaccccatgcgcgagctggacgagaagatcccgctgcgccatggcgtggtcggccaggagacttgcggcccgggcggcatcgcctacggcatgcgctccatcggcggcgtgctggagctggtcgactacatggagcagtactcgccggatgcctggatgctgaactactccaacccggccgccatcgtggccgaggcgacccgtcgcctgcgcccccacgccaggatactcaacatctgcgacatgcccatcggcatcgagggacggatggcccagatcgccggcctgccgtcacgcaaggagatgcgggtgcgctactacggcctcaaccacttcggctggtggacccgcatcgaggatctggcgggcaacgacctgatgccggccatcaaggcccatgtggccaagcacggctatgtgcccaagcaggctggccacgccgaggccagctggaacgacaccttcgccaaggccagggacgtgtgggcccttgatccg

SEQ ID NO: 260791 - DNA, 708 bp, Unknown
  Bacterial polypeptide expressing nucleotide sequence isolated from the Sargasso Sea
actcctggctcaacctcgcctccgccatctggttcttcctgaccccgcaggcaccaaaacccgccatgctgcacgtgattgatcgcacctgggtgccctcccagcgcgaaatcgccgccggtatcggctacggcttcggtaccaccatcaacgtcatcaatggcggcatcgagtgcggcgagcagaacaagaacaagggccagccggtcaaccgcatccgctactgggaagggctggccgagcactatcagatccccgtcaaggccgatgagaagaacacctgctggcagcagaccccctatggcagcctcaacctcaacggtgccaccgacgtgctctacaccaactgggacggcaactggaaatactatccggatcggcccggcggctactcgtttgaatgtgagctggtggggttccagaccgcctactcggcactggtaccgggggattacgagaagtgcgtgaccaacttctacggctcccacgccaactggcccaaggtgcgggtagtggccaagctggaccctgcgccggttgatccgaccgatccccccgtgggcgatgtggccgcctggagcgccagcaaggtctatacggcgggcaacaaggtgagctacaagggagccatctatcaggccaaatggtggacccagggcaatgaaccgggcaagggcgatccctgggtgctggtgccggcgaaatagc

SEQ ID NO: 260792 - DNA, 504 bp, Unknown
  Bacterial polypeptide expressing nucleotide sequence isolated from the Sargasso Sea
aaaataaggatagatcttttatatctcttatgaaaacatttgaaacatcatttaaaacaattattgaatgttcggaatgtggtaatttggacacagttgatccatgtaatatttgtacaaatcataatagggatagaagttctatttgtataatcgaagacgtttctgatttatggacatttgaaagaattggtttttataaaggactttatcaggttttgggcggaagtttatcagctataaatggtataggaacagaagaattatctatagataaattactagatagaataaaaaaaaataaaataaatgaagtaattttagctttaagtactacgatggaaggacaaactacaagccatgttattgctgaaaaacttgatcaaatcaaaaatttaaatgttacacgtttagctcaagggattccgattggaggagaagtacattatctagatgagaatacattaaatactgcatttcagttaagaaaaaaaattatttaaa

SEQ ID NO: 260793 - DNA, 716 bp, Unknown
  Bacterial polypeptide expressing nucleotide sequence isolated from the Sargasso Sea
ggatcaagcgcagcctcgccgccttgcgggagtgcatggcatgaacgacagcctggatgaactggccagtgaatacgtgctggggacactgcccgccgaacagcgcgctgaggtgcaacaacgcctggcccatgatgcggcactgcgtgcagcggtggatgcctgggagcagcgtctgttgcctctggtcgcgctggcacaaccggtgccgccttcggcacagctgtggcggcgcattgaacgccgcatcaaagcccccgaaacgagcgtggcgtggtggaacctgctggcgttctggcgcgggctttccgctgctggcctgatggcaagcgtggtgctggcggctttattactgacgcgcccgcccatgcccgcacccagcttcgtggtggtgttgatggcgccacaaagccaggcaccgggctgggtggtgcaggccagtgataatcagcagatccagttgattccactgggggtgatcgagattcctgccgacaaagccctggagttctggaccaagggcgatggctggcaggggcccgtatccctggggctggtcaagccggggcagaccttgtcggtgccgctggacaagctgccgccgctggcgccgaaccagttgtttgaactgacgctggaagggcccaatggctcgcccaccggcaaacccaccgggccgatccacgggatcggccgcgcagtcaaagtgctttgat

SEQ ID NO: 260794 - DNA, 2869 bp, Unknown
  Bacterial polypeptide expressing nucleotide sequence isolated from the Sargasso Sea
aatgctattacgctttttatctatattcagtttgtttttaattgtttcttgtggaggaggtggtgatacctcaatagattctccaggagaacttggtcaggtttcagcaccaactgctgctgaccaacaagttgtagttggtggttctgtactgacgggaacttgtcctagctcatcaaacattgatgttgacgacagtattggtggtaacactgtctgtgcaatatcaggcaccataactggtgatcttacgttaactgatgatgtaatttatagattaagcggcacagttaatgtgggtgccgacatgggaggagatggaacaaaagctggaggttcagctggtgttttgaacattcctgcgggagtaaccattgtttcaaaaacttctgctgattatcttgttgttcagagaggttcaaagattgaagctaaaggaacagcatcaaaaccaattgtattcactcactcttctgttttagatggttcacttacaaatccagatacagctagtggtctctggggtggattggttatcttaggtaaagcacctataaataaatgttctaatgatgttcgaggtacagcaagctgtgaaaaactcgtcgaaggagcaacagatgctctcatgggtggagcaactccaaatgataattcaggaacattaagatttgttagggtcgaatatgcgggttacgaaatattcccaggtaacgaattaaatggaatcacttttggtggtgtaggttcaggaactaccgttgattatgttcaagttcacaataatcaggatgattgtgttgagttttttggcggcactgtaaacgttactcatttggtttgtacaggtgctggagacgataaccttgatattgattggggttatacaggcaagatgcagtacgttgtagttaaacaatctagaggtgccggagatcacattgttgaatcagataatacgaatgctgatgcatcagtcggatatttaactactccaagatctcaaccaaaaattgcaaactttactttcctttcaaccggtagagacgaagctctaaaatataaagaaggtgtatccggtatgtatatgaatggtattgttgtgagttctggtgataaaggttgtattgaacataccaaggcagaaacactccaagacgcacctggttatgacaaaattgctcatcattcagtcttcatggattgtggaactggtggtgtttataatgcaggagacgattctgccacagtagcagaattacaagcttctattgaatctagagctactaacctagttactgacaaaactaatacattggttggtcagatgttcttgggaactaacgaatctggtgttgtttcggcatttactaatcaaacagctgtttgtgcagttggatctcatgcaagtggaacttcaaccttgtgtccaagtgacgcaactcaaattgatggttttttcgctaaaacaaactatgttggtgctttcgctccaggatctgatgaagacaacaactgggcagcaggatggactaaaggtctttttactgcaccagaatgtccagtcggaacttttgaatctgagcaactagaaggtaaaaaagtctgcagtgttcagggaaccttaacaagtgatgtcaccttaacaagaggcaacttctacaagcttgtaggaaaagttcaagttggtgaagacatgggtggcgatggaacaaaagatggtggagccagtgctactttaacaatagagcccggagttactgtatttggtgaatctggatctgattatttaatcgtaatgagaggttctaaattaatggctaatggtacaaaatctgcaccaattatcatgactggtagagatgatgttacaggacaagctactcagttttctagaggtttatggggtgggttagttttacttggccaagctccgataaacaaatgctctaatgatgtccgaggtaccgctgcttgtgaaaaagtagttgaaggttcatccgatgcacttatgggcggaaacactcctgacgactcaagtggatcactaaaatatttaagagttcagtatgctggatatgaaatatttccaggtaacgaattgaatggaatcacttttggtggtgtaggttcaggaactactgttgaatacgttcaggttcataataatcaagacgattgtgtagaattcttcggcggtacggttaatgtcaaatacttaatctgtacaggtgctggagacgataaccttgatattgattggggttaccaagggaagctacaatttgtaattgttaaacaatcatctgatgcgggtgatcatattgtagaatctgataacaccaatgccgatgcatctgttggttatttaacagagcctagatctcaaccaattatttcaaactttacttttatcagtaatggtaaagatgatgttatcaagcttaaagaaggtgtttcaggaatttatacaaatggtattgtcatagatgcatctaatagtaaggcctgtattgaaaccactaaagctgaaactttccaagacgctgcaacaacgccaaaggttacatttaactcagtagcatttgattgtaaggcgttagcagcactgggtgatgacgcaggaacacttgctcaagctgaagctttaataactgtaggaagtaataacctttactctgtagattctggtggaggttcatacgttccaacagtttcaggagtaattaatggtacagctgaaaatgcaatgacggtagctgataaatcagcagatgcattctttacaactactgattacgtaggggctgttaaagattctactgatacttggtataaagattggactgttgctggaagcttaaattaa

SEQ ID NO: 260795 - DNA, 2869 bp, Unknown
  Bacterial polypeptide expressing nucleotide sequence isolated from the Sargasso Sea
atgctattacgcttttcatctatattcagtttgtttttaattgtttcttgtggaggaggtggtgatacctcaatagattctccaggagaacttggtcaggtttcggcaccaacagctgctgaccaacaagttgtagttggtggttctgtactgacaggaacttgtcctagctcatcaaacattgatgttgatgacagtattggcggtaacactgtctgtgcaatatcaggcaccataactggtgatcttacgttaactgatgatgtaatttatagattaagcggcacagttaatgtgggtgccgacatgggaggagatggaacaaaagctggaggttcagctggtgttttgaatattcctgcgggagtaaccattgtttcaaaaacttctgctgattatcttgttgttcagagaggttcaaagattgaagctaaaggaacagcatcaaaaccaattgtcttcactcactcttctgttttagatggttcactttcaaatccagatacagctagtggtctctggggtggattggttatcttaggtaaagcacctattaataaatgttctaatgatgttcgaggtacagcaagctgtgaaaaactcgtcgaaggagcaacagatgctctcatgggtggagcaactccaaatgataattcaggaacattaagatttgttagagtcgaatatgcaggttatgaaatatttccaggtaacgaattaaatggaatcacttttggtggtgtaggttcagggactactgttgattatgttcaagttcataataatcaggatgattgtgtagagttttttggcggcactgtaaacgttactcatttggtttgtacaggagctggagatgataaccttgatattgattggggttatacaggcaagatgcagtacgttgtagttaaacaatctagaggagctggagaccacattgttgaatcagataatacgaatgctgatgcatcagtcggatatttaactactccaagatctcaaccaaaaattgcaaactttactttcctttcaactggtagagacgaagctcttaagtataaagaaggtgtatccggtatgtatatgaatggtgtggttgtcagttctggagataaaggttgtattgaacataccaaggcagaaacactccaagacgcacctggttatgacaaaattgctcatcattcagtcttcatggattgtggaactggtggtgtttataatgctggagacgattctgctacagttgcagaattacaagcttccattgaatctagagctactaacctagttactgatcaaactaatacattagttggtcaaatgttcctaggtactaatgaatctgatgttgtttcggcatttaccaatcaaacagctgtttgtgcagttggatctcatgcaagtggaacttctaccttgtgtccaagtgatgcaactcaaattgatggtttcttcgctaaaacaaactatattggtgctttcgctccaggatctgatgaagacaacaactgggcagcaggatggactaaaggtctttttactgcaccagaatgtccagccggaacttttgaatccgagcagctagaaggtaaaaaagtctgcagtgttcagggaaccataacaagtgatgtcaccttaacaagaggcaacttttacaagcttgtaggaaaagtacaagttggtgaagacatgggtggtgatggaacaaaagatggtggagtcagtgctactttaactatagagccgggagttactgtttttggtgaatcaggatctgattacttaatcgtaatgagaggttctcaattaatggctaacggtacaaaatctgcaccaattatcatgactggtagagatgatgttacaggccaagctactcagttttcaagaggtttatggggtgggttagttttacttggccaagctccaataaacaaatgctctaatgatgtccgaggcaccgctgcttgtgaaaaagtagttgaaggttcatccgatgcacttatgggcggaaatacttctgacgactcaagtggatcactaaaatacttaagagttcagtatgctggatatgaaatatttccaggtaacgaattaaatggaatcacttttggtggtgtaggttcaggaactactgttgaatacgtccaggttcataataatcaagatgattgtgtagaattcttcggaggtacggttaatgtcaaatacttgatttgcacaggtgctggagacgataaccttgatattgattggggttaccaagggaagctacaatttgtaattgttaaacaatcatctgatgcgggtgatcacattgtagaatctgataacaccaatgccgatgcatctgttggttatttaacagagcctagatctcaaccaattatttcaaactttacttttatcagtaatggtaaagatgatgttatcaagctcaaagaaggtgtttcagggatttatacaaatggtattgtaatagatgcatctaatagtaaggcttgtatagaaaccactaaagctgaaactttccaagatgccgcaacaacgccaaaggttacatttaactctgtagcgtttgattgtaaggcgcttgcagcactgggtgatgacgcaggaacacttgctcaggctgaagctttaataaccgtaggaagcaataacctttactctgcagattctggtgggggctcatatgtcccaacagtttcaggggtaattaatggtacagctgaaaatgcaatgacggttgctgataaatcagccgattcattctttacaactactgattacgtaggggctgttaaagattctactgatacttggtataaagattggactgttgctggaagcttaaattaat

SEQ ID NO: 260796 - DNA, 858 bp, Unknown
  Bacterial polypeptide expressing nucleotide sequence isolated from the Sargasso Sea
ggtggtaatggaaatgactcgttgattggcgattccggcaacgacacgctcaccggtggtgccggtaatgatctgatcgatggtggttcctacggaacagatattgcggtcttcagcggaaatctgagcgactaccgcttcaccgaaaccaccaacggacgcatcaccgcagaagatctgcgcaccggttcaaccgatggcaccgacactcttgttgacatcgagcaagtccaatttgctgatcagaccgtctccatcgctgatgcgcttcggctgacaggcacattcaccacggttgaatctcaaggctctgttgaacttcaaaaagatgccaacggcatgggttgggttcaacttgctgacggctcactcgatgacatcacccaggctggacgccgcgttggtgatagctcctggatgggttggtctcctgtagccgctgaaaccatcaacggccagaacaaagtcatctggtctcataacagcggcaccatgatggagtggaatcttgactccaactggagccagacatcacagcagtttcattcggctggctccaatggtttcttcgctgctgagtccgctttcaacatggacttcaatggcgattcgatcatcggtcgatccaacaccacggttgaatctcaaggctctgttgaacttcaaaaagatgccaacggcatgggttgggttcaacttgctgacggctcactcgatgacatcacccaggctggacgccgcgttggtgatagctcctggatgggttggtctcctgtagccgctgaaaccatcaacggccagaacaaagtcatctggtctcataacagcggcaccatgatggagtggaatcttgactcc

SEQ ID NO: 260797 - DNA, 454 bp, Unknown
  Bacterial polypeptide expressing nucleotide sequence isolated from the Sargasso Sea
atgttatattttgcctatggaagtaatcttaattggcatcaaatgaaaaaagaaagatgtccaggttcaaaatatattcagccgtatattctcaaaggttataaattagtatttagtcatcgtaatccaaacaataaatatggtcatgccaatatagaaaaaaataaaaattttacagtaccgggagctatttggagccttagcaaattacatgaaaaaattttggatgaatatgaggccacgaattacaatccaccttattattataaggaatattttagctggaaaggaaaaaaagttttggtttatattcaaaaaatttatacaaaaagaaaaccatcttcttcatatctgcatactattttagaaggttataaggattgtaatttagatattaattatttaaaaaaaagaatatcaaattacactttgaactacacagttcattggtaat

SEQ ID NO: 260798 - DNA, 1738 bp, Unknown
  Bacterial polypeptide expressing nucleotide sequence isolated from the Sargasso Sea
aatggcgactccaaaagtagttctcactgcagacagaactttgatgtctccatatcgaggtatttctcttgcaacattctttggatgtgctcctgcaattgatcctaatcgtgataaaaacagtttctggtataaaattctaaaaaaccaagttactccaaaagtattatttgattttatttgtaattggtctcctgatatcaatggtgttgccaaatttgctccatatggattacgaaaagttgaggctggattgttacgtgatggatatgctcgaaaagatgtagttgttgctcatccaaatcatattgaaaaattcattggtcctgaaaccgaagttgttggaacatacgaaatggatcctcttggaatgggtcctgtaacaatgacctttacctttggacgaaaacaaacatcatatgatgaatattacaatgcagaattacatagaagaattaatgcagcaaagaaaaagaatggaagtcatgctaaagttattgctggtgcctctggtacatggcagtacaattacgcacctgaaaaaattgaagaatatggattatatgcaatcttagaaggagagatgggcggaattgcacctgaaatagatggacatgctggtagatttttcgattacttgattgatggacaatttgaaaacatggatccatttagaaaaagaaaagatttcaaagttgacattaaagaattcaaacgtggtgacaaaacacaccatggaagatttgttaatttctgggatagaccagaactagatgagattcctgaaattgttgaaccaagtatgcatggcatggttgaagtaatgcgtggttgtggtcgtggatgtaaattctgtgatgtcactcttcgttctttaagatactactctcctgaaaaagtacaaaaagaaattgaagtcaatatcaaaaaaacaggattagatagagcatggcttcatagtgatgatatctttgtttatggaatggatataagaaccgcaaaaaatatggaaccaaatcgtgatgcattagaagatttgtttaaagcagtaatggctaccggtatcagacacacaaacccaactcatggaactctttctggcgcaattgccgatgaaagattagttccaaacatttcaaaaataattaatgctggacctgataatctaaccggaattcaatgtggatttgaaactggaagtacaagattaattgaaaaatatgctgatagaaaacttgcaccatatagtcctgatgaatggcattgggttgttaaagaaggtgtgaaaactcttaacgagaattactggattccagcatttactctgattatgggtctagataatgatgaacagccagaagatggttgggagactatcagattaattagtgaattagagcgagaacaaccagaagcaatgttcactgctactcctttaacattcgttccaattggattgctagaaaaatctgaattttatgatatgggccaagataatgacccaacacaattaggtgtaatgtacaagacttggcaacacaacttcaagtatggaattcaaaagttcatgaccaagactggaaaacatggtagtgctggtagaataaaggctgcagcatttaatggactagcacgttccttaggtggtgttccattaggcgcaatggaaagatatgcacgaagaaaaggtagagaacatgagcgtgtaattgagaaaatcaaggctgaatattggtaa

SEQ ID NO: 260799 - DNA, 314 bp, Unknown
  Bacterial polypeptide expressing nucleotide sequence isolated from the Sargasso Sea
catgttaaatattttagtgattggatccggggcaagagagcatgcaattgtgaggtctcttagtcgctcttcaaaaaagaaagagatatactgtctcgctacaaattataaccctggaattgctgaggtctgtaaagatatggcagttgcagatataaatgatttagaaaccgtaaaaatttatgcaaaaaagaaaaagatcgattttacaattattggtcccgaaaatccactcgcaaatggtgttgcagatgccctatctgatataggaatagaatccgttggccctaaaaaagacctcgcgcagattgaga

SEQ ID NO: 260800 - DNA, 2105 bp, Unknown
  Bacterial polypeptide expressing nucleotide sequence isolated from the Sargasso Sea
catggacgagtcagcgactaactacaaccccgcagccacagaggacgacggaacctgcgagtacgatgatgacgagacctcgacagacttcgcagggatctcaggattcgactctagctccatagagtgcggtccaactggtgacatctccatagccggttccagcacagtattccctgtggcaaacctgtgggccgaggcatatcagaagtattgcaacggaatcgcgatcaccctcgagggcggtggcagcggtgccggcgcaggtcgagtatgcgacaactcagagaagggaaccgccgtagacatcggggatatgtccagaggatggaagacctcagaggcatctgtcagatctgatggctacacatacgactgcctaaagggcgacaccagtcgctcagcagtacagatcagcatagccgcagacggcctctcagtagtcgtcaagaagggtggcgctgctgagacttgcatctcaggcctacctgggggcggtctatcagtcgatcaggctcgatggatatggagcgactacacagcagccgagctgaccgcttcaggttgggactccagcgctctcgccaacagcgacaacgacgactccactcacctttggagcgagctagacgccagttgcccagcatccgagatcaagatatcaggtgccgactccgagtcaggtacctacgagttcttcatggacgcaatgctttctgatgcaggtaatggtgaaacattcgacctcaacaggccagacggttacaccaacagcgccgaggacgaggttgtagttaattacctcgagtccaatgcagactcgataggctacttcggctacgcctactacaaggccaaccaagacaagctaactgcaatcgcaattgagaactctgatggagattatgtcgctccgtcgccccactcagtggctgacggctcctacaacccactagggagattcatctacatgaatctgcacaacgacgcacaatctctgcagaagacagcgcctttccttgcattcgggctctccgccagcggagctgctctagttgagaacgtcggatacgtcccaatgacccctaccttggtcacggtaatgctgtcaagggccggtgcggacgggggggtcgaccttacatccgtgaactgcggaccaacaggggccatcagcgtagctggctcctcgactgtcttccccgtggctaacctctgggcagagatctaccagacggcttgtgacaccactctgaccattgagggcggcggcagtggtgccggcgcaggtcgcgtttgcgacaactccgagaagggtacagcggtaatgatcggagacatgtccaggggttggaagtcctctgaggcatcagtcagaccaaacggatgggtgtacgattgcctgaagggagacacttctcgcgcagcaggacagttcccaatagctgccgacggactctccgtcgtcgtcaagaagggcggggcagcagagacctgcgtcaattcgatgggtggcttgactcctgaccaggtccgatggatatacagcgacttcaccgcagcacaacttgctgcagcaggttgggacaccaactctcttgccaacagcgacaacgacgactccactcacctttggagcgagctagacgccagttgcccagcatccgagatcaagatatcaggtgccgactccgagtcaggtacctacgagttcttcatggacgcaatgctcaatggaggggacggtggcgagacattcgacttacagagaccagacggttacaccaacagcgccgaggacgaggttgtagtcaactaccttacatcaaacggcgactcgatcggatacttcgggtacgcctactacaaggcgaaccaagatacacttactgccgtggcaataatgaacgatgcgggagaatatgtagcacccactccctcgacagtagcagacggttcgtacaacccactagggagattcatctacatgaatctgcacctagactctaacgacctggcactgacacttcctttccttgagttcggattctccagtgctggcgatgccctagtgaaccaggtgggatacgtgcctctacagcagg

SEQ ID NO: 260801 - DNA, 870 bp, Unknown
  Bacterial polypeptide expressing nucleotide sequence isolated from the Sargasso Sea
atttaattctagggggaatagtcttttatattaatgaaaccggtgaaagcggattggttgcagctatggaggatttagaaggagattatgagtggggttgtatgggagcagatgtagaaggagcagatggattgtctattggtacaggctatctgaacacaatagatatagtaaaccaaggatgtttaactgaaaatggaggtataacagcggcacaggcagcttcagatgctgaaataaacggctacagcgactggtacttaccctcaaaagatgaactctttgaagtgtactccacgataggccaaggaggtccagagggtaatctagggggtttcgaaaacaattggtattggtcttcctcggagtactatactaacttcgcgtgggatgtcggtttcgaatgtgctagcccgagcgtcagctctaagtacatttcatactacagtgtccgcccaatccgttccttcggaaatatggtaattggctgtacagattcaacagcattcaactatgattctttagccaatagcgatgatggttcgtgtatcgcagttttagttggctgtacagattcaacagcattcaactatgattctttagccaatagcgatgatggttcgtgtatcgcagttttagttggctgtacagattcaacagcttttaattataataatcaggcaaatgtcgatgacggtacttgtatagcagttttagttggctgtacagattcaacagcatttaactataatccgcttgcgaattctgatgatgattcttgtgaaccagtagttgaaggctgtatatttagttttgctactaattataatccagatgcaaacacagatgatggaagttgttccttctaag

SEQ ID NO: 260802 - DNA, 865 bp, Unknown
  Bacterial polypeptide expressing nucleotide sequence isolated from the Sargasso Sea
gccagccgcctggcgggctacgagtttgcgggcgagctgtcgctgtcgggcgagttgcgccccgtgcgcggcgcgctggccaccagcctggcgctgcagacgcagcagatcgatgcccagctggtgctgccccccggcagcgccgaagaagccgccctggtgcccgccgcgcgcgtggtgcgcgcccgccacctgctggacgtggtacgggcgttcctgccacccggcagcacggccggtggcgatgccgacgtggccaacgacggctggacccgcctgcaggccaccgcgctcgccgccagcaccaccgggcccgacatggccgatgtgaagggccaggcgggtgccaaacgcgcgctggagattgcagcggctgggggccacagcgttttgatggccgggccacccggctcgggcaagtcaatgctggcgcagcgttttgccgggctgctgcccgcgatgacggtggatgaagcgctggagagcgccgccattgccagcctggcgggccgcttcaggcccgaggcgtttggcgtgcgccccacgggccagccccatcacacggccagcgcggtggcgctggtgggcggtggctcgccaccccggccgggcgagatctcgctggcccaccagggcgtgctcttcctcgatgaactgcccgaattcccccgcgctgcgctggaggccctgcgcgagccgctggagaccggccacatcaccatcgcccgggcggcgcaacgcgcggagtttccggcccggttccagatgattgcggccatgaacccgtgcccctgcggctttctgggctctacccagcgcgcatgccgctgcacacccgaccaggtgcaccgtaccaggccaagct

SEQ ID NO: 260803 - DNA, 673 bp, Unknown
  Bacterial polypeptide expressing nucleotide sequence isolated from the Sargasso Sea
aatgtttgatgtaattgcctttgatgctgatgatactctctggcataatgaacacattttcttaaatgctcaggaaaaattttctgaggtttttgactcagaccagtctagtatggttcaaaatgctttatcaaaaaaacatattgaaaatataaaaatttatggatacggagttaaaggatttatactctctatgatagaaacttttctggaaatcagaaaagtgcagttcagcaataatgaagttcaacaaattctagattttggaagagaaatgctatcaactcctgtagatttggtaccaaatgtatttgaggttttaaatcaactgcatagagattatatattaatgataataacaaaaggtgatcttttagaacaagagaaaaaaatttctcggtcggggctaactaatttttttaaaaaaattgaaattgtaagtgataaaactgtagaaacttataaaaaaatcttaactcgatacgaaattgaggcgcatcgttttttaatggtaggcaattcaatgagatctgatattgttcctgtagtcaaaattggagcaaatgctgttcatgttccctataagacaacatgggagcatgaaaaagagcaccctcatttggatgaagataaatattatgtgttggaaaatatcggtttattaccagatttt

SEQ ID NO: 260804 - DNA, 628 bp, Unknown
  Bacterial polypeptide expressing nucleotide sequence isolated from the Sargasso Sea
ttttcataaagcgcagatgaagtttatcgaactacattctcatatcaaagatcctgaagaagtgatatatcaaattgagaagaaaaatatcaagttttatggctatggagtcaaagggtttatactgtctttattagaagtatcagtacgtttctccaacaaccaaaccgatttccaaaatatagctaaaataataaaaatcggaaaagatatgcttgctcatcccatacaactcttacccaatgtaaaagatacacttcgacatctctcagagcactatacgcttataatgataacaaaaggcgatttgcttgatcagcagagaaaagtaaaggaatccgggcttttgaaatactttagctcaatagaaatcgtttcagaaaaagacgatcaaacatatctagaaattttgcaaaagaataatactgtcccgaaggacttcttaatgattggaaattcattaaaatctgacattctgcctgttacaaaaattggcggaacgggaatttatattccccataaatttacatggagacaagaaaaagttgatagtacctatgatctaaagagttttgtcaaactgaaaaccatatcggctttaaaggtatggttaaaaaaccaaatttaa

SEQ ID NO: 260805 - DNA, 532 bp, Unknown
  Bacterial polypeptide expressing nucleotide sequence isolated from the Sargasso Sea
ttgtttgcattaatcggtgggcttattctgaatttgatgccttgcgtttttcctgtgctatctctaaagatatttaactttattgaaaagtctgattccccgaaagaagttaaagctcatggattaatctttgcttctggagcaatactcacatttttattaatttgtagcctaattttattattcaaatattttggagttcaggttggctggggatttcaacttcaatcgcctatttttcttaccttgctaatattcttatttatttttttatctggtttttttatttcttctctaaatcttaatgtggctttttctggtaatgcagtttcaggttcatctggatactcaggtagtttctttacagggttccttgctgtaatagtagcaactccttgcacggctcccttcatgggttcggcacttggtttagcactgcttcaacctagttatcaaacttatccaatttttttatctttagcgttaggtttttgtctcccctatcttgttcttagttttaatcctagattaa

SEQ ID NO: 260806 - DNA, 901 bp, Unknown
  Bacterial polypeptide expressing nucleotide sequence isolated from the Sargasso Sea
gtcggcgtcggccagcgtggcgtgatcgtcgtgtccgacgaccacgggcacaactggcgccaggtccccagtccggtgcaaagcgatctgactgcggtgagcttccccacaccgtcgcaaggctgggctgtcggtcacgacggcgtgattctgcatacgtcgaacggcggcacgagctggagcaaacagctcgacggacgcatctccaacgagcgcttcgtcgcctactaccgggacgccgcggcacacggcgacgcgcatgccgccgcctatcagaagcaggaagaaaacaacgccaaggcggggccgtcgctgccctacctcgatgtctggttcgacaacgccatgcaaggctatgcggtcggctcgttcggcgcgttcgccatgacgaccgatggcggcaagacctggcagcccggcctcgaacacatcgacaacccggacttcctgaacctgaacgcgattcgtggcattggcggcgaagtgtatatcgcgggcgaacgcggcaccctgttccggctcgatcgcgcgagcggccagttcaagcggctgcaatcgggctacagcggcagcttcttcggcatcgtcggcagcggccagcggctctttgccttcggtttgcgcggcaccgtttatcagagcaccgatcagggcgccagctggcaaaaaaccgacacgggtaccgattcgacgctgaacggcgccaccgtgctgggcgacggccgcatcgtgatctgcggcagccgcgcgatgctgctggttgccgacccggttagcggcgccttccagcgcgtctcggccgatacgccgatgctgttcgccggcatcgccgcagacggcgcggatcgcgtcgcgctcggcggttcgagcggcatgagcgtcgaggcaatcggcccacgcc

SEQ ID NO: 260807 - DNA, 778 bp, Unknown
  Bacterial polypeptide expressing nucleotide sequence isolated from the Sargasso Sea
aatgaccaaaaatcatttttacgaaaaaaagggtccttacccattaaatgaaattgtaaaaattatttcatgcgataatacatttataaataaaaataatattgaaattcatggtttagaatcattaaacaatgcaacggtgaaagacattactttcttgaattcacaaaagtataaagaattttcacttaagacaaaagctgcagcttgtataacaacatctaatttatctaaatttcttccagacaaatgtattaaacttaatgttaaaaatgttttatttgcagttactcaaacttcaaaaatgttttatccttatgctgacgttgattcacttgatgaaacattaaaggatttttctaaatttaaagatatatatccaggtgttaaattcggtaaaaatgtacttgtaggcaataatgttaaaattggaaaaaattcacacataggtagtaattcaataattgaaagtaatgtaaatttaggtgaaaattgtttaatcggttcatttgtgacaataaaaaattctcttatatctgacaatgttcacatacaagacggatgtaaaattggtgtaaaaggttttggttttatacctaaaaaagataaaaatataagaacacctcatatcggaaaggttatattagaagagggagttgaaattggtgctaatagtactattgatagaggctcgctgtcagatacagtaattggcaaaaatacttttttagacaatcaagttcatgtggcacacaatgtgaagataggaaaaaattgc

SEQ ID NO: 260808 - DNA, 543 bp, Unknown
  Bacterial polypeptide expressing nucleotide sequence isolated from the Sargasso Sea
aatgttttatccaaatgcagatatagattatccagatgaaaatttaaaaaaatctgatgaagtaaaaaacctatatccaaatgttttttttggtaaaaatgttttagttggtaaaaatgttaaaataggaaaaaattctatagttaatagtaattgtattatagaaagcaatgtggccattggtgaaaaatgtataattggttcttttgttactattaaaaactctctaatctataataatgttcatattcaggatggttctaaaataggagttaagggttttggttttataccgaataaaaataaaaatatacgatcgcctcatatcggaaaagttattttaaatgatggtgttgagattggagcaaatagcactatcgatagaggttctatttcagataccattataggtactaatacttttttagataatcaggttcatgttgcgcataatgttcaaattggtaaaaattgtatgattgctggacaggtgggttttgctgggagcactattattggcgataatgtagttataggtggtca

SEQ ID NO: 260809 - DNA, 809 bp, Unknown
  Bacterial polypeptide expressing nucleotide sequence isolated from the Sargasso Sea
aattaacaccaaggcagcagcatgtattacaaaggaaaatcttaagactttattaccaaaaaattgcataaaaatcttggtaaaaaacgtacttttttctacagctcaaatttcaaaaaagttttatccaagtgcagatttagattatccagatgactcagttgttgattcttctagtatttcttcaaaatatagttctgtcacatttggtaaaaatattttaattggaaaaaatgtaaaaataggatcaaagacaataattggtagtaatactattattgagaaaaatgtatttattggtaaaaattgtcttattggttcaaacattactctcaagaatactattattggtgacaacgttgttgttcaggatggatgcaaagttggtgtaaaaggatttggctttgtgccttttaaagataaaaattttagatttcctcatattggaagagttcttttaaataacaatgttgaattaggtgccaattgtacaatagacagaggatcgataggagatacagtgatcggagaaaacacttttttagataaccaagttcatatggctcataacgtaaaaattggaaaaaattgtatgatagctggtcaagttggttttgctggaagcacgacagttggaaataatgtttcaataggaggacaggctggtatatctggtcacttaacaattggaaataatgtaaaaattggaggtggaagtggagttgtaaaagatattcctgacaatgtcacagtcatgggttatcctgctgttaatttaaaagagtttcttaagaaagataaaatataat

SEQ ID NO: 260810 - DNA, 877 bp, Unknown
  Bacterial polypeptide expressing nucleotide sequence isolated from the Sargasso Sea
aatgataaaattttaatcaaagatttaaaaactttagacaaagcaaataaaaaccatataagttttttaaattcaccagattacattgatttagcaaaaaaaactaaagcctccgcttgtttaactacatttaatcttaaacaatacttaccaaaaagctgtttggtcattgttgtaaaaaacgtattattttctgttgctgaaatatccaaaaaattttatccaaatgctgatgttgactatccagatcaatctcttcaagaaattgatgaaattaattcagattttaaaactgtcatatttggtaagaatatttttcttggaaaaaatgttaaaataggttctaacactaatgtaggtagcaatactgttatagagcataatgttcaaattggcaaaaattgcataattggagcaaatgttactataagaaattcattaataggaaatgatgttgtgattcaagatggttctaaagttggtgttaaaggttttggctttatacctttgaaagacaaaaattttagatttccacatattggtagagttttaataaatgataatgttgagataggcgctaattgtactatagatagaggatctgtgggtgatacaataattggaaagaatacctttttagacaatcaagtacatgttgcacacaatgttagaataggtcaaaattgtatgatagctggacaagttggttttgctggtagcacttcgattggaaataatgtttctataggtgggcaggctggcgtttcaggccacctaaaaattggaaataatgttagaataggtggtggaagtggagttgtgaaagacatagcagacgggacaactgttatgggttatccagccagtgccactaaaa

SEQ ID NO: 260811 - DNA, 843 bp, Unknown
  Bacterial polypeptide expressing nucleotide sequence isolated from the Sargasso Sea
aatgtcagatatatcttttttcgttcccactggtccttacaatataaatgaattatcaaaggattttgtcgcctataaggataaaattttaattaaagatttaaaaaccttagacaaagcaaataaaaaccatataagttttttaaattcacctgattatattaattcagctaaaaaaactaaagcttctgtttgcttgactacaaaaaatcttaaaaaatacttaccgaaaaaatgtttagttataattgtgaaaaatgtgttattttctgttgctgaaatatctaaaaaattttatcccaatgccgatattgattttccagatcaatctcttcaagaaacaggtaaaattagttcaaaattcaaatctgtcacatttggtaagaatatttttcttggaaaaaatgttaaaataggttctaacactattgtaggtagtaacacagttatagagcacgatgttcaaataaacaaaaattgtgtaattggtgcaaatgttactataagaaattctataataggaaatgatgttgtgattcaagatggatctaaaataggggttaaaggctttggttttatacctgttaaaggtaaaaattttagatttcctcatattggcagagttttaattaatgacaatgttgagataggagccaactgcacaatagatagaggatctataggtgacacagtaattggaaaaaatacttttttagacaaccaagtgcatgttgcacataatgtcagaataggggaaaattgcatgatagctggacaagttggctttgctggaagtacatctattggaaacaatgtttctataggtgggcaggcaggaatttc

SEQ ID NO: 260812 - DNA, 814 bp, Unknown
  Bacterial polypeptide expressing nucleotide sequence isolated from the Sargasso Sea
aaggattcgtctggaaatgggattggcgacatttacggaataatagaaaagctagattatataaaatctttgggtgtaaatatgatatggatttgtcctatttacagttccccaaatgatgataacggatatgatatttcagattatagaaaaataagtgaagagtttggtggcaacaaagccttcgatattcttttagatgaaatgcacaaaagggacttgagactaatcatggatttagtagccaatcattcttctgatgaacacatgtggtttcaagaatcaaaaaaaggagaggacaatccataccacgactattatttttggaaaaaaggtaagccagacagagcacctaataattggttatcagtttttagtggctcagtttgggaatgggattctaatttgaataagtattatctccattcatttactaaaaaacaacctgatttgaactgggaaaatccaaaagtgagagaggaaatttacgatattttaaatttttggttctcaaaaggtgttgatggatttagaatggatgttatttcatttatatcaaaaaaattagattttcctccagcaaaacagggagccactttgtctgaaatgatggaaaatatatatgctaatggacctaggattcatgagtttttaaaagagatgaataagaaggttttgtctaaatatgatatagttactgttggagaagggcctggcgttaatttaaagactgggcttaaatacgtagatgaaaatgaaaaggaattagacatggtttttcattttgatcaccttcaaatagatttggaccaga

SEQ ID NO: 260813 - DNA, 725 bp, Unknown
  Bacterial polypeptide expressing nucleotide sequence isolated from the Sargasso Sea
tatgagtggatttgacagtgattttttgtggggttcggcaacttcggcctatcagattgaaggcggaacggcagaagggggacgaactgattctatttgggatgctttttgcaggaaaccaggcgctatccgagaccaatcttcaggcgaagtcgcttgtgagcacctaaaatattggaagcaagatgtggatctgatgtctcaaatcggcttacaagcctatcgtttttctatttcatggtcgcgaattatgcccaatggatatggtgccattaaccaagagggcattgatttttatgatcgcttaatcgatgcgctcttagaaaaaaacattgaaccattcatcacactatttcattgggatttgcctcaggtacttcaggagaaaggtggttggttaaaccctgagattgctaaatggttcggagagtattcaggaattttatctgatcgattctcggatcgagtcagtaattggttcactttaaatgaaccgcaatgctttattggtcttggtcattacgcgggtcataaagccccaggcttaaagcttggagtaaaagattctttattagcgttgcatcattcccttttggcgcatggtcattcggtaagagcgcttagggataatgctaaaaagccaataaaagtgggtcctgtgcctactggctctgttgcgtatccaacagtagatactccagagaatcgtgatgcagcctacaaag

SEQ ID NO: 260814 - DNA, 843 bp, Unknown
  Bacterial polypeptide expressing nucleotide sequence isolated from the Sargasso Sea
cctgagaaaaataaaaaataatgataatggagacatagctactgatcattatcacaaatataaagaagatatatctttaatgaataatatgaatctaggagcttatagattttctattgcctggactagaatacttccaaacggtaaaggggaaataaatcaaaaaggattagatttctactctagattaatagatgtattactaaaatataatataaaacctttcattacactttatcattgggatttaccacaagcacttcaggatgaaggtggatgggcaaataaagatatttcaaaaattttttcggattattcacaaattatagcaagaaaatttggagatagatgtgataattttataacattaaacgaaccagctgtattttcaatctttggatatctagatggttatatggccccaggttatcgaaataaaaaaaaatacttaaatgctatgcacaacattaacctttctcatggtagatctgtactagcaatcaaatcaatttcttcaaaaataaaagtaggctgtactttaaatatggcgccttgtattccatcatcaaaaaaagatgcagatataaatgcaacaaaaatttatgatacttactggaatagatcttacgctgatccgatgtacttaggcaaatatcctaaaattctgattaaagatttagatggtattatcggacaaaatgacatgaatataatatatcaaaaaaatgactttataggtcttaatcattatcaacaaataagagtaaaagctgataaaaataatttgctaggtgctagaggagtaataaaagatgaattgccttttaaattacaaaaaaaaaa

SEQ ID NO: 260815 - DNA, 283 bp, Unknown
  Bacterial polypeptide expressing nucleotide sequence isolated from the Sargasso Sea
tatggacatacaatttccaaaaaattttttgtggggagctgctacttctagttatcagattgaaggagctcatacaatgcatgataaaggaaagagtatttgggatacttttactcacacaccaggaaaaattaaaaataatgataatggtgatattgcaatagatcatttccataaattcaaggaagacataaatttgatggcagaaattaatatgtctgcttatagattttcaatatcttggacaagaattctacccaggggaaaaggtgaaattattcaa

SEQ ID NO: 260816 - DNA, 685 bp, Unknown
  Bacterial polypeptide expressing nucleotide sequence isolated from the Sargasso Sea
acctcaagctttcaaatagagggggatagaagcgggcgactagactcaatttgggacacattttgttcacaaaataacaccattgaagacaactccaatggtgatattgcgtgtcaacatgtggaaaaatggcaggaagatgttgcactcatcgcagggttaggagttgatgcatatcgactctcaatctcatggcctagggtggttaacagcgatggaactatcaaccatatcggcatgcagttttacgtaaacttggttgacgagttagtaaaacgcaacatcaaagtattcgtcaccttgtatcactgggatcttcctcagtatttagaagaaaaaggcggatggttaaatagagaaacggccacagcctttgcgcattacactgacatagtagtcagtgcgttaggtgataaagtgtattcttacgctaccttaaacgaaccattttgctcagcgtacctaggctacgaactcggtattcacgcaccgggcaaaaccggcgtggccaacggcagaaagtctgcgcaccatttgctgttagcacatggtctgggtatgaaggtgcttcgcgagaaatgccctaacagcttaaatggtattgtgcttaacttttctacttgtcacagtgccaccgaatcaccagccgataagttagccgcaaagcttgccgatgaataccata

SEQ ID NO: 260817 - DNA, 583 bp, Unknown
  Bacterial polypeptide expressing nucleotide sequence isolated from the Sargasso Sea
tatgcttgagcacttcagcgcagatcccacttttgaaggcaaagcaatcgactttataaaagacggcgacaacaccgccatttcagtcgacaccgatttccttggcatcaactattacagtcgaggcattattgcagccgatccagaagctcaaactcctggaaaaatcccaaaccctggtcccgaaatgcgaaccgatatggactgggaagtctatcccaccgggctttacgacctactcaagagaattcacgatgattatggtcccaaggaattgtacatcaccgaaaatggtgccgcttacagcgaaggtccggaccatgatggccgtgttagagaccaccgacgcaccagctatatccacaatcacctcttggcggttaaacgagcgattgcagacggtgttcccgtaggaggctactttgtttggtcactcatggataactttgaatggtcttttggctacaccaaaaggtttgggattgtgtacgtcgattacgaaacccaaaagcgataccccaaagacagtgcatactggctcaagtcgatcatgaatgatccaaacaacctactgatggattaa

SEQ ID NO: 260818 - DNA, 932 bp, Unknown
  Bacterial polypeptide expressing nucleotide sequence isolated from the Sargasso Sea
ccctaaaggcaaaggtcagactattcaaaaaggtttagatttttattctaaattaattgatgaattattaagcaaaaatataaaacctttagtgactctctatcattgggacttgcctcaatctcttcaggatgaaggtggttggtctaataaagatatatcaaaaatatttgctgattatgcctatattattattaaagaattaggtgataggataagttttgtatctacatttaatgagcctgctgtttttaccattcatggtctagctgatggatatatggctccaggaatatctgattttgatcattttatttcttcagtacataatgtaaatttagctcacggattaagtatgcaggcaatgagatcaattagatctgatttagaattagggtgtgttttaaatcttgggccttgtattccttgtacgaataaaaaagatgatatcgatgcgtctaaaatttatgacatgtattggaacagaatttttttagaccctatgtataaaggggaatatccaaaagattttttagaacaaattggtaagtattttagagatggtgatatgcaaataatcaatcaaaaaaatgactacataggactaaatcattatcaacatacaagggttaaagcagaccctactcatttattaaaagccagaggagcatatggaaatgaaaaaccatttaatttagaaaatgttgaattaacatctatgaactgggaaattgctccagagtcatattataaacaaataatggaattaaaaaatgaatacaataatccaattatttaccttacagaaaatggatgttcttatactgataaaattgaaaatggaaagattaatgactttaaaaggatagaattttataaaaaatatttaacagctgtaaaaaaagcaataaataatggtgctgatgttagag

SEQ ID NO: 260819 - DNA, 304 bp, Unknown
  Bacterial polypeptide expressing nucleotide sequence isolated from the Sargasso Sea
tatgcaactgggtttacctatacatattactgaaaatggaatggcaaaccaagacattatctctgaaaatcaagtcatagataatgaaagaatttcatatttttcactccatcttgaccaaatttataaattgttaaatgaaggattgcccataaaaagttattttgcatggtcattattagataattttgaatggtcttatggttatagtaaacgctttgggatcatttatgtagattacaaaactcaaaaaaggatacctaagtcttcatggtttgcattcaaaaatgaattgaatgaataa

SEQ ID NO: 260820 - DNA, 353 bp, Unknown
  Bacterial polypeptide expressing nucleotide sequence isolated from the Sargasso Sea
ccatataaataactggaaacaggacctagatttaatcgaaaaggctggtttctcagcttatagattttctttttcatggcctcgaattttaccaaacggaaaatctttagaaaatccaaatggtcttgatttttatgaccgacttattgacggaatgcttgagcgaaatctctggccttttgcaactttgtatcactgggatctaccgcaagctttagctgaggccggaggttggagaaatgaagaaacagctgattatttcgccaaatatgcagagttagtgatgaaatattttggtgaccgtttacattcagttgcaacgataaatgaaccatggtgcgtagcgtggttaa

SEQ ID NO: 260821 - DNA, 439 bp, Unknown
  Bacterial polypeptide expressing nucleotide sequence isolated from the Sargasso Sea
caactactacacaacggtcatgttagaggctggtggtcaagattttcctttcgttaaagctattgatcgaagtttacctaaaactgatatgggatgggaaatagagcctaaagggctaacagatgctataaatctagtatctcattatgcaccggagttaccgctttatataaccgaaaatggaatggcctctgcaaatactattactgatgaagatcgaattgaatattatagagatcatcttaatgaagttgcaaaggctacgcgaaatttgccaataaagggatattttgcttggtcacttttagataattttgaatgggcttttggctatacgaaacgttttggtattgtgcatgttgattataaaacacagcggagaacaaaaaaggatagttttaagtggtggcagagtgaactagttcgtccctcagcataa

SEQ ID NO: 260822 - DNA, 835 bp, Unknown
  Bacterial polypeptide expressing nucleotide sequence isolated from the Sargasso Sea
tactccaggcaaaatcaaaaatgatgaaaatggtgacatagcagcagatcactatcatttatttaaagaggatattaaattgatggctgatatcaaaatgtctgcttatcgattttctatagcttgggccagaatttatcctgaaggcaagggatccttaaatcaaaaaggaatagatttttacaataaacttattgatgaattacttaataaagatattaaaccattagttacattatatcactgggatttacctcaaaaattacaagacgatggtggatggtcgaatcgtgatacatctaaaattttttgcgattatgctacaacttttgttaaaaagttttcagatagggtcaattttatctcgactttaaatgaacccgcagtattttccattcatggtcatgcagatggatatatggcacccggaatatctgataaaaatatttttttttctagcattcacaatataaatcttgctcacggatatgcaattcagtctatgagatcaattaaaccaaacttagaattaggatgcgttcttaacttatctcctagtttaccttgttcaaattctgacgaggatacaaaagcaacaaaaatttttgatatgtattggaatagagcttttttagatcctatgtataccggttcatatcctgctgctttagaatataaattaaaaaaatatattcagaatgatgatttaaaaaatatacatcaaaaatgtgattacataggtttaaatcactatcaacattctagagtaaaagctgataaagattatttattaggcgcaagggtagcttataaagatgagagaccttttggttag

SEQ ID NO: 260823 - DNA, 247 bp, Unknown
  Bacterial polypeptide expressing nucleotide sequence isolated from the Sargasso Sea
gttcaagatcccctaagaacgcaatacctccgtgactatttaactgtcggtctggaagcgatggaacagagagtggacctccgtggttggttcttctggtccttactggataatttcgagtgggctgaaggttataccaaacggttcgggctgatttatgtcgattatgagacccaacaacggattcccaaagattcctaccgattcatccaaaaactaatccaggaaaataccctgcaagattgag

SEQ ID NO: 260824 - DNA, 946 bp, Unknown
  Bacterial polypeptide expressing nucleotide sequence isolated from the Sargasso Sea
atatcaaacctttttatcacattatattcactgggaccttccacaaaaaattcaagattctggaggctggtcaaatagagatataacaaaatatttttctgattattcatacttaattgcaaaaaaatttggtgataaatgtaaaaacataattacactaaatgaaccagctgttttttctactttcgggtatttagatggatatatggcacctggtttaagaaataaaaaacaatatttctcttctattcataacattaatcttgcacatggatttgcctataaatcaataaaatctatatcttcaaaaataaatgttggatgtactcttaacatggctccttgcttggcagtttctaatagtagaaaaaatgaaaatgctaaaatcatttatgacacattttggaatcgcgcctatgcagacccaatgtatttaggaatttatccaaaaattatagagaaaaaaatacaacatttaattaaacaaaatgacatgaagataattagtcaaaaaaatgattttataggactcaaccattatcaacatataagagttatatctgacaaaaataatttactcggagcaaggagtgttaatttaaatgaattaccaaaaaaaattaataaaaaaaaattaacttctatgaattgggagattgttcccaatgcttattacaatcagattatggaattaaaaaataggtataataatccaattattcatttaacagaaaatggatgctcttatccagatgtaaaaaacaaaaaaggcaagataattgacactaaaagaataagttttttaaaaaaatatttaaaagcagttaaaaaagcattaaaggacggagcaagaataaaaagttattttgtttggtcattattagacaactttgaatggtctttagggtatgaaaaaagatttggaattattcatgttgattttaaa

SEQ ID NO: 260825 - DNA, 789 bp, Unknown
  Bacterial polypeptide expressing nucleotide sequence isolated from the Sargasso Sea
aatgaaaattaccttagccgacagttctcctttgcttaaccctgaatttgtatttggcgtggccacagcttcgtttcagattgaaggcgcggccgacagccgggaaccctgtatctgggatactttttgtgcacagccgggccggattaaagatggttcagacggtctgaaagcctgtgatcatgtggcacgctggcgcgaagatgtggagctgattgccgcgctgggtgtcgatgcttaccgcttttcggtggcctggggccgggttatccgagccgatggcagcattaatcaggccgggctggatttctacattcagctgctcgatgcactgaaagcgcgcaatattaaagcctttgtcacgctgtatcactgggatttaccacagtatttgcaggatgaaggcggctggctgaaccgtgctaccgcgtataaatttgccgaatatgctgacatcgtatcccgggcattcggtgaccgggtgcattcctatgccacgctgaacgaaccgttctgcagtgcctacttaagctatgaagccggtattcatgcccccggcgtgcaaaaccgccagcatggccgccaggtagcgcatcatttattgctggcgcatggtttagcaatgccggtgctgcagaaaaatgccccggcagcattaaatggcatagtgctgaacttcagcccctgccatccggccagcgacagtgaagccgatatccgtgcagctgacatggctgaccagtaccataaccaatggtatatccaacccttgatggaagcgcgttaccc

SEQ ID NO: 260826 - DNA, 292 bp, Unknown
  Bacterial polypeptide expressing nucleotide sequence isolated from the Sargasso Sea
atgaacagtaataaatttcctaaagattttttttggggtacagcaacatcaagctatcaaatagaaggcgctgcagaccttgatgggaaaggaccttccgtatgggatacttttagtcataaaaaagatacaataaaaaatggagatactggggatgtcgcgtgtgatcattatcatttgtggccaaaagatttagaacttctagaaaaccttggagtaaactcatatcgattttctattagctggcctagaattcttccctcaggcagggagagtaagcccaatcaagcag

SEQ ID NO: 260827 - DNA, 457 bp, Unknown
  Bacterial polypeptide expressing nucleotide sequence isolated from the Sargasso Sea
aatgttaccagctaactctaagatgcaatcaaaagcattcacctatggtgtggcgactgcttcgtttcaaatcgagggggctgcagacacccgtttagcctgtatttgggacactttttgtgcaacacctggcaaaattcgtgatggttcaaacggtgagcaagcctgtgaacatgtaaaattatggcgacaagatattgatttaattgaatcgctcggcgtagatgcataccgtttatcaatttcttggccgcgcgtgttgcacaaagatggcagcttaaatgaccaaggcgttaagttttatatcgacttattagacgagcttaatcgccgtgacattaaaccatttgtaaccttatatcactgggatttaccacaacacattgaagacaatggcggctggttaaaccatgaaaccgcctatctgtttgccgattacgcagacaaaatcacccag

SEQ ID NO: 260828 - DNA, 769 bp, Unknown
  Bacterial polypeptide expressing nucleotide sequence isolated from the Sargasso Sea
caccggccgcggcgaggtgaacgaggcggggctggctttctacgagaaactgatcgataccctcttggctcaccagatagagccggtgctcaccctctatcactgggatttgccccaggcgctgcaggatgaatacggcggctgggaagaccgacgcatcatcgaggatttcgagcgctactgcgtgaccctgtatcagcgttttgccggcaaggtgaaatactgggtgtcgctcaacgagcagaactacaacctgaccaacgcctatcagctcggcactcacccgcccgcagtgcaggaccgcaagcgcttctttgccgccaaccacatcgcgtttctggccaacgcccgggtcatcaaggcgttccgccagcacgtgccgggggggctgatcggcccaagctttgcctactcgcccgcctatccggcgtcgtgcgatcccaaagacatgctggcgtttgaaaacgccgaggagttcaccaacctctggtggctggatgcctactgctttggccgttatccgcaggcggcgcttgcctacctgcgggaaaccggcgaggcgccggatatcctgcccggcgatctcgagctgctgcgggaagggacgcccgactacatcggcgtcaactactactacaccctgaccttcaccgacaacccgctcggcggccagaccctgcagcgcatcaataccacggggcagaagggcaccactccctcgagcggcattcccggcctctacaagacggcccccaacccgcaccttgag

SEQ ID NO: 260829 - DNA, 1324 bp, Unknown
  Bacterial polypeptide expressing nucleotide sequence isolated from the Sargasso Sea
ttgattaacttatcttttcttcaagactttccaaaagattttaactttggagttgctacttcctcttatcagattgaaggaacgatgtatggcaattgtggtaaatcaatttgggacgattttgctgagagaaaattgaatggcattgatgggaaacttgcttgtaatcatattgaatatttcaaagaggatattaaacttataaaagacgcgggttttaaggcctatcgtttctcatttgcttggcctagattatttccagacaacaataaagatgtcaatttaaagggtgtggatttttacaagcaattattagaggaaataaataattgtgatttagaggctttccctacaatttatcattgggatcttcccataagatttcaaaaaattaaaggttgggaagatcaggaaacctgtaaacattttggggaattatcttttttcatatcaaaaacatttggagatcaatttgaaaaaatttcaaccattaatgagccttggtgtgtttcttggttaagtcattatttaggagagcatgcaccaggtattaaaaatatccaatcagctgctaaaactatgcataatattttatttgcacactcgcaatctgttgaagcattaaggtcatgtaatgatcatcagatcggaatagttttaaataatcaatttggtcaacctatagatagtaatgaagaaaatattcaagcaacaaaactgtttgatgaaattcataatagatggttttccgatgctatctttaaaggtaaatatccagaattagctttatccatcctagaaaaattcctcccagaaaattacaaaacacaattagaattaatatcttcaccaattgactggataggattgaattattacacccggtctttaatcaaatacaaaaaatcagatgatggtgtcaattatgaatgtaatagtgggacgctaaaaaaaacagatatggggtgggaattttatcctgagggattgagctactttattaaaagaattaataaagaatacgataataatattccaatctatattacagaaaatgggatggctaataatgacaaattatctttaggaaatagtattaaagatcatgatagaatagaatttttcaatatacacttaaaagaggtgttagattgcgtgaatgaaaaattaccagtcaaagggtattttgcttggtcattacttgataactatgagtgggcctttggttactcaaaaagatttggtttaatttttactgatttccaaaactttaagagaatacccaaaaattcttattatgaatttcaaaaatacttgaaataag

SEQ ID NO: 260830 - DNA, 886 bp, Unknown
  Bacterial polypeptide expressing nucleotide sequence isolated from the Sargasso Sea
gatgcaagaaattaaccttccatccaattcaatgatgttgtcgaaagactttttgtttggtgtggctacatcaagtttccaaatagagggagacagaaaaggaagattagattgtatttgggacacgttctgcgaaaagaaaaatgccattactgatgccactaatggtgacattgcctgtaaccacatagatttgtggaaacaagatgtagagctaattgattctcttggtgttgatgcttatagactgtctatctcgtggccacgagtaatgaaacaggacggtagcgtaaacgaagtgggcatgcgcttttacgtaaacttagtcaatgaagttatcaagcgcggcatgaaagtgttcgtgacgctttatcactgggatttaccgcaacaccttgaagacaatggtggctggcttaatcgcaacacagcctatgcattcgaaaaatatgctgaagccgtagcaaacgcgttgggcgaaaaagtccactcctacgcgacattaaatgagccattttgttcagcctatttgggttatgaggcaggcattcatgcacctggaaagacaggcatggcaaatggtcgaaaggcagcgcaccacttattgcttgcccacggtttagcgttgaaggtgcttaaccgagtttgcccaaaaagccaaaacggtatcgtacttaactttagcaattgccatacaaaaagtgattcacaggaagacatacacgccgccaaactcgccgatgattaccaaaaccaatggtatttaaaacctattattgaaggcaaatatccagacattatcgataagctcgctcccgacgttaagcccgacattgcggaaggtgatatggctattatttgccaaccaatcgattacttaggcatt

SEQ ID NO: 260831 - DNA, 1435 bp, Unknown
  Bacterial polypeptide expressing nucleotide sequence isolated from the Sargasso Sea
gatgcatcaccacaagttcaacgacttccccgccgattttctatggggcgccgcctccgccgcctaccaggtggaaggggcctggaacgccgatggcaagggcccctcggtgtgggatctgttcaccaagctgccgggcaagacctttgagggcagcaatggcgacgtggcggtggatcactaccaccgcatggaggaggacgtggcgctgatggcggaaatggggctcaaggcctaccgcttctcggtgagctggccgcgcatctacccgaccggccgcggcgaggtgaacgaggcggggctggccttctacgagaaactgatcgacaccctgctggcgcaccagatagagccggtgctcaccctctatcactgggacttgccccaggcgctgcaggatgaatacggcggctgggaagaccgacgcatcatcgaggatttcgagcgctactgcgtgaccctgtatcaacgttttgccggcaaggtgaagtactgggtgtcgctcaacgagcagaactacaacctgaccaatgcctatcaactcggcactcacccgcccgcagtgcaggaccgcaagcgcttctttgctgccaaccacatcgcgttcctggccaatgcacgggtcatcaaggcgtttcgtcagcacgtgccgagcggcctcatcggcccaagctttgcttactcgcccgcctatccggcgtcgtgcgaccccaaagacatgctggcgtttgaaaacgccgaggagttcaccaacctctggtggctggatgcctactgctttggccgttatccgcaggcggcgcttgcctatctgcgggaaaccggcgaggcgccggacatcctgccaggcgatctcgagctgctgcgggaagggacgcccgactacatcggggtcaactactactacaccctgaccttcaccgacaacccgctcggcggccagaccctgcaacgcatcaacaccacggggcagaagggcaccaccccttcgagcggcattcccggcctctacaagacggcccccaacccgcaccttgagaccagcaactgggactgggccatcgacccgaccgggatgcgcatcgccctgcgccggctctcctcccgctatggtctgccgctgatgatcaccgagaacggcctcggcgagttcgacaagctggcagagggagatcgggtgcacgacgactaccgcatcgactatctgcgcagccacgtcaaggcgtgccaggaggcgatgcaggacggggtggaactgctgggctattgcgcctggtcgttcaccgacatcctgagctggctcaacggttaccagaagcgctacggcttcgtctttgtggagcgtgacgagcagggcggctccctgcgccggctcaaaaaagacagcttctactggtaccagacggtgataagctcgggcggcaaaacgctctaa

SEQ ID NO: 260832 - DNA, 197 bp, Unknown
  Bacterial polypeptide expressing nucleotide sequence isolated from the Sargasso Sea
ttatgaagttgcaaaagctgcgcgcaatttaccaataaagggttattttgcatggtcgctcctagacaactttgaatgggctttgggatacaaaaaacgttttggtattgtgcatgttgactataaaacgcaacgaagaacaaaaaaggatagttttaagtggtggcagagtgaattagttcgcagctcaccataaa

SEQ ID NO: 260833 - DNA, 1026 bp, Unknown
  Bacterial polypeptide expressing nucleotide sequence isolated from the Sargasso Sea
aatgaaacaattatctttacctagtggctcaccacttttagccaaacactttacttatggtgtggccacagcgtcttttcaaattgagggtggcgcagcagatcgtctcccctgcatttgggataccttttgtagtaaagagggtaaaattgctgataattcaaatggtgatgttgcctgtgagcactacactcgttggcaagacgatatagacttaattgagtcgctaggtgtagacgcctacaggctttctatttcttggccccgtgtgatgaccaaagctggccatttaaaccctaaaggcgttaagttttacaccgatattttagatgagctaaaacgtcgtaatatcaaagcttttgttactttgtaccactgggatttaccacaacatattgaagacgaaggcggctggcttaaccgaaacacggcttacgaatttgcacattacacagatttaattacccaagcctttggtgagcgagtacattcttacgcaacactaaacgagccattttgtagctcttatttaggctacgaaattggcgtacatgcacccggtattgtaggtcgagaacacgggcgaaaagctgcccatcatttactacttggccacggattagcgatgcaagtgcttgctaaaaatagccctaattcactcaacggtattgtgcttaactttacgccttgctactcagttacccaatgcgaagaagatttaaacgccactgcatttgctgatgactacataaatcaatggtatatgcagccagtaatgcaaggtcaataccctgatattattaaccaattacctaaagcccagcgccctgatattttaccaggcgatatggaaattattgcacagccacttgattatttaggtgtgaatttttatacccgtatgcattaccaagcaagcgaaacagacttttatcatgagctgccacacaaagccccaatgaccgatattggctgggaaatttaccctaaagcgcttacagagttacttgtatcgttaaacgaaaa

SEQ ID NO: 260834 - DNA, 271 bp, Unknown
  Bacterial polypeptide expressing nucleotide sequence isolated from the Sargasso Sea
agatggggaagtgtgggacaatgggcgtaccgcctacttccacacccatttaaatgcggtaaatgaagcaatagaaaaaggcgtagacatacgcggatattttgcatggagcctaatggacaactttgagtgggcactgggctattcaaagcgtttcggcatagtttatgtcgactacgcaacccaaaaacgtacgccaaaacaaagcgctttggcttattcaaaactggttaagagccggataaatgggtacattagcggtatcaaataa

SEQ ID NO: 260835 - DNA, 151 bp, Unknown
  Bacterial polypeptide expressing nucleotide sequence isolated from the Sargasso Sea
ttaaaaggttattttgcttggtctttacttgataattttgaatgggcttttggatatagcaaaagatttggaattgtttatgttgattttaataatttagaaagaataccaaaattgtcttggaaagaatttagaaagcatttgaaatgaa

SEQ ID NO: 260836 - DNA, 337 bp, Unknown
  Bacterial polypeptide expressing nucleotide sequence isolated from the Sargasso Sea
ttaacatatgtaatcagtaaactaaaaaagaattatagtaggatgataccaatttatattacggaaaatggtatggctcatagcgattctctggaacaaggtagagttgatgatcaagaaagagtaagtttctatgcaaaacatttattgcagattaagaaacttctaattaaaggtgctccaataaaaggattttttgcttggtcactattagataacttcgaatggtcatacgggtacagtaaaagatttggattaatatatgtggactttaaaaatcaaaaaagagtcccaaagagctcatggtttgaatttaaaaaagcactcaaaaaataat

SEQ ID NO: 260837 - DNA, 562 bp, Unknown
  Bacterial polypeptide expressing nucleotide sequence isolated from the Sargasso Sea
aatgggtgtttacccatctcaaacacttgatctcttttctcaatatatgccaatcaattatgaaaaagatctagcacaaatttcgcaaccattagattgggtaggaataaactattatacaagatcattgatcaaaattgatccaagtgaatcttttttgggttacaaatccgttaatggtgatttagacattaccgatatgggttgggaaatttttcctaaagggcttagaatactcattgaaaggttacataaagaatattcaaaaaaaattccaatttatattacagaaaatggtatggccaataacgatgttattgtagatggaaaaattaatgattctaaaagaataaaattctatagtgatcacctagttgagtgttttaagcttttagaaaatggaattcctttaaaaggatatttcgcttggtcattgttagataatttcgaatgggcatttggatatagtaaaagatttggtctggtctatgttgattttgataatttaaaaagagtaccaaaattatcgtgggaagaattcagaaggtatttaaaatcgtaa

SEQ ID NO: 260838 - DNA, 549 bp, Unknown
  Bacterial polypeptide expressing nucleotide sequence isolated from the Sargasso Sea
taaatttattaaatatcttaagaccttatatgccggataattattctaatgatttaaaaataatatcaaaaaaaattgattggatcggcataaattactacacaagaacaattgtgaagaaagataacaatgagaaatattttggatttaaaactctaaaagggagattacctaaaactgatatgggatgggagatttttcctgaaggtttaacacatgtgataaataaatttactgaaaattttagcaagagcacaccaatttatattactgaaaatggaatggctcataatgataaaattaaaaaaggaataattaatgatcaagaaagaataagtttttataaaagacatttaaaagaaataattaaccttttaaaagggggtgttctattaaaaggtttttttgcttggtcattattagataactttgaatgggcattcggatatagtaaaagatttggattaatttacgtagattttaaaacacaaaaaagaataccgaaaaattcatggcttgaatttaaaaaaaacttaaaaaataattaaa

SEQ ID NO: 260839 - DNA, 859 bp, Unknown
  Bacterial polypeptide expressing nucleotide sequence isolated from the Sargasso Sea
ataaatttgatggcagaaattaatatgtctgcttatagattttcaatatcctggacaagaattctccctaaaggcaaaggtcagactattcaaaaaggtttagatttttattctaaattaattgatgaattattaagcaaaaatataaaacctttagtgactctctatcattgggacttgcctcaatctcttcaggatgaaggtggttggtctaataaggatatatcaaaaatatttgctgattatgcctatattattattaaagaattaggtgataggataagttttgtatctacatttaatgagcctgctgtttttaccattcatggtctagctgatggatatatggctccaggaatatctgattttgatcattttatttcttcagtacataatgtaaatttagctcacggattaagtatgcaagcaatgagatcaattagatctgatttagaattagggtgtgttttaaatcttgggccttgtattccttgtacgaataaaaaagacgatatcgatgcctctaaaatttatgacatgtattggaacagaatttttttagaccctatgtataaaggagaatatccaaaagattttttagaacaaattgataagtattttagagatggtgatatgcaaataatcaatcaaaaaaatgactatataggactaaatcattatcaacatacgagggttaaggcagatcctactcatttattaaaagccagaggagcatatggaaatgaaaaaccatttaatttagaaaatgttgaattaacatctatgaattgggaaattgctccagagtcatattataaacaaataatggaattaaaaaataaatataataatccaaatt

SEQ ID NO: 260840 - DNA, 931 bp, Unknown
  Bacterial polypeptide expressing nucleotide sequence isolated from the Sargasso Sea
tctgatggaaagggagaaagtatatgggatacttttgcacatactccaggtaaaatcaaaaataatgagaatggggatgttgcagtaaatcattattaccaatttaaagaagatattaaattaatggcagatataaaaatgtctgcatatcgtttttcaatagcttggacaagaattttccctgatggagcaggttatttgaatcaaaaaggtttagacttttacaaaaaattaattgatgaattgcttaaaaataatattaaaccgatggttactttgtaccattgggatctccctcaaaaattacaagacaaaggtggatgggctaatcgtgatacctctaaattatttgctgattatgcttatacttttgctaagaaattttcagataaagtaaattttatttctactttaaatgaaccagctgtattttcaattcatggtcacgcagatggatatatggctccaggtatttctgataatgaaatttttttagcaacaatacataatataaatcttgctcatggatatgctatgcaatcaatgagatcaataaatgataaattagaactaggttgtgttcttaatttatcccctagcttcccttgttctaattctaaagaagatatagaggcagcaaaaatttttgatatgtattggaatagagcatttttagaaccgatgtatactggatcttaccctattgaattagagtataaattaaaaaaacatattctaacaaatgatctaaaagatatattccaaaaatgtgattacattggcctaaatcattatcaacactctagagttaaggctgataaaaattatttgttgggtgcaagaacggcctacaaagatgaaaaaccttttggccttaacgaaaatgaagatctaacttttatgggatgggaaattgctcctaattcatact

SEQ ID NO: 260841 - DNA, 844 bp, Unknown
  Bacterial polypeptide expressing nucleotide sequence isolated from the Sargasso Sea
atcccccacaacgaacccaacgtcttgagcatcctcggtcacggagtcggcatccatgctccggggcttcaagacgcatcggcctgtttcgcatcggcacatcatctcaacctcagtcacggactggtttcgagggaactgaagatctgccggtcggatcttcaactcggaccggtggtttcccttcagcccgtgatcgagctggatcgtgaccagaatgcctcagaaaggctggatgccctctggaacaagatgtttctggatccagtgttttttggaacctatcctgaaatcctagaagaagaactcaaaccctggattcatgagggagactctgaaatccttcaatacaaacctgatttttttggactcaaccattacaccgtaatgcgcgcccaaagcagcggaaaatcagccctgggagttcgtatcatggaaacaccagaaggactgccggtgactgacagtggttgggaaattcggcctgaagcaatgttggagcagttgctcgaattcagggaccaatatggtgacataccaatctacatcactgaaaatggttgctccagtcccgatcagccagatgcctccggagaggtcaaagatctcctgagaacgcaatacctccgtgactatttagctgccggtctggaagcgatggaaaagggagtggatctccgtggttggttcttctggtccttattggataatttcgaatgggctgaaggttataccaaacggttcgggctgatttatcttgattatgagacccaacagcggattcccaaagattcctaccggttcgtccaaaaactaatccaggaaaataccctgccggattgag

SEQ ID NO: 260842 - DNA, 797 bp, Unknown
  Bacterial polypeptide expressing nucleotide sequence isolated from the Sargasso Sea
actgttaccagattcatctttactcaagcccgagttcacgttcggtgtggcaacagcctcattccagattgaaggggcacgcgataagcgcctcgattgcatctgggatacattttgcgaaaagcctggcaccattgcagataacagccatggcgatgtagcttgtgatcatgttgcacgctggcaacaagatatcgagatgattgcagatttggctgtcgatgcttaccgcttatctatttcgtggccgagagtcatgcagcaagatggctcggttaacgagcaaggtatggcattttacgctcagctattatcggcgttaaaagcacgtaatattaagacctacgtcaccttatatcactgggatttacctcaataccttgaagataatggcggttggttaaaccgcgatacggcctataaattcaaagaatataccgagcttgttactcaacatttaggccatttggttgattcattcgccaccttgaacgaaccattttgtagtgcttatttaggttatgaggtgggtgtacatgcacctggcataaaatcgcaacaagctggccgacaagcagcgcaccacttattacttgcccacggccttgctatgcaagtattacgtaaaaactgcccagacacagaagcgggtatcgtattaaacttcagtccaacttatcctttaaccgccgatgataaaaaagccgctgagcttgctgatcaataccataatcaatggtatatcaaagcggttttagaaggtgcttacccatcgttactggatgatttagcagatg

SEQ ID NO: 260843 - DNA, 469 bp, Unknown
  Bacterial polypeptide expressing nucleotide sequence isolated from the Sargasso Sea
atggacatacaatttccaaaaaattttttgtggggggcagctacttctagttatcagattgaaggagctcatacaaagaataataaaggaaagagcatttgggatacttttgcacacacatcaggaaaaattaaaaataatcataatggtgatattgcaatagatcatttccacaaattcaaagaagacataaatttgatggcagaaattaatatgtctacttatagattttcaatatcctggacaagaattctgcctaaaggcaaaggtcaaactattcaaaaaggtttagatttttattctaaattaattgatgaattattaagcaaaaatataaaacctttagttacactctatcattgggacttgcctcaatctcttcaagatgaaggtggttggtctaatagagatatatcaaaaatatttgctgaatacgcatatattattattaaagaattaggtgatagaa

SEQ ID NO: 260844 - DNA, 208 bp, Unknown
  Bacterial polypeptide expressing nucleotide sequence isolated from the Sargasso Sea
ttataaaaaacatttagcagaaataaggaaccttttaaaagatggtatactgttaaaaggtttttttgcttggtcattattagataactttgaatgggcgttcggatacagtaaaagatttggattaatttatgtggattttaaaactcaaaaaagagtaccgaaaaattcatggtttgagtttaaaaaatacttaaaaaataattaa

SEQ ID NO: 260845 - DNA, 572 bp, Unknown
  Bacterial polypeptide expressing nucleotide sequence isolated from the Sargasso Sea
tatggacatacaatttccaaaaaattttttgtggggggctgccacttctagttatcagattgaaggtgctcatataaagaataataaaggaaagagcatttgggatacatttgcacacacatcaggaaaaattaaaaataatgataatggtgatattgcaatagatcatttccacaaatttaaagaagatataaatttgatggcagaaattaatatgtctgcttatagattttcaatatcctggacaagaattcttcctaaaggtaaaggtcaaattattcaaaaaggtttagatttttattctaaattaattgatgaattattaagcaaaaatataaaacctctagtcactctttatcattgggacttgccacaatatctacaagatgaaggtggctggtctaatagagatatatcaaaaatatttgctgattatgcatatattattgttaaagagttaggcgatagaataaattttgtatctacatttaatgagcctgctgtttttaccattcatggtctagttgatgggtatatggctccaggaatatctgattttgatcattttattt

SEQ ID NO: 260846 - DNA, 1190 bp, Unknown
  Bacterial polypeptide expressing nucleotide sequence isolated from the Sargasso Sea
caaagtaaaagatggttctaacggcgatatagcttgtgatcactatcatttgtggcgtgaggatattgcgctgataagctctttaggggtcgatgcttatcgtttatctattgcctgggcaagggtaatgaatcaagacggtagcctgaatcagcaaggtgtggatttctacatcaatattctggatgagttgaaagccaaaaatattaagtcttttgtcactttgtatcactgggatttaccgcagcatattgaagatcagggtggctggctaaatcgcaatacggcctatttgtttcaggattatgccgacaagttaagtaaagcttttggcgacagagtttattcgtatgccaccttaaatgagccgttttgcagttcgtatttaggttacgaagccggtattcatgcgcctggcttaactaaaaaagcttatggccgtcagtcagcacaccatttattgctggcgcacggtctggcgatgcaggtactgcaaaagaacagcccaaacagcatgaatggtttagtgctgaacttcacacctgcttatccgctaaccgacagcgctgccgatcaaagagctgcacagctggccgacgagtactttaaccagtggtacattaagcctgtgtttgatggtgcttacccggactcattcgccttactggccgatgaagacaagccagtgattgagccgggtgacttcgacattatcaaagcaccactcgactttttaggtgtcaatttctacacccgcactgtgtataaagccgctgaaggccgtgactttatcgaagtggatatggctgacgcaccgaaaacagatattggctgggaaatttatccacaggcctttaccgatctgttagtgtctttgcatcaaaaatacacactaccgcctgtttacattaccgaaaatggtgcagcggcggccgatcaactgcacaatggcgaagtggatgatcaactgcgtttgtcttattaccagttgcatttaaatgcagtgcaccaagcggttgagcaaggtgtggatattcagggttatttcgcctggagtttaatggacaactttgagtgggctgaaggctacttaaagcgttttggtatagtctatgtcgactacaacagccagcaaagaactgtgaaaaacagcggtctggcctatagaaatttaatcagtaatcgttaat

SEQ ID NO: 260847 - DNA, 694 bp, Unknown
  Bacterial polypeptide expressing nucleotide sequence isolated from the Sargasso Sea
atgtctgaaacttttccaaaaaattttttgtggggtgctgccactgcaagttatcaaattgaaggaggtgcctacaaagatggtaaaggtaaaagcatttgggatacttttgctcatactgaaggtaaaataaaaaataatgaaaatggagatatagctacagatcattatcatagatataaagaagatatatccctaatgaatgatattaaattaaatgcctatagattttcaattgcctggacacgtatcatgccggatggcaaaggtaaaattaatcaaaagggaatagatttttattctcgacttattgatgaacttttaaaatataatataaagccttttattactctttatcactgggatttacctcaaaaactccaagataaaggcggttgggctaacagagatataacaaaaatatttgctgattattctgaattagttgcaaaaaaatttggagacaggtgtgaatattttataacttttaatgaacctgcagttttttcaattcatggttatcttgatggatatatggctccaggatataaaaataaagataaatattttccttctgtacacaatataaatgtttcgcatggtttatctgtgcaagcaataagatcagttttatcaaaagttaaaataggatgtactttaaatatggccccatgtattgccagctctaataaaa

SEQ ID NO: 260848 - DNA, 1354 bp, Unknown
  Bacterial polypeptide expressing nucleotide sequence isolated from the Sargasso Sea
atgtctaataaatttcctgataatttcatttggggagctgcaacatcaagttatcaaattgaaggagcatctaaaattgatggaaagggtaaaagtatatgggatactttctcacacactaaaggaaaagtttttaaaaatcaaaatgctgatatagcaaccgaccattataataggtataaagaggatgttgctttaatgaacaatattaaactcaaagcatacagattttctatatcatggccaagaatttttcctaatggtaaaggaaaatttaataaaaaaggtgtagatttttattccaaattattagatgaactattaaaaaaaaatattaaaccttttattacgttatatcattgggatttacctcaaaaaattcaaaactcaggaggttggtctaatagagaaattacaaaatacttttccgattattcatacctaattgcaaaaaaatttggtgatagatgtaaaaattttattactctaaatgaaccagctgttttttctacttttggatacttagatggatatatggctcctggtttaaagaataaaaaaaaatatttatcttgtatacataacatcaatcttgcccatggatttgcatttaaatcaataaaatcagtatcttcgaatataaaggttggttgcacacttaatatggctccttgcttagcattttcaaatgatagtaaggatataaacgctaaaattacttatgatacattttggaatcgcgcatatgcagatccaatgtatttaggaagttatccaaaaattatagaaaaaaaaattcaaaatttgatcaaaaaaaatgatatgaaaataataaaacaaaaaaatgattttatagggctcaatcactatcagcatataagagttatatctgataaaaaaaatttattaggagcaagaagtgttagtttaaaagaattatcaaaaaaaataaatataaataaaaatttaactacaatgaactgggaaattgtacctgatgcatactaccgtcaaataatggagttaaaaaatagatacaacaatccaaatattcatttaactgaaaacggatgctctttttcagacaatgttaataacaatggtaaaatattagacgtgaaaaggataaattttttaaaaaaatatttaaaagcggttcataaagctattaaaaatggtgcaaaaataaaaagttattttgtttggtcttttctagataattttgaatgggctctaggatatggaaaaagatttggtattgttcatgtagactttaaaactttaaaaagaattccaaagaagtcatattatttttttggagaattgattaaaaaaaattctataccaaattaat

SEQ ID NO: 260849 - DNA, 1033 bp, Unknown
  Bacterial polypeptide expressing nucleotide sequence isolated from the Sargasso Sea
tcagttttacagccggcttgtggacggtttgctttccagggggatcgaaccctggttatgtctcaaccactgggatctcccacaggcattacaggaaaagggaggatggacaaaccgggacaccgtgatgcgttttgtcgaatacggttggaaggttttggaggaactcggagaccgggtaaaacatgtgatccctcacaacgaacccaacgtcttgagcatcctcggtcacggaatcggcatccatgctccgggacttcaagatgcatcggcctgtttcgcatcggcccatcatctcaacctcagtcacggattggtctcgagggaactgaagatctgccgttccgatcttcaactcggaccggtggtttcccttcagcccgtgattgaacaagagcgtgaccagaatgcctcagaaaggctggatgccctctggaacaagatgtttctggatcctgtgtttttcggaacctatcctgaaatcctagaagaagaactcaaaccctggattcatgagggagactctgaaatcctacaatacaaacctgatttttttgggctcaaccattacaccgtaattcgcgcccaaagcagcggaaaatcagccctgggagtccgtatcatggaaacaccagcaggactgccggtgactgacagtggttgggaaatccggcctgaagcaatgttggagcagttactcgaattcaaggaacgatacggtgacgttccaatctacatcactgaaaatggttgctccagtcccgatcagccagatgcctccggagaagtgcaagatcccctaagaacgcaatacctccgtgactatttagctgccggtctggaagcgatggaaaagggagtggacctccgtggttggttcttctggtccttattggataatttcgaatgggctgaaggttataccaaacggttcgggctgatttatgtcgattatgagacccaacagcggattcccaaagattcctaccggttcgtccagcaactgatccaggaaaataccctgccggattga

SEQ ID NO: 260850 - DNA, 1330 bp, Unknown
  Bacterial polypeptide expressing nucleotide sequence isolated from the Sargasso Sea
attggataacctttctgttctaaaggaatttccagataatttcacctttggtgccgccacttcatcgtatcaaatagaaggcaatagctatggaagatgtgggaaatctatttgggatgaattcgcccaaaaaaaattaaaaggaattgatggtttaaaagcttgtaatcattatgagtattttagagaagatattaagctcataaaagaccttggatttaaagcctatcgtttttcttttgcctggccaagattgtttcctgaaaataattctaatattaataaggaaggtgtcgatttctataatcgacttttggatgagattttaaacaatgacttagagccttttcctactctttatcattgggatttacctattcgtttctcgagaatgggtggttgggaaaatcaagatacctgtaagcattttgctgattactcatattttgtctctcagcgatttggagataaatttgaaaaagttgcaactattaatgaaccatggtgtgtgtcatggctgagccattatttaggggaacatgcacctggcaagaaagacctaaagtcagccgtcttaactatgcataatattttattagcacatggtttgtctctgcaagccttgaaatctaatagacctcataaaattggaattgtgctaaataatcagtacgcagagccttttaatcaagaatccgataacttaaatgcgttacaattatttgatgaaatccacaatcgatggttttccgacgctatttttaaagggagttatccaaaattagcattagaggttttaggaagtaatttatcaaaaaattttaatgaggatttaaaaataatctctcatcccttagagtgggttggcctcaattattatacgaggtcaattatcaaacataaaaaatctgaggatggtattgattatgaaaccctcagggggtcattaaaaaaaacagatatggattgggagttttacccaacaggtttgagttattttataaaacgaatatctaacgagtacagtaatcaaattcctatttatattactgaaaatggaatggcgaataatgatgagttgaatgctaggaatgaggttaatgatttagaccgagttgagtattttcatttacatcttcaagaaattttaaattgtttaaaagaaggtttaaatgttaaaggatattttgcctggtcattacttgataattacgagtgggcgtttgggtactcgaaaagatttggcttagtttttgtagattttgaaaattttaaaagaattccaaaaaaatcttattatgaattttcaaaatttttaaatagaaattaa

SEQ ID NO: 260851 - DNA, 1363 bp, Unknown
  Bacterial polypeptide expressing nucleotide sequence isolated from the Sargasso Sea
atgaaaaataaatttcctaatgattttttttggggaacggctacagcaagttaccaaatagagggtgctacagataaagatggaaaaagcaaaagtatttgggatacttttacacatacacctggaaaagttaaaaataatgaaaacggagatactgctgtagaccattatcataggtacgaagaagatattgagctgatggctaatataaatttaaattcatatagattttctttagcgtggaccaggattatccctgaagggataggtaaaataaaccctaaaggagtagatttttattcaaggttgatagacaagtgtttagaaaaaaatattgagcctttcataactttatatcattgggaccttcctcaatcactgcaagataaagggggttgggcaaatagagacataacaaatatattttcagattattcagaggctattgttaaaaattttggagatagatgtaatcattttatcacatttaatgaaccacaagtttttactattcatggatatgtagatggttacatggctccaggatacaaagatttagaaaaatactttgcatcaatacataatgttaatgttgcacatggcaaagcttttcaagcaatgaaatctttaaataataatataaaaattggctgtacttttaatatggcgccatgtattcctgccacaaaatcaagtggagatcttcatgcaactaaattattcgatacttattggaatagatcatttgccgaccctatgtatcttggaagatatcctgaattactaattaatgatgtctcaaaacatattcaacaagatgatatgaaaactatttttcaaaaaaatgattttattggattaaatcattatcaacatattagaattaaagctgataataaaaatttacttaaagcaagaggagcattcaatgatgaattgccttttggtcttgatgataaagatgcaaagttaactcttatgggatgggaaattgttccagatgcttattatgatcaaattatggatttaaaaaataattatggaaatccagatatttatctaactgaaaatggtgcagcatatccagatttaattgaaaaaaatggagaaataaacgacaacgatcgtattgattactttaagaagtatttaagtgctgtaaaaaaatcaattgataatggagctaaagttaaaagctactttgcatggacatttatggataattttgaatgggcgttaggttttgaaaagagatttggaatagtgcatgttgattttaaaactttaaaaagaacacccaaaaaatcatattattttttcaaaaagcttgtagaacaaaattcaattcctttagatttttaat

SEQ ID NO: 260852 - DNA, 1195 bp, Unknown
  Bacterial polypeptide expressing nucleotide sequence isolated from the Sargasso Sea
accgggcaaagtaaaagatggttcaaacggcgatttagcttgtgatcactatcatttatggcgtgaggatatagcgctgataagctctctgggggtcgatgcctatcgtttatctattgcctgggcccgggtgatgaatcaagacggcagcctgaatcagcggggcgtcgatttttacatcaatattctggatgagctaaaagctaaaaatattaagtcttttgtcaccttgtatcactgggatttgccgcagcatattgaagatcagggcggctggctgaaccgtaacaccgcttatttattccaggattatgctgataagttaagtaaagcttttggcgacagagtctattcgtacgccaccttaaatgagccgttttgcagctcctatttaggctatgaggccggtattcatgcgccaggtttaaccaaaaaagcttatggccgtcagtcggctcaccatttattgttagctcatggtctggcgatgcaggtactgcagaaaaacagcccaaacagcatgaatggcatagtgctgaacttcactcctgcttatccgctaactgacagccctgccgatcaaagagcagcgcagttggctgacgactactttaaccagtggtatatcaagcctgtatttgatggcgcttacccggattcttttgctctgctggctgatgaagacaagccaaagattgaagtaggcgactttgacattatcaaagcgccattggactttttaggcgtcaatttctatacccgtactgtgtataaagcctctgaaggccgcgactttattgaagtggatatggtggatgcgccgaaaacagatattggctgggaaatttatccacaggcctttaccgatctgttagtgtctttgcatcagaaatacaaactgcctcctgtttatattaccgaaaatggtgcagccgcagccgatcagttgcacaatggcgcagtggatgatcaactgcgtttatcctactaccagtcgcatctgaatgcagtgcatcaggcggtagaacaaggtgtcgatattcaggggtatttcgcctggagtttaatggataactttgagtgggccgaaggctacttaaagcgttttggtatagtttatgtagactacgacagccagcaaagaactgtgaaaaacagcggtctggcatacaaaaatttaatcagcaatcgttaa

SEQ ID NO: 260853 - DNA, 921 bp, Unknown
  Bacterial polypeptide expressing nucleotide sequence isolated from the Sargasso Sea
aatgaatagaagagattggataaaattatcggcatgtgcctctgcggtttttcccttcgtaggatttaccaagccttttcttttagaaaacccaattgaaaaggaattaaaagcatcagattttggaaaagatttcttatggggtgcagcatgtgcagcttatcaagtagagggggcatggaataaagatggaagagggccatcgatttgggatactttttcgcataaaaaagggaaggtccataataacgagaatggggatgtcgcaagtgatttttaccatcgatataaagaagatattgccttgcttaaagagttaaattttaaagtttttcgtttttctatttcttggtctcgtatttttcctgatggcactggcaaaataaatcaaaaaggaattgcattttatcatcaagtaattgacgaatgtcttaagcaaaacatccaaccatggattactctttatcattgggacttgccccaagtgttagaagataaaggagggtgggccaacagagatattgtcaattggtttttaaactatgttgatttttgcaccaaagaatacggttcaaaagttaaaaactggatggtgatgaatgagcctgctgcctttgttggcattggatacatgatggggtatcatgcgccaggaaaaaagagtgtctcaaaatttttaaaagcaacgcatcacgcttgtctagcaatggctgaaggagggcgaaaaatcaaaagtaatgtgcctgattctaatgttggcaccacctttagttgttcccacatcgatccataccgatctggcctaaaagacatcaaggctgtcgctagtatggatgcgctattaaatcgtttatatattgagccaagcttaggaatggggtatccttatgatgcaataccggcactaaaaaaaatagaaaa

SEQ ID NO: 260854 - DNA, 1053 bp, Unknown
  Bacterial polypeptide expressing nucleotide sequence isolated from the Sargasso Sea
gggaacaatgaaatatctgttgaggtatttcgctggtcagatgcggcctatattgaggatcaagatttttggcgtttgagtggtatctacagagacgtttatctgatgcacactcccgacacccacatcagacatttcaaggcaatatctgagcttgttgataattatcagcacggcgcattgaacttaacaacacacataaaaaattatggatctaaaacagagaagttagtgctgaaaaatacagtctatcataatggaggaattgttgtaaaagagttagatcctatttctattgaattattaggatcgaatgaaaaggttttgcagcaggagataattataaaagaggtaagcccgtggtctgcggagacaccgaatctctatacgttggttcttgcaatttttaatttggatggtgatcttattgaaaccgtgagtacaaaaataggattcaggagtgttgagctgaaaaatggtcagatgttggtcaatggtgagccgatcattatcaagggagttaaccgtcatgagcatgaccctgttatgggaagaacggtggatgaaaatctgatggtaaaagatattcttttaatgaaacaatttaatgttaacgctgttcgtacctctcactatccaaatcatcctaggtggtatgagctatgcaatgagtacggtctctatgtaatggacgaggcaaacctggagtctcatgcgttctggtctaagtttacactagaccccgtttggagacctgcattcgtagatcgagcgaagagaatggtactgagagatgtgaatcacccttcaataattttttggtcacttggcaatgaagcaggatacggtccgaaccatgatgcaatggccgaatggatacgcgactacgatccctctagactgattcactatgaaggaaaggagcctggatatggtcctctgccaaatcattacgatattattgctaatatgtatgcctccgtggatctaatgaaagagcttcatgataaaaatccatctagaccagtaatactctgtgagtattcacatgca

SEQ ID NO: 260855 - DNA, 1027 bp, Unknown
  Bacterial polypeptide expressing nucleotide sequence isolated from the Sargasso Sea
tggaatagaaagggatgtttttctttatgcacaaccaaaattagctgtcagagatttcttttgtaaaaacaggttgaatgatgaattggacaaagccaatttagattttgaaatagatttgaagaattataataactcctcaataaaatacactgtaaaaacaaaaatttttaatgatgataaagtaatctatcagaatgaatccaatggtgatattgataaaaatcaaacaaaaaaaattacacttgatggaattattgattcaccaaaattatggtcagcagaaataccaaacctttataatgtaaaacttgaattagttgactcggatggctcatatcaattaatcgattttaagactggttttagaaaaattgaattaaagaacggtcaattcttaattaataataaaccaatattattcaaaggcgttaatcgtcatgagcatgatgagtttactggacatgttgtttcaagagagtcaatgctgaaagacattgaaatcatgaaaaataacaatatcaattctgttagaacttcacactatccaaatgatccttactggtacgagttgtgtgatgagtacggattatatgtaattgacgaggctaatgtagagagccatggatttggttacaaaaaagaggatactccagcatttaaacctgagtttgacgatatgcacatggatagatgggtgcgaatggttgaaagagacaaaaattatccttcaattgtagtttggtcattaggtaatgaggcaggtgatgggccaattttcgttgaaggatacaaatggttaaaaaactttgatgacacaagattaactttttacgaacgtacatctgaacaaccaagaatgcaaagaggaaaaaaagaaatgaatggaattgacttagaacctcatactgatttttttggatggatgtattattatatgaatgatattaaaaaggattatttaggaaagtttcctgaaagaccatttatatgggccgaatattcacatgccatgggaaatagtaat

SEQ ID NO: 260856 - DNA, 892 bp, Unknown
  Bacterial polypeptide expressing nucleotide sequence isolated from the Sargasso Sea
caggtttttcttcattttgatggtgtcaagtctgctttctttgtttgggtaaatggacaaaaagttggctacagccaagggagtatgacccccgctgagtttaatatcacaaactacatcactaatgagaccaatgtaatatccgttgaggtattccgctggtcggatgctgcctatattgaggaccaagatttttggcggttaagtggtatctacagagatgtttatctgatgcacacaccagacacccacattagacatttcaaggccatatctgagctcgttgataattatcaacacggtgcgttgaacctaaccacccacataaaaaattatggatcccaaacagaagagttagttttaaaaaatacagtctactataatgacggaattgttgtaaaagacttgcaacctatttcttttgaattatctgggtctaatgaaaaggttttacagcaggaaataatgataaaagaagtaaatccgtggtctgctgagacaccgaatctctatacgttggttctttcaatttttaatttggatggtgatctcattgaaaccgttagtacaaaattaggattcaggagtgttgagctgaaaaatggtcagatgctggtcaatggcgagccgatcattatcaagggagttaaccgtcatgagcatgaccctaatattggaagaacggtagatgaaaatctaatggtaaaagatattcttttaatgaaacagtttaatgtaaacgctgttcgtacctctcactatccaaatcatcccaggtggtatgaactatgcaatgagtatggtctttatgtaatggatgaggcaaacctggagtctcatgcgttttggtctaagtttacattggacccagtttggagacctgcatttgtgg

SEQ ID NO: 260857 - DNA, 1246 bp, Unknown
  Bacterial polypeptide expressing nucleotide sequence isolated from the Sargasso Sea
atgaaggatgctattttaagaatctttttaattttttcagttttattttcaagcgcccaatataaagagtgggaagatttatcaacttttaaaattaatacagaagaaccacattcattttttataccaaaagacatcaatggtgattcgattacaaaatatttaaatggaacttggaatttcaaattatttaagaatgatgaattagttcctaaagatttttttaaaactgattttggtaaagatgattggcaaaagattcctgttccttcaaactggcaattccatactgacgactttcctttatatactaacattgtttatccatatgaaattaatccaccttatatgccaaaagagtacaatccagtaggattgtatcatagagaatttactgttgataatgattggaatgataagcaaatatttattcattttggagctgtaaactcagcattttatctgtggattaatggagattttgttggatatagtgagggaagtaaaacacctgcagagtttgatattagtaaatacctaaatggaagtgtaaatcaacttgtcatgaaggtaataagatggtcagatggtacatatattgaagatcaagacttttggagattaagtggaattgaaagagatatatttttatatgctcaacctaaattagcagtgagagactacttcctgaaaagtagcctaagtaataatttagataaagctgatttaaattttgaggttgatttaaaaaattataatagcttatctaaaaaatacactttaaaaacaaaaattttcaatgatcaagatgttgtttatcaaaatgaaaaagatggtactattgagagtaatcaatcaaaaaaaataacactaaacggtgttgttagctcaccagaactttggtcagctgaaattcctaatttatataatgtgcttattgagctagtagattcagatggtttttaccaaaaaattgattttcaaactggatttcgaagaattgaactaaaggatggccaatttctaattaacaatcaaccaatattgtttaaaggagtaaatagacatgaacatgatgaatttactggacatgtggtatcaagagagtcaatgattaaagacatagaaatcatgaaaaaaaataatattaattctgtcagaacatcacattatccaaatgacccttattggtatgagttatgcgataagtatggcctttatgttatagacgaagcaaacgtcgaga

SEQ ID NO: 260858 - DNA, 3166 bp, Unknown
  Bacterial polypeptide expressing nucleotide sequence isolated from the Sargasso Sea
attgtcagcaaacatcccacctgaaatagaagatccatccattgtcgagaccaataaagagcctgccaggtctaccttctttaattttgaatcaaaaaagcttgcaaaaataaatgaaccgtctgcatccgggcgttacttatctctaaatgggatgtggaaattcaattgggtgcgagaccctttagaccgcccaatggatagctaccaaattgattttgatgattcccgttgggatgagatcgaagttccttctaattgggaactcagtggctatggcgttcctatctatttaaatcatccttatgaattttcttatgacccagaccctccgaatattcctgatggatataacccagtaggctcctaccgaaaagagttcatcatgccagaagattgggagggccagcgtacagtgatccattttggtgcagtaaaatctgcttttttcatttggatcaatggtaagaaagttggttatagtcagggcagcaaactacctgcagagtttgatgtcagtgaatatgtaaaagcagggaataatgttgtggcattacaggtctacagatggtcagatggtacctacttagagtgtcaggatttctggaggatcagtggtattgagcgagatgtgtatctgtataccgagcccagtatacgggtcgctgacctttgggcaaagacaccactggatgaggactttaagaatggtcttttcgagcttgagatcgatattagaaatgatcagctcacggatgaaaaaatatcgatccaaactgaattattcaaaccaaatggtaggcgtgtttataataagacagacatagtgaccgtcccgggtgatacactgataaaacatatttttaaaaaacaaattttagatgttcatgcatggacagcagagacgccatctctatatactattcgggtaacacttaaaaaaggataccgtgtcattacatctttgagtgatgagatcggtttcaggacaatagaggtgtccggcggacaattattggtcaatgggcaacctattttgatcaaaggggtgaatcgtcatgaacatgatcctgataagggacatataataagtcgtgagctcatggagcaagatatcaaattgatgaaagagttcaatatcaatacggttcgtacgagtcactatcctgcagacccttactggtatgatctatgtgatagatacggtctatatgttattgatgaggcaaatattgagagccatggaatgggttatcatcctgatcgtaccttgggcaataaaccagaatggtatttagctcatctgacacgcatccagaggatggtagagcgggataagaatcacccttctatcattatgtggtctatggggaatgaaggtggtgatggagtgaacttcattgcctgttcaaactggctgcgtacgaaagacccttctaggcctgtacactatgaacgagcaggagatagagaccatgtggatatttatacacctatgtatcctggagtagaatggcttaagaaatgggcgagcaaaaagcatgaacgacctctgatcatgtgtgaatatatgcatgcaatgggtaatagtttaggaggcatgtcagattactgggaactcatacgtgaagaacctcagttgcaaggaggatgtatctgggattgggtggatcagggtttacgtaagacatccgaagatggaaaacagttttttgcttatggtggtgattatggtccaccagatactccgagtgatggaaatttcttgatcaatggtcttgtgcagccagatcggaggcctaatcctcatttttacgaggccaagaaggcatatcagaattttttggtgaggtctgtaggattggatgactttttgatcgagataatgaatgaacatttttttattagctccaaagaatatttgatatcatggaaactgagagcagatgggagtacaatccaatctggtgatcttgcgggtctgatcattaaaccgcaagaaagtaaacgtattaaagtgcctgtagaggaattcaaaatggaggcattgacagaatattttttagagatcgagttcagattaaaaaaggataacggactgttaaaagcaggtcatcttgcggcctgggagcagttacccattgtgaattatgcaacgatcaaaactgcggataaaattgctcattcttcatatatagacaatattccaattttggataatgtagtagaatcagataaggacatcatcatcgttggtaatgcatttcgggtagtgttctctaaagtaaaagggacgttggcgtcttggtcaaaaaatggaaaggagtatttggtcaatgggcccatgccaaatttttggaggacacctactgataatgattttggaaataacatgccagagagagcagcggtctggagaaaagcaagtcaggatcaacaggtcaatgatatccaggtcacaaataatagatatttcgttggtattcaggttggttttacgtatcctgatctgaattcaaatgggaagatcacttatagtatatatggggatggaaggatattggtcactcatagcattaatctgaatagtgcagacctgccagatcttccaaaatttggaactaggatgacgatcccaaaagagtatgataatatgacctggtttggtagaggtcctcatgagagctatattgaccgaaaggcaagtactagagtagatatattttctgggaaaatatctgagcaataccatccatatgtccgacctcaagaaaacggtaataaaacagatgtgcggtgggcaacttttaccgatcaagatggaaatgggatcatagtcagcggatttttatctttgaatgctagtcacttcattcctgaagattttgatgatggattcactatcgatgaccaaggtaagccattaaatgttagaggtaataagaggggaatgcatacgaccgatcttgtaaaaagagatcttgtacatttagatattgatcataaacaaatgggtgtcggaggtgaggatagttggggagcgcaaccgttaaaaaaatataaaattgaacctaaaagatataattatcattttatcatggctccgattaatgcaaatgacgatcctatgagtatatataagtatggcctacttgatcatgaataa

SEQ ID NO: 260859 - DNA, 2902 bp, Unknown
  Bacterial polypeptide expressing nucleotide sequence isolated from the Sargasso Sea
aatggaaaaggaaaacaacatagatcaattagattgggaaaacccatcagtaataggtattaataaagaaaatgcaagagcacacttttttgattttgaatcaaaagaattagcaaatactaataaatttgaaaattctaattattataagtcattaaatggaaaatggaaattctattattctttgaatccagatgtgcgacccaaagaatttatgaaaaatgattatgatgtttcttcttgggatgatatagaagtacctggaagttgggagatgcaaggatggtctgtcccagtatatgtaaatgttcaatacccatttcctgcaaaccctccatttgtaccacatgaatataaccgagtaggaagctatcgtaatagttttgaattgccttcatcctggttagacagagatatttttattcaatttgacggagttcgttctgccttttacttatggattaatggtaaatatataggctacagccaagattcaaaaactcctgcagagtttaatataacagattttattattgatggtaaaaatacagtttcagtggaggtgtatagattctcagatggttcatacttagaagggcaagatacctggaggattagtgggattgaacgaagtgtctttatttctgctaaaccaaaaataagattaactgatttttctataatatctgatctagacagcttgtataaaaatggtcattttgaattaattatggatttgattaataattcaaatgacagttctgatattactgttcagggagaattacataaacttgataaatcagtagaacccatattgagcttcgataaaaaaatgacagtatcaaataaagacacaatacactataagtctataataaataatgtagaagtgtggtcagcagagaccccaaatctttataggttgatgatcaccataattgacaatgatgaaaacgtaattcaaagttttacacaacaggttggttttagaaaaatagaaatggttccagggaatctcttaataaatggaaaggcaataatatttcgcggtgttaatcgtcatgaatgggactataaaacaggtaggtcaattacagagaaacaaatgattgatgatataaagcttatgaaaaaatttaatattaatgctgttcggacaagccattatccaaatcaaatgagatggtatgaactttgtaacgaatatggattatatgtaatagatgaagcaaatatagaagcacatggaatggaatttcataaagaaaaatacggctttatttcagatagcgatgaatggaaaaaagcatggattcaaaggggtagatccatggttgaaagagataaaaatcaaccatgtatcattatgtggtcaatgggaaatgaagcaggagatggagaaaattttaagagattatataaatggataaaagctaaagataatacaagacccgttgcatatgagccctcaagagaagcaaatcatacagatgttgtttttccaatgtattcatcaattgagactatttcaaaatatgcagaaaaaaatcccgaaaggccccttatcctttgtgagtatgctcatgcaatgggtaatagtttgggtaaccttcaagattattgggatacctttgaaaaatataatgttttgcaaggtggctttatttgggattgggctgatcaggtaatattaaaaactgatacatcaggtaaagagtattgggcctatggtggagattttggagatgagtttactataaatgattccaacttttgttcaaatgggcttgttgcagctgatcgaacaccaaacccacatttttttgaagtaaagaaagtatatcagccaataaaatttattgcagaggatattaccagaggccaagtacggatctcaaatagatatgattttataaatttagaccacattgacttttcttggtttatttcagaagatggaaaaactgtagaatctggtaaattaggagtaattgatttagagccaaatgcaagtaccgtcttatcttttaatctatcaagtgtcgttcctaaacctggatctgaatactttcttacaattattggaagattaaatcgtaatatgcctctactaaataaaaagcatgttgtcgcttgggagcaattcacattgcctattgatcgcccttcaataaaaactgatatttcaaattttccagatattagacttgtagagactgataccacagttaatgtgcttggagataattttcaaattacatttaataaacagacagggtttttaaatgattacgttttcagtaaacgtcatataatacaatctgaattgattccacacttttggagagcacctacagataatgatagaggaaatatgatgcatatacgtactgctatatggaaagacattggtaaagaattaaatattaaattttttcaaagatccttatctaaaaatgttgctaaaataaaaatggttgcgaatcatgacccaacagggtcagtcattacaattaaatataatatctttggaaatggcttaattgatatcgaacaagaaatagttacagaaaaagaatctttgccagaattaccacgatttggtatgaagatgacccttccaaaagattttaataaagtttcatggtatggtagaggccctcatgaaagttattgggatagaaaaacatccgctccagttaaagtgtattcaggtacagtttgggaacagacttatccctatgtaaggccacaagagacaggaaataaaactgatgttcgttggatggctcttgataatggaacaattggtttattagcaattggacaaaaactatttgatggaagtgttcatcaatacccgtatcgagatcttgaaaatataccggggacaagcgtc

SEQ ID NO: 260860 - DNA, 2000 bp, Unknown
  Bacterial polypeptide expressing nucleotide sequence isolated from the Sargasso Sea
tctgaaaaatacagtctatcataatggaggaattgttgtaaaagagttagaccctatttctattgaattattaggctcgaatgaaaaggttttgcagcaggagataattataaaagaggtaagcccgtggtctgcggagacaccgaatctctataagttggttcttgcaatttttaatttggatggtgatcttattgaaaccgtgagtacaaaaataggattcaggagtgttgagctgaaaaatggtcaaatgttggtcaatggtgagccgatcattatcaagggagttaaccgccatgagcatgaccctgttatgggaagaacggtagacgaagatctgatggtgaaagatattcttttaatgaaacaatttaatgttaacgctgttcgtacctcgcactatccaaaccatcctaggtggtatgaactatgcaatgagtatggtctctatgtaatggacgaggcaaacctggagtctcatgcgttttggtctaagtttacattagaccccgtttggagacctgcattcttagatcgagcgaagagaatggtattgagagatgtgaatcacccttcaataatattttggtcacttggcaatgaagcaggatacggtccgaaccatgatgcaatggccgaatggatacgcaactacgatccctctagactgattcactatgaaggaaaggaacctggatatggtcctctaccaaatcattacgatattattgctaatatgtatgcctctgtggatctaatgaaagagcttcatgatgaaaatccatctaggcctgtaatactctgtgaatattcacatgcaatgggcaatagtaatggaaatatttttaaatactgggacgcgatctacaaatatcctcgcttgcagggtgcatttatctgggactgggtagaccagggtttaactcgcaaggatagccatggggagtattttgtttatggtggtgattttggtgaaacactacatgatggaaacttttgcttgaatggagttatttctccagatagaaaaccacaccctgcgttgtatgaggtaaaatttcatcagcaaaacataaaagttacttgggatggaatagacaaaaatattttcatgatcgagaacaggaatttctttgtagaccttagttatgtgtttggtaagtgggagttaattgaggatggaaaaataatatcttcagggagtattaatactgactacataggcccgcagtcaaaacaaatctacgaacttccgccgtttaacttatctcataagaatagagagtatgctgtcaattttagatttgcgcttaaaaacgatcactcatgggcagagagcggtcacattgttgcatccgaccaggtcatcattaagagatatgatggtccaagatatcgcaaaggtggtaaacaaaataataaaaaagttcaggttaaagaaaatggcgatagggtagtggttagtgcagtcggaagagattttgattttgatctttctacggggcaacttgcacaggtaacaaaggcaaatgaatctttcatcgtgaatccgattattcataatatatggcgagcgcctactgataatgatgagggcggagatggtaaaagcttcgccagtcgttggcttaagagtggttataatgatatgaaaaggcaggtggtcaatgtcaatagttcattcacagatgatggcctatttcagatatctgtggatgaaaaatactctagtgactctgctaatattttagtaaatctgctttataccattctccaagatggtgaccttcatattaccgggaatacaaatataccagagggccttcctgttgttcctaaaataggtctctcttttcagatagataagaaatactctaatcttcagtggtatggccgaggacctcacgagtcatacattgatcgaaagcacagtgcattttttggaagatatagtggcactgtcagggatcaatattatccgtatataagaccccaggaaa

SEQ ID NO: 260861 - DNA, 780 bp, Unknown
  Bacterial polypeptide expressing nucleotide sequence isolated from the Sargasso Sea
cggcaacgtaaaatttgacgacggcagccgaaccgcgtggcagtgcctggcgacggaaaatgccgacggcacgtttaccaaactcggcccggtattaccgctgccggagggctataccggccacgtgcgtgacccgaaagtctggcagcacgaaggtcgctggtacatggtgctgggcgcacaggatttgcaaaagcgtggcaaggtgttgttattcagctcagcggaccttcatgagtggacgagtcagggcgaaatcgccggttatggcatcaatggcctggacgacgcgggctatatgtgggaatgcccggacctgtttgccctcggcgaccagcatgtcctgatttgctgcccgcagggcgtgcctcgtgagaaagagcgctatctcaacacctacccggcagtgtggatgagcggcgatttcgactaccaccgcgcggccttcgagcatggcgaactgcacgaattggacgcagggtttgagttctacgccccgcaaaccatgcttaccagtgatggccgccgtctgctggtcggctggatgggcgtgccggagggcgaagagatgcttcaaccgaccctcaccaacggctggatccatcagatgacctgcctgcgtgagctggagtttatcgatggtcagctataccaacgtcctctacgagagctgagcgccctgcgcggcgaagcgcacggctgggcagggaactccctgccgctggcaccgatggaaatcgttctacaaaccactggggacgatattttgagcctcgattt

SEQ ID NO: 260862 - DNA, 783 bp, Unknown
  Bacterial polypeptide expressing nucleotide sequence isolated from the Sargasso Sea
gggagtttggctatatgtgggagtgcccggacctcttccccctaggtgatcgccatgtgctgatcagctgcccgcaggggattgccccccggggagaggattatcgcaacctctaccagtgcggctggctggcgggtgacttcgacggcgagcacttcgcgcacggggctttccacgagctggacaggggcttcgagttctatgccccccagaccacccaggacagccaggggcggcgcctcttgtttggctggctgggactgcccgaagagaacgagatgagccagcccaccatcccctatggctggctgcaccagatgagctgcccgcgggagctgttctggcaaggcgactggctcagccagcggccggtggctgagctggcggcactgaagggggagcagacccgcttcgaggggacgctcggtgagtttccggggctggccatcgattcggcctggctcgatctggcgctgtgcggcgaggggagcctctggtttggcgccgtggccgagctgtgctggcggccggggcgcctggtgctgcgccgcctgaactggcagagcggagagtgggaggagcgatgctgcccctggcagggcggtagcatcaccgtcttgtgcgatcgatccagcctcgagtgtttcgtcgatggcggccgccataccctgtcggcgcgctacttcccgggaccggggccgcagcttgcgccgggcaaaccggtcgcgggcggcaaaatttgcctcgatcactggccgctggcggcctgcctagtacaatagc

SEQ ID NO: 260863 - DNA, 1594 bp, Unknown
  Bacterial polypeptide expressing nucleotide sequence isolated from the Sargasso Sea
gctgctcgcctgcgtagcgtgcacccaggtcgctgccgcgccttgcaacgcagcggccgaacagggcacaccgcaatggcggcccgcgctccactacacgccgcagcgcaactggatgaacgacccgaacggcctcgtctacgacaacggccgctatcacctgttctatcaatacaatccgctcggcaacgactggggcaacatgtcgtggggccatgcaacgagcaccgatctcgtccactggcgcgagcagccggtcgcgatgcgcgcgaacgcgacggaggaaatcttctcgggctcgatcgtcgccgacacgctcaatacgtccgggctcggcacgccgggccacacgccgctcgtcgcgctttatacgagcgtgtacaaggcgggctccggtcatgcgccgggcgtccaggcgcaatcgctcgcgtacagcctcgatcacggcgcgacctggcagccgtacgcacacaatccggtgctgacgctcgatccggaatcgaagcaatttcgcgatccgaaagtgtcgtggtatgcgccgggcggctactggctaatgacgacggtcgtcgccgacgcgcacgtcgtgaagctctatcgctcggacgacctgatccactggagtttcctgagcgacttcacgcggccgggcgtgccgcacgacggcacgctgtgggaaatgcccgacctcgtgccgctgccgctcgacggcgaccccgcccgcatccgctgggtcatgatcgtcaacgtcaatccgtggtcgattgccggcggctccggcgcgatgtacttcgtcggcgacttcgacggccgcacgtttacgccggatcgcgttgcgcccgccggctcggatcccgcgcaattccgctgggtcgatcatggcgcggatttctacgcagccggcaccttttccggcgcgcccggctcgcggccggtcgcgatcgcgtggatgagcaactgggattacgcggcgaaagtgcccaccacgccgtggcgcggcgcgacgaccctgccgcgcgaactgtcgctgaaaacgatcgacggcgaaccgacgctcgtcggcgaaccggccgccgcgttcgatgcctgggcggacggcaggcccgccgtgcatgaaggcgacctcacggtcgattccgcgacgcgcgcgctgtcggcggcgacgcgcggcgtcgtccagcgcatcacggtcacgatcgcgccgcagcatgcggcacgggctggcctgatcgtccggcgctcggcggatggctcgatcggcacccggatcgtgtacgacacggcaaagcgcacgctgacgctcgaccgttcgatgtccggtgcaaccaatttcgccgacacgttcagccgcgaacacatcgtggacctgccgctcgagcacgggcagttacggctcgagatcgtcgtcgatcgcggttcggtggaagtgttcgcgaacggcggccgagtcgcgctcaccgacctgatcttcccgccgcgcgatgcggaccgcgtcgccgtgttcgccgaacacggccgcgcgacgttctccgggctcacggtgacgcagctcgaagccggtagtgacgggcatggcgcctgtgcggcgcgatag

SEQ ID NO: 260864 - DNA, 295 bp, Unknown
  Bacterial polypeptide expressing nucleotide sequence isolated from the Sargasso Sea
ggcgcggagggcgcggcgctcgcgcgcgacgtcgcgcggcggtggttgaagagcgtcgcgcagattttgcgacggtcggggttcatgcacgagaagtacgacgctcggacgatagggggggcggtcggggggggcggcgagtacgcgccccagcgcgggttcgggtggaccaacggcgtcgcgctggtgttcctcgagaagtactgctacgacgggaagagcaagctcgggagggggccgccggacgtgggggggtgggggtggggaaggcccgaagactccatcaagcggtgac

SEQ ID NO: 260865 - DNA, 816 bp, Unknown
  Bacterial polypeptide expressing nucleotide sequence isolated from the Sargasso Sea
acgacaaggatacgccccgcgacgaatcctatgccgaagatgtggcgaccgcggcggaggcgaagggcgacaaggccatcacctatcgccacctgcgcgcgggcgcggaaagcggctgggacttcagctcgcgctggttcggcgacgggcggacgatcgcgaccatccacacgaccgacatcgtaccggtggacctcaacagcctgatgctggcgatggaacagcggatcgaggcgcgctgccagaaggcgggcgacagcgcctgcgccaccgaatttgcagggctggcgcgcaagcgcaaggcggcgatcgaccgctatctgtgggtcggcaaggaaggccgctatgccgactgggacagcaaggcgaagaagcccacagccatcctgtccgccgcgaccctctatccgctgttcgtcggcgcggcgtcgcctgcacaggctgatgccgtggcgaccacggtccgcgcgaaactgctgggcagcggcggcctgcgcaccacacccaaccggaccggccagcaatgggatacgcccaatggctgggcgccgctgcaatgggtggcgatcgacgggctggcgcgcaatgggcaggaaacgctggcccgcgacattgccgggcgctggatcggtacggtcgcagcggcctatgccgaaaccggcaagatgctggaaaaatatgatgtggaagaacgcaagcccggcggcggaggcgaatatccgcttcaggacgggttcggatggaccaatggcgtgaccagcgcgctgctggaccgttatcccgacatagcggccgaactggaaaaggccgaataaa

SEQ ID NO: 260866 - DNA, 920 bp, Unknown
  Bacterial polypeptide expressing nucleotide sequence isolated from the Sargasso Sea
tgctcaccagaaactaccccacgccccttcagaagaaatgacgatcgatatcgatctgctttatgaaatggatccgtgcgagttaaagctggatgaaatgattgaggcagagccagagccggagatgattgcagggttacccgcgtcagatgcgttaacccccgccgatcgttacctcgagctgtttgaacacgtccagtcatccaaactatttgctgatagcaaaaccttccctgattgtgcgcccaaaatggacccactggacattttgatccgctatcgcaaagttaaacgtcaccgcgactttgatctgcgacgctttgtcgagaaccatttctggctaccggaaacgccctccagtgaatatgtgtccgatccggcaagctcgctgaaagagcatatcgatcaactgtggcctgtgctgacgcgcgagccgcaggatcatattccctggtcctcgctgctggcgttaccgcaatcatatattgtgcccggcggacgttttagcgaaacctactactgggattcctactttaccatgctgggtctggcagagagcggtcgcgaagatctgctgaaatgtatggcggataactttgcctggatgattgaaaactatggtcatatccccaacggtaaccgtacctactacctgagccgttcgcagccaccggtctttgcgctgatggtggaactgtttgaagaggatggcgtgcgcggcgcgcgtcgctaccttgaacatctaaaaatggaatacgcattctggatggatggcgccgattccctggtgctcaaccaggcctaccgtcacgtgatcagaatgtcggacggctctctgctccaccgctattgggacgatcgtgatacgccgcgcgatgagtcatggcttgaagacgttgagaccgccaagcattcaggtc

SEQ ID NO: 260867 - DNA, 1471 bp, Unknown
  Bacterial polypeptide expressing nucleotide sequence isolated from the Sargasso Sea
ctgtttaaacatgtgcaaatggcacagctattcccagacagcaaaacctttgctgacgctattgttaaaaccgatctcaataccgttttagcggcctatgaacaagcgtgtttagatgctgagaaaagcggtgaagcagtagacttagctacgtttgttaatacccatttcgatattccagaaatgattagcgcaacatcgcaaaccaagtttgaaaatgtagccgattatattgagcatatgtggcaggtgctaacgcgtacccccgacactgagcagaaagacagcttaatagcgcttacccgcccatacatagtgccgggtggacgctttcgcgaaatctattactgggatacatattttaccgcgttaggtctaattgacgcggggcgcaccgacatggcaattaacatgttggtgaactttgtagatattttaaatgaagtaggctgcattcctaatggcaaccgcgcctattattactctcgcagtcagcctccaattttggcgttgttttataatttgcttaaagacgccctaagcgaccagcaaaaagaatacgttatctggggcttaaagaaagaataccagttttggatgaatgaagcgggcgagaacgcgtcacagaagggcgcagcacaactgcgcacggttaccatgccgtgtggcgcgacacttaatcgttacttcgacaccgagcctacgcctcgccctgagtcttatcgagaagacatagaaacagcagagcacataggcgctgacaaaagtcagttttaccagcatgttcgcgcggcttgcgaatcgggttgggactttagttcgcgctggctagctaaccccaattcattggcaagtattcgtacaactgaaattattcccgtagatttaaatgcgcttttggtaacgcttgaacagactctggcaagcgtgactaaaggtgccgagcaagcgcgctacagtacggcatctacagcacgaattaaggcaataaacacctatttgtttaatgctgaaaaggcgggctattttgactatcacttccccacacaaactcaaaccgatgtagtgtcagcggctatgtgtgtgccgttgttcgttggtattgcaaatgaacaacaggcagagggagtgcgcgctgcggtaatgaacaccttgctaaaaaaaggtggcgtggtaaccacttcaaacgctacgtcgcaacaatgggatgcgccaaatggctgggcaccgcttcaactgtttgccgttgaagggctgcgcaactatgggtttgaaatgcaggctcaaaccatcatgctacgcttttgtaaaaccattgagcgtcactttgcatcaagcggtgtgctacttgaaaagtacaatgtgtgtgaaccggaaataaaagcaggtggcggtgaatacgacgtgcagctaggtttcgggtggaccaatggcgtgtatacccgttttcagacatatctgaaccagtaaa

SEQ ID NO: 260868 - DNA, 601 bp, Unknown
  Bacterial polypeptide expressing nucleotide sequence isolated from the Sargasso Sea
tctgaatgccttcctctacaagctggaaagcactatcgccaatatttccgcgctgaaaggcgacaaagaaacggaagcgctgtttcgccagaaagccagtgaccgtcgcgatgcggtaaaccgctatctgtgggacgatgaaaacggctgctatcgcgattacgactggcggcgcgaacaaatggccctgttctctgccgccagtattgtgccgctgtatgtcggtatggcaacacatgaacaagccgaccggcttgctaacgcggttcgcagtcgcctgctcacgcccggtgggattttagcaaccgagcatgaaacgggtgaacagtgggataaacccaacggctgggcgccgctgcagtggatggcgatccagggcttcaaactgtacggtgatgaccacctcggggatgaaatcgcccgtaactggttgaaaacggtgaatctcttttatcaggagcaccacaaactgatcgaaaaataccatatagcagacgccgcgccgcgcgaaggcggcggcggggaatatccgttgcaggacggctttggctggaccaatggcgtggtgcgccgactcatcggtttgtatggcgaaccctag

SEQ ID NO: 260869 - DNA, 1618 bp, Unknown
  Bacterial polypeptide expressing nucleotide sequence isolated from the Sargasso Sea
actggccgtcgcctatctcgccgttgccggctgcgccgcgcaggccgacaacgcgaaccaggccgctgcccagtcgccaccgccggcaacagctgcaattgccaccgccgcatcgggcacgctgctgccgccgccgagccagctctacggcgacctgttcgtcgcggtgcagaccgcgcagatctatcccgaccagaagaccttcgtcgacgcgacgcccgatagcgatcccgcgacgatcgtgcagttgtatcagcaacagaaatcgcagccgggcttctcgctgaaggcgttcgtcgcgcagcatttcacgccgccgccggaaggcggcgtgacgcccccgccgaaccagacgctgcgccagcacatcgactggctgtggccgcagctcacgcgcacgagcacgacggtgccgccgtacagctcgctgatcccgctgccgaaaccgtatgtcgtgcccggcggccgtttccgcgaaggctactactgggatacctatttcacgatgctcgggttgcaggtgtcgggccgcgaggatctcgtcgacgacatgctcgacaacttcgcccacctgatcgatacgatcgggcacatcccgaacggcaaccgcacgtactacgcgagccgctcgcagccgccgttcttcgcgtacatggtcacgctcgccgcgcaggccgaaggcgacaaggtctaccagaaatacctgccggagctgcgcaaggagcatgcgtactggatgcagggcgaagccacgacgccgcgcgggcaggccacgcgcaatgtagtcgcgatgcccgacggcgcggtgctgaaccgctactgggacgcgagcgatacgccgcgcgacgagtcgtatctcgaggacgtgacgaccgcgaagtcggtgccggggcgtccggcgaacgaggtctatcgcgacctgcgtgcgggcgccgaaagcggctgggactacagttcgcgctggttcggcgacggcaagacgctcgcgacgatccgcacgacgtcgatcgtgccggtcgacctgaacagcctgatgttccatctcgagacgacgatcgtgaagggctgtgcggtcacgcgcgacgttgcgtgcgtgaccgatttttccgcgcgcgcggcgcggcgcgcggccgcgatcaaccgctatctgtggaatcgaaaaggctactacggcgactacgactggcaactgcgcaagccgcgcgacgccgtgacggccgctgcgctgtatccgctgttcgcgggcgtggcgtggcccgagcgcgcgaaggcgaccgcgcgcgaggtgcgcaagacgctgctgcagccgggtggcctcgcgacgaccaccgagaacaccgggcagcagtgggatgcgccgaacggctgggcgccgttgcagtggatcgcaatcgacgggctgcgccgctatggcgaaccggcgctcgcgaaggacatcggcacgcgtttcctgtccgacgtgaagcacgtgtatgcgaccgaaggcaagctcgtcgagaagtacgtggtcgaaggcgccggcacgggcggcggcgggggaggcgagtatccgttgcaggacggcttcggctggaccaacggcgtcacgctgaaactgctcgggctgtacggcgagtga

SEQ ID NO: 260870 - DNA, 881 bp, Unknown
  Bacterial polypeptide expressing nucleotide sequence isolated from the Sargasso Sea
gctgctagctgatgacagccccatccaaccccagcctgctcccagcccaaccccaactccccaacctcaacctcaaccggaaccggaaccagcaccagaaccaccaccagcacccaaacctgttgctgattacagcgaggcgttggggctttcgctgttgttttacgacgccaaccgctccggtgaccttgatgaatcaaccaaccgtgtcccctggcgtggggattccgggctgcgtgatgggcaagacggcatctatttcggcgatgcgacagcggagaacctgcaggttggtctcaaccttgatctcaccggtgggtatcacgatgccggcgatcacgtgaagttcggtctaccccttgcctcgaccctttcaaccctggcctggagcggaatcagctttgctgacggttacgccaacagcaaccagatggatgccttgctgaacaccgtccgatggggaacggactatctgcttaaggcacaggggaccaatgccatcggagaaaccacgtacttcattgcacaggttggagatgggcaggcagaccatgctctgtggagtgcaccggaacaacaaacgattgaacgtccggcgctggccgtcacaccagacaacccgggtagcgatgtcgccgcggcgagtgctgcggccctggcctccgcatccgtgttgtttcgagagacgggagactccggatatgccgacaccttgctcgaggcctcggaatctctgttcacatttgctgatcgctatcgagggcgatattccgactccatcaagagcgttcagagcttttacaactcatggagcggctacaacgatgaactggcttacggagcagcctggctggccagggcagtggatgcacagggtggag

SEQ ID NO: 260871 - DNA, 696 bp, Unknown
  Bacterial polypeptide expressing nucleotide sequence isolated from the Sargasso Sea
ttgtatctagtgaattaatcgcaacaggaatagatataaattttgctccggtcttagatattgatcagagtacgagcagcataataggtaatagatcattctcagataaccctgatgaagtaatttctatggcttcagattatatcgatggtatgcatcaggcaggaatgagttctacaggaaagcatttccctggccatggaggggttgctgaagacagtcatatagaattaccggaagatattagacaattagatgatttgatgaattttgatatgaagccatacattaagttagcaaataagcttgatgcaataatgtgtgcgcatattttatttcccaatgtagacaaaagcataccaagtttctctaaatattggatgaaagaaatcttaagaaataaaatgaattatgatggattaatttttagcgatgatttaactatgttaggtgccggtggagagccttgctctgaaaaggctagaaaatcaattcaagcagggtgcgatatggttttagtttgtaataataggaaagaaatagaaggcataataaatatttttgatgaaattggggttgagccttctgaaagattgtcaataatgaaacagaatacaaatatagaatggaatgaactaaataacagcgatagaaaaagaaatattaatattaaattagaaaaaataaggagttagt

SEQ ID NO: 260872 - DNA, 427 bp, Unknown
  Bacterial polypeptide expressing nucleotide sequence isolated from the Sargasso Sea
atgtatggtcgaataatgattgatgttgaggggacttctctgtctcaacaggacagagaattaatttcaaatggaaatgtaggtggaattattttattttcgaaaaactttaattcatttgagcaaatatctgacctagtaaatgaaatccatgcaataaaagaaaacattttaattgctgtcgatcaagagggtggaagggtacagagattttctaaagatttcacacaacttccttctttgaaagatttagctaaatattcagagattaataatgatccagatatatgcaaagaagttgcatggttaacttcttcagaacttattgctgctggaattgatttaaattttgcacctgttctagatatagatgaaagtgattcagcaattattggtgacaggtcgttttcttcaaaaactgatgaag

SEQ ID NO: 260873 - DNA, 334 bp, Unknown
  Bacterial polypeptide expressing nucleotide sequence isolated from the Sargasso Sea
atgttggattgtcaggccgaagaacttctgcctgaagaaaaggaaaagttaacacatccagtagtgggtggcgttattttatttagccgcaactatcatgataaacgtcagctctctgcgctggttcaagatataagacgctttgcaaagcgtccagtactgatcgccgtcgatcatgaaggaggccgcgttcagcgttttcgtgaaggctttactgccatacctgcaatgggcgatattttaaggcagtcagagcatcaagatgaaagtgctgcatacgcaaaagcgtgtggattagtattggcttatgaacttaaaaccttagacatcgatt

SEQ ID NO: 260874 - DNA, 733 bp, Unknown
  Bacterial polypeptide expressing nucleotide sequence isolated from the Sargasso Sea
aatgaaattaggtccaatcatgatggatgtgtcaggttttacactgaccgaaacagagaaaactcaaattgacaaaccgagcattggtggtgtgattttatttacacgtaattatcaagatattcatcaaattaaaaaacttattggtgagatacgtacgattaatcctgacttactgattgccgttgaccatgagggtggtcgagtacaacgatttagagagggctttacacacttaccagccatggcaaaactaggagaagtttacgatcaatttccagaacacgcacttgagcaagcgttttcttgtggctggattttagcgacggaattattagcgattgacgtggatttttcttttactccagtgctagatttggattacgggaattcatcagccattggtgacagagcttttcattccaaaccagaggtagtaatagaacttgcaggagcgttaataaaagggttacatgaagctggcatgaagtgtgttggtaagcattttcctgggcatggccatgtagaaattgattcacacttaggtttacctattgatgaacgtacaatgaatgaaatcgagtatgatattaactgttttaagggtttgattaataagggtttagatgctgctatgccagcacatgtgttgtatcctcaggttgatgataagccgtcaggtttttcatcaaaatggattaaagaaattttgaaaactcaattaggcttcggt

SEQ ID NO: 260875 - DNA, 655 bp, Unknown
  Bacterial polypeptide expressing nucleotide sequence isolated from the Sargasso Sea
aattatgctccttctgttgacctttcaattaatttggaaaacccagtaatctacaaacttgaaagaagttttggaagaaaaccaagcctagttctttctcatgcaaaatcatttataaatgcgcacagagaaaataacataatttctgtattaaaacatttcccaggacatggaagctctaatgaagattcacatttaggattaacagatgtttctgatacctggatgatagaagagttatatccttataaatctatgatagattctggatttgtagatgctattatgagcgctcatgttgtaaataaaaggttagatgataagatgttaccaggtactttatcaactaaaattattagtggattattaaggaactttatgggatttaatggagttgttttttcagatgatatgcaaatgcaagcaattacaaatcattatggtttagatttagctattgaaaaatcaataaattctggaattgatgttcttttattttgcaataatcagttagaagaaaacaaagtttcaactgataaagttatatctattattaaggataaaattcaatcaggcgaaatagagtattcgagaattgaagagtcatttaatagaattaaaaaactaaaacaaagttttgatataactaattagg

SEQ ID NO: 260876 - DNA, 679 bp, Unknown
  Bacterial polypeptide expressing nucleotide sequence isolated from the Sargasso Sea
ttagacataagttttgcacctgtgttagatctagatgattcaagaagttctgttattggtgatagatcaataggtgataatccagagaaggttattgctattgcaagcgcttttattaaaggtatgaatcaagcgggaatgcaagctactggcaagcatttcccgggacatggcggtatcttcgctgatagccatctaactttttctcaagatactagatctttattagaactagagagccatgacttacgtccctttgatgctttaaagcttaaacttggtgggataatgacggctcacatatctttttcaagtattgacaaagagatagcaactttttcaaaattttggctgcaagatattttaagagataaaatggaatttactggaacaatttttagtgatgacctctcaatgaagggctcagattatgtgggaggcattgaggccaaagtgagtaaagcattagaaagtggttgtaacatggttttggtttgcaatgatagacctgcagctttagaggcaatcaattttttagagaaagaaaaaatttctcagtcagaaaaagtaactaaattaaaagcctcaggatcaattgcttgggcagacttggaaaatgatgcaagaagaatagatataatagataaattaaacacaacagaaaaattaaagttatgac

SEQ ID NO: 260877 - DNA, 221 bp, Unknown
  Bacterial polypeptide expressing nucleotide sequence isolated from the Sargasso Sea
aatgactcttggacccattatagtttctattgagggcaagaaactctcagaagatgatcgtcatacacttcgaaatgatctgattggcggggttattcttttttcagaaaattatcagaatcgagagcaattaatggagttagttagatccattaagaatgttaaatcacctgaattaatcgtttgtgttgatcaagagggcggtcgtgttcaaaggttta

SEQ ID NO: 260878 - DNA, 419 bp, Unknown
  Bacterial polypeptide expressing nucleotide sequence isolated from the Sargasso Sea
aatggaagacttatttggccctttgatggttgatgttgatggtaaatatctaagcgaagaggacaaaaatattttaaacaataaatatattggggggattattcttttctctaaaaattttgagtcttttgagcagttacaaaaattaataaaagaaattaaaaaagttaaaaaaaatatacttatagctgtcgatcaagagggtggtagagtacagaggtttcataacgaatttaccaaaataccttcgatgcaaaatatatcaaaatatgcaattaaatataaccatacaagagtctttcaggaaattggttggttaatatctagcgaattaattgcttctggagttgatttaaatttttctccagttttagatcttaatgaaaacacttcaagtattatttccgatagagcttttt

SEQ ID NO: 260879 - DNA, 841 bp, Unknown
  Bacterial polypeptide expressing nucleotide sequence isolated from the Sargasso Sea
tatgaaaagtacttatggcagattaatgttcgatatcgatggtaaaagtttatctattgaagacaaaaaattgatatcaaataagcatgtaggaggattgatatttttttctaaaaattttgaatcttttcaacagatatcaaatcttgtaaaagaagttagagaaataaaagaaaatattcttatagctgttgaccaggagggaggaagggtccaaagacttaataatgagtttactaaaatcccatctatgcaagaaattgcaagatttgcaaaagatcataatgactcctctatttgcaaagatattggatggcttatatctagtgaattaatcgcaacaggaatagatataaattttgctccggttttagatattgatgagagcactagcagcataataggtaatagagcattttcaaataattctgatgaagttacctctatggcttcagattatatcgatggcatgcatgaggcaggaatgagttctacaggcaagcacttccctggccatggaggggttgctgaagacagtcacaaagaattaccagaggatattagacaattagaggatttgatggattttgatatgaaaccttatattaaattggcaaacaagcttgatgcaataatgtgtgcacatattttatttccaaatatagataagagcataccaagcttttctcagcattggataaaaaaaattcttagaaacaaaataaaatatgatggattaatttttagcgatgatttgactatgttaggtgccggtggagagccatgttctgaaaagctagaaatcaatttcagcaggatgcgatatggtgttagtttgtaa

SEQ ID NO: 260880 - DNA, 736 bp, Unknown
  Bacterial polypeptide expressing nucleotide sequence isolated from the Sargasso Sea
agaaaataatgataaagagtttataaaagatttagcttggttgatttctagtgaattaattgcagcaggtatagatgttaactttgctcctgttttagatatcaatagaaatatctcaagcataataggaaatagatctttttcaaatgatatccttgaagtaataaataatgcctcagattatattgatggaatgcatgaagcaggaatgaaatctacaggaaaacatttccctggtcatggaagcgtaattgaagatagtcatctagaacttccagttgatgaaagagagcttgatgaattattaaacgaagatttaaaaccttatattaaattaaatgataaattagatgtgataatgtgtgcccacatattattttctaaagttgatagtaaaatccctagcttctcagttacttggattaataatgtactaagagataagcttaattataaaggtttaatatttagtgatgatttatctatgcttggatctggaaacgagagtcttaataacaaggtggaaatgtcattagatgcaggatgcgatatggtaataatttgtaatgatagatctggagtaaaagaagtaattgagcatttagataaaactgatattgaacaaacttcaggaatatctgaaattaagagttcaaaaaaaattaaatggaatgatcttttaaataataacagagcaatggcaattaaagaaaaactaaaaaatatgaggaattaa

SEQ ID NO: 260881 - DNA, 988 bp, Unknown
  Bacterial polypeptide expressing nucleotide sequence isolated from the Sargasso Sea
atgaaactaggcccaatcatgatggatgtggcaggttttaaactggccgaaaaagagaaaactcaacttgacaaaccaagcattggtggtgtgattttatttacacgtaattatcaagatattcatcaaattaaaaaacttattggtgagatacgtatgattaaccctgacttactgattgccgttgaccatgaaggtggtcgagtacagcgatttagagagggctttacacacttacccgccatggcaaaattaggcgaagtttacgatcagtttccagaactcgcacttgagcaagcgttttcttgtggttggattttagcagcggaattattagcaattgacgtagatttttcttttactccagtgctagatttggattatggaaattcatcagccattggtgatagagcttttcattccaatccagaggtagtaatagaacttgcaggagcgttaataaaaggattgcatgaagctggcatgaagtgtgttggtaaacattttcctggacatggccatgtagaaattgattcacacttagatttacctattgatgaacgcacaatgaatgaaattgagtatgatattctctgttttaagggtttgattaatcagggtttagatgctgctatgccagcacatgtattgtatcctgaggttgatgataaaccgtcaagtttttcatcaaaatggattaaagaaattttgaaaaagcaattaggcttcggtggggttgtgtttactgacgacttatcaatgcaaggggcacattttattaagaacattgctgaacgtgttcatgtgtcattagagagcggttgtgacatggctgtgatttgcaatcatccagaattagttacagaggtgattgatttagattggcccgaaagtgaaaaactccaattaatgaaagggataaaaactcagaaaatcgataaaatagtactcaatcatcatatagataatattcaaaagttattatgaa

SEQ ID NO: 260882 - DNA, 1882 bp, Unknown
  Bacterial polypeptide expressing nucleotide sequence isolated from the Sargasso Sea
actgtttactgctagcgcaaccgctcaatctggaagtgctaacgcttcgaataatcctaagcccagcgctgatgccgaaacaattcgcgctgtaaaaaacatgctcgggcaaaaaatcattttggattttcgttatttctgcgaagacaatacgccgtcatcgcgctgtcgtacgcctatgacggtaattccaccgtcactgttaaatgtgctcagtatgcacaacatcggcggtgttattttgttttcagagaacattcaaaataccgagcagttaattacgctcaattacaccatgcagcagcatatggtaaaagcaggtcgtcagccgttgtttattgctgtcgatcaagaagggggcagggtcgcaaggttgccttcagacatgctctcgccgtttgcgggtaacatggccattggcgccacttttcatcagcgaggcagcgcatttgcgcaaagtgtggcatcgcatattggccaaacgcttttaccgctgggaataaacaccaattttgcgccgtcggttgatgtaaatagcgagccgaagaaccccgttattaacgtacgcagcttttcggaaaacccagagcaggtagccgcactcgggcagacatttgtcagtgctatgcaaagtacaggtgtaatgagtgctatcaaacattttccaggccatggtgatacccatgtagatagccacagtggcctgccgcaagtaacgcatagcaaagcgcaagctatggcgggtgacatccttccttttgcgaatatcattaatagtgcaacgcctcctgcaatggtaatgagtgcacacattcagtacccgtctttagacgatacgacaattattgataagcatggtaagtcacaaatagttcctgctactttgtcgaagaagatactaagcaatttgcttcgcaaccaattaggatatcaaggccttatcgttactgacgcgttagacatggcaggtattactcagtttttctcccatgaagaagcattagtcagtgcattcagcgcaggtgctgatattgcgcttatgccgttcaccataagaacccaagacgacataaaaaagttcgcgttacttttggataatgcagcaaatcgaatgtcggaaagcgctttcttgaaagcgtctcataatcgtattattaaggcaaaacagcgctttgctttgcaaagttttatttccaagcccatgtcatggtggctcaatgaagcgaaagaaaatgcttcaatgaataaccctaacagtttgaaaaaccgaggaattcaaattgagaaagcgctttctaaatcgtcagtttctgtactcttcgggaaggatgagttgccaataacttcaaatcgctggttggcgcttatgccagacgcagcaagatgtttagcatttgaagccgcgcttacacgcgcacgttccaacttcaacaataagactctggagtttgcgtgtttgccgttaactgcgttacctaaaacccaattagcaatgaatctattaaaacaagctgacgtgctggtggttggcaacattagcccgctacatgctaactatgaattaggaggagtcgatttacctgtgcatgtgaaacgacgcgcaagcgagactgaggtgatggcatttagcaaaaaaataatggttgctgcgaaagcacagaataaaaccgtggtctttgctccactgcgcatgccatataaggcgcatgacgtgaaagagctagccgatgttgctattgctacatttagttatgcggtgaacattacacagcaaagtgataaagaaaatcagcacgttacgagctatagtcttaatgctttggttgatgtattacttggtagcgcgctcgctgagggacgttcacctgtttcgttgaaatag

SEQ ID NO: 260883 - DNA, 1012 bp, Unknown
  Bacterial polypeptide expressing nucleotide sequence isolated from the Sargasso Sea
aatgaatattcctgatggagtaatactatctatttctagttatgatatcaaaaatgatgaagtggaattccttggtcaaacaaatcctttaggctttgttttgtttaaaagaaattttagcacaaaaaaacaacttcttaatttgatcaaaaaattaaaaacattaacaatgaacaaatcagctttgatttttattgatcaggaaggagggcgagtgcaaagattaaataatcatgaattcataaaatttccccctcagaaaatttttggagaactattcctaaaagataaaattttatctttagatttggcttataaaacatcctttttattaggttatgaattgaaacaagtcggaatagatgtcaatttttcgccagtttgtgatatctattacgattatggtcattctgttattggtgatagatcttttggaaataatccaaatgctgtcaaaatattatctaagcaatattgcaaaggtctcagagaatctggaataatacctgttttaaaacactttccaggtcatggtagatcatatactgatacacacaatgataagtcaattgtatcaacagatcatagtgaattaaaaaaaacagatcttgttcctttttcttttttgaaagaagagagtcttgtgatgctttcacacataatttactcagatatcgacaatgaagtttcaacctattctaaaaagataaacaagatattaaggttaaaaaataaatttaatggtttaattctgacagatgatatttcaatgaaggccttaaaagataaactagaaaatatagttgaaaaatcctatgatgctggttgtgatgttgtgttatattgtaaaggaaatttgcgagaaatgaaagcgttttatccttttacaaaaaaacttaaaaaagagtattacaccttttttttgaatgatatgttaaaaatgaaaactgtaaaacataaaatcgatgaccttaaagaagagttaatgagaaaagaattaataaaaatttaa

SEQ ID NO: 260884 - DNA, 466 bp, Unknown
  Bacterial polypeptide expressing nucleotide sequence isolated from the Sargasso Sea
tatgactaatttatttggaagattaatgattgatattgatggatatagtctttctaatgaggacaaaaccatactttcaagcaaacatgttggaggtttaattcttttttctagaaattttgattcgtataaccaactttataatcttattgaagaagttcacttgatcaaagaaaacataatcattgctgtcgatcaagagggtggaagagttcaaagatttcaaaaagaatttacaaatataccctcaatgcaagaggcatctctttttgcaaaaaaaaatgaggatcatggttttataaaagatttagcttggttgatctctagtgaactaattgcggtgggcatagatattaattttgcacctgttttggatatcaacagaaatctttcgaccataataggaaatagatctttttcagacgacattcttgaagtaataaataatgcttcgaattatattgat

SEQ ID NO: 260885 - DNA, 898 bp, Unknown
  Bacterial polypeptide expressing nucleotide sequence isolated from the Sargasso Sea
catgaaagatttatatggaagactgatgatagatataaatggaaagaatctatcagaagaagataaatttataatctcaaacaaacatgttggaggattaattcttttctcaagaaattttgaatcttttgagcaactacaaaatcttattagcgaaataaattctattaaagaaaatattgttattgctgttgatcaagaaggaggtagagtccagagatttaaaaatgaattcttgctcataccatcaatgcaagaaatttcactttatgcaaaagaaaatgatgacatggaaattttttctgatttagcttggttagtttctagcgaactaatggcagttggtattgatattaatttcgcaccagtattagatgtggatgagaaaacttcaagtattattggagatagggccttctctaatagcgtttctgaagtaattacatatgcatcaaaatacattgatggtatgcatgatgctggcatgaaatcaacaggaaaacactttcctggccatggaggtgtttatgaagatagtcatcttcatttgccaatagataatagatccaaggaagatttaatgatctctgatattaaaccttatatagagttaaaagataaacttgatatcgttatgtgtggacatattttatttcctgaaattgatccaaatattccaagtttttcaagtgcttggattaaagacatacttaaaaaggagttgaattatcaaggcctaataataagcgacgacctatcaatggagggagcaaaaggtgaaaattgttccattaaaacaagagattcattccaagcgggttgcgatatggcaataatttgtaaatacagagatgaagtaaaaaaagtattaagtttcttggatgatattaagatcgag

SEQ ID NO: 260886 - DNA, 301 bp, Unknown
  Bacterial polypeptide expressing nucleotide sequence isolated from the Sargasso Sea
atgaaaaatttatttggaaaggtaatgttagatatcagtggtaagaaattatcagtagatgataaacagataatatcaaacaaacacgttggaggcttaatactattctcaagaaactttgattcatttacacaactcaaaaatttaacagatgaagtatttcatataaaagagaatatcataattgccgttgatcaagagggaggaagagttcaaaggtttaaaaatgaatttaccgagattccatcaatgcaacaactcgcaaattttgcaagagatgaagaagatattaatatattta

SEQ ID NO: 260887 - DNA, 679 bp, Unknown
  Bacterial polypeptide expressing nucleotide sequence isolated from the Sargasso Sea
tatgtatggtcgaataatgattgatgttgaggggatatctctgtctaaacaggacagagaattaatttcaaatgtaaatgtaggtggaattattttattttccaaaaacttcaattcatttgagcaaatatctgacctagtaaatgaaatccatgcaacaaaagaaaacattttacttgctgtcgatcaagagggtggaagagtacagaggttttctaaagatttcacacaacttccttctttgcaagatttagctaaatattcagagattaataatgatccagatatatgcaaagaagttgcatggttaacctcttcagaacttattgctgctggaattgatttaaattttgcacctgttctagatatagatgaaagtaattcagcaattattggtgacagatcgttttcttcaaaaactgatgaagtaatcaagcatgctgaaaaatatattgagggaatgcatgaggcgggtatgcaggcaactgcaaagcactttcctggacacggtggagtatcagaagatagtcatgttattttgcctgaagataaaagatcattagagttattgatgagatctgatattcaaccctatattaaattaaataaaaaaattgatgcgataatgtgtgctcacattttatattcattaattgatgacaaaataccaagctactca

SEQ ID NO: 260888 - DNA, 873 bp, Unknown
  Bacterial polypeptide expressing nucleotide sequence isolated from the Sargasso Sea
aaaatattatttttgctgtagaccatgaaggtggcagagtacaaagattcaaaaatgaattcactaaaattccctcgatgcaggaaatttctctttatgcaaaaaaaaatagtaatagtaaaatatttaaagaggtcgcatggctttcttccagtgaattaatatctgcaggaattgatataaattttgcacctgttcttgatcttgataaaaactcttcatcaataattggggatagagctttttcaaatgaagctcaagaagttattaaaaatgcatctttttttattgatggaatgaatgaagctggaatgagttcaacaggtaagcattttcctgggcatggcggagttgttgaagatagtcataaagagatgccaactgataacagatcctttgatgagctagattcagaaaataatgacttagagccatttagaaggctgtctaaaaaattggatgctgtaatgtgcgcgcatatattattccctaagatagatgaatatattccaagtttttcaaattattggttaaaagattttcttaggaatgaattaaattatagggggttagttctatcagatgatttaacaatgcttggtgccggcaatgattcatgtcatgaaaaagtagaaaagtcacttaatgcagggtgtgacatggttttgatatgtaatgacagaaatggtgcaaagcaggctattgattttatggtaaaaaaagatattgataagtctgttgaaatagcaaaattaaaaagtagctcaaaatgcgaatggagcgatttagattctagcttaagagcaaaggaaataaagagtattattaaagaaataggagataaacatgagaagaatagtaacgggtcataac

SEQ ID NO: 260889 - DNA, 414 bp, Unknown
  Bacterial polypeptide expressing nucleotide sequence isolated from the Sargasso Sea
tatgagtaactctttacttgggaggctaatgctcgatctggatggaacctcgcttactcaagaagaaaataaattactgcataatcctcatgtagggggcgtgattttatttgaaagaaatatctcttcaagggatcaagtccaagagttatgtggaataataagaaagataaatccaaagcttcttattgcagtagatcaagagggaggaagggttcagcgattaaaagaaggctatacaattttgccgactatgcaaaaactagctgcatttttaaattcagatagtgataaaaactttctttttgcaaccgatttaggttggttgatggcctcagaagtgattgcgtcaggcttagatataagttttgcacctgttttagatttagatgattccagaagttctgttattgg

SEQ ID NO: 260890 - DNA, 580 bp, Unknown
  Bacterial polypeptide expressing nucleotide sequence isolated from the Sargasso Sea
tatgaacccgataaaaccctcggttggggtcttaatgttggatattgaagggaaatcactcactaaattagaagaggatttaatcgagagagactcggttggcggagtaatcctatttacccgcaactatgaaagtccggcgcaactaagagaattagtggcatcaatcagggctatcaattgtgatatcttgatagcggtcgatcaagaaggagggcgagtccagcgctttgacaaggattttgtgagtcttcctagcctaggtgatatcggaaagatctataaaaaggagccagaactgggtgaatctctggcaaaaacatgcgcatgggtaatggctacggaactgatttcgtatgacatagatctgagctttgccccagtaatagatcttcaaaatacgagaagtgaggttattggtgatcggtctttttcttcagaccctgattcagttatcgccttggctaaatcgtatatttctggactatcagaggctggcatgagcgcttgtggtaaacattaccctggccatgggactgtaagagcagattctcatatcgagcttccagttgatgacaga

SEQ ID NO: 260891 - DNA, 795 bp, Unknown
  Bacterial polypeptide expressing nucleotide sequence isolated from the Sargasso Sea
gatgaccgagtcttcagtttcttctactgattcatacgctgtgtcggatgcgttagcacaggccgtaggcgtgattaccgatattgaaggaacggcgctgacggatgaggatcgtgatttcttaactcagcctgaaatcgccgggcttatttttttcgcgcgtaattacgaatctcctcagcagctgaaagctcttacgggcgagttaaacgcgttgagacccgacctcctgattaccgtagatcaggaaggtggtcgtgtgcagcgctttcgctccggatttacgctgtttgagccgatgatgcgctatgaagccatttttgttgaatcaccagaaaaagcgcttgagcttgcccgtttgggtggccaacttctggcttctgagttgatcgcgcatggcgttgatctgacgtttgcaccggttctggatattgagcgagatctttcacgggtgattggcgaccgagccttcggtcacagcgcagacacggtgacggcattggccagagcctggtgcgaaggactttcttctgcgggcatgttgtctgtcggtaaacactttccggggcatggagctgttgaagctgactctcatctggagttaccggtcgacccgcgtaatgccgaagccttagaagccgagtcggtaccttttaaaacgctgatcagtgaaggcgtgatacagggcattatgcctgcacacgtcgtttatcctgccattgatgcaaaccataccgccggtttttcttctgtctggttgcaggacgttctgcgtaagcagctcggcttcagcgg

SEQ ID NO: 260892 - DNA, 637 bp, Unknown
  Bacterial polypeptide expressing nucleotide sequence isolated from the Sargasso Sea
aatgaaactaggcccaatcatgatggatgtttcaggttttacactgaccgaaacagagaaaattcaaattgacaaaccgagtattggtggtgtgattttatttacacgtaattatcaagatattcatcaaattaaaaaacttattggtgagatacgtatgattaatccagacttactgattgccgttgaccatgaaggtggtcgagtacaacgatttagagagggctttacacgcttaccagccatggcgaaattaggggaagtttatgatcaatttccagaacacgcacttgagcaagcgttttcttgtggttggattttagcggccgaattattagcgattgacgtggatttttcttttactccagtattagatttggattacggaaattcatcagccattggtgatagagcttttcattccaatccagaggtagtaatagaactagcaggagcgttaataaaagggttgcatgaagctggcatgaagtgtgttggtaaacattttcctggacatggccatgtagaaattgattcacacttagatttacctattgatgatcgcacaatgaatgaaatcgagtatgatattctctgttttaagggtttgattaatccagggtttagatgctgctat

SEQ ID NO: 260893 - DNA, 748 bp, Unknown
  Bacterial polypeptide expressing nucleotide sequence isolated from the Sargasso Sea
atggggcgtggattcataatgacggatataggtgggagagaactgacttctgccgacagacagttattactcgaagagaatgttggtggcgtaattctttttagtagaaattatgagtcccctcaacaaatcattgaattagttcaggagatacgcaatctcaaatctcctccattgcttgtggctgttgatcaagagggtggaagagtacaaagattgcgtgatggtttcactcttattcctgcaatgcgaaaaattgggcgtttatacgaaatgaatgctaaaactgcactcaaggtatccgagacagcaggatggataattggcgctgaattaagatcggtcggtatagatttgagttttgcaccatgtgttgatttagactggggcgtcagttcagttattggtgacagatctttccataaaaataagttcgctgttgaaaatctagcttatcatttttcaaaaggaatgagggaatcaggaatgtctccagtcgcaaaacatttccctggacatggagctgttgcaacagattctcatgaagatcttcctgttgatagaagagaatttagtgaattacttgatgatatatatccttatgaatcactgataagaaaaaatacagttccagctgtcatgatggctcatattatttacaaagaagctgataatttacctgcaagtatctcagaatattggatgaagaatcatctcagacatcagctgaatttcaatggtgtaattt

SEQ ID NO: 260894 - DNA, 871 bp, Unknown
  Bacterial polypeptide expressing nucleotide sequence isolated from the Sargasso Sea
atgattgatattgatggattcaatctttccgatgaagataagtctttactttcaagtaaacatattggaggtttaattcttttttcaaaaaattttaattcatacgatcaactttataatttaattaaagaagttcgttcaatcaaagataatattataatagctgtagaccaagagggcggaagagttcaaagatttcaaaaagaatttacaaacataccctcaatgcaagaggtatctctttttgcaaaaaaaaatgaagatcatgattttataaaagatttagcttggttgatctctagcgaactaattgcggtgggcatagatatgaattttgcacctgttttggatatcaacaaaaatctttcgaccataattggaaatagatctttttcagacgacattcttgaagtaataaataatgcttcagattatattgatggaatgcatgaagcgggaatgaaatctttaggaaaacattttcctggtcacggtaatgtaattgaagacagccatttagagctcccagaggatgaaagagagctttgtgaattgatgaatgaagacataaaaccttatattgaattaaaggataaaatagatgtgataatgtgtgctcatatactatttcctaaagttgataataagattcctagcttttcagacacatgggttaataatattctaagaaataaacttaattataaaggtttaatattcagtgatgatttatcaatgcttggatctggaaatgatagccttaccaacaaggtgaaaatgtcattggatgcaggatgcgatatgctaataatttgtaatgatagatctggagtaaaagaagtaattgagtatttagataaaactgattaga

SEQ ID NO: 260895 - DNA, 859 bp, Unknown
  Bacterial polypeptide expressing nucleotide sequence isolated from the Sargasso Sea
atgaaactaggcccaatcatgatggatgtgtcaggttttacactgaccgaagcagaaaaaactcaactggtcaaaccgagtattggtggtgtgattttatttacacgtaattatcaaaatattcatcaaattaaaacacttattggtgcgatacatattcttaatccagacttactgattgcagtcgaccatgagggtggaagagtacaacgatttagagaggggtttactcgcttgccggccatggcaaaattagggaaagtttacgatcaaaatccagaaaaagcacttgaacaatctttttcttgtggttggattttggcgacggaattattagagattgacgttgatttttcttttactccagtgctggatttagattacgggcattcatccgccattggtgatagagcatttcattccaatccagaggtggtaataaagctcgcaggagcgttaattgaagggctgcacgaagctggtatgaagtgtgttggtaagcatttccctgggcatggacatgtagcaattgattcacacgtagatttaccaattgatgaacgcccaatgaatgaaatcagtcaggatatactttgttttaagggtttgattaatcagggtttagatgcagctatgccagcacatgtgatgtatccacaggttgatgataagccgtcagggttttcatcaaagtggattaaagaaattttgcaaacgcaattaggctttggtggggttgtgattagtgacgacttatctatgcaaggagcacattttattaagaatattgttgaacgcgttcaagtgtcgttagagagcggttgtgacatggctttaattgcaatcatcctgagttagt

SEQ ID NO: 260896 - DNA, 778 bp, Unknown
  Bacterial polypeptide expressing nucleotide sequence isolated from the Sargasso Sea
atggataatcaatatggaagattaatgttagatattagcgggacaattttatcagatgacgacaaggcgttaataagaaatgaacatgttggcggattaatattcttttcaagaaactttgaatctttttatcaaatcaaagatcttgtggctgagataagaagtattaaagaaaatattatcattgctgtcgaccaagagggaggaagagttcaaaggttcaacaagaattttacaaatataccgtctatgcaaaaagttacaaaattcgcatatttaaacaatgacataaactttttaaaggaaattggctggttaatctcaagcgaattgattgcggctgatatcgatataaattttgccccagttttagatattgacgagtcaacgtcaagtatcattggagatagagcctttgcaaataatatctcagatgttgtttctgcggcatctgaatttattgatggaatgcatgaggctggaatgagatctactggaaagcattttcctggtcatggtgggatatttgaagacagtcatattgaacttgctgaagataaaagaaatttagaagaattattaattaaagatataagaccatatattgaactatccaacaaattagatgcggttatgtgtgcccatgttctattttcaaacatagatgaagaaataccaagctattctaaatactggctaagaaatattttaaagggagaaattaaatatgatggtttaatttttagtgatgatttaagtatgttgggagctgggtaat

SEQ ID NO: 260897 - DNA, 1012 bp, Unknown
  Bacterial polypeptide expressing nucleotide sequence isolated from the Sargasso Sea
tatgaaaaattcatatggaagattaatgttagatattgctggaaaaagcctatctcaggaagataagactttaatatctaatcatcatgtaggtggcttaatactcttttctaataattttgaatcttttaaacaaatatcagaacttgtaaaagaagtgaaggcaataaaagataatattcttatagctgttgatcaagaaggtggaagagtacaaagatttaataatgaatttacaaaaataccctcaatgcaagaaatatcaaattttgtaaaaaaatataatgattcttctttatttaaagaaatcggatggcttatatcaagtgaattaatagcagcaggtatagatataaattttgcaccagttttggatatagatgatagctatagcaccataattggtagtagagcattttccaataatgctgatgaggttatttctatggcttcttcttatatagatggcatgcatgaagcaggaatgaaatctactggtaaacattttccaggacatggaagtgtaagtgcagatagtcataaagaacaacccgaagatttaagaagtctagatgaattaattaaaaaagacatcaaaccatatattgaattatcaaacaaacttgatgcaataatgtgtgcgcatatcttatttccaaatattgaaaaagaaataccaagtttttcaaactattggatagacgaaattattaaaaatgaaattaattttaatggaataatttttagtgatgatttaactatgcaaggagctggcaatgattcttatccagataaagctaagaaatctattcaaagtggatgcgatatgattttagtttgtaataacaggaaagagatagaaaatataattaatgaatttgatgaaattggagttaaaccaattaagaaattatcagagatgaaaaaaagcatggatatagattggcatgagctaaataaaagcaacaggaaaaaacaaattaaaataaaattagaagcaataaggagttga

SEQ ID NO: 260898 - DNA, 824 bp, Unknown
  Bacterial polypeptide expressing nucleotide sequence isolated from the Sargasso Sea
tatgtatggtcgaataatgattgatgttgaggggacttctctgtctcaacaggacagagaattaatttctaatggaaatgtgggtggaattattttattttccaaaaactttaattcatttgagcaaatatctgacctagtaaatgaaattcatgcaataaaagaaaacattttacttgctgttgatcaagagggtggaagggtacagaggttttctaaagatttcacacaacttccttctttgcaagatttagctaaatattcagagattaataatgatccagatatatgcaaagaagttgcatggttaacttcttcagaacttattgctgctggaattgatttaaattttgcacctgttctagatatagatgaaagtgactcagcaattattggtgacaggtcgttttcttcaaaaactgatgaagtaatcaaacatgctgaaaaatatattgagggaatgcatgaggcgggtatgcaggcaactgcaaaacactttcctggacacgggggtgtatcagaagatagtcatgttattttgcctgaagatcaaagatcattagagctcttgatgagatctgatattcaaccctatattaaattaaataaaaaaatcgatgcgataatgtgtgctcacattttatattcattaattgatgacaaaataccaagttactcaaaattttggattagagacattattcgaaaagaattaaattttgaaggtgtaattttcagtgatgatctatcaatggcgggtgctggagaagagtcttgtagagtgaaagccgctaaatcaattgaagctggttgcgatatggttt

SEQ ID NO: 260899 - DNA, 1012 bp, Unknown
  Bacterial polypeptide expressing nucleotide sequence isolated from the Sargasso Sea
tatgactgatttatttggccgattaattattgatatagatggaaaaaatctttccaatgatgacaaaacaatactttcaagcaaacatattggaggtttaatacttttttcaagaaattttgattcatatgatcaacttgataatttaataaaagaagttcatttgatcaaagaaaatataatcatagctgtagatcaagagggtggaagagtgcaacggtttgaaaaagaatacacaaagattccctcaatgcaagatgcttctctttttgcaaaagagaatgatgataaagagtttataaaagatttagcttggttgatctctagtgagttaattgcagtaggtatagatattaactttgctcctgttttagatatcaatagaaatatttcaagcataataggaaatagatctttttcaaatgatatccttgaagtaatagataatgcttcagattatattgatggaatgcatgaagcaggaatgaaatctacaggaaaacattttcctggtcatggaaacgtagttgaagacagtcatatagaacttccagttgatgaaagagaacttcatgaattattaaatgaagacttaaaaccttatattaaattaagtgataaattagatgtgataatgtgtgcccacatattattttctaaagttgatagtaaaatccccagtttttcagatacttggattaataatgttctaagaaataagcttaattacaaaggtttaatattaagtgatgatctatctatgcttggatctggaaacgatagtcttattaacaaggtgaaaatgtcattgaatgcaggatgcgatatggtaataatttgtaatgatagatctggagtaaaagaagtaatcgagtacttagataaaactgatgttgaacaaacttcaggcatatctgaaattaagagttcaaaaaaaattaattggaatgatcttttaaataataacagagcattagcaattaaagaaaaactaaaaaatatgaggaattaa

SEQ ID NO: 260900 - DNA, 997 bp, Unknown
  Bacterial polypeptide expressing nucleotide sequence isolated from the Sargasso Sea
atgattaatgaatttggcagaataatgcttgatatcgaaagcacttctcttacagatgaggataagtttgtcattacaaataagcatgttggaggaattatatttttttcaaggaattttgaatcatatgaacagataaagaacttagttattgagattaaaaacataaaagaaaatattatttttgctgtagatcatgaaggtggcagagtacaaagattcaaaaatgaattcacaaaaattccctcgatgcaggaaatttctctttatgcaaaaaaaaatagcaatagtaaaatatttaaagagatcgcatggctttcttccagtgaattaatatctgcaggaattgatataaattttgcacctgttcttgatcttgataaaaattattcatcaataattggggatagagctttttcaaatgaagctcaagaagttattaaaaatgcatctttttttattgatggaatgaatgaagctggaatgagttcaacaggtaagcattttcctggacatggtggagttgttgaagatagtcataaagagatgccaactgataacaggtcttttgatgagctagattcagaaaataatgacttagaaccttatagaaagctgtctaaaaaattggatgctgtaatgtgcgcgcatatattattccctaagatagatgaatatattccaagtttttcaaattattggttgaaagattttctcaggaatgaattgaattacagaggcttagttttatcagatgacttaacaatgcttggtgcaggtaatgacttatgtcatgaaaaagtagaaaagtcacttaaggcagggtgtgacatggttttgatatgcaatgatagaaatggtgcaaagcaggctattgattttatggaaaataaagatattgataggtctattgaaatagcaaaattaaaaagtagctcaaaatgtgaatggagcgatatagattcgagcttaagagcaaaggaaataaaggatatta

SEQ ID NO: 260901 - DNA, 895 bp, Unknown
  Bacterial polypeptide expressing nucleotide sequence isolated from the Sargasso Sea
tacagaaataaaaactataaaagaaaatattatttttgctgtagatcatgagggaggaagagtgcaaagatttaaaaatgaatttactaaaattccatcaatgcaagcaatttctctttatgcaaaaaaaaatgataattatgaaatatttaaagaaatagcatggcttgcttcaagcgaattagtatctgtaggaattgatattaattttgcacctgttcttgatcttgatattgattcttcatcaataattggagatagagctttttctaatcaagcccaagaagttatcaaaaatgcatctttttttattgatggaatgaatgaagctggaatgtgttcaacaggtaagcattttccaggacatggcggagttgttgaagatagtcatttagaaatgcctactgataataggtcttttaatgagcttgattcaggaaataacgacttagaaccatataggagactatctaaaaaattggatgctgtgatgtgcgcacatatattatttcctaaaatagatgaacatattccaagtttttcaaaatattggttgaaagattttcttaggaatgaattggaatataagggcttaattttatcagatgatttaacaatgcttggtgcaggaaatgatttatgtcatgaaaaagtagaaaagtcacttatggctggatgtgacatggtattaatatgtaatgataggaatggtgcaaagcaggctattgatattttggagaataaagatattgataggtctattgaaattgcaaacttaaaaagtagaacaaaatgtgaatggagcgatttaaattcaagctcaagagcaaaagaaataaagagtactataaaagaaataggagataaatatgagaagaatagtaacggggcataa

SEQ ID NO: 260902 - DNA, 1033 bp, Unknown
  Bacterial polypeptide expressing nucleotide sequence isolated from the Sargasso Sea
atgagcaaatcttatcttgggaggctaatgctagatctggatggaacctcccttactcaagaagaaaataaaatattgcttaattcacatgtagggggcgtgattttatttgcaagaaatatctcttcaagagatcaagttcaagagttgtgtggagcaataagaaatataaaccccaagcttcttattgcagttgatcaagaggggggaagagttcagcgtttaaaagaaggctatacaattttgcctactatgcaaaaactagctgcatttttaaaatcagaaagtgataaaaacttttcctttgcaaccgatttaggttggctaatggcctccgaggtgattgcatcaggattagacataagttttgcacctgtgttagatctagatgattcaagaagttctgttattggcgatagatcaataggcgataatccagagaaggttattgctattgcaagcgcctttattaaaggcatgaatcaagcgggaatgcaggctactggcaagcatttcccgggacatggcggtatctttgctgatagtcatctaactttttctcaagatactagatctttattagaactagagaaccatgacttgcgtccctttgatgctttaaagcttaaacttggtgggataatgacggctcacatatctttttcaagtattgataaagagatagcaactttttcaaaattttggctgcaagatgttttaagaaataaaattgaatttactggagcaatctttagtgatgacctctcaatgaagggttcagattatgtgggaggcattgaagccaaagtgagtaaagcattagagagtggttgtaacatggttttggtttgcaatgacagacctgcagctttaaaagcaatcaattttttagagaaagaaaaaatttctcagtcagaaaaagtaactaaattaaaagcctcaggatcgattgcttgggcagacttggaaaatgatgcaagaagaatagatataatagataaattaaacacaatagaaaaattaaagctatgac

SEQ ID NO: 260903 - DNA, 1003 bp, Unknown
  Bacterial polypeptide expressing nucleotide sequence isolated from the Sargasso Sea
tatgtatggtcggataatgattgatgttgaggggatatctctgtctcaacaggacagagaattaatttcaaatggaaatgtaggtggaattattttattttctaaaaattttaattcatttgagcaaatatctgacctagtaaatgaaatccatgcaataaaagaaaacattttacttgctgtcgatcaagagggcggaagagtacagaggttttctaaagatttcacacagcttccttctttgcaagatttagctaaatattcagagattaacaatgatccagatatatgcaaagaagttgcgtggttaacttcttcagaacttattgctgctggaattgatttaaattttgcacctgttctagatatagatgaaagtaattcagcaattattggtgacagatcattttcttcaaaaattgatgaagtaatcaagcatgctgaaaaatatattgatggaatgcatgaggcgggtatgcaggcaactgcaaaacactttcctggacacgggggtgtatcagaagatagtcatgttattatgcctgaagataaaagatcattagagctcttgatgaggtctgatattcaaccctatattaaattaaataaaaaaatcgatgcgataatgtgtgctcacattttatattcattaattgatgacaaaataccaagttactcaaaattttggattagagacattattcgaaaagaattaaattttgaaggtgttatttttagtgatgatctatcaatggcgggtgctggagaagagtcttgtaaagtgaaagctgctaaatcaattgaagctggttgtgatatggttttaatttgcaataacagaaaggatgctatctcaacaatcaattattttgataagttgggaattaagccaagtaaaaagatatcaaatttgaagaaaactactaatgtagattgggatgaattagtcaattttgagagaaccgttaatattaaacatacattaaaaaatatgaggagctaa

SEQ ID NO: 260904 - DNA, 304 bp, Unknown
  Bacterial polypeptide expressing nucleotide sequence isolated from the Sargasso Sea
atgaacccgctaaagccctcgtatggtgtgttaatgttggatattgaggggaaatcactcactaaattagaggaggatttaattgagagagactcggttggcggactcatcctatttacccgtaactatgaaagtccgacgcaacttacagaattagtgtcatcaattagggctatcaatcgcgatatcttgatagcagtcgaccaagaaggagggcgagtccagcgctttgacaaggattttgtgagcctccctagcctaggtgatatcggaaaaatctataaaaaagaaccagtactgggtg

SEQ ID NO: 260905 - DNA, 1012 bp, Unknown
  Bacterial polypeptide expressing nucleotide sequence isolated from the Sargasso Sea
atgactgatttgttcggcagattaatgattgatattgatggattcaatcttacgaatgaagataaatcgatacttgcaagtaaacatattggaggtttaattcttttttcaagaaattttgattcatataatcaactttgtaatcttattaaagaagttcgctcaattaaagagaatataatcatagctgttgaccaagagggcgggagggttcaaagatttgaaaaagaatttacaaaaataccctcgatgcaagaggcgtctctttttgcaaaaaaaaataaggataaaggctttataaaagatttagcatggttgatttctagcgaattaattgcagcaggtatagatattaactttgcacctgttttagatatcaacagaaatatttcgaccataattggagatagatctttttcagatgatatttttgaagtgataagtaatgcttcagattatattgatggaatgaatgaagcaggaatgaaatcttcaggaaaacattttcccggtcacggcaatgtaattgaagacagtcatatagaactcccagaggatgcaagagcacttcgcgaattgatggatgaagatattaaaccttatattgaattaagagataaaatagatgtgataatgtgcgctcatatactattttctaaagttgataataaaattcctagcttttcagacacttggattaataacattcttaggaataaacttaattataaaggtttaatattcagtgatgatttatctatgcttggatctggaaatgagaaccttaccaacaaagtgaaaatgtcattggatgcgggatgcgacatgctaataatttgtaattatagatctggagtaaaagaagtaatcgagtatttagataaaaatggttatgaacaaacttcaagaatatttaaaataaagggcttcaagaaaattaattggaatgatcttttaaataataatagggcactagcaactaaagaaaaattaaaaagtatgaggaattaaa

SEQ ID NO: 260906 - DNA, 836 bp, Unknown
  Bacterial polypeptide expressing nucleotide sequence isolated from the Sargasso Sea
tatgactgattcttatggacgactgatgattgatttagagggaattactttgtcagacgatgacatcgcccttatatcaaataaacatattggcggaataatacttttttcaagaaattttgagactttagaacaattaaaaagtttgataattaagatatttgcaataaaaaaaaatgtaatcattgcagttgatcaagaaggagggagagttcagagattttataaagactttacagtcattccctctatgcaaagtctggcagtttacgcaaaagaagaaaatgatatggaaatttttgctgaaactgcatggttaatttcttcagagctcgtggctataggcattgatttaaattttgctccagtattggatgttgatgaagaaacttcgagcgttataggagacagagctttttcaaataaagttgatgaagtaatagaattttcctctaattttattgatgggatgcatgaagcgggtatgtcagcaacaggtaaacattttcctggtcatggaggaatatttgaggacagtcatcttagtcatgttgaagataaaaggaccttttctgatctattgaatttagatataaaaccttacattaaattaaaaaataagttggatgccattatgtgtgcacatgtattttttccaaatgttgatgagaaattaccaagtttttctaaaacttggcttcaggatattttaaaaaataagcttgagttcactggcttaatattcagtgatgatctttcaatgaaaggttctggtgatgaaaattgttatatcaaaacaatgcaatctttcaatgctggatgtgacatggccataa

SEQ ID NO: 260907 - DNA, 661 bp, Unknown
  Bacterial polypeptide expressing nucleotide sequence isolated from the Sargasso Sea
atgaaaaacctcaaagtacagccgctaggaccaattatgtgtgatcttaacagcactgagttgggttttgatgaaatcgaattattacaacatccgcttataggtggcgttattctcttttctcgtaattatgaatcacaagaacaattatctgaattaacactaaagattcaccaattacgtcgaccatcgctattgatagccgttgatcatgaaggtggtagagtacagcgtttcaaaaatggctttagtcaattaccggcttgtggtttgataggtaagtgtgaaccgttggcaaaagccaaacaattagctgaaaatactggctggcttatggcaattgaattattgtctgttggagttgattttagttttgctccagtattagatattggaggagagataagtgaagttataggggatcgtgcttttcacattgaaccagataaaatctcaaaattagcaaattcttatatgcttggtatgagaaaagctggcatgtcagctgttggcaaacatttcccagggcatggctcggttatagaggattcgcatatttcaattccactagataatcgtcaatttgatgatattcttttacaagatatcattccttttaaagctttgattgaagctggaattccaggactaatgccggcac

SEQ ID NO: 260908 - DNA, 1012 bp, Unknown
  Bacterial polypeptide expressing nucleotide sequence isolated from the Sargasso Sea
atgaaaagtacgtatggcagattaatgttagatatcgatggtaaaagtttatctattgaagacaaaacattgatatcaaataaacatgtaggaggattaatatttttttctaaaaattttgaatcttttcaacagatatcaaatcttgtaaaagaagttagagaaataaaagaaaatattcttatagctgtcgaccaggagggaggcagggtccaaagatttaataatgagtttactaacataccatctatgcaagaaattggaagatttgcaaaagaacataatgattcttctatgtgcaaagatataggatggcttacatctagtgaattaatcgcaacaggaatagatatcaattttgctccggttttagatgttgatgagagtacgagcagcataataggtaatagagcattctcaaataacccagatgaagtaatttctatggcttcagactatatcgacggcatgcatcaggcaggaatgagttctacaggaaagcatttccctggccatggaggggttgttgaagacagtcataaagaattaccagaggatattagacaattagatgatttaatgagttttgatatgacgccatacattaagttggcaaataagcttgatgcaataatgtgtgcgcatattttatttcctaatgtagataaagatataccaagtttctcaaagcgttgggtgaaagaaattctaagaaacaaaatcaattatgatggattaatttttagcgatgatttgactatgttaggtgctggggtagagccgtgctctgagaaggctagaaaatcaattcaagcaggatgcgatatggttttagtttgtaataatagaaaagaaatcgatggcgtaataaatctttttgatgaacttggtatcgagccttctgaaagattatcaaaaatgaaaaagagtacaaatatagattggaatgaactaaataacagcaatagaaaaaataatattaatattaaattagaaaaaataaggagttagt

SEQ ID NO: 260909 - DNA, 430 bp, Unknown
  Bacterial polypeptide expressing nucleotide sequence isolated from the Sargasso Sea
atgcacggttcactgatgctggacattgctggtacctggttgactgccgaagatcgccagctgcttcgtcagcccgaggtcggcgggcttattctgtttgcccgaaatatcgagcactcgcgccaggtcgacgagctgtgccgatcgattcgagccgtgcggccagacctgctgttggcggtggaccaggagggtggccgcgttcagcggctgcgccagggtttcgtacggcttccgccgatgcgcgaacttgcgagctgcgccgacgcgccgcggctggcggaagcctgcggctgggtgatggcgaccgaggtactcgctgcgggcctggatttcagcttcgcaccggttctcgatcttgaccaccagcgcagtgccgtggtgggaacgcgtgcattcgaaggcgatccgcaggccgccgtgtgctgat

SEQ ID NO: 260910 - DNA, 1030 bp, Unknown
  Bacterial polypeptide expressing nucleotide sequence isolated from the Sargasso Sea
atgaaaacgactcccggcccggtcatgctcgacgtcgtcggcacgaccctgtcgcgcgacgatgcgcggcgcctcgcgcatccgaataccggcggcgtgatcctgttcgcgcggcacttccagaaccgcgcgcaactgaccgcgctgaccgacgcgatccgcgcggtgcgcgaagacatcctgatcgccgtcgatcacgagggcgggcgcgtgcagcgtttccgcaccgacggcttcacggtgctgcccgcgatgcgccgcctcggtgagctgtgggaccgcgacgtgctgctcgcgacgaaggtcgccacggccgtcggctacatcctggccgccgagctgcgcgcatgcgggatcgacatgagcttcacgcccgtgctcgacctcgactacgggcactcgaaagtgatcggcgatcgcgcattccatcgcgatccgcgcgtcgtcacgctgctcgcgaagagcctgaatcaggggctgtcgctcgccgggatggcaaattgcggcaagcatttcccggggcacggcttcgcggaggccgactcgcacgtcgcgttgccgaccgacgaccgtccgctcgacgcgatcctcaagcaggacgtcgcaccgtacgactggctcggcctgtcgctgtccgcggtgattcccgcgcacgtgatctacacgcaggtcgacaagcggccggccggtttctcgcgggtgtggctgcaggacatcctgcgcggccggctcggcttcactggcgcgatcttcagcgacgacctgtcgatggaggccgcgcgcgaaggcggcacgctcacgcaggcggccgacgccgcgctcgcggccggttgcgacatggtgctcgtctgcaaccagccggacgcggccgaggtcgtgctgaacgggctgaaagcacgggcaacggacgagtcggtgcgacgcttcaagcggatgcgtgcgcgcggcaaggcgttcaagtgggacaagctgatcgtgcagcccgagtatctgcaggcgcaggcgctgttgagcagcgcattggcctgag

SEQ ID NO: 260911 - DNA, 706 bp, Unknown
  Bacterial polypeptide expressing nucleotide sequence isolated from the Sargasso Sea
aatgttggactgtcaggctgaagaacttttgcctgaagaaaaggaaaaattagcacacccggtggtgggaggcgtaatcttatttagccgtaactatcacgacaagcgtcagctctcggcgctggttcaagatataagacgctttgcgaagcaaccggtgttgattgccgttgatcatgaaggaggccgcgtccagcgttttcgtgagggctttactgccataccagcaatgggcgatattttaaggcagtcagagcatcaagatgaaagtgcagcatacgcaaaagcgtgtggattagtgttggcttatgaacttaaaactttagatatcgattttagctttgccccggtgcttgatataaacggtgtatcgcaagttattggtgacagggcattctcagacaatgctgacgacgttattcgccttgccgctcatctaatccaaggtttaaaggctgtaaatatgccggctattggaaagcactttcctgggcatggcagtgtagcaccagactctcatatagcgttacccgtcgatgaacgcgaatttgatgaaatacgcagtaccgatatggtggtatttgaacgcttaatcgagcgtgcgctgcttgatggcgttatgcctgcccatgttatttataatcaggtgtgtgataagcctgcgggtttttcaactaaatggctgcaggatatccttaaacaggat

SEQ ID NO: 260912 - DNA, 406 bp, Unknown
  Bacterial polypeptide expressing nucleotide sequence isolated from the Sargasso Sea
cgacgccattatgcctgcccacgttatctacagcgatgtggatccgcgcctggccagtggttcagcgcactggctgaagacggtgctgcgcggtgagctgggtttcgacggggtcattttctctgacgatctgtcgatggaaggggcggcgatcatgggcagttatgccgaacgtgggcaggcatcgctggatgcaggttgcgatatgatcctggtctgcaataatcgtaagggtgcggtcagcgtgctggataacctgtcgccgatcaaagcagagcttgttacgaaattgtatcataaaggttcatttacccgtcaggagttaagggattctgcccgttggaagacggttaatgcgcagctggagcagctccacgcgcgttggcaagaggcgaagtctgcgtaa

SEQ ID NO: 260913 - DNA, 1030 bp, Unknown
  Bacterial polypeptide expressing nucleotide sequence isolated from the Sargasso Sea
tatgagttatctaatgctggatctgctgtctttagaggtcagtgaggctgaagctgagatgctgcgccatccgcaagtgggcggtttgatcctgttttcccgcaactttactagccgtgggcaattaattgccttggtgcagcagattcgccaaattcgtcccgagattttgattgccgtcgaccatgagggcggacgagtacaacgttttcgcgaaggttttacgcttattccggccatgggggatattttgccagcggctaagggcgagatggcattggcgaaacgttgggcctgtgagctgggttttttaatggccatcgagttactcgcctgtgacatcgacttaagctttgcgcctgtgctcgatcttaacggcatcagccaagtcattggcaaacgtagttttagtgcaaagcccgatgaagtgattgcgttagcgcagagttttattgagggtatggccgaggcgggcatgggtgccgtgggtaagcatttcccaggtcatggcagtgtggctgcagattcccatattgcgcaacctatcgatgaacgtgaggctgaggcgatttttaatcaagatattttgccatttaaagatttgattgctcaaggtaaattatcgggcattatgcctgcccatgtgatctaccctaaagttgaccctaatcctgcgggcttttcaacctattggttaaagcagatccttcgccaagatctgggttttaatggggtgattttctccgacgatctggggatgaagggcgcatcttttgcgggagattatttaggccgcgcccaagctgcgttggatgcgggttgcgatatgattttggtttgtaatgataatccaggtgttatgtcactcttaaacggttttgtatggccttctgctgcaccaaaacatccggcgagtttacttaaacctaatgcggcgcagactgctatcgcattagaaaatagtgctcgttgggaaaatgccaagcagctggccgagcaaatccaactcgcacaacaggcaaaagtttga

SEQ ID NO: 260914 - DNA, 1030 bp, Unknown
  Bacterial polypeptide expressing nucleotide sequence isolated from the Sargasso Sea
atgagttatctaatgttggatctgctgtctttagatgttagcgaagcagaagccgagatgctgcgccatccgcaagtgggtggtttgatcctgttttcccgcaatttttccagccgtgagcagttaattagcttagtgcagcagatccgccaaattcgtcccgagattttgattgccgtcgaccatgagggcgggcgagtacagcgtttccgtgaaggatttaccttgattcccgccatgggggatattttgccagcggctaagggcgatttggttctcgctaaacgttgggcctgtgaattaggctttttaatggccatcgaattacttgcctgtgacatcgacttaagctttgcgcctgtgctcgatcttaacggtatcagccaagtcattggcaaacgtagttttagcgcaaagcccgatgaagtgatggcgttagcccagagttttattgagggcatggccgaggcgggcatgggcgctgtgggtaaacatttccccggtcatggcagtgttgcagcggactcccatatcgcgcaacctatcgatgaacgtgaagctgaagcgatttttaatcaagatattttgccgtttaaagagttgattgctaaaggtaaattatcgggcattatgcccgcccatgtcatttaccctaaagttgaccccaatccagcgggcttttcaagctactggttaaagcagatcctacgccaagagctgggctttaacggggtgattttctccgacgatcttggcatgaagggcgctacctttgcgggggattatttgggccgcgcccaagctgcgttggatgcgggctgcgatatgattttggtttgtaacgataatccgggtgtgatgtcattgctaaatggctttgtgtggcccgccgcggcgccacaacatccggcaagtttactcaaacccaatgcggcgcaaacggctatcgcattagaaaacgctagccgttgggaaaatgctaagcagctggctgagcaaatccagctcgcacaacaggcaaaagtttgat

SEQ ID NO: 260915 - DNA, 289 bp, Unknown
  Bacterial polypeptide expressing nucleotide sequence isolated from the Sargasso Sea
atgaaaaaagcaaaaatttacaaacccacaaaaacagcaatgcaatcaggtaagagaaatacaaaaaaatggttgcttgaatttgatacattaaatacaggaataagtcatttgatgggatgggaaacttcaaaagatactatgtcagaagttaagttagaattttcaaataaagatgaagctattaattatgcaaagaaaaacaatattgagtattatattgttgaaccacaaaaacaaaaattaataaaaaaatcatatgcggataatttcctgaaagataaataaa

SEQ ID NO: 260916 - DNA, 825 bp, Unknown
  Bacterial polypeptide expressing nucleotide sequence isolated from the Sargasso Sea
tatgaataaaaaatttttagtatttttaacttttttgattagtttaaatttttatagtaacgtaaatgctaaattgtatagatcgggaactatatttgaaaatcagataaagttttcaaaaaaatttacattacctcttacagaaggtaaatgggaagtaattaatcaatacgaatttaattatttttttcaatttaaaggaaattcaattgttagattaaaaaataatgaagtaatggaatttatttggattgaaagagctaatttatctagttatcaaaatgcatatatagacaatgcaatgaatgaaattgtatttaaagatcaatatgatggatgttataaaagaccagaatattatattgttgaggtttattcaaaaggaagtactcataattgtttggtaatccgccacatcgattccaataaagaattattttccccagatgatccaggagcagtaaatgcaaaattaaaaaaatcactaagagatcgttctataataattcctccaataatgtttgatagttatcattcatatttttcaaggttaattagaggagaatggtatgtgattcaatatatggctaatcccaaattatttaattcaccaaaaattaattatctaactgaagaaagttctgaatttcataaagccaatatatctagatatcctgaacataaattaacaatggataaatggatttcagtttcagccaaacgtcatagagagatagaaaaattacttaaagccaaggaacatcatttgctaaatttagacaaatatattctaaaaaacgataatgattatctgaatagtgaagg

SEQ ID NO: 260917 - DNA, 379 bp, Unknown
  Bacterial polypeptide expressing nucleotide sequence isolated from the Sargasso Sea
gatgaaagtaggtattatcggcgccatggaacaggaagtggccctgctgcgcagccagatgagcaacccgaccaccctgcaactgggcggctgcgagttctatcagggcaccctggcaggcaaagaagtgatcctgacccgctccggcatcggtaaagtcgccgccagcgtcgccaccagcctgctgctggaaaaattcgctcccgactacgtcatcaataccggctctgccggcggctttgcccaggacctgcacatcggtgacgtggtgatcgccagcgagatgcgcttccacgatgtggatgtcaccgcttttggctacgagatgggccagatggcgcagcaaccggccgccttcccctgcgacgagacgctcatc

SEQ ID NO: 260918 - DNA, 539 bp, Unknown
  Bacterial polypeptide expressing nucleotide sequence isolated from the Sargasso Sea
cacggtgggcgcaacgcagctgatgacacactaccagccggacgccgtcatcaacaccggctctgccggcggcttcggtgcggccatggaagtcggcgacgtggtcatctccagcgaggtgcgccatcacgatgtcgacgtcaccgctttcggctacgaaatgggccaggttcccggcatgccggcaggctttgccccggatcccgggctgatcgagaccgcgcgcgcctgcatcgaaagcctcggggatctacgcgtccacgaaggcctgatctgtaccggcgacagcttcatggccgatccgacacgggtcgacaccgtgcgcggacatttcccccagatgctggcagtagagatggaagccgccgcgattgcccagacctgccatctgttcgcgtgcccgttcgtggtcattcgggcgctgtcggatatcgccggcaagcagtccgaactctcctttgacgccttcctggaacgggccgcgacgcattccgccaagatggtcgatgcgatcctcgctcgcctggccgggcaatgat

SEQ ID NO: 260919 - DNA, 669 bp, Unknown
  Bacterial polypeptide expressing nucleotide sequence isolated from the Sargasso Sea
ttttaaaagctcaactgagcgatatgaccacggtcaaactggcggattatgagttttatcagggccgtctggccgacaccgacgtggtattggtgcaatctggtataggcaaagtggcttccgctgtcgctactactttattaatcagtcagttcaaaccggactgtgtcattaacacgggttcagccggtggttttgacccggagctaaatgttggcgatgtggtgatttcttctgaagtgcgccatcacgatgtcgatgtcacagcttttggttacgaaattggccaggtaccacgcatgccagcaggttttacggcccatccagctttgatcagcgctgcagagcaaagcatcaataccttaggtttttgcaaaactaaaaaaggtttaatcaccactggcgatgtgtttatgtgccagcctgagcgtattgctcaaacccgtgcacaatttccaaccatgcttgcagtggaaatggaaggtgcagccatagctcaggcttgttatcagttgaacacaccttttgtggtgatccgcagcttaagcgatatcgcaggcaaagagtctcctagctcttttgaagcttatttagaaatcgcctctaaaaacagttcagccatggtgctggagcttctgaaaaacctgaaaacggttcagctgagctaaa

SEQ ID NO: 260920 - DNA, 712 bp, Unknown
  Bacterial polypeptide expressing nucleotide sequence isolated from the Sargasso Sea
atgaaaattggtattattggcgcaatggagccagaagttgcccatcttattgcggctatgacaaacgcctcttcgcaaacgattgcgggtattgaatttatcgctggcaccttagcgggcaaagacgttgtagtgacgcgctcaggtattggtaaagtcgccgctagtattgccaccacgctgctgattgagaaatacgcccccgatgcagtaatcaacacaggttctgcgggtggttttgtcgattcactgtcgattggcgatatcgtgatttcatccgaagtgcgccaccacgatgtggatgtcaccgcatttggttacgaaataggccaaatggcgcagcaacccgcagcctttattccagcgccatacttagtcgaagcagccaataaggccatcgcacaattaggcgaagtgaaagcgattgaaggcttaatctgtactggcgatagctttatttgcgaccctgttcgcaccaagaccatgttggagcacttcccaaccatggcggcctgtgagatggaaggcgcggcaattgcccaagtttgtcatcagttcggcgtgccatttgtggtgatccgctcgctctctgacaacgccaacaacgactcccccgtcgacttcgattcttacattgtgaaggcaggttaccattcagcattgatggtgatgttgctgcttgagcaattagatccaaactcagtaaagtaat

SEQ ID NO: 260921 - DNA, 712 bp, Unknown
  Bacterial polypeptide expressing nucleotide sequence isolated from the Sargasso Sea
atgaaaattggtattattggcgcaatggagccagaagttgcccatcttattgcggctatgacaaacgccacttcacaaacgattgcgggcattgaatttatcgcaggcaccttagctggcaaagacgtcgtagtgacacgctcaggtattggcaaagtcgccgccagcatcgccaccacattgctgattgagaaatacgcccccgatgcggtaatcaacacaggttctgcgggcggttttgccgattcactgtcgattggtgatatcgtgatttcatccgaagtgcgccaccacgatgtggatgtgaccgcatttggttacgaaattggccaaatggcgcagcaacctgcggcgtttatcccagcgccatacttagtcgaagccgccaataaggccatcgcacaattaggtgaagtgaaagcgattgaaggcttaatctgtactggcgatagctttatttgcgacccagtacgtaccaaaaccatgttggagcacttcccaaccatggcggcctgtgagatggagggtgcggcaattgcccaagtgtgtcaccagtttggcgtgccattcgtagtgatccgctcgctctctgacaacgccaacaacgactctccggtcgacttcgattcttacattgtgaaggcaggctaccattcggcactgatggtgatgttgctgcttgagcaattagatccaaattcagtaaagtaat

SEQ ID NO: 260922 - DNA, 242 bp, Unknown
  Bacterial polypeptide expressing nucleotide sequence isolated from the Sargasso Sea
tatgaaaatcggcattattggcgcaatggaagaagaagttacgctgctgcgtgacaaaatcgaaaatcgtcagactatcaccatcggcggtagcgaaatctacacgggtcagctgaacggcgtagatgtcgcgttactgaagtccggcattggtaaagttgccgccgcaatgggtgctgcgctgctgctggagcgctgccagccagacgtgattatcaacaccggctctgcgggcggccttg

SEQ ID NO: 260923 - DNA, 181 bp, Unknown
  Bacterial polypeptide expressing nucleotide sequence isolated from the Sargasso Sea
atggtcacaaaaaacgaaaaaataagcaaaattggaactgattataaagtagctgatatatctttagctgaatttggaaaaaaagaaattaagattgctgaaacagaaatgcctggattgatggcaattagagaagagtataaaaaccagaaaccactcaaaggtgcaaatatacttggtt

SEQ ID NO: 260924 - DNA, 124 bp, Unknown
  Bacterial polypeptide expressing nucleotide sequence isolated from the Sargasso Sea
aatgaaaagcaaggttaagacaacaccaaaaccaaaatttaaggttaaagatatctctcttgccaattggggacgcaaagaaattttgcttgcagaatcagaaatgccaggtctaatgtccctg

SEQ ID NO: 260925 - DNA, 157 bp, Unknown
  Bacterial polypeptide expressing nucleotide sequence isolated from the Sargasso Sea
attgcctctatggggattcctgtctatgcatggcaagggatgaatgaagaggaatttaactggtgtattgaacaaacattattttttggagagaagagagagcccttaaatatgattcttgatgatggaggtgatttaaccaatatggtacttgatc

SEQ ID NO: 260926 - DNA, 791 bp, Unknown
  Bacterial polypeptide expressing nucleotide sequence isolated from the Sargasso Sea
gctcctcgagaagggcgcgaacaccgaggcgaccgacaatcacggccgcacggcgctgcacgaagcggtgtcctataaccgcgacacggtggtgcggatgctcctcgggaagggcgcgaacatcgaggcgaccgacaaggacggccgcacggcgctgcacctcgccgcgaagtacggctgcgacgcggtggtgcgcacgctcctcgagcagggcgcgaagatcgaggcgacctacaaggacggccgcacggcgctgcacctcgccgcgaagtacggctgcgacgcggtggtgcgcacgctcctcgagaagggcgcgaacaccgaggcgaccgacaatcacggccgcacggcgctgcacgaagcggtgtcctataaccgcgacacggtggtgcggatgctcctcgggaagggcgcgaacatcgaggcgaccgacaaggacggccgcacggcgctgcacctcgccgcgaagtacggctgcgacgaggtggtgcgcacgctcctcgagcagggcgcgaagatcgaggcgaccgacaaggacggccgcacggcgctgcacctcgccgcggggaacggcgagaacgcagctgtctgcatgctcctcgagaagggcacgaacatcgaggcgagcgacaaggacggccacacggcgctgcacctcgcggcgatgtttcgcgaagacactttcaataagtactggtggtgcacggtggtgcgcacgctcctcgagcagggcgcgaacatcgaggcgaccgacaaggacggccacacggcgctgcatcacgcccgcgacg

SEQ ID NO: 260927 - DNA, 964 bp, Unknown
  Bacterial polypeptide expressing nucleotide sequence isolated from the Sargasso Sea
aaagattcaaaattagcaaaaataggacatgaagaagtaagttgggcaagcagacagatgcaagttctagaagaaataaaaaatgaattttcatcaactaaacctctaaacggcttaagtattggtgcctgcatgcatgtaacaaaagagactgctaacttaatgcttactttaaaagaagctggagcaaatgtagctttgtgtgcatccaatccactatctacaaaagattcagttgcggcttatcttgtcgaaaatgatgtagaggttcatgctgtacatggagtctctaatgaagaattctttaaacaccttaactctgttttagatacaaaacctgatattacgatggatgatggggcagatctagtcacattattgcttaccgacagatcagacattccaataatgggttcaatggaagaaactacgactggagtaataagactaaagtccatggaaaagaataataaacttcgattcccagttgtggccgtaaatgactctgacacaaagcatttatttgataacagatttggtacaggtcaaagtgcaatggacggtgttgttagggctacagatcttttaatagctggcttaaatgtagttgtggttggctttggtgattgtggaaaaggggttgcagagagagcctatggtatgggagcaaaagttactgttgttgaaccaaactcggtacgtgcactagaagctttaatgcatggatatgaagttaaaaatagtattaatgctgcaaaaattgctgatgttgttgtttcagtaactggaaatatgcatgcacttgacaagcaacattttgatgtaatgaaagacggtgttgttttggccaatgcaggacattttgatgtagaaataaatctagaaagattaaaagaagatagttcagaggttgatagagtaagagaacatgttgaaagttataaatatgatgaaaagaaatatt

SEQ ID NO: 260928 - DNA, 139 bp, Unknown
  Bacterial polypeptide expressing nucleotide sequence isolated from the Sargasso Sea
tatgtcatctgtagaagattatgttgtaactgatatttcattggctgattggggcagaaaagagttagatattgctgagacaaaaatgcctgggttaatgtcattaagagaagaatattctaaatcacaagacctaaaa

SEQ ID NO: 260929 - DNA, 88 bp, Unknown
  Bacterial polypeptide expressing nucleotide sequence isolated from the Sargasso Sea
gaaattactttacctagcaataaaagaataattttacttgccgaaggaagactggtaaatcttgtgttgtgcaacaggacaccctagt

SEQ ID NO: 260930 - DNA, 199 bp, Unknown
  Bacterial polypeptide expressing nucleotide sequence isolated from the Sargasso Sea
tatgaaagaagattataaagttgcggatattaccttggcagagtttggaagaagagaggtatctcttgctgaaaacgaaatgcctgcattaatggcgcttagagaaaaatataaagaggagcaaccattatcaggtgcaaagattatgggttgtattcatatgacaatccaaacagctgtactaatggagaccttatag

SEQ ID NO: 260931 - DNA, 757 bp, Unknown
  Bacterial polypeptide expressing nucleotide sequence isolated from the Sargasso Sea
catggaagcttactattggtggtgtacaggacttatgattattattcacgttggtttcttaatgtatgaagtgggcgctactagaatgcaaaatgccgtttcttcaggtgttaaaaatttattagcatttgcatttatgattccaacattttggttatttggatggtggatctatttagcatttccaggaggttttgttcctattgatttagaaggatatggagctccatggaatgtgtcaatgggaccaatgttaagtgatcaagcaactggtgttttctgggctgcatttacattattcgcatgtaccacagcttcgatattttctggagctgtaattgaaagaatcagaattagtgcttttgtttttttagcagtagttcttggctcagtagtgtggatactagcagcttcttggggttggcatccagatggatggctggtaacaggatttggttttcatgacgtagcagctgcagggtgtgttcatactgttgcaggattgtttgcgtttggtgtattattaaatcttggaccaagagtaggaaaatataatgatgatggttctagaaatgaattagaaggtcacagtttagtgctttcttttgttggcctgttaactttaattgtaggtttctttggattcttaggagcttgtttaatttgggcaggatctgattttggtggctgggtgaacatttatggtgcaccagcaactttatcatcttttgcttataatactttaatgggtctagct

SEQ ID NO: 260932 - DNA, 708 bp, Unknown
  Bacterial polypeptide expressing nucleotide sequence isolated from the Sargasso Sea
catggaagcttactattggtggtgtacgggactaatgattataattcacgttggtttcttaatgtatgaagttggagctactagaatgaaaaatgcagtatcttcaggtgttaaaaatttattagcatttgcattcatgattccaacattttggctatttggatggtggatctatttggcttttccaggaggctttgttcctattgacttagaaggatacggagtaccttggaatgtttcaatgggacctatgttaagtgaccaggctacaggtgtattctgggctgcatttactctatttgcttgtactacagcttcaattttttctggagcggtaattgaaagaattagaataagtgcatttgtatttttagctgttattttaggatcagtagtttggatcttagcagcttcttggggatggcatccagatggatggttagtaacaggatttggttttcatgatgtagcagcagcaggatgtgttcacacagttgcagggttgtttgcatttggagtattgttaaatcttggaccaagagtaggaaagtataatgatgatggttctgctaatgaacttgaaggacatagcttagttctatcttttgttggtttattaactcttattgtaggtttctttggattcttaggagcttgttttatttgggcaggatctgatttaggtgggtgggtgaacatttatggtgc

SEQ ID NO: 260933 - DNA, 757 bp, Unknown
  Bacterial polypeptide expressing nucleotide sequence isolated from the Sargasso Sea
tggaaaaagtattaaaaaatttaaaaaaaataaactaattactattgtcggtaaaacttctgaagaaacatataaattaaataaatttttcttcaaaagtctaaaatctagaagaccttttactaaagtgaagatggcaactactttagacgaaaaagtagctagaaaagattattcaagtaaatggatatcaaataaggcaagcagaaactatggacacaaattaagatttgaaagccaggcaattttaacaacttcaaaaactgtaatcaaagatgatccacattttacaataagaaaaaaaaataaaattattagatatatgcctgtgattataattgatagatttttaaatacaccaatagattctaaaattataaaaaatattagtaaaagaagggtaattatttttacccatgtaagaaatcaaaaaactattaaattcaaaaaaataggatgtgaagttttttttattaaattgaattcaaaaaaattatttaatttaaaagaaattttaaaaaaggtttttaaattaaatatcaataatattttggtagaagctggcggtattttatttactaatctacttaatagcaatctagttgatgaaattcatctttttaggtctaataagaaatttggattagaggggaaaccgcttttacataagaaaagtttcaaaaatttaaaacttaaattaacatttgaaagaaattttggaaaagatatatatagatactattctctaggaaaataa

SEQ ID NO: 260934 - DNA, 139 bp, Unknown
  Bacterial polypeptide expressing nucleotide sequence isolated from the Sargasso Sea
atggcccaagattttaaagtaaaagacataaatttagctgactttggtagaaaagaaatttctatagcagagtccgaaatgccaggcttaatggcattaagaaaagaatataaaggcaagaaacctttaaatggagcaa

SEQ ID NO: 260935 - DNA, 125 bp, Unknown
  Bacterial polypeptide expressing nucleotide sequence isolated from the Sargasso Sea
tgcagcagcagcaattgctaaagctggaatacagtatttgcaatggaaaggtgaaactgaagaagaatattggtggtgcgttaaacaaacgattgaaggtaagaaagattggatccaaatatgaa

SEQ ID NO: 260936 - DNA, 799 bp, Unknown
  Bacterial polypeptide expressing nucleotide sequence isolated from the Sargasso Sea
actggctgatgaatttaaagtgaaaaaaggacctattcgagctataaaattaattcctattgaaggaatccctctgataaaacctggagatgacctccctgcaatcatcattaagtcggccaattcatacaagataaattggtttgaaggagacattcttgttatagcacagaaaattgtttctaaagctgaaggccgtctggtcaacctaaagcaaattaaaccctcaaaacgtgcttttgaacttggattagtaacccaaaaggacccaagattggttgaattgattcttcaagagtcgacaaaagtgatcaggtacagaaaaggagttttagtagttcagaatgatcatggagtcattctcgccaatgccggcatagatcgttcgaatctagagcaggatcaggaacaggattgggttcttttgcttccgaaggatcctgatctttcagcaaaaataattcaccaagaattacttgctaaaactggattacatttgggagtcattatcaatgacagtattggaagagcatggaggaacggcacactaggaactgccatcggagtagccggattgcctgctattgttgatctgaggggcagaaaagatcttttcggaaatcttttaagggtaagtgaagaggcagttgcagatgaactagcatcagcagcttcacttttacagggacaggccgatgaagcacttcctgttgttttgattcaaggttttcaatcacaaacatcgaatatccccgcatcaggattgattcgtcctccagaaacggatttatttcagtaa

SEQ ID NO: 260937 - DNA, 840 bp, Unknown
  Bacterial polypeptide expressing nucleotide sequence isolated from the Sargasso Sea
aaggcaaaattgcatatgaatgggcacgtacccatatggacattttagataatacattaaatcgattaaaaaaatcaaagccactaaaaggtgttacagtggcattttgtcttcacattacaaaagaaacatcagttttagttatgggtgcaaaagaactaggcgcaaacgttgcagtgtgcggaggaaatccattgaccacacaagatcatattgctgcttttcttgcaacacaagggattcacatttatgcctggaatggacaaacaaacaaagaatatgattggtgtttagatcaagtgttaagtcataaaccaagtttaatctgcgatgacggagcagatatgaacgtaaaagttcattttgataaaaaattcaaatcacttcaagttctaggttcaactgaagaaacaactgcaggagttaccagagttgaagcaattgagaaacaaggaaaattaaagtatccagtgatcattgtcaacgatgcagacaccaaacacatgtttgataatagatatggtacaggtcagagtacaattgatggatatcttagagcaatgggactattgttcacttccaaaaaaattgtagttgtaggatatggatgggttggaagaggagtagcagaaagatcaagaggaatgggcggaaaagtgattgttacagaagttgatccagtaaaagcattagaagctcatatggacggatacgatgttatgccaatgtcacaagccgcaaaaattggtcaaattttcattacaaccacaggtatgaccagcgttataagaaaagaacatctcctagcaatgaaagatggagcagttgtggaaacgtagg

SEQ ID NO: 260938 - DNA, 106 bp, Unknown
  Bacterial polypeptide expressing nucleotide sequence isolated from the Sargasso Sea
ttggtagaaagagaaatttcattagcagaaactgaaatgcctggtttaatggcgctaagaaaagaatataaaagaaaacacccgctaaagggtgctagaattcttg

SEQ ID NO: 260939 - DNA, 266 bp, Unknown
  Bacterial polypeptide expressing nucleotide sequence isolated from the Sargasso Sea
aagcagaattatggatggttcatttgcaaaccaggtccttgcccaaatacatttatataaacagggttttgcgaatataaatgacgaagataagaaagctgagatgataactgtagaagttcttcctaagaaactggatgaagaagttgcaagtctaatggttgaaggctttggaggtatggtcacaaagctgactcaagatcaagctgactatataaacgttccaaaagatggtccgtttaaagaagagacttacaaatattaat

SEQ ID NO: 260940 - DNA, 225 bp, Unknown
  Bacterial polypeptide expressing nucleotide sequence isolated from the Sargasso Sea
tatgaaaaagcataataaaaatgttgttgaaattttaccatatctagttaaagacatcaaactagctaaacttggaagggataaaatagatatttctgaaaaagaaatgcccggattaatgtcattaagaaagaagtattctaaaaacaaaccattaaaagggttcaagcttactggttctttacatatgactattgagactgcaattcttatcgaaactttgaa

SEQ ID NO: 260941 - DNA, 161 bp, Unknown
  Bacterial polypeptide expressing nucleotide sequence isolated from the Sargasso Sea
tcaaactgctgttttaattgaaacattgactaaactaggggcagaagtatctctggtcctcgtgcaatattttttcaactcaagatcatgccgctgcagctattgccgctacaggaataccagtatatgcgtggaaaggtatgaacgaagaagaatttgat

SEQ ID NO: 260942 - DNA, 286 bp, Unknown
  Bacterial polypeptide expressing nucleotide sequence isolated from the Sargasso Sea
gttaatttagctttagcaactggacatccaagcagagtcatggatggatctttttttaatcaggtgcttgcacaaattgcattatttgaagatggttttgctgatcaatctgatgatcaaaaagaattgtatgtaaaagttttgccaaagaaactagatgaagaagtagcaagtttaatggttaaaggttttggtggaactctaacaaaactaacaaaagaacaagaagaatatatttccgtaagtaaagaaggtccatttaaggatgattcttacacctattagt

SEQ ID NO: 260943 - DNA, 859 bp, Unknown
  Bacterial polypeptide expressing nucleotide sequence isolated from the Sargasso Sea
tatgagtaaggtaaagaacccaaaattagcaaaacaaggtaaaattgcatatgaatgggcacgtacccacatggatattttagataatacattaaatcgattaaaaaaatcaaagccactaaaaggcgttacagttgcattttgtcttcatataacaaaagaaacatcagtcttagttatgggtgctaaagaattaggtgcaaacgttgcagtttgtggaggaaatccattaactacacaagatcatattgcagcatttcttgctacacagggaattaacatttatgcatggaatggtcagacaaacaaagaatatgactggtgtatagatcaagtactaagtcataaaccaagtttaatctgtgatgacggagcagatatgaatgtcaaagtacattttgataaaaaattcaaatctctacaagtactaggttccacggaagaaacaactgcaggagttactcgagttaaagcaatggaaaaacaaggaaagctaaagtatccagttatcattgttaatgatgcagataccaaacatatgtttgataatagatacggtacaggtcaaagtacaattgacggatatcttagagcaatgggacttttgtttacatccaagaaaatcgttgtagttggatatggatgggtaggaagaggagtagccgaaagatcaagaggaatgggaggaaaagtaattgttactgaagtcgaccctgtaaaggcattagaagctcatatggacggatttgatgtaatgccaatgtcacaagctgcaaaaattggccagatttttatcacaactacaggaatgacaagcgtaatcagaaaagaacatcttctagcaatgaaagatggagca

SEQ ID NO: 260944 - DNA, 473 bp, Unknown
  Bacterial polypeptide expressing nucleotide sequence isolated from the Sargasso Sea
catgactttagaggaattaaatacctttgtcaccacccaagccaacgttgggatggaagcttattattggtggtgtactggttttatgattatcatccatgtcggtttcttaatgtatgaagtaggagctacacgaatgaagaatgcagtttcttctggtgtaaaaaacctattagcttttgcatttatgataccaactttttggttatttggatggtatatttatttagcattcccaggaggttttgtaccaatcgatcttgaaggttatggtacaccttggaatgtttctatgggtccaatgttaagcgaccaagctactggggtgttttgggcagcgtttactttatttgcttgcacaactgcttcaattttttctggagcagtaattgagcgtataagaattagcgcctttactttccttgcagttattttaggatcagttgtttggattattggtgctgcttggggat

SEQ ID NO: 260945 - DNA, 145 bp, Unknown
  Bacterial polypeptide expressing nucleotide sequence isolated from the Sargasso Sea
tatgacagattataaagttaaagatattaacgaggcagaatttgggagaaaagaaatttcattagcagaaacagaaatgccaggtttaatggcattaagaaaagaatataaaggaaaaaatcctttaaaaggcgcaagaattcta

SEQ ID NO: 260946 - DNA, 508 bp, Unknown
  Bacterial polypeptide expressing nucleotide sequence isolated from the Sargasso Sea
tggattccaagttatgactggtactgaagcttttagaaaagctgattttatctgctcagttacagggaatataaatgtaattgataagcatcattttaaaataatgaaagatggtgtaattatctctaatgccggacattttaatgttgagattaatattgaggccttgcgaaaaatggcttcgaaaaataaaaaaataagaagtgacattgaagaattcacagtcggtaagaaaaaaatatgcttattatctgacggcagacttgtaaacctttctgcagctgaaggacatccgtcaagcgttatggatatgagttttgcgaaccaagcactttgtacagagtatatggtaaaaaatcataaaaaattaagcaataaagtttatgatgtcccatcagatatcgacaataaagttgcagaaataaagctaaaatcgatggatgtcaaaattgataagctcaccaaaatacaggatgactaccttaactcgtgggaaagcggaacctaa

SEQ ID NO: 260947 - DNA, 117 bp, Unknown
  Bacterial polypeptide expressing nucleotide sequence isolated from the Sargasso Sea
tatgtcagaagatttcaaagtaaaagatatcaatctagcggattttggtcgtaaagagatatcaatagctgaaagtgaaatgcccggtttaatggcattaagaaaagaatacggtaa

SEQ ID NO: 260948 - DNA, 409 bp, Unknown
  Bacterial polypeptide expressing nucleotide sequence isolated from the Sargasso Sea
atgacgttggaagaattaaatgtctttgtcaccacacaagcaaatgtaggcatggaagcttactattggtggtgtacaggactgatgattataattcacgttggtttcttaatgtatgaagttggagctactagaatgaaaaatgctgtatcttcaggtgttaaaaatttattagcattcgcatttatgattccaacattttggctatttggatggtggatctacttagcttttccaggaggctttgttcctattgatttagaaggatacggagttccatggaatgtttcaatgggaccaatgctaagtgaccaggctactggtgtattctgggctgcatttactctatttgcttgtactactgcttcaattttttctggagctgtaatgaaagaattagaattagtgc

SEQ ID NO: 260949 - DNA, 409 bp, Unknown
  Bacterial polypeptide expressing nucleotide sequence isolated from the Sargasso Sea
atggaagcctactattggtggtgtacaggacttatgattattattcacgttggtttcttaatgtatgaggttggcgctacaagaatgaaaaacgcggtatcctcgggtgttaaaaatttattagcatttgcatttatgattccaactttttggctatttggatggtggctgtatctagttatgtacaatgggtttataccagcagattcaggttatggaccaacatatggattaccatgggatgtatctatgggtcctatgcttagcgatcaagctactggtgtattttgggcagcatttacgctgtttgcgtgtacaacagcttcgattttttctggagcagtaattgaaaggattagaataagcgcttttgtttttctagcagttattctaggttctgtagtttgga

SEQ ID NO: 260950 - DNA, 726 bp, Unknown
  Bacterial polypeptide expressing nucleotide sequence isolated from the Sargasso Sea
tttgataagctcagttgcatggttaacaaagcataccttaaaagatggaaaatattcagattccattcctgcaaaaactcttttatttttagcaaaagtaccatccacttcaaaacaggtttttggttgtcatatcttagatcatcaaaatgattgcaaaggacttgggggcaaagaattcttattaaatgaagatagtgatctaggttttacatattttaataacaatgaatttctctcaggctatttactcatatcaaggtattttgtagacgaaaaacaaagtaaagttcaattaataagaattaaatctggtgaagtgatacatgagtggtcaccggacattgagtctattcatgcaatctcaaaaatagacagaaagttagcccctttagaaaaagacaaaggtaaagaaagatatttatactttcacccttttgtaactacaactggaaatttaatctttaaaacttattctcctctcgtcaaaataaattcatgttcagaattagtatggcaaattgacgaattgtttcatcatagtactgaagcagatcaagaaaacaatatttgggtgcccacacttaagaaaccaggcagatatataaatatcgataataactatcatgatgatgagataaccaaagttagcattaaagatgggaaaataatctatcaaaagtctgtaactgagattttagaggaaaatgatcttttacatttagt

SEQ ID NO: 260951 - DNA, 901 bp, Unknown
  Bacterial polypeptide expressing nucleotide sequence isolated from the Sargasso Sea
tttggtatcagcttgcggcggttctggtggttctgaacctgctgtaacgccaccaacttcgggtaatccaccgccagtggtgatacctccaccagtaacgaatgcgcccacttttactaacgtggcagtgcatgacccgtccgtgatcaaagtaggttcagacttctatatttttggctcgcacttagcagcggcgaagtccacggatttacaaaactggaccctagtggccgatggcgtcaatgccaacaataagctgatgcccaatgccgcaactgaaatcaaagaaacctttgactgggctcaaacttcaacgctttgggcagctgatgtgattgaaattggtggcaagttttatatgtactacaacgcgtgcaaaggcgattcaccacgctcggctttaggtattgcagtggcagactcagtcgaagggccttacaagaaccaacagttgttactgaaatccggtatgtggggcgaacccagcgaagatggttcaatttacgatgccaccattcatccgaacgtcgtagacccggatgtgttttttgataaaaccggccgcttgtggatgttgtatggctcctattcgggtggcttgtttattctggagcttgataaagcaacaggaatacctttaccggaccaaggctatggcaaacacctggtgggggggaatcacagccggatagagggcggatacgtgctgtacagccctgacagcgattattattacctcttcgtatcttttggtggcctggatgccaatggtggctacaacatacgtgtagcgcgatccagtaatcctgaaggcccttattttgatgcacttggcaattcaatggctgacgtaaaatccaacccggctttgcctttgtttgacgacgccagcatagcgccc

SEQ ID NO: 260952 - DNA, 199 bp, Unknown
  Bacterial polypeptide expressing nucleotide sequence isolated from the Sargasso Sea
atggttcttttcgctaatcaagttttagctcaaatacatttatacaagcaaggttttgcgaacataaacgatgaggacacaagagctgaaatgattactgtagaagtcttacctaaaaaattagatgaggaagttgcaagcttaatggtagagggatttggcggaactgtttacaaactcacaaaagaccaagctgatt

SEQ ID NO: 260953 - DNA, 505 bp, Unknown
  Bacterial polypeptide expressing nucleotide sequence isolated from the Sargasso Sea
gatgcatgaaaatatcgttgcggctcctgaactggcaggaaagggtctgcaaaagattgaatgggtccgcaggaatatgccgattctgcggaagatccaatctgaattcgagaaagagcagccctttgccggaaagcgaattaccgtctgtattcatctcgaagcaaaaacggcttttctggccctggtcctgagatcaggcggagccaaggtttctgtcaccggaagtaatcctgaatcaaccaaagacgatgtcgtggcggctattgccgaagaaggattgagggtctatgctaggcatggggcagaacccagtgaaatgcgaaaatacatggagatggcgctcgatttaaaaccacatctggtgatcgatgatggaggagatctggtggaaatcctccatgaaacgcgaaccgacctgttgaaaggaatgttaggtgcctgcgaagagacgaccaccggtgtaattcgagcgcaggcaagggccaaggctgctcagcttcaa

SEQ ID NO: 260954 - DNA, 538 bp, Unknown
  Bacterial polypeptide expressing nucleotide sequence isolated from the Sargasso Sea
tatgactttagaagagttaaacaccttcgtcaccacccaggccaacgttggcatggaagcttattattggtggtgtacagggttcatgattatcatccatgtaggtttcttgatgtatgaggtaggagcgacacgaatgaagaacgcagtttcttcaggtgtaaaaaatctacttgcttttgcatttatgataccaacattttggttatttggatggtatatttacttagcattcccaggtggatttgttccaattgatcttgaaggttatggagcgccatgggatgtttcaatgggtccaatgttaagtgaccaagctaccggtattttctgggcagcatttactctatttgcttgtactacagcatcaattttttctggtgcagtaatcgagagaattagaataagcgcttttgttttcctagcaataatcttaggatctgtagtatggattttaggtgcttcatggggatggcatccagatggatggttagtaacaggatggggttaccatgatgttgctgctgctggtgtgtca

SEQ ID NO: 260955 - DNA, 577 bp, Unknown
  Bacterial polypeptide expressing nucleotide sequence isolated from the Sargasso Sea
ttggctgacggattttgtgtgaaaaaagcaacttttaaagagataaaattaatccctattgatgggattcctctcgtaaagccaggagatgacttacctggaatcattattcggactgccaatgcatctaagattgagtggattgaaggagatatactggttatagctcagaaaatcatttctaaagctgaaggtcgtttagtcaacttaaaagagattaatccctcaaaacgtgctcttgaacttggatatttaactcaaaaggatcccagactggtggaattaattcttcaagaatcaacaaaagtaatcagacatagaaaaggagttttggtagttcagaatcatcacggagtgatccttgccaatgcagggatagatcgttctaatttagaacaggataaggaacaggattgggttcttttactgccaaaggactcagatcattcagccaaaaaaattcaccaagaattactttccaaaactggagtacatttgggagtcatcatcaatgacagtattggaagagcctggagaaatggtactttaggaactgcaattggggttgccggaatac

SEQ ID NO: 260956 - DNA, 511 bp, Unknown
  Bacterial polypeptide expressing nucleotide sequence isolated from the Sargasso Sea
ttggctgaaggattttgtgtgaaaaaagcaacttttaaagagataaaattaatccctattgatggaattcctctcgtaaagcctggagatgacttacctggaatcatcattcagactgccaatgcatctaagattgagtggattgaaggtgacatacttgttatagctcagaaaatcatttctaaagctgaaggtcgtttagtcaacttaaaagagattaatccctctaaacgtgctcttgaacttggatctttaactcaaaaggatcccagactggtggaattgattcttcaagaatcaacaaaaatgatcagatacagaaaaggtgttttggtagttcagaatcatcatggagtgatccttgccaatgcaggaatagatcgttctaatttagaacaggataaggaacaggattgggttcttttactgcccaaggactcagatctttcagccaaaaaaattcaccaagaattattttccaaaactggagtacatttgggagtcatcatca

SEQ ID NO: 260957 - DNA, 1285 bp, Unknown
  Bacterial polypeptide expressing nucleotide sequence isolated from the Sargasso Sea
atgactttagaggaattaaataccttggtcaccacccaagctaacgttgggatggaagcttactattggtggtgtacaggatttatgattatcattcatgttggttttttaatgtatgaagtaggtgctacaagaatgaagaatgctgtttcttcaggtgttaaaaacttacttgcatttgcttttatgattccaacattttggttatttggatggtatatatatttagcattccctggtggttttgtaccaatagatcttgaaggatatggtactccgtggaatgtatctatgggtccaatgttaagcgaccaagctactggagttttctgggcagcttttactttgtttgcttgtacaactgcttcaattttctcaggagctgtaattgagcgtataagaataagcgcctttacatttctagcagtcattttaggttctgtagtatggattcttggtgctgcgtggggatggcatccagatggatggttagtaacaggatggggataccatgatgtagccgcagcaggcgttgttcatactattgctggttggtttgcttttggtgtacttcttaatcttggaccacgtattggaaaatataatgaagatggtagtgcaaatgaaattgaaggacatagtttagtctcatcattcattggtctcttaatgcttatagttgggttctttggtttccttggagcttgtttaatttgggctggagcagattttggtggatgggtgaacatttacggtgcgcctgctactttatcttcatttgcgttcaatacattgatgggattagctggaggcatgatcggtgctttctggtggagtaaaggaaatccattctggatgatgtctggaggacttgcaggtatatttatatgtgctggtggtttagatatttggtatccaggttttgcttttgtacttggtataattgcaggatgtgtgattattccagctaacaattggcttcacaatacttttaaaattgatgactgcgtaggagcggtttcaattcacggagtagcgggtgttttaggagtattagcagtaggtatatttgccgctggatacccttcagcaggagatattcctccaacctcttttgtaggtcagttagttggttgtattgtaatggtattaacaggacttattccaggttatgttatatcttttataatgaaatcaatgggttggttaagagttcctgatgaggttcaagctgctggaattgatagcgctgaactaaatttaagagcttatgccgataaataag

SEQ ID NO: 260958 - DNA, 139 bp, Unknown
  Bacterial polypeptide expressing nucleotide sequence isolated from the Sargasso Sea
atggcaaatgaggattacaaagtagcagatataaatcttgcagatttcggtagaaaagagatttcacttgctgaaactgaaatgcctggattaatggcattaagaagtgaatataaaggaaaaaaaccacttcaggggg

SEQ ID NO: 260959 - DNA, 120 bp, Unknown
  Bacterial polypeptide expressing nucleotide sequence isolated from the Sargasso Sea
catggaagattataaagttaaagatatttcactagctgattttggaagaaaagaaatttctattgcagaaagtgaaatgccaggattaatagctttaagagaagaatatcaaaaaagaaa

SEQ ID NO: 260960 - DNA, 875 bp, Unknown
  Bacterial polypeptide expressing nucleotide sequence isolated from the Sargasso Sea
aatgacgttggaagaattaaatgtttttgtcaccactcaagcaaacgtgggtatggaagcttactattggtggtgtacaggacttatgataattattcacgttggtttcttaatgtatgaagtaggggctacaagaatgaaaaatgccgtttcttcaggtgttaaaaatttattagcatttgcatttatgataccgacattttggctatttggatggtggatctacttagcttttccaggaggatttgttcctattgatttagaaggatacggagctccttggaatgtttcaatgggaccaatgctaagtgatcaggctactggtgtattctgggctgcatttactctatttgcttgtactactgcttcaattttttctggagctgtaattgaaagaattagaattagtgcatttgtattcctagcagttgtattaggatctgtcgtttggattttagcagcttcttggggatggcatccagatggatggcttgtaactggatggggattccatgatgtagcagctgcagggtgtgttcacactgttgcaggactatttgcatttggggtgcttttaaaccttggaccaagagtaggaaaatataatgatgatggttctatgaatgatcttgaaggtcatagcttagttctatcttttgttggcttattaactttgattgtaggtttctttggattcctaggagcttgtttaatttgggcaggatcagattttggcggttggataaacatttatggtgcaccagctacattatcttcttttgcattcaatactttgatgggtctagctggaggcatgatcggtgctttctggtggagtaaaggaaatcctttctggatgatgtcaggtggactag

SEQ ID NO: 260961 - DNA, 307 bp, Unknown
  Bacterial polypeptide expressing nucleotide sequence isolated from the Sargasso Sea
aatgacacttgaagaacttgaatcgtacgtgatgatgcaagcgaacgtcagtatggaagcttactattggtggtgtactgcgttaatgattgcaattcacgtaggtttcttgatgtatgaagtaggatcgtctcgttttaaaaatgcggtctcttcagctacaaaaaaccttttagcgttcgcgtttatgataccaaccttctggttatttggttggtatatttatcttgcatttccagagggatttactccaatagcacttgacggttatggtactccatggaatgtatctatggggccaatgtta

SEQ ID NO: 260962 - DNA, 436 bp, Unknown
  Bacterial polypeptide expressing nucleotide sequence isolated from the Sargasso Sea
aatgacacttgaagaacttgaatcgtacgtgatgatgcaagcgaacgtcagtatggaagcttactattggtggtgtactgcgttaatgattgcaattcacgtaggtttcttgatgtatgaagtaggatcgtctcgttttaaaaacgcggtctcttcagctacaaaaaaccttttagcgttcgcgtttatgataccaaccttctggttatttggttggtatatttatttagcattcccaatgggatttactcctattgagctagagggttatggaaccccttggaacgtatcaatgggaccaatgttaagtgaccaagccacaggtgttttctgggcggcatttacattatttgcttgtaccacagcatctattttttcaggatctgttcttgagagaataagaattagctcatttactttcttagctgtgttttag

SEQ ID NO: 260963 - DNA, 1282 bp, Unknown
  Bacterial polypeptide expressing nucleotide sequence isolated from the Sargasso Sea
aatgacgttggaagaattaaatgtttttgtcaccacacaagcaaacgtgggcatggaagcttactattggtggtgtactggacttatgataattattcacgttggtttcttaatgtatgaagtaggcgctacaagaatgcaaaacgctgtttcttcaggtgttaaaaatttattagcatttgcatttatgattccaacattttggctatttggatggtggatctacttagcttttcctggaggatttgtacctattgatttagaaggatacggagttccatggaatgtttcaatgggaccaatgctaagtgaccaggctaccggtgtattctgggctgcatttactctatttgcttgtactactgcttcaattttttctggagctgtaattgaaagaattagaattagtgcatttgtatttctagcagttgttttaggatctgttgtttggattttagcagcttcttggggatggcatccagatggatggcttgtaactcaatggggttttcatgatgtagcagctgcagggtgtgttcacactgttgcaggactatttgcatttggagtgcttttaaatcttggaccaagagtaggaaaatataatgatgatggctctatgaatgatcttgaaggtcatagcttagttttatcttttgttggcttattaaccttgattgtaggtttctttggattcctaggagcttgtttaatttgggcaggatcagattttggaggttgggtaaatatttatggtgcaccagctacattatcttcttttgcgttcaatactttgatgggtctagctggaggcatgattggtgctttctggtggagtaaaggaaatcctttctggatgatgtcaggtggactagcaggtatatttatatgtgctggtggtcttgatatttggtatcctggatttgcatttattctaggtacaattgcaggttgtgtaattattccagcaaacaattggcttcacaacacttttaaaatagatgactgtgtaggagcagtatcaattcacggtgtttgtggtatcttaggtatgttgtgtgtaggtctttttgcttctggtttcccagcagcaggagatattccagcttcaaatctaactggtcaaattgttggtgctattgtaatggctttaactggatttgtgcctggctatgttatttcatatattatgaaaatggctggctggttacgtgtgccagatcacattcaaaaagcaggtattgataaagctgagcttggattacaagcttataaccagtaa

SEQ ID NO: 260964 - DNA, 313 bp, Unknown
  Bacterial polypeptide expressing nucleotide sequence isolated from the Sargasso Sea
ttagccgaaggaagactggtaaaccttggaaatgccacaggtcatccaagcagaattatggatggctcatttgcaaaccaagttcttgcccaaatgcatctctactcagctggttttgcaaatgtaaatgatgaagataaaaagaaagaattaattcaagtagaggtccttcctaaaaaacttgatgaggaagttgcctcccttatggttcaaggttttggcggtgttgttacaaagcttactgaagagcaagctgattacataaatgtcccccaagatggtcctttcaaagaagattcttataagtactaga

SEQ ID NO: 260965 - DNA, 376 bp, Unknown
  Bacterial polypeptide expressing nucleotide sequence isolated from the Sargasso Sea
ataaaacctcaggttcataaaatttatcgcgactctaaagattcttctaattatttaatccttctatcggagggaagattggttaatcttggaaatgcaactggtcatccatcaagaatcatggatggttcttttgctaatcaggtgctggctcaaaaattcttatatgaacaagcatttgcatccataaacgatgaaagcgtaaaagaagatatgatcactgtgcaagttttacctaaagaattagatgaagaagtagcgagttacatggttgaaggttttggtggcgtaatgacaaagctaactaaagatcaagctgaatatatcaaagtcgatgaagctggaccttacaaaccagaatattacaaatactaat

SEQ ID NO: 260966 - DNA, 160 bp, Unknown
  Bacterial polypeptide expressing nucleotide sequence isolated from the Sargasso Sea
aatcaggttatcacgatgccaaaatctctcgatgaaaaagttgccagacttcatttagattcactcggtgttcgcctgactgaactttctcaagagcaagctgattatcttggagtacctaaagaagggccgtttaaacctgagcactacagatactaaa

SEQ ID NO: 260967 - DNA, 529 bp, Unknown
  Bacterial polypeptide expressing nucleotide sequence isolated from the Sargasso Sea
tttagaggcagtaatggacggatttacggtgatgccaggaatagaagcggcgtcagtaggtgaagtgttcattacagttactggcgggctacatactttagggaaagaacactttgctgtcatgccagatggagcagtactatctaatagtggccacttcaatgttgagatagatatccctgcattagaagatatggcagttgctaaaagaacggtgagagattttgtggatgaatacgaaatgccggacggaaggacattatatttactcggagagggtaggcttataaatttggcagcagcagaagggcacccgtctgcggtaatggacatgagttttgctaaccaggctctgagccttgaatatttaatggctaatgctaacaccatggaaaatggtgtttatgttgttccaagagatattgatgatgaggttggtagattgaaattagctgctttaggcgtatcaattgataccctaagtgaggaacaagaaaaatatattaatagttgggaagaaggaacctaa

SEQ ID NO: 260968 - DNA, 313 bp, Unknown
  Bacterial polypeptide expressing nucleotide sequence isolated from the Sargasso Sea
agagaacacgttgaaagttataaatatgatggaaaagaaatattagtacttgctgaaggaagactcgtaaatttagctgctgctactgggcatcctgcatcggtgatggacatgtcatttgcaaatcaagctttggctgctgagtggattaaagagaaccataaaacattggaagcaaaagtatacacccttccaagtgaagttgatttgaaaattgctgcaactaaattaggactcatgggtggagagctagaaatactcacaaaagagcaaatcgaatatctcgactcttgggagcatggcaccagttaaa

SEQ ID NO: 260969 - DNA, 73 bp, Unknown
  Bacterial polypeptide expressing nucleotide sequence isolated from the Sargasso Sea
atgagattacttttccagaataataaaaggttaatcttgcttgctgaaggaagattagtaaatttaggatgtg

SEQ ID NO: 260970 - DNA, 136 bp, Unknown
  Bacterial polypeptide expressing nucleotide sequence isolated from the Sargasso Sea
tatgcataaagattataaagatttattaaaagatattaagggattatctgaggaaacaacaactggagtactcgcacttaagaagatggaaggccaaggaacattattggttccagcaataaatgtaaatgactca

SEQ ID NO: 260971 - DNA, 406 bp, Unknown
  Bacterial polypeptide expressing nucleotide sequence isolated from the Sargasso Sea
tttgtatattggacactttgataacgaaattcaagttgatgctttaaataaatcaaatgtcaaaaaggatcaaataaaacctcaacttgatcgatatacttttaaaaatggtaagcaaatattcttattggctgaaggaagattaattaatttaggatgtgcaacaggacatgcaagctttgttatgtcaacttcgttttcaaatcaagtgctagcacaggtatttctagctaaaaataaacctgcaactggcatttatgatttaccaagaaagttagatgaagaggttgcaagaatacatctaaaacatttagatgctgacttaacaaaactttcgaaagatcaagcaagatacatcggtgtaagtgttgatggcccatttaaaaaagaagaatatagatattag

SEQ ID NO: 260972 - DNA, 102 bp, Unknown
  Bacterial polypeptide expressing nucleotide sequence isolated from the Sargasso Sea
accaccacaggggtcaagcgtctttaccagatgcaaaaagacggcgaactgcttttcccggcaattaacgtaaacgattcggcgaccaagtcgaagttcgaa

SEQ ID NO: 260973 - DNA, 289 bp, Unknown
  Bacterial polypeptide expressing nucleotide sequence isolated from the Sargasso Sea
tatgcttgctaaaggaagattagttaaccttggatgtggcacaggtcatccaagctttgttatgtcggcttcttttacaaatcaagttctggctcaaatggaaatttttaataataccgcagcttatgaaaacaaagtttatactttgccaagaaaattagatgagaaagttgctgaacttcatttggctaaagttggagcaacgcttacaaaacttagtgatgagcaagctagctatattggaatttcttcagatagtgcttttaaatctgatgaatatagatattaa

SEQ ID NO: 260974 - DNA, 719 bp, Unknown
  Bacterial polypeptide expressing nucleotide sequence isolated from the Sargasso Sea
tatgagtaaggtaaaaaacccaaagctagcaaaacagggaaagatctcatacgaatgggctcgtactcacatggatattttagataatacattaacacggttaaaaaaatcaaagccgctgaaaggagtgacaattgcattttgcctacacattacaaaagaaacctcagttttgttgatgggggcaaaagaattaggagcaaatgttgcagtttgtggcggaaatccattaacaacgcaagaccatattgcagcatttcttgcaactcaaggaattcacatttacgcatggaatggacaaaccaacaaagaatatgattggtgtcttgatcaagtactaaaccacaaaccagatttaatctgtgatgacggtgcagacatgaatgtcaaagtacatttcgataaaaaattcaaatcattaaaaattcttggctccacagaagaaacaactgcaggagtaaccagagtacaagcaatggaaaaacaaggtaaattgaagtatccagttgtaatcgtcaatgatgcagatacaaaacatatgtttgataatagatatggtacaggtcaaagtacaatagatggatatctaagagcaatgggattattattcacatcaaagaaaattgtagtagtaggttacggttgggtaggaagaggagttgcagaaagatcaagaggaatgggaggcaaagtaattgttacagaaattgacccagtaa

SEQ ID NO: 260975 - DNA, 162 bp, Unknown
  Bacterial polypeptide expressing nucleotide sequence isolated from the Sargasso Sea
catgcttggcggcaagcgcgcgctcgtcctcggcttcggagacgtcggcaagggcagcgccgctgcgctccgcgggtccggctcccgcgtgctggtgacggagatcgacccgatcaacgcgctccaggcgtgcatggaggggtaccaggtgacgaccatcga

SEQ ID NO: 260976 - DNA, 185 bp, Unknown
  Bacterial polypeptide expressing nucleotide sequence isolated from the Sargasso Sea
atgggaaaactataaaaattatgaaaataaagtttatgttcttccaaaaaaacttgatgaaaaagtcgcagctctgcatttgaaaaaagttggtgcgaaattaactgagctaagcgaaaaacaagctgattatattggtgttagtaaagttggaccatttaaagatgaaacatatcgttattagg

SEQ ID NO: 260977 - DNA, 292 bp, Unknown
  Bacterial polypeptide expressing nucleotide sequence isolated from the Sargasso Sea
ttgtacgatggtaaggaaatcttagtactagctgaaggaagactagttaatttagctgccgcaactggccatcctgcttcagtgatggatatgtcatttgctaaccaggccttggctgcagaatggataaaagataatcatgaagacctagagccaaaagtttatactcttccgaatgaagttgatttaaaaattgcagctacaaaattaggactcatgggtggagaattagaaattcttactaaagagcaaattgaatatctcgactcctgggagcatggcacaagctaaa

SEQ ID NO: 260978 - DNA, 142 bp, Unknown
  Bacterial polypeptide expressing nucleotide sequence isolated from the Sargasso Sea
accaaaacatttatttgaaaaagttgcaacattacatcttaagaaagtgggtgctaaattaactaaattgtcaaaagatcaggcagactatataagcgtaaaagtggaaggtccattcaaacctgatgcctaccgctattaa

SEQ ID NO: 260979 - DNA, 98 bp, Unknown
  Bacterial polypeptide expressing nucleotide sequence isolated from the Sargasso Sea
cctgtccgatcaggactatgtagtcgccgatatctctttggcagattttggtcgaaaggaaatcgcgatcgccgagaccgaaatgcccggtctgatgg

SEQ ID NO: 260980 - DNA, 364 bp, Unknown
  Bacterial polypeptide expressing nucleotide sequence isolated from the Sargasso Sea
aaagagattaaacctggtgtccataaaataataagaaataaagatgaatatataattcttctgggtgaaggtaggctagttaatttagctttagcaaccggacatccaagtagagtcatggatggatccttctgtaatcaagtgcttgcacaaattgcattatttgaagatggttttgctgataaatctgatgatcagaaagaattatatgtaaaagttttaccaaagaaactagatgaagaagtagcaagtttaatggttaaaggttttggtggaactctaacaaaactaacaaaagagcaagaagaatatatctccgtaagtaaagaaggtccatttaaggatgattcttacacctattagt

SEQ ID NO: 260981 - DNA, 198 bp, Unknown
  Bacterial polypeptide expressing nucleotide sequence isolated from the Sargasso Sea
aatgaacgcgaaagtaggcacctttactgattataaagtcgcggatatttccctagcgaattatggccgctcagaaatccatattgccgaaaccgaaatgccggcactcatcgctattcgtgaaaaataccgtgccgagcagccgctgaaaggcgccaaaattattggctgcattcacatgaccattcagaccgccgt

SEQ ID NO: 260982 - DNA, 147 bp, Unknown
  Bacterial polypeptide expressing nucleotide sequence isolated from the Sargasso Sea
tgcgggttatggcgaggtaggcaagggctcggccgagtccctgcgcaatgctggctgccgcgtgatggtgaccgaaatcgatccgatctgcgccctgcaggcggcgatggagggctatgaggtcgtcaccatggaagaaggcgcggc

SEQ ID NO: 260983 - DNA, 235 bp, Unknown
  Bacterial polypeptide expressing nucleotide sequence isolated from the Sargasso Sea
tatgattctaaaggagataaaaatgagtaaacaagattacaaagtaaaagatatttctcttgcagaatacggaagacaagaaattttattagctcaggatgagatgcctgctttaatgcaattaagaaaaaactataacgatgagcaacctcttaagggcgcaaaaatcatgggctgcatacatatgactgtccaaactgctgtcttaattgaaacattaattaaattaggtgct

SEQ ID NO: 260984 - DNA, 729 bp, Unknown
  Bacterial polypeptide expressing nucleotide sequence isolated from the Sargasso Sea
gtgtgaagagactactacaggggtgcaccgactcaagtctatggaagctgaagggaaacttaaatatcctgtttttgcagttaatgacaccccaatgaagcgtttatttgacaatattcatgggacgggagaatcgactatactctccattgctgttacgactaatttttcatgggcgggtaaaacagtggtcgtggctggatatggttattgtgggaggggggtggccaaaaaaatatccggtcaaaacgcgcgggtaataattacagaggtggatccattgaggggtttggaggcatacatggagggatatgaagtgatgccaatgctgcaagcggctcataggggggatgtattcattacgacgacggggaattgtgatattctgaataaaaatcactttgaattgatgcgggacggggttattcttgcaaatgctgggcattttgatgttgagattaatataaaagaactagaaaaattatccacatctgaacgaatagtgagggatggtgttcgggagtatcaattgaaggatggtcgcaggattaatgtgcttgcttcggggagacttgtcaatttagccagcccattatctctcggacatccgattgagataatggaccaaagttttggtatgcaagcagtctgtatgcgcgagatggttgtaaatcctacttatgatccgggggtacattcagtgccaatggaactggacgcacaggtggc

SEQ ID NO: 260985 - DNA, 88 bp, Unknown
  Bacterial polypeptide expressing nucleotide sequence isolated from the Sargasso Sea
agagtccggagttccagtttttgcttggaaaggtgaaacactagaagagtattgggtggtgcactatgcaagctttaacatggcctga

SEQ ID NO: 260986 - DNA, 448 bp, Unknown
  Bacterial polypeptide expressing nucleotide sequence isolated from the Sargasso Sea
cattggtcattttgatacagaaatagatacccaattcatgagagatgaatgggagtgggaagaaataaaaccccaagtacataaggtttatagaagtcaaagctcagataatgaaaataatgactatcttatactgttatcagaaggaagattggtaaatcttggaaatgcaacaggccacccatccagaattatggatggatcttttgcaaatcaggttttagctcaaatgtatttatttgaaaaaaagtttgcttctttaaatgatgatgagtctagggaagaaaaaattaaagttgaggtcttgccgaaaaagctagatgaagaagttgcttcatatatggtcagtggatttggtggtgttataactgaactttctgatgagcaagctgactatataaatatagataagcaaggtccttttaaatctgacgagtataagtattaa

SEQ ID NO: 260987 - DNA, 169 bp, Unknown
  Bacterial polypeptide expressing nucleotide sequence isolated from the Sargasso Sea
catggaagattacaaagtaaaagacatcacattagctgaatttggcagaaaagaaatttctttggcagaaaccgaaatgccaggtcttatggctttaagaaaagagtataaagaaaaatttccacttaaaggtgcaaaaattttaggatgtctccacatgactattcaa

SEQ ID NO: 260988 - DNA, 199 bp, Unknown
  Bacterial polypeptide expressing nucleotide sequence isolated from the Sargasso Sea
gataaaactatcgtctgtaatattggtcattttgataatgagatagatatggcatggctcaatgaaaattacggatcaactaaagacactataaaccccaagttgataagtataatattaatggcaatgatatcattgtgcttgctgaaggaagacttgttaatttgggctgtgctactggacacccatcctttgtgat

SEQ ID NO: 260989 - DNA, 229 bp, Unknown
  Bacterial polypeptide expressing nucleotide sequence isolated from the Sargasso Sea
atgagtgcatccttttctaatcaggttttagcccagatagaaatatgggaaaactataaaaaatatgaaaataaagtctatgttctgcctaaaaaactggatgaaatggtagctatgttccatctacaaaaagttggagctaaactaactgaaatgtccaaagaccaaagcgattatttaggtgttgaacagcaaggcccatttaagaaagatacatataggtactagt

SEQ ID NO: 260990 - DNA, 185 bp, Unknown
  Bacterial polypeptide expressing nucleotide sequence isolated from the Sargasso Sea
tatgaataaaaatgactttaagatagctgatttaagtttagcagaatggggaagaaaagaaattacattagccgaaaaagaaatgcctggactgatatctttgagagaagagtataaagatactaaacctttaaaaggggctaatataataggatgcttgcatatgactatacagacagcagttt

SEQ ID NO: 260991 - DNA, 241 bp, Unknown
  Bacterial polypeptide expressing nucleotide sequence isolated from the Sargasso Sea
ccgaggtcctgctcgtccacgacccagaccctcgcgcagctcgagctctggaaggagcgcgacagcgggaagtacaagactgaccaggtctacctcctcccgaagaatctcgacgagaaggtcgcccgcctccacctcccagcgctcggcgcggagctcaccgtgctcacgaaggagcaggccgattacatcgacgtgcctgtgggtggcccctacaagccggacacgtaccgctactagg

SEQ ID NO: 260992 - DNA, 173 bp, Unknown
  Bacterial polypeptide expressing nucleotide sequence isolated from the Sargasso Sea
agttttaattgaaacgttagttgatctaggagcagaagtaagatggtcttcttgtaatatatttcaacacaagaccatgcagctgcagctattgccaaggcaggtatacctgtatttgcttggaaaggtgaaacagaagaggaatattggtggtgcgttaaacagacaataga

SEQ ID NO: 260993 - DNA, 1123 bp, Unknown
  Bacterial polypeptide expressing nucleotide sequence isolated from the Sargasso Sea
attgagtaaggtaaaaaacccaaaattagcaaaacagggtaaaactgcatatgaatgggcacgaactcatatggatattttagataatacattaaatcgattaaaaaaatcaaagccactaaaaggagtgacagtagcattttgtctccatattacaaaagaaacatcagttttggtaatgggtgctaaagaattaggtgcaaatgttgcagtttgtggaggaaatccgctaaccacccaggatcatattgctgcatttcttgcaacacaaggaattcacatttatgcatggaatggacaaaccaacaaagaatatgactggtgtattgaacaagtactaagccataaaccaagtttaatctgtgatgacggagcagacatgaatgtcaaagtacattttgataaaaaattcaaatctctcaaagttttaggttctactgaagaaacaactgcaggagttactagagttagagcaatggaaaaacaaggcaaactaaagtatccagtaataattgtaaatgatgcagatacaaaacacatgtttgataatagatatggtacaggtcaaagtacaattgatggttatcttagagcaatgggattattgtttacatctaaaaaaatagtcgttgtaggttatggatgggtcggaagaggagttgcagaaagatccagaggaatgggaggaaaagtaattgttacagaagtggatccagttaaagcattagaagcacatatggatggatttgatgttatgccaatgtcccaagctgcaaaagtgggacagattttcattacaactacaggtatgaccagtgtaattagaaaagaacaccttcttgcaatgaaagatggagcagttgttggaaacgtaggacattttgatgtagaaatagatacaaaattcctcttagaaaaatcaaaatcagtaagagaagtaagaccatcacttgatgaatgtatcttaagaaatggaaagaaaatctatcttattggaaaaggtagattagcaaatctagtagcagcagaaggccatccaccagaagtcatggcacaatcattttcaaatcaaattttatcattattgtatatcttaaaaaatcataagaaaatgggcacaaaa

SEQ ID NO: 260994 - DNA, 739 bp, Unknown
  Bacterial polypeptide expressing nucleotide sequence isolated from the Sargasso Sea
gatgctcgtcaatgaagcccgctgcaaatatctctttgataacgtccacggcaccggacaatccgtctgggatgcggtgatgcgcagtaccaatcttgttctagccgggaaaacggtggtggtggcaggctacggatggtgcggaagaggttgtgcgttgagggctcaggggatgggtgcatcggtgattgtttgtgaagtggacccggtcaaggcttgtgacgcaatgatgaacggatgccgtgtgatgcccttgatggaagcctgtaaagaggcagatgtggttttaagtgtcaccggagttcgtcacaccataagaaaagagcattttaaggtgcttaaggacaatgcgcttttggccaacgcaggacacttctgggaggaaatcgacgtagaggggttgtccgggatgtcaaaggacagaaagcagatgagaacgaacgtggaaggatttcttctgcaggatggacgttggctgaatttattgggaaatggaaatatcgtcaatattgcctgtgccgacggacatccggcggaaatcatggataccagtttcgcactccaggcattgtccgcacagcatctggtgcaacaggaaaaacaactcgccaaccgttgttatccggtacctgaaaggatcgatcagagagtggcacaaatcaggctcgagtcttccggagtctcctttgacactctgacggaagaccagcaacaatacctttccggttgggatgcctga

SEQ ID NO: 260995 - DNA, 271 bp, Unknown
  Bacterial polypeptide expressing nucleotide sequence isolated from the Sargasso Sea
atgagtgaaacattaacagggcaaattgtagaatctttgccttataaagttaaaaatatcgatctttttgatgatgggcgtaaagctttagaaatagctgaaaaagaaatgcctggactaatggctacaagaaaaaaatacggtccagatcttccgctaaaaggaaaaaaaataactggttctttacacatgacagtagagactgcagttttgatagaaactttggtggaacttggtgctgatgttcgctgggcaagttgcaatatatttt

SEQ ID NO: 260996 - DNA, 697 bp, Unknown
  Bacterial polypeptide expressing nucleotide sequence isolated from the Sargasso Sea
tcggcaacaaatacccttatagcgggaaaaaatgttatagttgtaggttatggatggtgcgggagaggtatagcaaatcgccttaaagggcttggagcaaaggtttttgtagttgaagcaacttctagcagtgctgatggttcatctggttatcatcgagcgctcgaagcgcattatgacgggtgttgggttggaaatttagatgagatagttcatttaggagatatattcatctccgctactggaaataagcacgccataggtattgagcatatgaaaaaaatgaaaaatggtgcaattttagcgaacgctggtcatttcaataatgaaattgacataaaaggcttagaatctttttctagttcatcaaaagaaatccttccaaacgtagataaatattatttaaatgacaacaaacatctagttcttctttcaaaggggagattggttaatctatcccagccaacaggccaaggtcaccctattgagatcatggatgcaagcttcgccattcaggctctatgcgtcgaatatttagttgaaaactaccaaaatttgaaaccttcaatatacgatgttccaatgtcaattgataatgaggttgctaaaattgcattagaagcacaagaaatatatctggatgatttatcagatgatcaaaaaaaatatttacaaacctggcaggagggaacctagt

SEQ ID NO: 260997 - DNA, 315 bp, Unknown
  Bacterial polypeptide expressing nucleotide sequence isolated from the Sargasso Sea
atatcatccttttaggtgaaggcagattagttaatctagcactagcaaccggacatccaagtagagtcatggatggatctttctgcaaccaagttcttgcacaaattgcattatttaaagatggttttgctgataaatctgatgatcagaaagaattatatgtaaaagttttacctaaagaactagatgaagaagtagcaagtctaatggttaaaggttttggtggaacattaacaaaattaacaaaagagcaagaagaatatatctccgtaagtaaagaaggtccatttaaggatgattcttacacctattagt

SEQ ID NO: 260998 - DNA, 303 bp, Unknown
  Bacterial polypeptide expressing nucleotide sequence isolated from the Sargasso Sea
tgggtgaaggcaggctagttaatttagctttagcaaccggacatccaagtagagtcatggatggatctttctgtaatcaagtgcttgcacaaattgcattatttgaagatggttttgctgataaatctaatgatcaaaaagaattatatgtaaaagttttaccaaaagaactagatgaagaagtagcaagtttaatggttaaaggttttggtggaactctaacaaaactaacaaaagagcaagaagaatatatctccgtaagtaaagaaggtccatttaaggatgattcttacacctattagt

SEQ ID NO: 260999 - DNA, 242 bp, Unknown
  Bacterial polypeptide expressing nucleotide sequence isolated from the Sargasso Sea
agtcgattgcccaaatatgaattatgcggaaaactataaaaattatgaaaataaagtttatgttcttccaaaaaaacttgatgaaaaagtcgcagctctgcatttgaaaaaagttggtgcaaaattaactgaactaagcgaaaaacaagctgattatattggtgttagtaaagttggaccatttaaagatgaaacatatctgttattagagaggaaaaatgagaccttatttttttactagt

SEQ ID NO: 261000 - DNA, 345 bp, Unknown
  Bacterial polypeptide expressing nucleotide sequence isolated from the Sargasso Sea
ttaagaatgaaagtacaaaagtagagagagtaagagaacatgtagagagctataaatataaagataaagaaattttagttctagcagaaggaagattagttaaccttgcagcagctacggggcacccagcctcagttatggatatgtctttcgcaaatcaagctttggcatcagaatggataaaagataatcataaaaaactagaatcaaaggtatacacattacctaaggaagtagatattaaaatagctgctacaaaattaagcctaatgggtggcgagttagagatattatctgatgagcaaattaaatatctagattcttgggagcacggtacaagctgaa

SEQ ID NO: 261001 - DNA, 190 bp, Unknown
  Bacterial polypeptide expressing nucleotide sequence isolated from the Sargasso Sea
tgaattgtggaataattccgataaatatgaaaaaaaagtttatgttctacctaaacatttagatgaaaaggtagctatgctgcacttagagaaagttggggctaaattaactaaaatgtcaaaagaacaagcagactacattagcgttaaaccatcaggaccatttaaaccagatacttatcgctactag

SEQ ID NO: 261002 - DNA, 733 bp, Unknown
  Bacterial polypeptide expressing nucleotide sequence isolated from the Sargasso Sea
catggaagattataaagtaaaagacatttctcaagctgaatttggtagaaaagaaatatcaatagctgaaagtgaaatgcctggtttaatggctttaagagaagagtattctaaagataaaccattaaaaggtgcaaggattataggatgtcttcatatgacaattcaaacagctgtgctaatcgaaactttagttgcattaggcgctgaagttcgttggtcttcttgtaatattttttcaactcaagatcatgcagctgctgcaattgcaaaggctgggatccctgtttatgcctggaaaggtgaaacagaagaggaatatttatggtgcattaaacaaactatagttggaaaacctgactggaagcctaatatgttattagatgacggcggagatttaacagctatcatgcataatgagtatcaggatttgatgaaagatattaagggtgtttcagaagagactacaactggaattaaagcactaaacaaaatggaaaaagataaattgcttttagttccagcgataaacgtgaatgattcagtcactaaatcaaaatttgacaatttatatggatgtagagaaagtttagtagatgggataagaagggctactgatgtaatgatgtctggaaaaatagcaattgttgctggtttcggagacgttggtaaaggaagtgcagcatctttaagacaaagtggtgctagagttttagttacagaagcagatcca

SEQ ID NO: 261003 - DNA, 358 bp, Unknown
  Bacterial polypeptide expressing nucleotide sequence isolated from the Sargasso Sea
atcatcaaatgttcaaagagatactattaagcctcaagtggatcgatatacttttgatgatggtcactcagtatatttgcttgcggagggacgtttgatgaatcttggttgtgcaacaggacatcctagttttgtcatgtcaaattcatttactaatcaagtattagctcaaatagcattagcaaaagataaaccagatcttggtgtctatatgttgccaaaggaacttgatgaagaggtcgcgcgcttgcacttaagtcatttaggagtaactcttacagaattatctgatgaacaagcagactacataggtgtatctaaatctgggccatttaaacctgagcattacagatattaa

SEQ ID NO: 261004 - DNA, 781 bp, Unknown
  Bacterial polypeptide expressing nucleotide sequence isolated from the Sargasso Sea
acacttttagttcctgcgataaatgttaatgactcagttacaaaatcaaaatttgataatctctatggatgcagagaaagtttagtcgatggaatcaaaagagctacagatgtaatgatgtctggaaaagttgctatcgttgcaggatttggtgatgtaggaaaaggaagtgcagcctcattaagacaaagtggtgctagagtaatggtaacagaaacagatccaatttgtgcacttcaggctgcaatggagggttatgaagttgtattaatggatgaaatgattggtcaagctgatattgttgtgacagcaacaggcaataaagacatagttactgcagatcacatgagagcaatgaaagatagatctatcctttgtaatattggacactttgataatgaaatacaagttgatgcattaaaaaattataaatgggatgaaataaaaccccaagttcacgaaatcactttccctgataataaaagacttatcttgttagcagaaggaagacttgtaaatttaggatgtgcgactgggcacccaagctttgttatgagtgcttcatttacaaaccaagttacggctcaaatagaattatggaacaattcagataattatgagaacaaagtatacgtacttcctaaacatttagatgagaaagttgcaagattacatttagaaaaagttggagcaaaactaactccattatctaaagatcaagccgattacatcagtgttaaaactgaaggaccatataagccagatgcttaccgctactaag

SEQ ID NO: 261005 - DNA, 505 bp, Unknown
  Bacterial polypeptide expressing nucleotide sequence isolated from the Sargasso Sea
atgaatgattttaaagtaagagatttacttcaagctgactttggtagaaaagaaatttctatagctgaaagtgagatgcctggtttaatggcaattagagaagagtatggaaaaaaaaaaccattaaaagatgcaagaataattggctgtttacatatgacaatacaaacagcagtactgattgaaacattagtttatttaggtgcagatgttcgttggtcttcttgtaatattttttcgacacaagatcatgcagctgctgcaatagctaaagcaggtatacctatttatgcatggaaaggtgaaacagaagaagaatacttatggtgcataaaacaaactattgagggaaaaaaagattggaagcctaatatgcttttagatgatggtggtgatctaactgctataatgcataatgaatataaagatttactcgaaaatgttaaaggggtctcggaagaaacaacaactggaattaaagctttaaataagatgaaaaagagaa

SEQ ID NO: 261006 - DNA, 826 bp, Unknown
  Bacterial polypeptide expressing nucleotide sequence isolated from the Sargasso Sea
tatggcaaatgaggattacaaagtagcagatataaatcttgcagatttcggtagaaaagagatttcacttgctgaaactgaaatgcctggattaatggcattaagaagtgaatatgaaggaaaaaaaccacttgagggggcaagaattctcggctgtcttcatatgactatacaaactgctgtgctaattgaaacattagtagaattaggtgctgatgtcagatggtcatcgtgtaatatattttcaacacaagatcatgctgcagctgcaatagcaaaagcaggtataccagtttatgcatggaaaggtgaaacagaagaagaatattggtggtgtgtaagacaaacgattgaaggtaaagagggttggaaaccaaatatgattctcgacgatggcggtgaccttacaagtttaatgcataaagaatataatgacttattaaaagatgtaaaagggctctcagaggaaacaacaacaggtgtactcgcattaaaaaaaatggagagcgaaggtactttaatggtgccagctattaatgtaaatgactcagtcaccaaatctaaattcgataatctttatggctgtagagaaagtttggttgatggaattaaaagagcaactgatgtcatgatgtcaggaaaagttgctatagttgcaggttttggtgacgttggcaaaggcagtgctgcttcattacgtcaaagtggtgcaagagtaatggttactgaaacagatccaatttgcgcattacaagcggcaatggaaggttatgaagtcgttttgatggatgaaatgattaaggaagcagacattgtgtacagcaac

SEQ ID NO: 261007 - DNA, 586 bp, Unknown
  Bacterial polypeptide expressing nucleotide sequence isolated from the Sargasso Sea
atgagccaagattttaaagtaaaagatataaatttagctgactttggtagaaaagaaatttcaatagcagagtctgagatgccaggcctaatggcattaaggaaagaatacaaaggtaagaaacctttgaatggagcaaacattcttggctgtcttcatatgacaattcaaacagctgttttgatagaaacacttgttgaacttggtgcaagtgtgagatggtcttcttgtaatattttctcaacacaagatcatgctgctgctgcaattgcaaaagcgggaataccagtttatgcatggaaaggtgaaacggaaaaagagtattggtggtgcattaaacaaactatcgaaggtgacaaaagttggaaaccaaacatgattttagatgatggtggtgatcttaccggactaatgcacaaggattataaagacctacttaaaaatattaaaggagtatcggaagaaactacaactggagttttagcattaaaaaaaatggagtctaataaaacattgctaatccccgctataaatgtaaacgactcagtaacaaaatctaaatttgataatttatacggctgtcgag

SEQ ID NO: 261008 - DNA, 355 bp, Unknown
  Bacterial polypeptide expressing nucleotide sequence isolated from the Sargasso Sea
atggaagattataaagtaaaagacattgctcaagctgaatttggtagaaaagaaatatcaatagctgaaagtgaaatgccaggtttaatagctttaagagaagagtattccaaagaaaaaccattaaagggtgcaaggattataggatgtcttcatatgacaattcaaacagctgtactaatcgaaactttagttgcattaggtgctgaagttcgttggtcttcttgtaatattttttcaactcaagatcatgcagctgctgcaattgcaaaggctgggatccctgtttacgcctggaaaggtgaaacagaagaggaatatttatggtgcattaaacaaactatagttggaaaac

SEQ ID NO: 261009 - DNA, 817 bp, Unknown
  Bacterial polypeptide expressing nucleotide sequence isolated from the Sargasso Sea
atgaaagattatgcaatcacagatataaaacttgctgaatggggaagaaaagaaatatcaatcgctgagactgaaatgccagggttaatagcatgtagagaattgttttcaaacgataaaccattaaaaggtacaagaattgcaggttgtttgcatatgacgattcaaacagcagtcctcatagaaaccttaacaagtcttggggctagtgttagatgggctagctgtaatattttttcaacacaagatcacgcagctgcggcaatagcaaaacaagatattccagtttttgcaaaaaaaggtgaaactttaaaagaatattggaattatgtagatcaaatatttacttggtcaaatgatacagttgcgaatatgatcctagatgatggtggtgatgcaactttgtatattatactaggcgctaaagctgaaagtggtgaacaagttttacctaaccctgctaatgaagaagaagaggctcttaaatcacaaattttatctagacttgaaagttctccaggatggttcacaaaagtcaaaaaaagcattaaaggggttactgaagaaacaactacaggggttcttagattatatcaaatggcagaaaaaggcgatcttccttttccggcaatcaatgtgaatgattcagtaacaaaatctaaatttgataatctttatggatgcagagaatctctagtagatggtattagaagagccacagatgtgatgttatctggtaaagttgctgttgttgcaggttatggtgatgtaggaaaagatctgcagcttcacttcgtcaaggtggagcccaggtaat

SEQ ID NO: 261010 - DNA, 509 bp, Unknown
  Bacterial polypeptide expressing nucleotide sequence isolated from the Sargasso Sea
ggatgagatgattagtgaagctgacatagttgtaactgcaactggaaataaagatattgtcactgcagatcatatgagagaaatgaaagatagagccattctatgcaacattggacattttgataatgaaatccaagttgatgctttaaaaaattataaatgggacgaaattaaacctcaagttcatgaaataacattgccggatggaaaaagaattattttattagctgaaggaagactagtgaatttaggatgcgcaacaggacacccaagttttgtaatgagtgcatcatttaccaatcaagttactgctcaaatagaactatggaataattctgataaatatgaaaaaaaagtttatgttttacctaagcatcttgatgaaaaagtagcaaggttgcatcttgaaaaagttggagcaaaacttactaaactatccaaagatcaagctgattatattagtgtaaaacaagatggaccatacaaacccaatgcatatcgctactaaa

SEQ ID NO: 261011 - DNA, 261 bp, Unknown
  Bacterial polypeptide expressing nucleotide sequence isolated from the Sargasso Sea
catggctgaaacagcaaaagaaaataaaatagatttgatgaacgattacaaagtcgctgatatctctctggctgaatggggcgagaaggaaatcaaaattgcagaaacggaaatgccaggcttgatgagcatcagagaagaattcggaaaggaaaagcctctgaaaggcgcaagaattgcaggctgtcttcacatgacgattcaaacagcagtactcattgaaacattgattgaacttggtgctgatatcaggtggtcttc

SEQ ID NO: 261012 - DNA, 972 bp, Unknown
  Bacterial polypeptide expressing nucleotide sequence isolated from the Sargasso Sea
gaacttggtgctagtgtaagatggtcttcttgtaatattttttcaacccaagatcacgctgctgcagcaatcgcaaaagcaggaataccggtttatgcatggaaaggtgaaacagaaaaagaatattggtggtgcatcaaacaaactatagaagccgataaaaattggaaaccaaatatgattttagatgatggtggtgacctaacaggactaatgcacaaagattacaaagatcttcttaaaaacattaagggagtatccgaagaaactactactggagttttagcattaaaaaaaatggagtctaataaaacattgctaatccccgctataaatgtcaacgactcagtaacaaaatctaaatttgataatttatatggttgtcgagaaagtttagtagatggaattaaaagagcaactgatgtcatgatgtccggtaaagttgctatagtcgctggttttggtgatgtgggtaaaggaagcgcagcatctctaagacaatcaggagcaagagtgatggttacagaaaccgatcctatctgtgcgttacaagccgcaatggaaggttatgaggttgttttgatggatgaggccataaaggatgcagatattgtagtaactgctacaggtaataaagatattgtaaccgctgaccacatgagagaaatgaaagacagagcaatattatgtaatatcggtcatttcgataatgaaattcaagttgatgctttaaagaattataaatggactgaaataaaaccacaagtccacgaaatagaactgccaaataaaaaaagaattattttattagctgaaggaagattggtaaatcttggctgtgcaactgggcacccaagttttgtaatgagtgcctcatttacaaatcaggttatagctcaaattgaattgtggaataactcaaaaaattatgaaaagaaagtttacgtattaccgaagcacttagacgaaaaa

SEQ ID NO: 261013 - DNA, 195 bp, Unknown
  Bacterial polypeptide expressing nucleotide sequence isolated from the Sargasso Sea
tatgagtaataatgattataaagttgcggatatttctctagcagaatggggcagaaaagaaataataattgcgcaatctgaaatgcctgctcttatgcaattaagagatagatataaaaaagagcaacctctcaaaggggctaatattcttggctgtatccacatgacaattcaaacagccgttcttattgagac

SEQ ID NO: 261014 - DNA, 365 bp, Unknown
  Bacterial polypeptide expressing nucleotide sequence isolated from the Sargasso Sea
tatgacagattataaagtaaaagatatcaatgaagcagaatttggaagaaaagaaatctctttagcagagactgaaatgccaggattaatggcagtaagagccgagtataaaggtaaaaacccacttaaaggtgcaagaattttaggctgtcttcatatgacaattcaaacagcagttttgattgaaactttagtagatttaggtgcagaatgtagatggtcctcatgtaatatattttcaacacaagatcatgcagcagcagcaattgcaaaagctggtatcccagtatttgcatggaagggtgagaccgaggaagaaatattggtggtgtgtaaaacagactatagaaggcaaaaaagactgg

SEQ ID NO: 261015 - DNA, 202 bp, Unknown
  Bacterial polypeptide expressing nucleotide sequence isolated from the Sargasso Sea
tatggctcaggattataaagtaaaagatatcaatcaagcagcttttggaagaaaagaaatttctttagcagaaacggaaatgccaggacttatagctcttcgaaaagagtacaaaggaaaaaaacctttaaagggtgcaaaaattctaggctgtcttcatatgacaatacaaacagcagttttaattgaaactctagttgaa

SEQ ID NO: 261016 - DNA, 1027 bp, Unknown
  Bacterial polypeptide expressing nucleotide sequence isolated from the Sargasso Sea
caagatcatgcagctgctgctattgctaaagcaggtattcctgtttatgcatggaagggtgaaacggaagaagaatacttgtggtgcatcaagcaaactatagttggaaaatctgattggaaaccaaatatgttattagatgatggaggtgacttaacggctatcatgcataatgaacataaagaattaatgaatgatgttaaaggtgtttcagaggaaacgaccactggaattaaagcacttaacaaaatggaaaaagataaatctctattagtgccagcaattaatgtcaatgattctgtaaccaaatcaaaatttgataacctatatggttgtagagaaagtttagtagatggcataagacgagcaactgatgttatgatgtcaggtaaaattgcaattgtagcaggatttggagatgttggaaaaggaagtgctgcatctttgagacaaagtggagcaagagtattagtcacagaagcagatccaatttgtgctcttcaagctgcaatggagggttacgaagttgttttaatggaagaagctataagtagagcagatatagttgtaaccgcaacaggaaataaagatattgttactgcagaccatatgagagatatgaaagatagagcaatattatgtaacattggtcactttgataatgaaatacaagttgaagctttgaaaaattataaatggactgaagtaaaaccccaagttcacgaaattgaattacctagtggtaagagaattattttattagcagagggaagattagtaaatttaggttgtgcaactggtcatcctagttttgttatgagtgcatcttttactaatcaggtaattgctcaaatagaactttggcataatcacaaaaattatgacaacaaagtttatgtactgcctaaacatttggatgaaaaagttgctactttacatcttaaaaaagttggcgctaaattaactaaattatctaaagatcaggcggattatataagtgtagggacagaaggtccctttaaaccag

SEQ ID NO: 261017 - DNA, 574 bp, Unknown
  Bacterial polypeptide expressing nucleotide sequence isolated from the Sargasso Sea
attactgaagctgatccgatttgtgcattacaagctgccatggaaggatacgaggttgttttaatggacgaagctataagcaaagctgatattgttgttactgcaactggcaataaagacattgtgacagcagatcatatgcgagatatgaaagaccgagcaatattatgtaatattggtcattttgataatgaaattcaagttgaagcgttgaaaaactacaaatggactgaggtaaaaccacaggttcatgaaattgaacttccaagtaaaaaaagaataattcttctggcagagggtagattggttaatttgggatgtgcaactggacacccaagctttgtgatgagtgcatcttttaccaatcaagttatagcacaaatagaattgtggaataattataaaaattatgaaaataaggtttatgttctgccaaaacacttagatgaaaaagtagcaacattacatttaaaaaaagttggtgcaaaattaacaaagctttcaaaagaacaagctgactacatcagtgtcggagtagaaggaccttttaaacctaatgcttatcgctactaaa

SEQ ID NO: 261018 - DNA, 943 bp, Unknown
  Bacterial polypeptide expressing nucleotide sequence isolated from the Sargasso Sea
ggaaatcaaaattgcagaaacggaaatgccaggcttgatgagcatcagagaagaattcggaaaggaaaagcctctgaaaggcgcaagaattgcaggctgtcttcacatgacgattcaaacagcagtactcattgaaacattgattgaacttggtgctgatatcaggtggtcttcttgtaatatcttctcaacacaagatcatgctgcagctgctctagcagccaaaggcattccaatatttgcatggaaggatgagagcgaagaagaatactggtggtgcgtagaaaagacaatcaacggtccagacggttggacgccaaatcttatacttgatgacggcggagatttaacgggtctcatgcatgaaaaatatcctgaactcatgaaagacatcatcggtgtttcagaagagacaacaacaggggtattgcgtctctataacatggagaaagatggaacgctcatgtgtcctgcaatcaatgtcaatgactcagtgacaaaatcaaagttcgataatctctatggctgtcgtgaatcactcgtagatgggatcaagagagcgaccgatgtcatggtagctggaaaaattgctgttgttgctggatacggggacgttgggaaaggctcagcgcagagtcttagaggccttggcgctacagtttggataaccgaaatcgacccaatatgtgcacttcaagctgcaatggaaggatatcgagttgtgacaatggatgatgcttgctctcaagcagacatctttgttactgccactggaaactacaatgtcattgataaacatcacttagaacagatgaaggatcaagcaatcgtctgcaatattgggcattttgataatgaaatcaacgtagaatccatgaaagatcatgagtggatcaatatcaaacctcaagtagatcacattgtcttccctgatggcaaaaga

SEQ ID NO: 261019 - DNA, 724 bp, Unknown
  Bacterial polypeptide expressing nucleotide sequence isolated from the Sargasso Sea
atggaagattttaaagttaaagatataacccaagcagattttggaagaaaagaaatttctatagcagagacagaaatgcctggattaatggcactaagaaaagagtacaaaggtaaacagccacttaaaggtgcaaaaattgtaggctgtctacatatgactattcagactgcggtcttgatagaaaccctagttgaattgggtgctgaagtaaggtggtcgtcttgtaatattttttcaacacaagatcatgcagctgcagcaattgcaaaagctggcatcccagtatttgcatggaaaggtgaaactgaggaagaatattggtggtgtgtaaggcaaacaatcgaaggtaaaaaagattggaaaccaaatatgatacttgacgatggaggtgatcttacagcattaatgcataaagattataaagatttattaaaaaatatcaaaggactctcagaggaaaccacaacaggtgtgttagctcttaaaaaaatggagagtgaaggtaaattgttagtaccagcaataaatgtaaacgattctgtcactaaatctaaatttgacaatttatatggttgcagagaaagtctagttgatggaatcaagcgagcaacagatgttatgatgtctggtaaagttgcaatagttgcaggttttggagatgtaggaaaaggtagcgcagcttctttaagacaatcgggggcaagggtaatgataaccgaaa

SEQ ID NO: 261020 - DNA, 1051 bp, Unknown
  Bacterial polypeptide expressing nucleotide sequence isolated from the Sargasso Sea
accattgaagggtgctaggattgccggatgtctgcacatgacaattcagacagccgtattgattgaaaccctcattgagcttggtgccgatattcggtggtcttcatgcaatatattttcgacacaagatcatgccgcagccgcgcttgctgcaaaaggtattcctatatttgcatggaaagatgagagtgaagaagaatactggtggtgtgttgagcaaacaatcaaaggaccaaatggttggacaccaaaccttatacttgacgatgggggtgatttaacaggactcatgcacgaaaagtatcctgaattaatgaaagatataatcggtgtttcggaagaaaccacaaccggtgttcttcgtctttacaatatggaaaaagacggatcactcatgtgtccagcgattaatgtaaatgattctgtcacgaaatcgaaattcgataacttatatggatgtcgtgaatcactcgtggatggaatcaaaagagcaaccgatgtcatggtggcagggaaaatagcaattgttgccggatatggagatgttggaaaaggttctgcacaaagtctcagaggacttggtgccactgtatggattactgaaattgatccaatatgcgcccttcaagccgcaatggaaggataccgagttgtaaccatggacgatgcttgctcaaaagcggacatcttcgtaacagctactggaaattacaatgtaatcgataagcatcatttagagcagatgaaggatcaagcaatcgtttgcaatattggtcacttcgacaatgaaataaatgttgagtcaatgaaggaccttgagtggatcaatatcaagcctcaagtcgaccatattgtctttccggatggaaaaagaatcatcctgcttgctgaaggtcgcttggttaatttaggttgtggtacgggtcatccaagttttgtcatgtctaattcattctgcaatcagactcttgctcaaattgaactattcaaaaacagctcgaattacgataaacaggtctatgtccttccaaaatcacttgagaaaaagtgc

SEQ ID NO: 261021 - DNA, 587 bp, Unknown
  Bacterial polypeptide expressing nucleotide sequence isolated from the Sargasso Sea
tatggccgattataaagtaaaagatatatcagaagcagaatttggtagaaaagaaatttcactagcagaaacagagatgcctggattgatggctttaagaaaagagtataagggaaaaagccctctaaaaggtgcaagaattttaggttgtcttcatatgacaattcaaactgcggttcttattgaaactctcgttgatttaggagccgaggtaagatggtcttcgtgtaatattttttcaactcaggatcatgcagctgctgcaatagcaaaagtgggtatacctgtatttgcatggaaaggcgaaactgaagaggagtattggtggtgtgtaaagcagacaattgaaggaaaaaaagattggaaacctaacatgatacttgatgatggtggagatttaaccgcactaatgcataaagaatacaaggatttattaaaagatatcaaaggactttcagaagaaacaacaactggagtattagctttgaaaaaaatggaagcccaaggaacattgttagttcccgctataaacgtaaatgattctgttacaaaatctaagtttgataatttatatggatgtagagaaa

SEQ ID NO: 261022 - DNA, 376 bp, Unknown
  Bacterial polypeptide expressing nucleotide sequence isolated from the Sargasso Sea
atgaatgattataaagtaaaagacatcaatcaagcagaatttggaagaaaagaaatatcactcgcagagacagagatgccaggcttaatggctttgaggaaagaatataaaggaaaacatcctcttaaaggcgctagaattttaggatgcctccatatgactatccaaacagcagttttaattgaaaccttagttgacttaggtgccgaagtaagatggtcttcttgtaatatattttcaacacaagaccacgcggctgcagccattgcaaaagctggaattcctgtttttgcttggaaaggagaaacagaagaggaatattggtggtgcgtgaagcaaactattaaggaaaaaaagatggaaaccaaacatgatt

SEQ ID NO: 261023 - DNA, 960 bp, Unknown
  Bacterial polypeptide expressing nucleotide sequence isolated from the Sargasso Sea
aatgaagaccgttgaagataatgccctagataaagactataaagttgctgatatcactctcgctgattggggcagaaaagaaatagccatagctgagactgagatgcctgggctaatagcgcttcgtgaggagtatggtgaaactaaacctttagatggtgctcgtataagtgggtgtttgcatatgacaatccaaacagctgtacttatagagactctgactgctttaggagcagaagttcgttggtcttcatgtaatattttttctacacaagaccaagcagctgcagcaattgcttcaactggtgttccagtttttgcttggaaagaggaaagtgaagaagagttttggtggtgtatagataaaactatagaaggccctaatggctggcgcccaaatttaattttagatgatggtggtgatctaacagcggtaatgcatgaaaaataccccgaatttcttaaagatgttagaggccttagcgaagaaacgacaacaggagtgcaccgactgcatgaaatggctcaagataaatctttaatggtcccggccttcaacgtgaacgatagtgttaccaaatcaaaatttgataatctctatggctgtagggaaagtttggttgatggaattaggcgagcaacagatgttatgatggcaggaaaagttgcggtggtgtgtggctttggtgacgttggcaaaggatcatcggccagccttagaaatgcaggctgtcgggttttagtaacagaggttgaccccatttgtgcactgcaggccgccatggaaggttatgaagttgttacgatagaagatgtagcatcccaagccgatatttttgtaaccacaaccgggaatgttgacgttgtaaacatcgagcatatgagggatatgaaagatcgtgctattgtttgtaaacattggcattttgatacagaaattcaggtttcggctctaaaaaa

SEQ ID NO: 261024 - DNA, 307 bp, Unknown
  Bacterial polypeptide expressing nucleotide sequence isolated from the Sargasso Sea
catgagcgattacaaagtaaaagatatcaacctagctgaatttggtagaaaagaaatttccctagcagaaacagagatgccaggattaatggcattgagaaaagaatataaaggaaaaaatcctcttaaaggagcaagaattttaggatgtcttcacatgacaattcaaactgcggttctcattgaaactcttgtagatttaggagcagaagtaagatggtcttcatgtaatattttttcaacgcaagatcatgcagcagcagctattgcaaaagcaggtattcctgtctttgcttggaaaggtgag

SEQ ID NO: 261025 - DNA, 906 bp, Unknown
  Bacterial polypeptide expressing nucleotide sequence isolated from the Sargasso Sea
aaccgggttaatacaccaaccatatccggaaatgttggacaggatacatggtgtttcagaacaaacaacaactggtgttcatcgtttaaaggaacttcttagaaacggagaactaaaaattccagctattaatgttaatgactcagttactaagtcaaaaaatgataataaatatggttgcaggcatagtctaaacgatggcattaaaagagccaccgatatgttgctgtctggaaaaaaagcacttgttattggttatggtgatgttggaaaaggctctgccttaagtttagcccaagaaggaatgatcgttcgtgtagtcgagtctgatccgatatgcgccatgcacgcttgtatggatggctttgaagttgtttcaacatatgaaaatggtgttgtatcaagaaaagatgaggacattaataaaactttacttcaagatacagatttattggttaccactaccggtaatgtaaatgtatgtgatgcaccgatattgagaaatattaaaaatactgccttggtttgtaatattggtcactttgataatgaaattgatactgcatatatgagagatgcatggcattgggaagaaataaaacctcaagttcacagagtttttagagatgcaaccccagacgaagagcctgatctgagcagtaaaaattatattgttttattggcagagggcagattggtaaatcttggaaatgcaaccggtcatcccagtagaattatggatggatcatttgcaaaccaagtccttgctcaaattttcttatatgaacaggcttttgcaaacattaatgatgatgagaaaaagaaagagttaattactgtaaaagttctaccaaaaaaacgtgatgaggaagttgctgaattaatggttcaagggttggaggaacc

SEQ ID NO: 261026 - DNA, 1006 bp, Unknown
  Bacterial polypeptide expressing nucleotide sequence isolated from the Sargasso Sea
acctgtttttgcatgaaaagtgaaacagaaaaagaatattggtgttgtattaaacaaacgattgaaggaaaaaaagattggaaagcaaacatgattctggatgatggaggagatctaacagctttaatgcataaagattacaaagatttattaaaaaatataaaaggagtttccgaagaaactacaacaggagttttagctttaaaaaaaatggagtccaataatgaattattgattccagcaataaatgtaaacgactctgtaactaagtcgaaatttgataacctatatggatgcagggagagtttagttgacggaatcaaaagagcaacagacgtaatgatgtcaggaaaagttgcaatagtcgctggatttggtgacgttggtaaaggtagtgcggcatctctcaggcaagctggtgcaagagtcatggttacagaaacagacccaatctgtgcattacaagcagcaatggaaggatatgaagtagtattgatggacgaggctatcaaggacgctgatattgtagtaaccgctacgggaaacaaagatattgttaccgcagaccatatgagagacatgaaagacagagcaatcttgtgtaacatagggcactttgataacgagatccaagttgatgcattaaaaaattacaaatgggacgaaattaaaccgcaagtacatgaaatagaattaccaagcaaaaaaagaatcatcttattagcagaaggcagacttgtaaatttaggttgtgctactgggcacccaagttttgtaatgagcgcctcctttaccaatcaggtgattgctcaaattgagctctggaataattctaataaatatgaaaaaaaagtttatgttttaccaaagcatctagatgaaaaagttgcaacgttacatttaggtaaagtaggagcaaaattaactaaaatgtcaaaagaacaagcagactatattagcgttaaacaatcaggaccgtttaaaccagatacttatcgctactaaa

SEQ ID NO: 261027 - DNA, 499 bp, Unknown
  Bacterial polypeptide expressing nucleotide sequence isolated from the Sargasso Sea
aatgctttcatcgcttaaagatggtgctgtagtttgtaatattggtcattttgatacagaaatagatacgaaatatatgcaggatgaatggtattgggaagaagtaaaacctcaagttcatagaatatttagagattgttcacccgatcaggagcctgacttatcgagcaagaattatttgatacttttagctgaagggaggttagtgaatcttggaaatgcaacaggtcatcctagtagaattatggatggttcatttgcaaatcaagttcttgcccaaatgcatctttactcagctggatttgcaaatgtaaatgatgaagataaaaagaaagagttaattcaagtagaagtccttcctaaaaagcttgatgaggaggttgcctcccttatggttcaaggctttggtggtgttgttacacagcttactgaagaacaagctaattatattaatgtccctcaagatggtcctttcaaagaagattcttataagtactag

SEQ ID NO: 261028 - DNA, 809 bp, Unknown
  Bacterial polypeptide expressing nucleotide sequence isolated from the Sargasso Sea
tgaaagaatgaaaaatggctcgttaacgcttcctgctattaatgttaatgattctgttactaaatccaagtttgacaataaatatggttgcaaggaaagtgcagttgatgctgtaagaagagcaactgatattatgcttgcaggtaagaaggttgttgtctgtgggtatggtgatgtcggaaaaggaactgctgcttcatttaggggtgctggatctattgtcacagttacagaaatagatccgatttgtgctcttcaagcctcaatggatggctacgaagttaaaaagttaatgaatgtagtcagcaaggctgatattgtagttacagcaactggtaacaaggatatagttaattctgagtcatttaagatgatgaaggataaaactattgtatgtaatataggtcattttgataatgaaattgacatgaactggttagagactaatttttctgatcataaaactaatattaagcctcaagttgactcatatagaatatcaaaggataaggaaattataattcttgctgagggaagacttgttaaccttggttgtgcgactggtcatccaagttttgttatgagtaactcttttacaaaccaggttctagctcaaatggagctctggaataattcagacaagtacgaaaataaagtatatatgctacctaaaaatttagatgaattggttgctaaacttcatttagaaaagttgggtgtggaacttgaagaattatcttcagatcaagcgcaatatataggagtccaaaagagtgggccttttaaaccagaatattataggtattaag

SEQ ID NO: 261029 - DNA, 580 bp, Unknown
  Bacterial polypeptide expressing nucleotide sequence isolated from the Sargasso Sea
tgttgtttctgcttacgaaaatggaaatgttggcaaagatggtaagaatttagataaaaaactattagaaaaatacgatttagtcgtaactacaacaggcaatatcaatgttttagatagacatatgctcgatgctctaaaatctggctgtgttgtttgcaatataggacattttgatagtgaaatagatgttaagtatttaaagaactatgaatggaaagaaattaaacctggcgtccataaaataataagaaacaaagatgaatatataattcttctgggtgaaggcaggctagttaatttagctttagcaacaggacatccaagtagagtcatggatggatccttctgtaatcaagtgcttgcacaaattgcattatttgaagatggttttgctgataaatctgatgatcagaaagaattgtatgtaaaagttttgccaaagaaactagatgaagaagtagcaagtttaatggttaaaggttttggtggaactctaacaaaactaacaaaagagcaagaagaatatatctccgtaagtgaagaaggtccatttaaggatgattcttacacctattag

SEQ ID NO: 261030 - DNA, 754 bp, Unknown
  Bacterial polypeptide expressing nucleotide sequence isolated from the Sargasso Sea
ttacgattcggtcacaaaatctaagttcgacaataagtacggctgccgcgaaagcctagtcgacggggttcggcgggcgacggacgtgatgatggctggcaaggttgcggttgtcgccggtttcggcgatgtcggcaagggatccgccgaaagcctccgcagtgccgggtgccgggtgctggtcactgaagcggacccgatttgcgcccttcaagcggccatggaagggttcgaagtggtgactatgaatgacgccgcaccgaggggcgatatcttcgtcaccgcgaccggcaatattgacgtcatcaccctcgaccatatgcgtgcgatgaaggaccgagcaatcgtctgtaacatcggtcactttgactcggaaattcaggttgaagccctgcgcaattacaagtgggaaaacgttaaaccgcaggtcgacgaaattgagtttccggacggaaagcggctgattctattggcggagggccgcctcgtgaatctcggctgtgccaccggccaccccagctttgtgatgagcgcttctttcgccaaccaggtgctggcccagatcgagctgtggcagaacgccagcgactacgaccgcaaggtctacgtccttcccaaacacctggacgagaaagtcgctgctctgcacctcgccaaactcggggcgcaactgacggagctctcggccgaacaggcggcctatatcggcatcggacaagacggtccgtttaagggagagcattaccgatactga

SEQ ID NO: 261031 - DNA, 537 bp, Unknown
  Bacterial polypeptide expressing nucleotide sequence isolated from the Sargasso Sea
aagagctattggctacgaccgacgtactagtaacttgtacagggaacgccaacgtttgtgattctgcgatgctaagcacgatcaaatccggcgctatcgtttgtaacataggtcacttcgataacgagatcgacactgaatacatgagagagaattggcaatgggaaaccgttaaagaccaggttcaccaaatctatcgctcggataaccgcgatgactatttgattttgttatcagagggcagactagtgaatctaggaaatgcgatggggcacccatcccgaattatggatggttccttcgcaaatcaagttttggctcaaatgcacttatatgagcaaaagtgggccgaccaacccgaaaaccaacgatctcctatttcagttgaagtcttacctaaaaaactggacgaagaggtagcgcagcttatggtggaaggatttggggggctcattacgaaactgacagcagatcaagctgactatatcggagtgacaacagaaggccccttcaaaccagaagcttataagtattaat

SEQ ID NO: 261032 - DNA, 535 bp, Unknown
  Bacterial polypeptide expressing nucleotide sequence isolated from the Sargasso Sea
aatggaaggttttaaggtcgttactatggaaaaagtatgcactgaagctgatatatttgtaactgccaccggaaacttttcggttattgattatactcatatgagtaaaatgaaagatcaggcgattgtctgcaatataggtcatttcgataatgaaattgatgttgcatcattgtctaaatgtaagtggaccaacataaaacctcaggtagatcatgttgaatttgaaaatggtaacaagattatcttacttgctgaaggtaggctaataaatttaggttgcgcgacaggtcacccaagttttgtaatgtctaattcatttaccaatcaagttctagctcaaattgagctttgggaaaatcattcctcctatgagaataaagtttatgttttacctaagaaattagatgaggaagtcgcaagacttcatcttgaaaaagtaggtgcagagttaaccgaactctctgaggagcaagcgaaatacattggtgttgatagcaatggaccttataaaaatgatacttacaggtactag

SEQ ID NO: 261033 - DNA, 401 bp, Unknown
  Bacterial polypeptide expressing nucleotide sequence isolated from the Sargasso Sea
tattggtcacttcgacaatgagattaatgttgagtcaatgaaggaccttgagtggatcaatatcaagccccaagttgaccatattgtctttccggatgggaaaagaattatcctgcttgctgaaggtcgcttggttaatttagggtgtggcacgggtcatccaagttttgtcatgtctaattcattctgcaatcagactcttgctcaaattgaactattcaaaaacagctcgaattacgataaacaggtctatgtccttccaaaatcacttgatgaaaaagttgcaaaacttcatctggacaagatcggagctaaattaacaaaactaaccactgaacaggctgaatatataggtgttaaagagtcaggaccctacaaacctgaacattaccgatactgat

SEQ ID NO: 261034 - DNA, 400 bp, Unknown
  Bacterial polypeptide expressing nucleotide sequence isolated from the Sargasso Sea
tggagttgcgttggcaaatgctggccattttgatgtagaaataaatttagaagcacttaaaaatgaaagcacaaaagtagagagagtaagagaacatgtagagagctataaatataaagacaaagaaattttagttctagctgaaggaagattggtcaaccttgcagcagctaccggacacccagcttcagttatggatatgtctttcgcaaatcaagctttggcatcagaatggataaaagataatcataaaaaactagaatcaaaggtatacacattacctaaggaagtagatattaaaatagctgctacaaaattaagccttatgggtggcgagttagagatattatctgatgagcaaattaaatatctagattcctgggagcatggcacaagctga

SEQ ID NO: 261035 - DNA, 769 bp, Unknown
  Bacterial polypeptide expressing nucleotide sequence isolated from the Sargasso Sea
atggaagattataaagtaaaagacatagctcaagctgaatttggtaggaaagaaatatcaatagctgaaagtgaaatgccaggtttaatggctttaagagaagagtattctaaaaagaaaccattaaagggtgcaagaattataggatgtcttcatatgacaattcaaacggctgtactcatcgaaactttagttgcactaggagctgaagttcgttggtcttcttgtaatattttttcaactcaagatcatgcagccgctgcaattgcaaaggccggtatccctgtttatgcttggaaaggcgaaaccgaagaagaatatttatggtgcattaaacaaactatagttggaaaaccagattggaagccaaacatgttattagatgatggtggagatttaacagctatcatgcacaaagaatatcaggatttaatgaaagatattaaaggtgtttcagaagaaactaccactggaattaaagcactaaataagatggaaaaagataaatctcttttagtaccagcaataaacgtaaatgactctgttacaaaatcaaaatttgataatttatatggatgtagggaaagtttagtagacgggataagaagagctactgatgttatgatgtctggtaaaatagcaattgttgctggttttggagatgttggaaaaggaagtgctgcatctttaaggcaaagtggtgctagagttcttgttacagaagcagatccaatttgtgctctcccagccgcaatggaaggatatgagg

SEQ ID NO: 261036 - DNA, 340 bp, Unknown
  Bacterial polypeptide expressing nucleotide sequence isolated from the Sargasso Sea
aagtaaacctcaagtgcatgaaatagagctgccaagtggcaaaagaattattcttttagctgaaggaagattagttaatcttggttgtgcaacaggacatccaagttttgtaatgagcgcatcatttaccaatcaagttattgctcaaatagaactttggcataatcataaaaattatgaaaataaagtttacgtacttccaaaacatttagatgaaaaagtagcaactctgcatttaaaaaaggttggggcaaaactaacaaaattatcaaaagagcaagcagattatataagcgttgaaacagaaggtcctttcaaaccagatgcctatcgctattaa

SEQ ID NO: 261037 - DNA, 484 bp, Unknown
  Bacterial polypeptide expressing nucleotide sequence isolated from the Sargasso Sea
atggaagattataaagtaaaagatttatcgcaagcagaatttggacgaaaagaaatttcaattgctgaaagtgaaatgccaggtcttatggctttaagggaagagtacgctggaaaatctcctttaaagggtgcaaaaattataggttgtttgcatatgacaatacaaacagcagtattaattgaaaccttagtagatttaggtgcagaagtaagatggtcatcttgtaacattttttctactcaggaccatgcagcagcagcaatagcaaaagctggtattccagtttatgcgtggaagggagaaacagaggaggaatatgtttggtgcataaaacaaaccattgaaggtaagaaaagttggaaacctaatatgcttttggatgatggtggtgatttaacagcaatgatgcacaacgaatataaagatttattaaaagatgttaaagggagtttcggaagagacaactacagggataaaagct

SEQ ID NO: 261038 - DNA, 914 bp, Unknown
  Bacterial polypeptide expressing nucleotide sequence isolated from the Sargasso Sea
aatggaaacattaaccaaaattaaaagaattgttgaagatatagattataaagtagctgatataagtctttctgaagatggtcgtaaagatctagatattgcagaaaaagaaatgcccggtctgatggcaactagaaaaaagtatggagcaaacaagccattgtctgggaaaaagcttactggttcgttgcatatgactgttgagacagcggtgttaattgaaactcttgttgaattgggcgctgaagttcgttgggcaagttgcaatattttttcaacacaagatcatgcggctgcttgtatagctgaaacggacgtacctgtttttgcatggaaaggggaaagtttagaggaatattggtggtgtacactacaagcgcttacttttaatggaaatgaaggtcctgatctaattgttgatgatggtggagatgcaacattactaattcataagggatttgagttagaagagtattatgcaaaaaataatactatacctaagatcacaactaaaatcaaagaagagcagattattgagaacttgcttcgcgaagtattagaaaaagatccaatgcattggcataaagtagcaaaaaacattattggagtttcggaagaaacaactacaggtgtgcaccgactagaacaaatgtctaaagatcaaacattgttgtttcctgcttataatgtcaatgattcagttacgaagtctaagtttgataatgtatatggttgtagagagtctttagcagatggtttaaaacgttcaatggatgttatggtcgcaggaaaaactgtattggtttgtggttatggagatgttggaagaggatgcgtccaatctatgagaggatatggagcaagagttttagttactgaaattgaccctatatgtgctctttcagctgcaatgg

SEQ ID NO: 261039 - DNA, 289 bp, Unknown
  Bacterial polypeptide expressing nucleotide sequence isolated from the Sargasso Sea
ttgttagctgaaggtagacttgtaaatcttggatgtgctacaggtcacccaagttttgtaatgagtgcatcttttacaaaccaagttacagcacaaatagagttatggaataactcagataaatatgagaaaaaagtttatgtactaccaaaacatctagatgagaaagttgcaagactacaccttgaaaaagttggtgcaaaattaacaccactatcaaaagatcaagctgattatataagtgttaaaactgaaggaccttacaagccagacgcttacagatattaaa

SEQ ID NO: 261040 - DNA, 182 bp, Unknown
  Bacterial polypeptide expressing nucleotide sequence isolated from the Sargasso Sea
gaataattctgaaaagtatgaaaagaaagtttatgtattaccaaaacatctagatgaaaaagtagcaagattacacctagaaaaagttggagcgaaactaactaaaatgtctaaagatcaggcggattatattagcgtaacacctgatggaccttacaaaccagatgcctatcgctactaaa

SEQ ID NO: 261041 - DNA, 990 bp, Unknown
  Bacterial polypeptide expressing nucleotide sequence isolated from the Sargasso Sea
acccttaatagatctgggtgcagaaattagatggtcaggttgcaatattttctccactcaagatcatgctgctgcagcaatggcagagagaggtatacctgtttttgcttggaaaggtcaaactgacgaagaattcgattggtgcatagaacaaactattcttaaagatggtgagccatgggatgcaaatatgattttagatgatggtggtgatttaactcatatggttcacacaaagtatcctgagatgctagaaacaattcatggtatctctgaagaaacaactacaggcgtttataggctgaaaaagatgttagagaaaggagagttaaaggttcctgcaataaatgtaaacgactccgtaacaaaatcgaaaaatgacaataaatatggttgcaggcatagccttaatgatggaataaagagagctacagatatgcttttatccggaaagaaagcactagtaattgggtacggtgatgtaggtaaaggctcagcagctagcttagctcaggaaggaatggttgtaagagtaactgaatctgaccccatatgcgctatgcaggcatgcatggatggattctcacttgtttcatgttacaaggatggaaatgttactggaaaagaagatgatattaataaaactcttcttcaagatactgatatcttagttacaacaactggaaatgttaatgtttgcgattcagcaattcttaattctcttaaaaatggagcagtagtttgtaatattggtcactttgatactgaaatagatactgtttatatgaaagacgtatggtattgggaggagataaagcctcaggttcatcgagtctttagggactgctcacctgatcaggagcctgatctcacgagtaaaaactatatactcttgctagctgaaggaagacttgtaaatctaggaaatgctactgggcatccaagcaggattatggatggctcctttgcccatcaagtgcttgctcaaat

SEQ ID NO: 261042 - DNA, 400 bp, Unknown
  Bacterial polypeptide expressing nucleotide sequence isolated from the Sargasso Sea
atgactgattataaagtaaaagatattaacgaagcagaatttggaagaaaagaaatctccttagcagagactgaaatgccaggattaatggcagtaagagccgagtacaagggcaaaaaccctcttaaaggtgcaagaattttgggttgtcttcatatgacaattcaaacggcagttttaattgaaactttggtagacttgggcgcagaatgtagatggtcctcatgcaatatattttcaacacaagatcatgcagcagcagcaattgcaaaagctggtataccagtatttgcatggaagggtgaaacagaggaagaatattggtggtgtgttaaacaaactatagagggtaaaaaagattggatccctaacatgattttagatgatggtggagatctta

SEQ ID NO: 261043 - DNA, 1027 bp, Unknown
  Bacterial polypeptide expressing nucleotide sequence isolated from the Sargasso Sea
aaaaccacttaaagatgctagaattattggttgtctgcacatgacaatccagacagctgtattaattgaaacacttgttgaattaggagcagaagtaagatggtcatcttgtaatattttttcaactcaagatcatgcggctgctgctattgctaaagcaggtattcctgtttatgcatggaaaggtgagacggaagaagaatacttgtggtgcatcaagcagactattgttggaaaatctgattggaaaccaaatatgttgttagatgatggaggtgacttaacagccattatgcataacgaatatagggaattaatgaaagatgttaaaggtgtttcagaggaaacaaccactggaattaaagcacttaaaaaaatggaaaaagataaatctcttttagtgccagcaattaatgtcaacgattctgtaaccaaatcaaaatttgataacctatatggttgtagagaaagtttagtagatggcataagacgagcaactgatgttatgatgtcaggtaaaattgcaattgtagcaggctttggagatgttggaaaaggaagtgctgcatctttaagacaaagtggagcaagagtattagtcactgaagcagatccaatttgtgctcttcaagctgcaatggagggttacgaggttgttttaatggaagaagctataagtagagcagatatagttgtaaccgcaacaggaaataaagatattgtaactgcagaccacatgagagacatgaaagatagagcaatattatgtaacattggtcactttgacaatgaaatacaggttgaagctttgaaaaattataagtggactgaagtaaaaccccaagttcacgaaattgaattacctagtggtaaaagaattattttattagcagagggaagattggtaaatttaggttgtgcaacaggtcatcctagttttgttatgagtgcatcttttactaatcaggtaattgcacaaatagaactttggcataatcacaaaaattatgacaataaagtttatgtg

SEQ ID NO: 261044 - DNA, 828 bp, Unknown
  Bacterial polypeptide expressing nucleotide sequence isolated from the Sargasso Sea
ccaggccgccttcggccgcaaggagctcgacatcgccgagaccgaaatgcccggtctgatggcgctgcgtgagaagtacggcacggagaagccgctgaagggcgcccgcatcgccggctctctgcacatgacgatccagaccgcttgtctgatcgagaccctggtggagctgggcgccgaggtgcgctgggcgtcctgcaacatcttctccacccaggatcacgccgctgccgccattgcagcccagaacattccagtcttcgccgtcaagggtgaaacccttgaggagtactgggagtacacccaccgcatcctcgagtggggcgacggtggttcccccaacatgatcctggacgacggtggcgatgccaccggcctggtgatgctcggcagcaaggctgagcaggacatcaccgttctggacaatccctccaacgaagaggagaccttcctgttcgcgtcgatcaagaagaagctggcccaggatcccaccttctattcgcgcaccaaagccgagattcagggcgtcacggaagaaaccaccacgggtgtggctcgcctttacaagatgcagaagagcggtgaactgcccttccccgccatcaacgtcaacgactccgtcaccaagagcaagttcgacaacctctacggctgccgcgagtcgctggtggacagcatcaagcgagccaccgatgtgatggtggccggcaagcaggccctggtgatgggctacggcgatgtgggtaagggctcagcccagtccttacgcggtcttggcgccaccgtctgcatcgctgaagtggatcccatctgtgccctgcaggccgc

SEQ ID NO: 261045 - DNA, 536 bp, Unknown
  Bacterial polypeptide expressing nucleotide sequence isolated from the Sargasso Sea
aactaccactggtaacgtaaatgtttgtgattctgcaatgataagcactttaaaaaataccgcagttgtatgtaacattggtcattttgataatgaaattgatactgcttacatgagagaaaactattactgggatgaaattaagccccaggttcatagagtttttagagatacagctccagatggaactcctgatttgtcgagcaaaaactatattattttgctagctgaaggaagattggtaaatcttggaaatgcaacaggacatcctagtagaattatggatggatcttttgccaatcaagtccttgcacaaattcatttatataaacaaggttttgcaaatataaacgatgctgacaaaaaagcagaaatgctaaccgttgaagttttgccgaagaaacttgatgaagaagttgctagccttatggttgaaggttttggaggaacagtaacccagcttacaaaagaacaagctgattatattaatgttccacaagaggggccttttaaagaggaaacatataaatactaaa

SEQ ID NO: 261046 - DNA, 340 bp, Unknown
  Bacterial polypeptide expressing nucleotide sequence isolated from the Sargasso Sea
catggaagattataaagtaaaagacatagctcaagctgaatttggtaggaaagaaatatcaatagctgaaagtgaaatgccaggtttaatggctttaagagaagagtattctaaagaaaaacctttgaagggtgcaagaattataggatgtcttcatatgacaattcaaacggctgtactaatagaaactttagtagcattaggtgctgaagttcgttggtcttcttgtaatattttttcaacacaagatcatgctgcagctgcaattgcaaaagctggcattccagtttacgcttggaaaggtgaaacagaagaagaatatttgtggtgtataaacaaa

SEQ ID NO: 261047 - DNA, 249 bp, Unknown
  Bacterial polypeptide expressing nucleotide sequence isolated from the Sargasso Sea
aatgagtaaagactacaaagtaaaagacatagaattagctgaatttggcagacaagaaattttgcttgcgcaagatgagatgcctgccttaatgcagttaagagacaattaccttgatgaacagccgctcaaaggtgccaaaatcatgggttgcatccatatgacaatacaaacagctgtattgattgaaactctcattgatttaggtgctgaagtcagatggtcatcatgtaacatcttctcaacaca

SEQ ID NO: 261048 - DNA, 535 bp, Unknown
  Bacterial polypeptide expressing nucleotide sequence isolated from the Sargasso Sea
atgaaagcctacgaagttgttgttatggatgaggctatcaaagatgctgatatagttgtaactgcaacaggaaacaaagatatagttacagcggatcatatgagaaacatgaaagacagagcaatactttgtaacattggccattttgataacgaaattcaagttgaggcgttaaaaaattataagtgggatgagataaaacctcaagttcacgaaattgaattacctagtaaaaaaagaattattcttttagctgaaggcagattggtgaacttgggatgtgctacagggcaccctagttttgtgatgagcgcatcatttacaaatcaagtaattgctcaaattgaattatggaataattcagataaatatgagaaaaaagtttatgttcttcctaaacatcttgatgaaaaagttgcaatgcttcatttagaaaaagtgggagctaaattaacaaaaatgtcaaaagagcaagccgattatataagcgttaaaccatcaggaccatttaaaccagatacttaccgctactaaa

SEQ ID NO: 261049 - DNA, 379 bp, Unknown
  Bacterial polypeptide expressing nucleotide sequence isolated from the Sargasso Sea
aatacaaacagaagctcttcaaaattacaagtctgatgagattaaaccacaagtaagagaggtagaatttccagatgggaagaaaatattattactatcagagggaagacttgttaacctaggaaatgccactggccatccaagttttgttatgagtgcatcatttaccaatcaggtcttagcgcaacttgaactttggaaaaattctaaaaattatgaaaataaagtttatgttttaccaaaacatttagatgaaaaagttgcatcattacacttaaagaaggttggagcaaaacttacagaattaactgataaacaagcagaatatattggtgttagtaagcaaggaccatttaaagataatacttacagatattag

SEQ ID NO: 261050 - DNA, 786 bp, Unknown
  Bacterial polypeptide expressing nucleotide sequence isolated from the Sargasso Sea
ttcggaaaggaaaagcctctgaaaggcgcaagaattgcaggctgtcttcatatgacgattcaaacagcagtactcattgaaacattgattgaacttggtgctgatatcaggtggtcttcttgtaatatcttctcaacacaagatcatgctgcagccgctctagcggccaaaggtattccaatatttgcatggaaggatgagagcgaagaagaatactggtggtgcgtagaaaagacaatcaacggtccaggcggttggacaccaaatcttatacttgatgacggtggagatttaaccggtctcatgcacgaaaaatatcctgaattgatgaaagacatcatcggtgtctcagaagagacaacaactggggtattgcgtctctataacatggaaaaagatggaacgcttatgtgtcctgcgatcaatgtcaatgactcggtgacaaaatcaaagttcgataatctctatgggtgtcgcgaatcactcgtagatgggatcaagagagcgaccgatgtgatggtggctggaaaaatagctgtcgttgctggatacggcgatgttggaaaaggttcagcgcagagtcttagaggccttggcgcaacagtttggataactgaaattgatccaatatgtgcacttcaagctgccatggaaggatatcgagttgtgacaatggatgatgcttgctctcaagcagacatctttgttactgccactggtaattataatgttatcgataaacatcacttagagcagatgaaggatcaagcaattgtctgcaatatt

SEQ ID NO: 261051 - DNA, 464 bp, Unknown
  Bacterial polypeptide expressing nucleotide sequence isolated from the Sargasso Sea
tgctgtggttgtagggcctaatgggactgttgacaaccccgagggagttcctgttttcgcctggaaaggcgaaactctggaggagtattggtgggcgacggaacagctctttcattggcctgatggagaaggtccaaatttaattctagatgacgggggcgatgccaccatgatggtccataagggccttgaatatcttgagagtggtgatattcccactgctggaagtgaagactctgaagagtggggtgtctttcttaacaggcttcaaacgatccaaggagagggtgctatagattgggccgctatctcatcaggaataatgggagtgtctgaggagacgacaacaggagtccatcgcctctatcagatgcaggatgaagggtcattgctatttcctgcaataaacgtaaatgatgcagtaactaaatctaagtttgataatctttatggttgtaggcact

SEQ ID NO: 261052 - DNA, 763 bp, Unknown
  Bacterial polypeptide expressing nucleotide sequence isolated from the Sargasso Sea
cgattatgtcatgactctgtaacaaaatccaaatttgataatttgtatggctgtagagaaagtttggttgatggaattaaaagagcaactgatgtaatgatgtcaggcaaggttgcaatagtagctggatttggagatgttggaaaaggaagtgcagcttctttaaggcaagcaggcgctagagttatggttacagaaactgatcctatttgcgcattacaagcagcgatggaaggttatgaagttgtattaatggatgaagctattaagctagctgatatcgtagtaaccgccactggtaataaagatattgttacagcagatcatatgagaaatatgaaagacagagccatattatgtaacataggtcatttcgataatgaaattcaagttgaagctttaaaaaattataaatgggacgaagttaaacctcaggttcacgaaatagaactaccaagcaaaaaaagaattatattattggcggaaggaagacttgtaaatttaggttgtgcgacaggtcacccaagttttgtaatgagcgcttcttttactaaccaagtaattgctcaaattgaattatggaataattctgataaatatgaaaagaaagtttatgttttaccaaaacatttagatgaaaaagtagctaaacttcatttagaaaaagttggagcaaaattaactaaaatgtcaaaagaacaagcagactacattagcgttaaaccatcagggccatttaaaccagatacttatcgctactaga

SEQ ID NO: 261053 - DNA, 829 bp, Unknown
  Bacterial polypeptide expressing nucleotide sequence isolated from the Sargasso Sea
gaaacaacgacgggtgttttggctttgaaaaaaatggaagcaaacaaaaaattaatgataccagctattaatgtaaatgactctgttacaaaatcaaaatttgacaatctttacgggtgcagagaaagcttggtagatgggatcaaaagagcaacagatgtaatgatgtctggcaaagtcgcaatagttgctggatttggtgatgtaggtaaaggaagcgctgcatctctaaaacaggcgggcgcaagagtaatgataaccgaaacagatcctatatgtgctttgcaggctgcaatggagggatacgaggtagtcttaatggatgaagcaattaaaaaagcagatattgtagtaacagcaacagggaataaagatattgttaccgcggatcacatgagagaaatgaaggatagagcaatattatgtaatattggacactttgataatgaaattcaagttgatgctttaaaaaactataagtgggatgaaataaaacctcaggtgcatgaaatagaattaccaagcaaaaaaagaatcattttgctagctgaaggcaggctagtaaatctcggttgtgcaacaggtcaccctagttttgttatgagcgcgtcttttactaatcaagtaattgcacaaattgagttatggaataattcaaataaatacgaaaaaaaagtgtatgtgttaccaaaacatttggacgaaaaggttgcaatgcttcatcttggaaaagttggagcaaaacttacaaaaatgtcaaaggaacaagcagactacattagcgttaaacaatcaggaccttttaaaccagatacttatcgctactaaa

SEQ ID NO: 261054 - DNA, 478 bp, Unknown
  Bacterial polypeptide expressing nucleotide sequence isolated from the Sargasso Sea
atggaagattataaagtaagagatttatcacaagcggaatttggacgaaaagaaatttcaattgctgaaagtgaaatgccaggacttatggctttaagggaggagtatgctggaaaatctcctttaaaaggtgcaaaaattataggttgtttgcatatgacaatacaaacagcagtattaattgaaaccttagtagatttaggtgcagaagtaagatggtcatcttgtaacattttttccactcaagaccatgcagcagcagcaatagcaaaagctggtattccagtttatgcgtggaagggagaaacagaggaggaatatgtttggtgcataaaacaaaccattgaaggcaagaaaagttggaaacctaatatgcttttagatgatggtggggatttaacagcaatgatgcacaatgaatataaagatttattaaaagatgttaaaggagtttcggaagagacaactacagggataa

SEQ ID NO: 261055 - DNA, 187 bp, Unknown
  Bacterial polypeptide expressing nucleotide sequence isolated from the Sargasso Sea
atgaccgattataaagtaaaagatattaatcttgcagaatttggaagaaaagaaatctcattggctgaaactgaaatgccaggattaatggcattgagaaaagagtattcagggaaatcgcctttaaaaggagcaaaaattttaggatgtctgcatatgacaattcaaactgcagttttaatagaaa

SEQ ID NO: 261056 - DNA, 904 bp, Unknown
  Bacterial polypeptide expressing nucleotide sequence isolated from the Sargasso Sea
atagcggagtcagaaatgccaggactaatggcattaagaaaagaatttaaaggaaaaaaacctttgaagggagcaaacattttaggttgtcttcatatgacaattcaaacagctgttttaatcgaaacactcgttgaacttggtgcaagtgtgagatggtcttcttgtaatattttttcaacacaagatcatgctgctgcagcaattgcaaaagcaggaataccagtatacgcatggaaaggcgaaaccgaaaaagaatattggtggtgtattaaacaaactatcgaaggtgataaaaattggaaaccaaatatgattttagacgatggtggtgacttaactggactaatgcataaagattacaaagatcttcttaagaatattaagggagtatctgaagaaactacaactggggttctagcattaaaaaaaatggagtctaataaaacattgttagtccccgccataaatgtcaacgactcagtaacaaaatctaaatttgataatttgtatggttgccgggaaagtttagtggatggaattaaaagagcaacagatgtaatgatgtctggaaaagttgctatagttgctggttttggtgatgttggtaaaggaagtgcagcatctcttagacaatcaggcgcaagggttatggttacagaaactgatcctatttgtgcacttcaagctgcaatggaaggatatgaggttgtcttaatggatgaggctataaaggatgcagacatagttgtaactgctacaggcaacaaagatattgtaactgctgaccatatgagagaaatgaaagacagagcaatattatgtaatattggacacttcgataatgagatacaagttgatgctttaaagaattacaaatggactgaaataaaaccacaagtac

SEQ ID NO: 261057 - DNA, 745 bp, Unknown
  Bacterial polypeptide expressing nucleotide sequence isolated from the Sargasso Sea
gtaactaaatctaaatttgataatctttatggttgtaaagaaagcttagttgatggcattagaagaggaactgatgttatgatggctggtaaaatagctgttgtagctggttatggagatgtcgggaaaggctcagctgcaagcctaagaggagcaggtgccagagtatgtgttactgaagtagaccctataaacgccttacaagctgcaatggaaggttttgaggttgtaacaatggatgatgcttgttcatatggagatatatttgtaactgcaacaggcaatgtagatatcataactttagatcacatgagaaaaatgcgagacagagcaatagtatgcaatattggccatttcgataatgaaatacaaactgaagctctaagaaattataaaactgaagaaattaaacctcaagttgacgaaatagagtttcctgatggtaaaaaattaattctactttcacaaggaaggctagttaatcttggcaatgcaacaggacatcctagtttcgttatgagtgcatcgtttacaaatcaagttatggcacaactagaactatggaataactataaaaattatgaaaataaagtttacgttttacctaaacatcttgatgaaaaggtagcgatgttgcatctaaaaaaagtaggtgcaaaacttacagaattatcaaacaaacaagctgaatacataggggtaaaaaaagaaggtccttttaaggacgacacttatagatattaaa

SEQ ID NO: 261058 - DNA, 464 bp, Unknown
  Bacterial polypeptide expressing nucleotide sequence isolated from the Sargasso Sea
taacaaagatattgttactgcagaccatatgagagatatgaaggatagagctatcttatgtaatattggtcactttgataatgaaatacaagttgaggcattaagaaactacaagtggactgaagtaaaacctcaagtgcatgaaatagagttacctagtagcaaaagaattattcttttagctgaagggagattagttaatcttggttgtgcaactggacacccaagttttgtaatgagcgcatcatttactaatcaagttattgctcaaatagaactttggcataaccataaaaattatgaaaataaagtttacgtacttccaaaacatttagatgaaaaagtagcaactttgcatttaaaaaaagttggggcaaaactaacaaaattatcaaaagaacaagcagattatataagcgttggaacagaaggtcctttcaaaccagatgcctatcgctattaaa

SEQ ID NO: 261059 - DNA, 348 bp, Unknown
  Bacterial polypeptide expressing nucleotide sequence isolated from the Sargasso Sea
tatggaaaacgattataaagttgctgatataaaacttgctgaatttggaaggagagaaatatcacttgctgaaaatgaaatgcctgcattaatggctttaagagataaatacagagctgagcaaccacttgctggagccaaaattatgggctgtattcatatgacaattcaaactgcagttttaatggaaacattactcgatctcggagcagaattaagatggtcatcttgtaatatattttcaacacaggatcatgcagcagcagcaatggctgcaaatggagttcctgtatttgcttggaaaggtgaaactgaagaggagtacgagtggtgtattgacaaactatt

SEQ ID NO: 261060 - DNA, 367 bp, Unknown
  Bacterial polypeptide expressing nucleotide sequence isolated from the Sargasso Sea
atgacagttgactataaagttaaggatatttcattaagtgaatggggtagaaaagagatagctattgcagagacagaaatgccaggtttaatggctattagagaagaatacggtaacacaaaaccgcttgaaggagcaagaatagttggttgtttacacatgactattcaaacagcagttttaattgaaactttagttcatttaggtgcatctgtaagatggagttcatgtaatattttttctacacaagatcaggctgccgcagcaatagcagcaaaaggaattccagtttttgcctggaaaggaatgagtgatgatgaattttggtggtgtattgaacaaaccttatcgggacctgaaggatgaa

SEQ ID NO: 261061 - DNA, 421 bp, Unknown
  Bacterial polypeptide expressing nucleotide sequence isolated from the Sargasso Sea
gtgcataggttaaaagagatgctagaaaaaggcgaactaaaaattcctgctattaatgtaaatgactcagttacaaaagcaaaaaatgataataaatatggatgtaggcatagtcttaatgatgctctcaaaagaggaaccgatatgttgctttctggtaagaaaggattagtaattggttatggagatgttggtaaaggttcggctgcaagtttggctcaagaaggcatgatagtaagtgttgttgagtcagatccaatttgtgctatgcaggcttgcatggatggatttgcggttgtttcatgttacaaaaatggtgtagttacaagagatcctaaggatattaatatggatgtcatgggtgatacggatctaatagtaactacccctggtaatgtaaatgtttgtgattctgcaatga

SEQ ID NO: 261062 - DNA, 621 bp, Unknown
  Bacterial polypeptide expressing nucleotide sequence isolated from the Sargasso Sea
tttgggacggagaaaaattggtatcgcggaaggagaaatgccgggtttgatggcgttgagaaaggaatacggaaaggagaagcctttagccggggcaaggattacggggtcattgcacatgacagtcgaaaccgcagttttgatcgagactttagtggaattgggggctgaagtacgctggtcttcctgtaatattttttctactcaggatgaagctgctgcggccattgctgcagctggaattccggtattcgcatggaaaggagagaccgaggaagaatactggtggtgtatcgaacaaaccctcaaatgggatgggaatgagggtacaaacttgcttcttgatgatgggggagatttgacctggtatgttcacgacaaatatccgcaattgcttgaaaatattatggggctttcagaagaaaccactactggggtccaccgtcttcatcagatggctcggaagaatgagctcaaggttcctgcctacaatgtgaatgattcggtgaccaagagtaagttcgacaatctttacggatgccgtgaatccctcgtagacggaatcaaacgggcaacagacgtgatgattgcaggcaaattagctgtggttgcaggatatgg

SEQ ID NO: 261063 - DNA, 448 bp, Unknown
  Bacterial polypeptide expressing nucleotide sequence isolated from the Sargasso Sea
tatgaaagattttaatgactttaaagtaaaagatattctcctcgctgactttggtcggcaagagatacttttagctcaagatgagatgcctgctctaatgcagttaagagaaaaatatagacatgaacagccattatcaggggcgaagataatggggtgcattcatatgacagttcaaactgctgttttaatcgagaccttaatagatttaggtgcagaagtgagatggtcttcatgtaatattttttcgactcaagaccatgctgccgctgcaattgccgccaaaggtattcctgttttcgcttggaaaggagaaactgaagaagaatatgaatggtgtttagatcaaaccatcaataaagacggtgcaccctgggatgcaaatatgattttggatgatggcggagatctaaccattaaaattcacacagaatatccagaaatgcta

SEQ ID NO: 261064 - DNA, 766 bp, Unknown
  Bacterial polypeptide expressing nucleotide sequence isolated from the Sargasso Sea
aaagctgaaaaagatttatctgttctagataatcccggtaatgaagaagaaatagctttattcaatgcaattaagtctaagttggaaaatgatagtgacttctattctagaattaagagtaatatcattggcgtcactgaagaaactacaactggagttgcaagactttatcaactgcaaaagcaaaattcgttacctttccctgctatcaacgttaatgactcggtaactaagagcaaatttgataatttatatggttgccgtgaatcgttagtagatagcataaagcgtgcaactgacgtgatgattgctggtaaggttgctttagttatgggttttggagatgtaggtaagggttcagctcagtcattacgtggacttggtgcaattgtaaaagttgctgaagttgatccaatttgtgctcttcaagcagcaatggaaggttttagcgtcgttacgctagacgatgttgtcaaagatatagatatctttgttacggctactggtaactatcaggtgataacacatgagaatcttatcaagatgaaggatgaggccatagtttgtaatattggccatttcgataatgaaattgacgtagcttccctaaaaaattatgaatgggaaaatattaagccgcaagttgatcacataactctacctagtggaaataaaattatccttttagctgaaggtagattagtcaatttaggctgtgccactggccacccaagctttgttatgagtaattcttttactaatcagg

SEQ ID NO: 261065 - DNA, 485 bp, Unknown
  Bacterial polypeptide expressing nucleotide sequence isolated from the Sargasso Sea
tatgtctttagcagaaaagaccaagcaagaattactcccctacaaagttaaagacttagagctttcaaattggggaagaaaagaaattttattggcagaagctgagatgcctggcttaatgtcacttcgagaagaatacagtgcatcaaaaccgcttcagggagcaagaatcgctggatgtcttcatatgacaattcaaactgctgttcttattgaaacattgactgacctaggagctgaggtttcgtggtcatcttgtaacattttttctacccaagatcatgcagctgcagctattgctatcactggagtgcctgtatatgcatggaagggtatgaacgaagaagaatttgattggtgtattgaacagacattgtttgcgtttaaggacggcaagcctctgaacatgatattagatgatggtggagatttgaccaatatggttctagataattatccagagctagtatcagaaattaaaggtt

SEQ ID NO: 261066 - DNA, 919 bp, Unknown
  Bacterial polypeptide expressing nucleotide sequence isolated from the Sargasso Sea
aatataaacgatgcagattttggtaatcgggagatttccttagctgaaaccgaaatgcctggcttaatggcaatcagaaatgagtacaaaaaaaataaaccattaaagggtgcaaaaataattggttgtcttcatatgacaattcaaactgcagtgctaatagaaacattagtagaattaggtgccgaggtcagatggtcgtcatgtaatatattttctacccaagaccacgcagcagcagcgattgctaaaaaaggtatacctgtctttgcgtggaagggtgaaacagaggaagattattggtggtgcataaaacaaactattgaaggggaaaaaaactggaagccaaaccttctcttagatgatggcggagatctaacggctttgatgcattcagattatcaagatctactgaaaaatatcaaaggtgtatcagaggagactacgactggtgttaaggctttaaaaaaaatggaaaaccaaaaaaaattaatgatacctgcattcaatgtaaatgattcagtaacaaaatctaaatttgataatttgtatggctgtagagagagcttagttgacggaataagaagagcaactgacgttatgatgtcaggtaaagttgcggttgtagctggttatggagatgtaggaaaagggagtgccgcttctcttagacaaagcggcgcaagagtgatgattacagaaagcgatcccatatgtgcactacaagccgcaatggaaggatacgaagtagtcttgatggatgaagttattgaaaaagcggatatagtagttactgcaactggtaataaagatatagttacaattgagcatatgcgaaaaatgaaagatagatcaatactgtgtaatattggacattttgataatgaaatacaagttgacagtttaaaaaattataaat

SEQ ID NO: 261067 - DNA, 415 bp, Unknown
  Bacterial polypeptide expressing nucleotide sequence isolated from the Sargasso Sea
agcaatagtttgtaatataggtcatttcgataatgaaatacaatctgaagcacttcaaaactacaaatctgatgaaattaagcctcaagtaagagaggttgagttccctgatggtaaaaagatattattactttctgaaggtagattagttaatttaggaaatgcaactggacatcctagttttgtcatgagtgcatctttcacaaatcaagttttagctcaaattgaactttggaaaaattcaaaaaactatgaaaataaagtttatgttctacccaaacatttagatgaaaaggtagcatcgttacacttgaagaaagtaggagctaaacttactgaattgactgataaacaagcggaatatattggagtaagtaaagagggtccttttaaagataacacatacagatattag

SEQ ID NO: 261068 - DNA, 739 bp, Unknown
  Bacterial polypeptide expressing nucleotide sequence isolated from the Sargasso Sea
atgagccagcaatatatcgtaaaagacatttctttatctgattttggtcgcaaggaattaagtatagctgaaacagaaatgcctggattgatggcgctgcgatcggaatatggagaaagcaaacctttaaaaggtgcgcgtatcgtcggctcacttcacatgactatccaaacagcagttttaattgaaacacttgtggcattaggcgcagatgttcgttgggcttcctgcaacattttctccacccaagaccatgcagccgcagcaattgccgcagcaaatattcctgtgtttgctattaagggtcagtctttagaagagcattgggattacttagataagtcttttatgtttcctgatggcccaaatatgattttagatgatgggggtgatgcaactttgtatgtgcttcttggtgcgcgcgctgaagcaggtgaagacatcattccagttccccaatcagaggaagaagaggtcataaaggtgcaaattaaaaaacgcatggaacaatcacctgggtggtttacgaaaacgcgtgatgccatcaaaggtgtttctgaagaaacaacaactggtgttcaccgtctttacgaattggttaaaaatggtcaacttccttttccagctattaacgttaatgactctgtgactaagtcaaagtttgacaacaagtatggttgtaaagaatctttggtggacggtatccgtcgtgcaacagatacaatgatggcaggtaaga

SEQ ID NO: 261069 - DNA, 866 bp, Unknown
  Bacterial polypeptide expressing nucleotide sequence isolated from the Sargasso Sea
gatcttggacgatggtggtgatctaacagctttaatgcataaagattacaaagaattaatgaaagatattaagggtttatcagaagaaacaacaactggagtattagcacttaagaaaatggaacaagacggtacgctgttagttccagcgatcaacgtcaacgactcagtgacaaaatcaaaatttgataacctgtatggttgcagagaaagtttagtagatggaattaaaagagcaacagatgttatgatgtcaggtaaggttgcaatagtagctggttttggtgatgtaggtaagggtagtgcagcctcacttagacaatctggtgctagagtaatggttacggaaactgatccaatttgtgcacttcaagctgcaatggagggttatgaagttgttacaatggatgatatgattagccaagcggatatagtagttactgcaactggtaacaaggacattgttacagcagatcatatgagagaaatgaaggatagagcaattttatgtaacattggccacttcgataatgaaatacaagttgatgctttaaaaaattataaatgggacgaaattaaaccccaagttcatgagattacattgccaagtaataaaagaataatattattagctgaaggtaggttggtaaatttaggttgtgctactggtcatccaagctttgtaatgagtgcttcatttacaaaccaagtaaccgctcaaatagaactgtggaataattcagaaaaatatgagaagaaagtttatgttttaccaaaacatttagatgaaaaagttgctatgctacatttagaaaaagttggagcaaagttaacaaaattatccaaagatcaagcagattatatta

SEQ ID NO: 261070 - DNA, 679 bp, Unknown
  Bacterial polypeptide expressing nucleotide sequence isolated from the Sargasso Sea
aggaaagaaatttctttagccgaaacagaaatgccaggattaatggctcttcgtaaagagtataaaagttcaaagcccttaaaaggtgcaaaaatacttggttgtttgcatatgacaatacaaactgctgttttaattgagaccttagtagacctgggcgcagaagtaagatggtcttcatgtaatatattttcaactcaagatcacgcagctgcggctatagcaaaatctggtatacctgtttttgcttggaagggagaaacagagaaagaatattggtggtgtgtgagacaaactatcgagggaaaaaaaagctggaagcccaatatgatattagatgatggtggtgacctcacggcattaatgcataaagattataagaatttattaaaagatattaaaggcgtatccgaagagacaacaactggagtactagctttaaaaaaaatggaaaaaaataaagaattattaatacccgctataaacgtcaatgactcagttaccaaatcaaaatttgataatttatatggctgtagggaaagtttaactgatggcataaaaagagctacagatgtgatgatgtcaggaaaggtagctatcgttgctggtttcggagatgttggtaaaggtagtgcagcatcattgagacaagcaggagccagagtaatgatacagaaac

SEQ ID NO: 261071 - DNA, 739 bp, Unknown
  Bacterial polypeptide expressing nucleotide sequence isolated from the Sargasso Sea
atgtcagaagatttcaaggtaaaagatataaaactagctgattttggaagaaaagaaatttctttagccgaaacagaaatgcctggcttaatggctttaagaaaagaatacaaaagtaaaaaacctttaaagggtgctcgaattctaggatgtctccatatgacaattcaaacagcggttttaattgaaacactggtagagctaggtgcagaggttagatggtcatcttgtaatattttttctactcaagatcatgcagcagcagcaatcgctaaagcaggaatacctgtatttgcatggaaaggtgaaactgaaaaagaatactggtggtgcgttaaacaaactatagagggaaagaaagattggaaacctaatatgattttagatgatggtggagatcttacagctttaatgcacaaagattacaaagatttactaaaaaatattaaaggagtttcagaagaaacaacaacaggtgtattagctctaaaaaaaatggaagtaaataaacagcttttaataccagcaattaatgtaaatgactcagttacaaaatcgaaatttgataatttgtatggatgtagagaaagtttggttgatgggattaaaagagcaacagatgttatgatgtctgggaaagtagctattgttgctggattcggcgatgtaggaaaaggaagtgctgcatcattgagacaagctggcgctagagttatggtaactgaaactgatccaattt

SEQ ID NO: 261072 - DNA, 793 bp, Unknown
  Bacterial polypeptide expressing nucleotide sequence isolated from the Sargasso Sea
gaagagcaaggaactttgttagtacctgctattaatgtaaatgactcagttacaaaatcaaaatttgataatttatatggatgtagagaaagtttagttgatggaattaaaagagcaacagatgttatgatgtcaggaaaagttgcaattgttgctggttttggcgatgttggaaaaggaagtgcagcatctttacgtcaaagtggagctagagtaatggttacagaaactgatccaatatgtgcacttcaagctgcaatggaaggttatgaagttgtattgatggacgagatgattggagaggcagatattgttgttactgctactggaaataaagatatagtaacagcagatcacatgagagctatgaaggatagatcaatcttatgtaatattggccacttcgataatgaaatacaagtagaagcgctaaaaaattataaatgggacgaaattaaaccacaggttcacgaaattacatttccagataataaaagacttattttattagctgagggaagacttgtaaatttaggatgtgcaactgggcatccaagctttgttatgagcgcatcatttactaatcaggttacagctcaaatagaattatggaataattctgagaagtatgagaacaaagtatatgttttgccaaaacatcttgatgagaaagtggcaagactacatttagaaaaagttggagcaaaattaaccaaactgtcaaaagatcaagctgactatattagtgttacaacagaaggaccttataaaccagatgcttaccgctactaaa

SEQ ID NO: 261073 - DNA, 802 bp, Unknown
  Bacterial polypeptide expressing nucleotide sequence isolated from the Sargasso Sea
agagtaaaaaatggcactcttccattacctgcaattaatgttaatgattctgtaacaaaatctaaatttgataataaatatggttgtcaagaaagtgctgttgatgcagtgagaagagctacagatataatgatggctggtaaaagagtcgtagttgcaggatatggtgatgttggcaagggaacagtagcttcttttagtggtgctggagccatagttactgtagttgaagttgatccaatctgtgcgctacaagcttcaatggatggtcatgaggttaaaaaaatgaaaacagctataacaaacgcagatattattgtaacagctaccggtaataaagatattttaaaagatgaacattttagactgatgaaagacaaagcaatagtttgtaatattggtcattttgataatgaaattgatatggcttggctaaatgaaaattatggacatacaaaagatgaaataaaacctcaagttgatttatataatattgacggcaaagatgtgattattttggctgagggaagattagttaatttaggatgtgcaactggtcatcctagctttgttatgagtaattcttttactaatcaaactttagcccaattagagctttggaaaaattctggctcttatgaaaataaagtttacatgttgccaaaacatcttgatgaaaaagttgccaaattacatttagagcgattaggtgttgaacttgaagaattaaatcaggaacaggcagattatattggagttaatattaatgggccattcaaacccgaatattacagatattaat

SEQ ID NO: 261074 - DNA, 835 bp, Unknown
  Bacterial polypeptide expressing nucleotide sequence isolated from the Sargasso Sea
atggctcaagattataaagtaaaagacattagccaggcagattttggtagaaaagaaatttctttagcagaaacagaaatgccaggtcttatggctttgaggaaagagtataaaggcaaaaaacctttaaagggtgcaaaaatcttaggttgtcttcacatgacaatacaaaccgcagttttaattgaaactttagtagaattaggagcagaagtaagatggtcctcatgtaatattttttcaacacaagatcacgcagcagctgcaatagcaaaagcgggtattcctgtatttgcttggaaaggtgagacagaagaagagtactggtggtgtgttaaacaaactattgaaggaaaaaaagattggaaaccaaatatgattttagacgatggcggtgatcttacagctttaatgcataaagaatataaaaatttattaaaagatgttaagggagtttcagaagaaactacaacaggagttttagcacttaaaaaaatggagtctaacaaagaattattaatccctgctataaatgtaaatgactcagttacaaaatctaaattcgacaatctttatggttgtagagaaagtttagtagacggtataaaaagagctactgatgttatgatgtcaggtaaattagccatcgtagctggatttggagatgttggcaaaggaagtgcagcttcattacgtcaagcaggtgcaagagttatggttacggaaacagaccctatatgtgcgttacaagctgcaatggaaggctacgaagttgttattatggatgaagctattaaagatgctgatatagttgttaccgctacaggaaacaaag

SEQ ID NO: 261075 - DNA, 715 bp, Unknown
  Bacterial polypeptide expressing nucleotide sequence isolated from the Sargasso Sea
atgacagattataaggttaaagacatatcacaagcagaatttggaagaaaagaaatatcattagcagaaactgaaatgccaggtttaatggctttgcggaaagagtataaagggaaaaaccctctcaaaggcgcaagaattttaggttgtcttcacatgacaatccagacagctgttttaattgaaactttagtagaattaggagcagaagttagatggtcttcgtgcaatatattttctacacaagaccatgcagctgcagccatagctaaagctggtatacctgtatttgcttggaaaggtgaaactgaagaagaatattggtggtgcgtaaaacaaactatcgaaggtaaaaaagattggaagccaaatatgattttagatgatggaggtgatttaactgcgttaatgcataaagattataaagatttattaaaatcagtaaaaggattatcagaagaaactacaactggtgttctagccctaaaaaaaatggaagcagaaggaactttattagttccagcaattaatgtaaacgattctgtaacaaaatctaaatttgataatttatacggctgtagagaaagtttagtcgatggaatcaaaagagcaacggacgttatgatgtccggcaaagttgctatagtagctggattcggagacgtggaaaaggaagtgctgcatcacttagacaaagtggagcaagagttatggt

SEQ ID NO: 261076 - DNA, 462 bp, Unknown
  Bacterial polypeptide expressing nucleotide sequence isolated from the Sargasso Sea
catggaagattttaaagtaaaagatataagccaagcagaattcggaagaaaagaaatttcgattgctgagactgaaatgcctggactaatggcattgagaaaagaatataagggaaaacatccccttaaaggatcaaaaattgttggctgtctgcacatgacgatacagacagcagtattaatagaaactttagtggaactaggtgccgaggtaagatggtcatcttgtaatatattttcaacacaggaccacgctgcagctgcgattgcaaaagcaggaattccagtgtttgcctggaaaggtgagactgaagaagaatattggtggtgtgtaaagcaaacaatcgaaggaaaaaaagattggaaacctaatatgattcttgatgatggcggagatcttacagcacttatgcataaggattataaagatttattaaaagacgtaaaaggtttatcagaaga

SEQ ID NO: 261077 - DNA, 469 bp, Unknown
  Bacterial polypeptide expressing nucleotide sequence isolated from the Sargasso Sea
catggaagattataaagtaaaagacattgctcaagctgaattcggtagaaaagaaatatcaatagctgaaagtgaaatgcctggtttaatggctttaagagaagagtattctaaagaaaaaccattaaagggtgcaagaattataggatgtcttcatatgacaattcaaacagctgtacttatcgaaaccttagttgcattaggtgccgaagttcgttggtcttcttgtaatattttttctactcaagatcatgcagctgctgcaattgcaaaggctgggatacctgtttatgcctggaaaggtgaaacagaagaggaatatttatggtgcattaaacaaactataattggaaaaccagattggaagcccaacatgttattagatgatggtggtgatttaactgctatcatgcacaatgaatataaagatttaatgaaggatattaaaggtgtctcagaaagagactac

SEQ ID NO: 261078 - DNA, 281 bp, Unknown
  Bacterial polypeptide expressing nucleotide sequence isolated from the Sargasso Sea
tgaaggaagattagttattcttggtgcgcaaactgacatccaaagttttgtaatgagcgcgtcatttactaatcaagttattgcacaaatagaactttggcataatcataaaaattatgaaaataaagtttacgtacttccaaaacatttagatgaaaaagtagcaactttgcatttaagaaaagtaggtgcaaaactaacaaaattgtcaaaagaacaagcagattatataagcgttggaacagaaggtcctttcaaaccagatgcctatcgctattaaa

SEQ ID NO: 261079 - DNA, 780 bp, Unknown
  Bacterial polypeptide expressing nucleotide sequence isolated from the Sargasso Sea
aattgttaatccctgctatcaatgtaaatgattctgttacaaagtcaaaatttgataatctctacggatgtagagaaagtttagttgacggtattaaaagagcaactgatgtaatgatgtcaggaaaggtagccattgtagctggctacggtgacgtaggtaaaggaagcgcggcatcattaagacaagctggagcaagagtattagtaacagagaccgaccctatatgtgcattacaagctgctatggagggttatgaagttgttgtgatggatgatgcaataaaagatgcagatattgttgtcacagccacaggaaataaagatgttgtaacagcagaccatatgagaaatatgaaagatagagctatactttgtaacataggtcactttgataatgaaattcaagtagaagctcttagaaattataaatgggatgaaattaaacctcaagtgcatgagatagaacttccaagtaaaaaaaggataattttacttgccgaaggtagacttgttaatcttggatgtgcaactggtcatccaagtttcgttatgagtgcttcttttacaaatcaagtaattgctcaaattgaactatggaacaattcagagaaatatgagaataaagtttatgttttaccaaaacatttagatgaaaaagttgcgatgcttcacttagaaaaagtaggagcaaaattaacaaaaatgtcaaaagaccaagcagattatattagcgttaaacagtcagggccatttaaaccagatacttatcgctactaaa

SEQ ID NO: 261080 - DNA, 799 bp, Unknown
  Bacterial polypeptide expressing nucleotide sequence isolated from the Sargasso Sea
actcaagatcatgctgctgcagcaatagcaaaagctggaattccagtatttgcatggaaaggagagaccgaagaagaatactggtggtgtgttagacaaacaattgaaggaaaaaaagattggaaacctaatatgatcttagatgacggtggggatctaacagctttaatgcataaagattataaagaattaatgaaatcaataaaaggtctatctgaagaaacaacaacaggagtattagcacttaaaaaaatggaatccgaaggaactttaatggttccagctataaatgttaatgactcagttactaaatctaaatttgataacttgtatggatgtagagaaagcttagtagatggaattaaaagagcaacagacgttatgatgtctggtaaagttgcaatagttgcaggttttggtgatgtaggcaaaggaagcgcggcatctttaagacaaagtggggcaagagtaatggttacagaaacagatccaatatgtgctttgcaagctgctatggaaggatatgaagtagttcttatggatgaaatgatcaaacatgcagatatcgttgttacagcaacaggaaataaagatattgttacagcggatcatataagagatatgaaagatagagcaattttgtgtaatattggacattttgataacgaaattcaagttgaagcattaaaaaattacaaatgggaagaaattaaacctcaagttcacgaaataacattgccaagtaaaaaaagaattattttattagccgaaggaaggctagtaaatttaggttgcgcaa

SEQ ID NO: 261081 - DNA, 643 bp, Unknown
  Bacterial polypeptide expressing nucleotide sequence isolated from the Sargasso Sea
atgaatgactataaagttaaagatatctcattagcagaatttggtagaaaagaaatttcattagctgaaacagagatgccaggcctaatggctttaagaaaagaatatcaagggaaacatcctctgaaaggtgcaagaattttaggatgtcttcatatgacaattcaaacagcggtattaattgaaacattgactaatttaggtgcagaagttaggtggtcatcttgcaacatattttctactcaagaccatgcagctgcagcaatagctaaaactggaattcccgtatttgcttggaaaggcgaaactgaagaagaatattggtggtgtgttaagcagacaattgaaggtaaaaaagattggttgccaaatatgatattagatgatggtggagatttaactgcattaatgcacaaagattacaaagatttgttaaaaggagtaaaaggtttatcagaggaaactacaactggtgttttagcattaaaaaaaatgcaagaagaaggcaaattattagtaccagctattaatgttaatgactcagttacaaaatcaaaatttgataatttatatggttgcagagaaagtttagtagatggaattaaaagagccacagatgtaatgatgtcaggtaaggttgcaa

SEQ ID NO: 261082 - DNA, 958 bp, Unknown
  Bacterial polypeptide expressing nucleotide sequence isolated from the Sargasso Sea
tgttttgatggaacattactcgatctcggagcagaattaagatggtcatcctgtaatatattttcaacacaggatcatgcagcggcagcaatggctgcaaaaggagttcctgtatttgcttggaaaggtgaaactgaagaggagtacgagtggtgtattgaacaaactatttgtaaagatggaaagccatgggatgcaaatatgattcttgacgatggaagtgatcttacagctatggtacatgctaaatttcctgacatgttagagactattcatggtgtgtctgaagaaacaactactggggtgcataggttaaaagagatgctagaaaaaggtgaattaaaaattcccgctattaatgtaaatgactcagttacaaaagcaaaaaatgataataaatatggatgcagacatagtctcaatgacgctctaaaaagaggaaccgatatgttactttctggtaagaaaggattggtaattggttatggagatgttggtaaaggttcggctgcgagtttggcccaagaaggcatgatagttagtgttgttgaatcagatccaatttgtgcgatgcaagcttgcatggatggttttgcagttgtttcatgttacaaaaatggtgtagttacaagagatcctaaggatattaatatggatgtcatgggtgataccgatctaatagtaactaccactggtaatgtaaatgtttgtgattctgcaatgataagcactttaaaaaatactgcggttgtatgtaatattggtcattttgataatgagattgatactgcttatatgagagaaaactactactgggatgaaattaagccccaggttcatagagtttttagagatacagctccagaaggaacacctgatttatctagtaaaaactatattattttgctagctgaaagaagattagtaaatctcgggaatgcaacagggcatcctagta

SEQ ID NO: 261083 - DNA, 858 bp, Unknown
  Bacterial polypeptide expressing nucleotide sequence isolated from the Sargasso Sea
gcctgggttaatcgctcttagaaaagaatatggtaataaaaaaccattgaatggagctcgtattctaggatgtttgcacatgacaattcaaacagcagttttaattgaaactcttataaaattgggagccgaatgtcgttggtcatcatgcaatatattctcaacacaggatcacgcagccgctgcaattgctaaggcaggtatacctgtttttgcttggaaaggtgaaacagaaaaagagtattggtggtgtgtcaaacaaacaattgaaggaaaaaaagattgggtaccaaacatgatcttagatgatgggggtgatttaactgcattgatgcacaaagaatataaagatttactaaaaaatatcaaaggagtttcagaagaaactaccacaggtgttttagctttgaaaaaaatggaagcaaataaagaattattaattcctgcaataaacgtaaacgattcagttacaaaatctaaatttgacaatctttacggatgtagggaaagtctggtagatggcattaaacgtgcaactgatgtgatgatgtcagggaaagttgctattgttgctggctacggagatgtaggtaaaggaagtgcagcctcattaagacaggccggagctagagttttggtaaccgaaactgatccaatttgtgcgttacaagctgctatggaaggttatgaagtggtattgatggatgatgcgattaaggatgccgatatcatcgtaaccgcaacgggtaataaagatattgtaacagcagatcatatgagaaacatgaaagacagagcaatactatgtaatattggacactttgataatgaaattcaagtcgaggctctaaaaaatta

SEQ ID NO: 261084 - DNA, 943 bp, Unknown
  Bacterial polypeptide expressing nucleotide sequence isolated from the Sargasso Sea
agcagaaacagaaatgccagggttaatggcattaaggaaagaatataaggggaaatctcctttaaagggagcaaaaattcttggatgcttgcacatgacaattcaaactgcggttctgattgaaactttagtagagttaggcgcagaggttagatggtcatcgtgtaatattttttctactcaagatcatgctgctgcagctatagctaaagctgggataccagtttttgcatggaaaggtgaaaccgaagaagaatattggtggtgtgtaaaacaaactattgttggtaaaaaagattggaaaccgaacatgatattggatgacggtggagatctaactggtttgatgcataaagaatataaagatttattaaagaatatcaaaggagtatcggaagaaacaacaactggagttctagccttaaaaaaaatggaggaaaaaaaacaattactaattcccgcatttaatgtgaatgactcagttacaaagtcaaaatttgataatttatatggatgcagagagagtttagttgatggtattaaaagagccacagatattatgatgtcaggaaaagttgcaattgtggcaggttttggagatgttggaaaaggaagtgctgcctcactacgtcaagctggcgctagagttatgataacagagacagacccaatatgtgctctacaagcagctatggagggatacgaagttgtgttaatgcaagacgccatcaaagatgcagacattgttgtgactgcgacaggtaacaaagatattgtaactgctgatcacatgagaaacatgaaagacagagcaatattatgtaatattggtcactttgataatgaaattcaagttgaggctctaaaaaattataaatgggatgaaattaaacctcaagttcacgaaatagagcttcctagtaaaaaaagaaattattttatt

SEQ ID NO: 261085 - DNA, 823 bp, Unknown
  Bacterial polypeptide expressing nucleotide sequence isolated from the Sargasso Sea
acaactgggtgtattagcactaaaaaaaatggaagctcaaggaacattattagttccagcaataaatgtaaatgactctgttacaaaatctaagtttgataatttatatggatgcagagaaagtttagttgatggaattaaaagagcaacagatgtaatgatgtcaggaaaagttgcaattgttgcaggatttggtgatgttgggaaaggtagtgctgcttcattgagacaaagtggagcgagagttatggtaacagaaactgatccaatttgtgctcttcaagcagcgatggaaggttatgaagttgtccttatggacgaaatgattaaagaggcagatatagttgtgactgctacaggaaacaaagatatcgttacagctgatcatatgagagacatgaaggatagagcaatattatgtaatattggacattttgataatgaaatacaagttgaagctctaaaaaattataagtgggatgaaattaaacctcaagttcacgaaattaccttacctagcaaaaaaagaattattttattagctgaaggtaggttggtaaatttaggatgtgctactggacatccaagttttgttatgagtgcatcattcacaaatcaagttactgcgcaaatagagctatggaataattcagataagtatgaaaaaaaagtatatgttttacctaagcatcttgacgaaaaagtagcaagattacacttagaaaaagtaggtgctaaacttacaaaaatgtctaaagaccaagcagagtatattagcgttacaccagagggaccttataagccagatacttatcgttattaa

SEQ ID NO: 261086 - DNA, 256 bp, Unknown
  Bacterial polypeptide expressing nucleotide sequence isolated from the Sargasso Sea
atgaatacctttaaagactatatcgtgaaagatatcgcccagtcaacttggggccaaaaggagctagacatagcagaaacagaaatgccaggattgatgtcattaagagatgagtatggtaagactaaacccttaaaaggtgcgagaattgctggttgtttgcacatgactattcaaactggagtcttaatagaaaccttaaaagaacttggggccgatattcgttgggctagttgtaatatcttttctacacaag

SEQ ID NO: 261087 - DNA, 308 bp, Unknown
  Bacterial polypeptide expressing nucleotide sequence isolated from the Sargasso Sea
agatggtaagaaattattattattatctaaaggtagattggttaatctaggtaatgcaacaggtcatcctagttttgtaatgagtgcttcttttacaaatcaagtcatggcacaaattgagctttgggaaaattataaaaattacgaaaataaagtttatgtccttccaaaacacttagatgaaaaggttgcttttttacatttaaataaagtaggagcaaaattaactaaattaactgacaaacaagcagaatatattggtgtaaaaaaagaaggaccattcaaagacaacgattatcgttactaat

SEQ ID NO: 261088 - DNA, 403 bp, Unknown
  Bacterial polypeptide expressing nucleotide sequence isolated from the Sargasso Sea
atggaaaatgactacaaggttgctgatataaatcttgctgaatttggaagaagagaaatctcacttgcagagaatgaaatgccggcgttaatggcactgagagacaagtatagagatgatcaacccttggcaggtgccaaaattatgggctgtattcatatgacaattcaaacagctgttcttatggagacattaattgacttaggtgcagagttaagatggtcgtcatgtaatattttttctacacaagatcatgcagctgcagctatggctgctattggtgtacctgtttttgcatggaaaggtgaaactgatgaagagtatgagtggtgtattgaacaaaccatttgtaaagatggtaagccatgggatgcgaatatgattcttgatgatggaagtgacc

SEQ ID NO: 261089 - DNA, 933 bp, Unknown
  Bacterial polypeptide expressing nucleotide sequence isolated from the Sargasso Sea
taaagtaggcatccctgtttatgcctggaaaggggaaacagaagaagagtattggtggtgtgttcgacaaactattgagggaaaagaagggtggaaacccaatttaatattagatgatggtggcgatcttacaggtcttatgcatagagaatacaaagagctgctaaatgatgtaaaaggtttatctgaagaaactactactggagtgttagcactcaaaaaaatggaaattgatggaactctcatggtaccagcaataaatgtgaatgactctgtaactaaatctaaatttgataacctctatggatgtagagagagtttagtggacggtatcaaaagagcgaccgatgttatgatgtcaggaaaggttgcaatcgttgctgggtttggcgatgttggaaaaggtagtgcagcttctctgcgtcaaagtggggcaagagtaatggtcaccgaagcagatcctatatgtgctttgcaagcagcaatggagggttacgaggttgttacaatggatgatatgattaaagaagcggatattgttgttactgctacaggtaacaaggatattgtaactgctgatcatatgagagaaatgaaagatagagctatactgtgtaacattggtcacttcgataacgaaattcaagttgaggctctaaaaaattataagtgggatgaaattaaacctcaggttcacgaaattactcttcctagtgaaaaaagaattattttacttgcagaaggtaggttggttaaccttggttgtgcaacaggtcatcctagtttcgttatgagtgcatcatttacaaaccaggttactgctcagattgaactttggaacaatcctgaaaaatatgagaaaaaagtgtacgtacttccaaaacatttagatgagaaagtttgcagacttcatttagaaaaagtaagtgcaaa

SEQ ID NO: 261090 - DNA, 541 bp, Unknown
  Bacterial polypeptide expressing nucleotide sequence isolated from the Sargasso Sea
gcagcaatggaagggtatgaagttgtattaatgaatgatgcaatcaaagaggcagacattgtagtaactgccacaggaaataaagatattgtgacagctgatcatatgaggaatatgaaagacagagcaatattatgtaatattggtcactttgataatgaaattcaagtggaagctttaaaaaattataagtgggatgagataaaacctcaagttcacgaaattgaattgccaagcaaaaagagaattattttattagctgaaggaagacttgtaaacttaggttgtgcaactggacatcccagttttgtaatgagcgcttcctttactaatcaagtaattgcacaaattgaattatggaaaaattcagataaatatgaaaagaaagtttatgttttaccaaaacatttagacgaaaaagtagctatgttacatttggaaaaagttggagcgaaattgactaaaatgtcaaaagaacaagcagattacattagcgttaaaccatcgggaccatttaaaccagatacttatcgctactaga

SEQ ID NO: 261091 - DNA, 447 bp, Unknown
  Bacterial polypeptide expressing nucleotide sequence isolated from the Sargasso Sea
cagcagaccacatgagagacatgaaggatagagctatcttatgtaacattggacattttgataacgaaatacaggtcgaggctctgaaaaattataaatggactgaagttaaaccacaagttcacgagattgaacttcctggtggtaagagaattattttattagcagaaggtagattggtaaatttaggttgtgcaactggacatcctagttttgttatgagcgcatcttttactaatcaggtaattgcgcagatagaactttggcataatcacaaaaattatgaaaataaggtttatgtattaccaaagcatttggatgaaaaagttgctacattacaccttaaaaaagttggtgctaaacttactaaactatctaaagatcaagcagattatataagtgtgggaacagaaggtccttttaaaccagatgcctaccgctattaaa

SEQ ID NO: 261092 - DNA, 393 bp, Unknown
  Bacterial polypeptide expressing nucleotide sequence isolated from the Sargasso Sea
catggaagattataaagtaaaagatattgctcaagctgaatttggcagaaaagaaatatcaatagctgaaagtgaaatgcctggtttaatggctttaagagaagagtattctaaagaaaaaccgttaaagggtgcaagaattataggatgtctacatatgacaattcaaacagctgtactaattgaaaccttagttgcattaggagctgaagttcgttggtcttcttgtaatattttttcaactcaagatcatgcagctgcagcaattgcaaaggctgggatccctgtttatgcctggaaaggtgaaacagaagaggaatatttatggtgtattaaacaaactatagttggaaaacctgactggaaacctaacatgttattagatgacggtgg

SEQ ID NO: 261093 - DNA, 910 bp, Unknown
  Bacterial polypeptide expressing nucleotide sequence isolated from the Sargasso Sea
ctaatggcattaagaaaagagtataaaggaaaaagtcctctaaaaggtgcgagaattttaggttgtcttcatatgactattcaaaccgcagttcttattgaaactcttgtagatttaggagcagaagtgagatggtcttcatgtaatattttttcaacacaggatcatgcagcagcagctattgctaaggtaggaataccggtttttgcatggaaaggtgaaaccgaagaggaatattggtggtgtgtaaaacaaacaattgagggaaaaaaagactggaaaccaaatatgatccttgatgacggtggtgatttaaccgcacttatgcataaagattacaaagatttattaaaagatatcaaaggattgtcagaggaaacaacaacaggagtattagcgttgaaaaagatggaagcacagggaacattgttagttccagcaattaatgtaaatgattctgtaacaaagtctaaatttgataatctatatggttgtagagaaagtttagttgatggaataaaaagagccacagatgtaatgatgtcaggaaaagttgcaattgttgctggatttggtgatgtgggaaaaggaagtgctgcatctttaagacaaagtggagcaagagttatggttacagaaactgatccaatatgtgctctacaagctgcaatggaaggttatgaagttgtactaatggacgaaatgattaaagaggcggacattgttgttacagccacaggaaacaaagacatagtaactgctgatcatatgagagatatgaaagatagagctatactttgtaatattggacacttcgataatgaaattcaagttgaagcattaaaaaattacaaatgggacgaaattaaaccacaagttcacgaaataactttgccaagtaaaaaaagaa

SEQ ID NO: 261094 - DNA, 790 bp, Unknown
  Bacterial polypeptide expressing nucleotide sequence isolated from the Sargasso Sea
aagctgcaagtccctgcaattaacgtcaatgattcagttacaaagtcaaagtttgataatctttacggctgccgagaatcattagcagacggaataaaaagagcaacagatgtaatggttgcaggtaaagtagttgttgttgcaggctatggggacgtcggtaaaggctctgcacagtctatgcggatgctaggagctcgggtcatcataacagaaattgatccaatatgtgctttgcaagctgcaatggaaggatttgaagtcttaaatatgaaagctgcagcagctttaggagatatttttgtcacagcaactggttgttgtgacgtcataaatgaagatcattttcacctgatgaaagataaagcaatactttgtaatattggacactttgattcagaaataaatgtagcttacttgcatgacaatcctagagttgaaaaaataaatattaaaccgcaagttgacttatttaaattttcaaataaaaaatcactgattgttttagctgatgggcgacttgtaaatcttggttgtgctacagggcatccaagttttgttatgtcaaattctttttgtaatcaagttctagcacaaattgaactttggaaccaccgggatagatacgatatctcactttacaggcttccaaaacatcttgatgagaaagtagccactttacatcttgaaaaattaggggtgagtttgactcaacttactagcaaacaatccgagtatttaaatataccaatagaaggtccatttaagcctgaacactacagatactaag

SEQ ID NO: 261095 - DNA, 700 bp, Unknown
  Bacterial polypeptide expressing nucleotide sequence isolated from the Sargasso Sea
ttagtagatggaattaaaagagccacggatgttatgatgtcaggcaaaacagcgatcgttgccggtttgggtgatgttggaaaaggaagtgcagcttctttaaggcagagtggtgcaagagttatggtaaccgaagcagatcctatttgtgcgttacaagcagcaatggagggatacgaagtagttttaatggacgaggcaattggcaatgcagatattgttgtaacagcaaccggcaacaaagatattgttactgcagatcatatgaggaaaatgaaagatcgttctatactttgtaacattggtcactttgataatgagattcaagtagaagctttaaaaaattataaatggacagaaattaaacctcaggttcatgaaatagaatttcctgataaaaaaagaattttgttacttgccgagggaagattagttaatttaggatgcgctacaggacatcctagttttgttatgagcgcatcgttcaccaatcaaactatagcacaaatagaattgtggaataattctgataagtatgaaaataaagtttatgttttaccaaaacacttagatgaaaaagttgcgatgcttcatttagataaagttggcgctaaattaacaaaactttctaaaaaccaagccgactatatcagtgttaatgaaaaggggccatttaaacctgatagctatcgctactaat

SEQ ID NO: 261096 - DNA, 824 bp, Unknown
  Bacterial polypeptide expressing nucleotide sequence isolated from the Sargasso Sea
gctgaggtcacatggagcagctgcaatatcttcagcactcaagatcatgctgctgccgcaatagccgctgcaggaatacccgtctacgcctggaagggtgagtctgatgaagaatttgagtggtgtatcgagcagaccctcatgtttccttcagggaagccactgaacatgattctcgatgatggtggggaccttactgccatggttcacgagcaatttcctgaacttcttacaaatatctacggtgtcagtgaggaaacaaccgctggaatccatcgcctcgaggtgctgaacaaaactggtgcccttcaagtccccgcaattaacgtcaatgacagcgctacaaaaagcaagttcgataacctctatggctgccgtgagtccctagcggacggtgtcaaacgggcaacggacattatgcttgctggcaaagtcgctgttgtctgtggatatggtgatgttggcaaaggatgtgctgctagcctgaagagctacggatgccgtgtcatcgtgactgagatcgatccgatcaatgccctccaagctgctatggaaggctttgaagttgtcaccatggaagatgcctgcaaagaagggaacctatttgtcaccacaactggtaacaaggacatcattcttggcaagcacattgagcacatgccgaacgatgcaattctttgcaatattgggcatttcgacacagaaatagatgtcgcttggctcgagcagcaagttgctgatggcaaagtttcaaaggacgaaatcaaagctgccgacattggtgccgttgatcggtatacgttcaatgggaatggtcgaagcgt

SEQ ID NO: 261097 - DNA, 885 bp, Unknown
  Bacterial polypeptide expressing nucleotide sequence isolated from the Sargasso Sea
tatgcttttagatgacggtggtgacttaactgcgatgatgcataatgaatacaaagatttaataataggcgttaaaggagtttcagaagaaacaactacaggaataaaagctttaaataaaatggaaaaagaaaaatctttactagttcctgcaattaatgtgaatgactctgttaccaaatcaaaatttgataacttatatggatgtcgagaaagcttagttgacggaattagaagagcaactgatgtgatgatgtcaggaaagatcgcaattgttgctggttttggtgatgttgggaaaggaagcgctgcatcattaagacaaagtggggcacgtgtattagttactgaagcagacccaatatgcgcattgcaagctgcaatggaaggttatgaagttgttttaatggatgaagcaattagtaaagcagatattgtcgtaactgcgactggtaataaagacatcgttaccgctgatcatatgagagatatgaaggatagagcgattttatgtaatatcggacatttcgataatgaaattcaggttgaggcattaaaaaattataaatggactgaagtaaaacctcaggttcatgaaattgaattacctagcaaaaaaagaataattttattagcagaaggtagattggtaaatttaggttgtgccacagggcatccaagttttgtaatgagtgcttctttcacaaatcaagttattgctcaaatagaattgtggaataattataaaaattatgaaaaaaaagtttatgttttaccaaagcatttagatgagaaagtagctacacttcatcttaaaaaagttggcgctaaattaactaaactttcaaaagatcaagcagattatattagcgtaggagtagaggg

SEQ ID NO: 261098 - DNA, 718 bp, Unknown
  Bacterial polypeptide expressing nucleotide sequence isolated from the Sargasso Sea
atgaaattagattataaagtaaaagatatcaatttagccgaatttggtagaaaagaaatatctctcgcagaaacagagatgcctggtctaattgctctcagaaaggaatataaagatcaaaaacctttgaagggagctaatattttaggttgtttacacatgaccattcaaacggctgttcttatagaaacattaattcaattaggtgctagcgtgagatggtcatcttgtaatattttttcaacacaagatcacgctgcagcagcgatagcaaaagcaggtatacccgtgtatgcttggaaaggtgaaacggaagaggaatattggtggtgcattaaacaaaccatagaaggagacaaaaattggcgaccaaacatcttattggatgatggtggagatctaacagctcttatgcataaagagcataaagaattattgaaatctgttaagggtgtttcagaagaaacaacaaccggtattaaagctttaaaaaaaatggaggcaaaaaaagagcttatgatacctgcaataaatgtaaatgactcagttacaaaatcaaaatttgataatctatacggatgtagagaaagtttagttgatggaataaaaagggcaaccgatattatgatgtcgggcaaagtagcaattgttgcaggttttggagatgttgggaaaggtagtgctgcatctttgagacaggctggagcaagagtgatgg

SEQ ID NO: 261099 - DNA, 262 bp, Unknown
  Bacterial polypeptide expressing nucleotide sequence isolated from the Sargasso Sea
ttaggatgtgctacaggccacccaagctttgtaatgagtaactcgtttacaaatcaagtacttgctcaaattgagttatggaataactataaaaactacgataacaaagtctatatgcttcctaaaaacttagatgaaatggttgctaaacttcatctggataaacttggtgtggagcttgaagaactatcaaaagagcaagcagaatacattggtgttcagttaaacggaccttataaaccagaatattacagatattaag

SEQ ID NO: 261100 - DNA, 847 bp, Unknown
  Bacterial polypeptide expressing nucleotide sequence isolated from the Sargasso Sea
gaaacattgattgaactcggagctgatatcaggtggtcttcatgtaatatcttttcaacacaagatcatgctgcagctgctctagcagccaaaggcgttccaatatttgcatggaaagatgagagcgaagaagagtactggtggtgcgtagaaaagacaatcaatggtccagacggttgggccccaaatctcatacttgatgacggtggagatttaacgggtctcatgcatgaaaaatatcctgagctgatgaaagatatcattggtgtctcagaagaaacaacaacaggagtacttcgtctttataatatggagaaagatggaacactcatgtgtcctgcaatcaatgtcaatgactcggtgacaaagtcaaaatttgacaatctctatgggtgtcgcgaatcactcgttgatgggattaaaagagcaaccgatgtcatggtggctggaaaaattgctgtcgttgctggatatggtgatgttggaaaaggctcagcacagagtctaagaggtctgggtgctacagtttggataaccgaaatcgatccaatttgtgcacttcaagctgccatggagggatatcgtgttgtgacaatggatgatgcttgctctcaagcagacatctttgtaactgccactggaaactataatgttattgataagcatcacttagagcagatgaaggatcaagcaatcgtttgcaatattgggcattttgataatgaaatcaacgtagaatccatgaaagatcatgagtggatcaatatcaaacctcaagttgatcacattgtttaccctgatggcaaaagaatcattctccttgctgaagggcgtttggtaacttagg

SEQ ID NO: 261101 - DNA, 590 bp, Unknown
  Bacterial polypeptide expressing nucleotide sequence isolated from the Sargasso Sea
gcgtgttattattacagagatagatccgatttgtgctcttcaagcttcgatggatgggtttcaggtaaaaaaattggaaacagtaatctcagaagtagatattgtggttacagctactgggaataaagatattgtcgagggtcgtcattttgaattaatgaaggataaaactatcgtatgtaatattggacattttgataacgaaattgatattgcatggttaaataaaaactttggtgatacaaaagatgaaataaaaccacaggttgataaatatacaattaatggtaaagatgtcatcattttagcagaaggacgtcttgtcaatctaggaaatgctacagggcatccttcttttgtaatgagtaattcattttgtaatcaagttttggctcaaattgaattgtggaataataacgataactataataatgaagtctatgttttaccaaaacatttggatgaaaaagttgctagacttcacctagaaaaattaagtgttgaattaaccgaattaagagatgatcaagcagaatatattggtgtaaaagtgaaaggaccttttaagcctgaagaatatcgatattaat

SEQ ID NO: 261102 - DNA, 247 bp, Unknown
  Bacterial polypeptide expressing nucleotide sequence isolated from the Sargasso Sea
ggtcatccaagttttgttatgagtaattcttttactaatcaagtattagctcaaattgaacttttcaataagtcagataaatactctaaagaggtctatgttttacctaaacatttagatgaaatggtagctagattacatttggataaaattggggctaagttaacaaaactaactaaagatcaagcagactatattaatgtctctgttgaaggaccttataaaccagagcaatatagatattaaa

SEQ ID NO: 261103 - DNA, 726 bp, Unknown
  Bacterial polypeptide expressing nucleotide sequence isolated from the Sargasso Sea
ataatctttacggatgtagagagtctttagctgatggaattaaacgttccacagaaattatgctggcaggaaaaactgttgtaatatgtggatatggagacgtaggaaaaggctccgctcaatctatgaagtcttatggctgtaaagtaattgtaactgaaattgaccctatatgtgctcttcaagcagcaatggagggatttgaagttagaatattagaagatgttttagatagaggaaatatttttgtcactactacaggaaacaaagatattataaccttaaaacatatgaaaaaaatgaaggatcaagccatagtttgtaacattggacattttgataatgaaattcaagtagatgcattaaataaatcagatgccaaaagagatcaaataaaaccacagcttgatagatatacttttaaaaatggtaagcaaatattcatattagcggaaggaagattagttaacttaggatgtgcaacaggacatgcaagctttgttatgtcaacttcgttttcaaatcaagtgctagcacaagtatttttagctaaaaataaacctgcaactggcatttatgatttaccaagaaaattagatgaggaagttgcaagaattcatttgaaacatcttgacgcggacttaacaaaattaactaaaagccaagcaaactatattggtgtaaatgttaacggtccttttaaaaaagatgagtatcgttactaag

SEQ ID NO: 261104 - DNA, 679 bp, Unknown
  Bacterial polypeptide expressing nucleotide sequence isolated from the Sargasso Sea
atgagtgattataaagtaaaagatatatctgaagctgagtttggaagaaaagaaatctcaatagctgagagtgaaatgcctggattaatggctttaagagaagagtactctggtaaaactcctttgaaaggtgccaagatcataggttgtttacatatgaccattcaaacagctgttttaatagaaacattagtagatcttggtgctgaggtgagatggtcatcatgtaatatattttcaacgcaagatcatgctgctgctgctatagcgaaagcaggtattccagtttacgcatggaaaggtgaaacagaagaggagtatttatggtgtataaaacaaacaattgtagggaacaaaaattggaaacctaatatgctactcgatgatggtggtgacttgactgctataatgcataatgaatataaagatttgttaaaagacgtaaaaggtgtttcagaggaaacaactactggaattaaagctcttaataaaatggaaaaagataactcgcttttagttccggctataaatgtaaatgactctgttacaaaatcgaaatttgataatttatatggttgcagagagagcttagttgatggaattagaagagcaaccgatgtgatgatgtcaggtaaaattgctattgttgcaggttttggtgatgtgggaaagaggtagc

SEQ ID NO: 261105 - DNA, 816 bp, Unknown
  Bacterial polypeptide expressing nucleotide sequence isolated from the Sargasso Sea
gtgttcatcgattaaaagatatggaaaaaaatggtttattgaaagttcctgctataaatgtaaatgattcagtaacgaaatctaaatttgataatttatatggatgtaaagaaagcctagttgatggcatcagaagaggaacagatgttatgatggctggtaaagttgctgtagtagctggatatggagatgttggaaaaggatctgcagcaagcttaagaggagcaggagcaagggtatgcgttacagaaattgatcccattaatgcgttgcaggcggctatggaaggatatgaggttgtgactatggatgatgctgcttcttatggtgatatttttgtcacagctacaggaaatttagatgtaataactttagatcatatgagaaagatgcgtgacagagcgatagtttgtaatattggtcattttgataatgaaattcaaactgaggcattacaaaattataaatcagatgagattaaacctcaagtaagagaagttgaattccctgatggaaaaaaaatattattattatctgaaggccgtcttgttaatttaggaaatgcaacaggtcatccaagttttgttatgagtgcttctttttcaaaccaagttattgcacaaattgaactttgggaaaattataaaaattatgaaaataaagtttatgttcttccaaaaaaattagatgaaaaagttgctctacttcatttaaaaaaagttggagcaaaattaactgagttaaatgaaaagcaagctgattatattggtgtcagtaaagcaggaccatttaaagacgatacttataggtattagg

SEQ ID NO: 261106 - DNA, 934 bp, Unknown
  Bacterial polypeptide expressing nucleotide sequence isolated from the Sargasso Sea
tgtattgaacaaactatttgtaaagatggaaaaccatgggatgcaaatatgattcttgatgatggaagtgatcttacggcaatggtgcatgctaaatttcctgacatgttagagactattcatggtgtgtctgaagaaacaactactggggtgcataggttaaaagagatgctagaaaaaggcgaactaaaaattcctgccattaatgtaaatgattcagttacaaaagcgaaaaatgataataaatatggatgtagacatagtcttaatgatgctcttaaaagaggtaccgatatgttgctttctggtaagaaaggattagtaattggttatggagacgttggtaaaggttcggctgcaagtttagctcaagaaggcatgatagttagtgttgttgaatcagatccaatttgtgcaatgcaggcatgcatggatggatttgcagttgtttcatgctacaaaaatggtgtagtaaccagagatcctaaggatattaatatggatgtcatgggtgatacggatctaatagtaactaccaccggtaatgtaaatgtttgtgattctgcaatgataagcactttaaaaaatactgcagttgtatgtaacattggtcattttgataatgagattgatactgcttatatgagagaaaactattactgggatgaaattaagcctcaggttcatagagtttttagagatacagctccagacggaactcctgatttgtccagcaaaaactatattattttgctagcagagggaagattagtaaatcttggaaatgcaacagggcatcctagtagaattatggatgggtcttttgccaatcaagtccttgcacaaattcatttatataaacaaggctttgcaaatgtaaatgatgctgataaaaaagcagaaatgttaaccgttgaggttttacctaaaaaac

SEQ ID NO: 261107 - DNA, 457 bp, Unknown
  Bacterial polypeptide expressing nucleotide sequence isolated from the Sargasso Sea
tttcggtactggtaatatgcatgctttagataagcaacattttgatgttatgaaagatggcgtagctttagcaaatgcaggtcattttgatgtggaaataaacctcaatgtacttaaagagcacagttcaagtgttgatagggtaagggaacatgttgaaagttataaatataacgataaagaaatcctggttcttgctgaaggaaggttagtaaatctagctgcagcgactggacatccagcatctgtaatggatatgtcttttgcaaaccaggctctagctgctgagtggataaaagataattataaaaatctagaatcaaaagtttatacactgcctaaagaagtagatttgaaaatagctgcaacaaaattgggactcatgggtggtgagttagaaattcttactgaagaacaaattaattatcttgactcatgggagcacggcactagctaa

SEQ ID NO: 261108 - DNA, 708 bp, Unknown
  Bacterial polypeptide expressing nucleotide sequence isolated from the Sargasso Sea
cacatactacagccatatcaattcagtagtaagtgaaaaaccaaatattactatagatgatggagctgatttggtagcatttttacatcaagaaaagcctgaacttatgtcagaaataattggtggaatggaagaaacaacaacaggtgttataaggctgaaagcattagctaacgaaaaaaaattaaaatatcctataattgctgcaaatgattctcaaacaaagcatatgtttgataatagatatggaacaggccaaagtactcttgatggaataattagagctacaaatattcttttatccggaaaaaactttgtaataattggttatggttggtgtggacgaggcttagctcagagagcaaagggaatgggagctcaaacaattgtttgtgaagtagacccaataaaagcattagaggcagttatggatgggcaccaagtaatgaaaatggaagaagctgcaaaagaaggtgatatatttgtgacagtaacaggtggccttcatgcaattggtaaaagtcatatagaaaatatgaaagatggtgcaataatagcaaattcaggtcactttaatgttgaaatagatttagattctttagaagaaatgtcagaaacaaaaagtactcttaggccattcgtagaagaatatgttttagaaaatggaaaaactatttgtgtacttggtgaaggaagcttattaatctt

SEQ ID NO: 261109 - DNA, 712 bp, Unknown
  Bacterial polypeptide expressing nucleotide sequence isolated from the Sargasso Sea
atggaaaacgattataaagttgctgatataaaacttgctgaatttggaaggagagaaatatctcttgcagaaaatgagatgccggccttaatggcgttaagagataaatatagagatgagcagcctttggctggtgcaaaaattatgggatgcattcacatgactattcaaactgctgttttgatggaaacattagttgatctaggagcagaattaagatggtcatcttgtaacatattttcaacccaggatcatgcagcagcagcaatggctgcaaaaggagttcctgtatttgcttggaagggtgaaactgaagaagagtacgagtggtgtattgaacaaactatttgtaaagatggaaaaccatgggatgcaaatatgattcttgatgacggaagtgatcttacaggtatggtgcatgcaaaatttcctgacatgttagagactattcatggcgtatctgaagaaacaacaacgggagtgcataggttaaaagagatgctagaaaaaggcgaactaaaaattcctgccattaatgttaatgactcagttacaaaagcaaaaaatgataataaatatggatgcagacacagtcttaatgatgctctaaaaagaggaaccgatatgttgctttctggtaagaaaggattagtaattggttatggagatgttggtaaaggttcggctgcaagttggctcaagaaggcatgat

SEQ ID NO: 261110 - DNA, 253 bp, Unknown
  Bacterial polypeptide expressing nucleotide sequence isolated from the Sargasso Sea
tgccacaggtcaccctagttttgttatgagtgcctctttcacaaatcaagtcattgcacaaattgaattatggaataactcagataaatacaagaatagagtttatgtattaccaaaacatttagatgaaaaagtagcaatgttacatttagaaaaagtaggtgcaaaattaacaaaaatgtcaaaagatcaagcagattatattagcgttaaacaatcagggccattcaaaccagatacttatcgctactaa

SEQ ID NO: 261111 - DNA, 334 bp, Unknown
  Bacterial polypeptide expressing nucleotide sequence isolated from the Sargasso Sea
atgtctttagcagaaaagaccaaacaagatttactcccttataaagtgaaggacttggagctttcaagttggggaagaaaagaaattttattggcagaagctgagatgcctggcttaatgtctcttcgtgaggaatatagcgcatcaaaaccgcttcagggagctagaattgctggatgtcttcatatgacaattcaaacggctgtccttattgaaacattgactgaccttggagctgaggtttcgtggtcatcgtgtaacatattttctacccaagatcatgcagctgcagctattgcagctactggagtgcctcgtatatgcatggaaaggc

SEQ ID NO: 261112 - DNA, 535 bp, Unknown
  Bacterial polypeptide expressing nucleotide sequence isolated from the Sargasso Sea
aatggaaggatatgaagttgtactcatggacgagatgattaaagaggcagatatagttgttacagcaacaggaaacaaagacattgtaaccgctgatcacatgagagaaatgaaagatagagcaatattgtgtaatattggacactttgataatgaaattcaagttgaagcactaaaaaattataaatgggatgaaattaagccacaagttcacgaaataactttgccaagtaaaaaaagaataatactgcttgccgaggggagactagttaacctaggttgtgcaactggacatccaagttttgtaatgagtgcttcgtttactaatcaagtgactgctcagatagagctatggaataattcagataagtatgaaaaaaaagtttacgttttaccaaaacatcttgatgaaaaagttgctagattacacttagaaaaagtaggtgctaaacttacaaaaatgtctaaagatcaggcagattatattagtgtaacacctgatggaccttacaaacccgatgcatatcgctactaa

SEQ ID NO: 261113 - DNA, 289 bp, Unknown
  Bacterial polypeptide expressing nucleotide sequence isolated from the Sargasso Sea
tttattggcagagggaagattagtaaacttgggttgtgctacaggacacccaagttttgtaatgagtgcttcttttacaaatcaagttattgctcaaattgaattgtggaataatcataaaaattatgagaacaaagtttatgttttaccaaagcatttagatgaaaaagtagctacacttcatcttaaaaaggttggcgctaaattgactaaactttcaaaagatcaagcagattatatcagtgtaggagtagagggacctttcaagcctaatgcctatcgctactaa

SEQ ID NO: 261114 - DNA, 832 bp, Unknown
  Bacterial polypeptide expressing nucleotide sequence isolated from the Sargasso Sea
tatgacagattacaaagtaaaagatattaatgaagcagaatttggaagaaaagaaatctctctagcagagactgaaatgccaggattaatggcagtaagagctgaatataaaggcaaaaatccacttaaaggtgcaagaattttaggttgtcttcacatgacaattcaaacggcagttttgattgaaactttagtagatttaggtgcagaatgtagatggtcttcatgcaatatattttcaacgcaagatcatgcagcagcagcaattgcaaaagctggtattccagtatttgcttggaagggtgaaacagaggaagaatactggtggtgtgttaaacaaactattgagggtaaaaaagattgggtccctaacatgattttagatgatggtggagatcttactgctcttatgcataaagattacaaagatttattaaaaggtgtaaaaggtttaagcgaggaaacaacaacaggtgtcttggcacttaaaaaaatggaagaacaaggtcaattattagtcccagcaattaatgtaaacgactcagtcacaaaatcaaaatttgataatttatatggatgtagggaaagtttagttgatggaattaaaagagctactgatgtaatgatgtcaggaaaagttgcaatcgttgcaggctttggtgatgttggaaaaggtagtgcagcatcgttaagacaaagtggagcaagagttttagtaactgaaactgatcctatttgtgcattgcaagctgctatggaaggttacgaagtagttttaatggatgaaatgataggtcaagcagatattgttgtaactgcaactggaaaataa

SEQ ID NO: 261115 - DNA, 571 bp, Unknown
  Bacterial polypeptide expressing nucleotide sequence isolated from the Sargasso Sea
atgagtgaagattttaaggttaaagacataagtttagctgattttggtgataaagaaattgcaatagctgaaacggaaatgcccggtttaatggcattaagagaagaatatggtgactctaaacccctagatggggcaagaattgtaggttgtttacatatgacaatacaaacagctgttttgattgagactctggtattcttaggtgctactgttaggtggagctcatgtaatattttttctactcaagatcacgctgctgcagcaatagctgccaaaggcattccagtatttgcttggaaaggaatgacagaggaagaattttggtggtgtattgagaaaacattagaaggcccagatggttggaagccaaatatgattttagatgatggtggagatgctacaaaattaattcatgaaaagtatccaaaaatgttggaagaaatcttaggtttatcagaagaaacaactacaggtgtccaccgtttaaaagaaatggaaaaaaatggaacattaaaggtgccagcaataaatgttaatgactcagttactaagtctaaatttgacaact

SEQ ID NO: 261116 - DNA, 757 bp, Unknown
  Bacterial polypeptide expressing nucleotide sequence isolated from the Sargasso Sea
ccacttaaaggagcaaaaatacttggatgtttacacatgacaattcaaacagcagttttaatagaaactttggtggatctaggagcagaagtaagatggtcttcgtgcaatattttttctacccaagatcatgcagctgcagctatagccaaagcaggaattccagtatttgcctggaagggtgagacagaggaagaatattggtggtgtgttaaacaaaccatagaaggtaaaaaagattggaaaccaaatatgattctagacgatggtggagatttaactgcacttatgcataaagattacaaagatttattaaaagatattaaaggactgtcagaagaaacaacgactggagtattagcacttaaaaagatggaagctcagggaacattattagttccagcgatcaatgtaaatgactcagttacaaaatctaaatttgataatttatatggatgtagagaaagtttagtagatggaattaaaagagctacagatgtaatgatgtctggtaaggtcgcaatagtggcaggctttggagatgttggaaaaggaagtgctgcttcattaaggcaaagtggagcaagagtaatggttacagaaactgatccaatttgtgctctgcaggcagcaatggaaggttatgaagttgtgctcatggacgaaatgatcaaagaagcagatatagttgttacagccacaggaaataaagacatagtgacagctgatcatatgagagaaatgaaagatagagcaa

SEQ ID NO: 261117 - DNA, 885 bp, Unknown
  Bacterial polypeptide expressing nucleotide sequence isolated from the Sargasso Sea
tctgattttagatgacggtggagaccttacagcattaatgcataaagattataaagatatgctaaaaaatatcaaaggtgtctcagaagaaacaacaacaggcgttctagctttgaaaaaaatggaagcgaagaaagagcttttaataccagcaattaatgtcaacgattcagttacaaaatcaaaatttgacaatttatatggttgcagagaaagtttagtagatggaataaagagagcaaccgatgttatgatgtccgggaaagtagctattgttgcaggatttggcgatgtaggaaaaggaagcgcagcatcattaagacaagccggcgctagagttatgataacggaaacagatccaatttgcgcattacaagcagcaatggaaggttatgaagttgtcttaatgaacgatgcaattaaacatgcggacatagtagtaactgccacgggaaataaagatattgtaacagctgatcatatgagagatatgaaagacagagcaatattatgtaacattggtcacttcgataatgaaattcaagttgaagctttaaaaaattataagtgggacgagattaaaccccaagttcacgaaatagaactaccaagcaaaaaaagaattattttattagccgaaggaagactggtaaacttaggttgtgcaactgggcaccctagttttgtaatgagtgcttcttttactaatcaagtaattgcacaaatcgaattatggaataattcagataaatatgaaaagaaagtttatgtgctgccaaaacatttagatgaaaaagtagctatgttacatttagaaaaagttggcgcaaaattgactaaaatgtcaaaagaacaagcagattatattagcgttaaaccatcggg

SEQ ID NO: 261118 - DNA, 805 bp, Unknown
  Bacterial polypeptide expressing nucleotide sequence isolated from the Sargasso Sea
catgcagcgggacggttcgcttctgttcccggccatcaacgtcaacgactcggtcaccaagagcaagttcgataacaagtacggttgccgccactcgttggtcgatggcatcaaccgagcaaccgacacgctcattggcggcaaggtcgccgtggtgttcggctacggcgacgttggtaaaggttctgcggactcgttgcggggccagggtgctcgcgtgatcgtcaccgaggtcgaccccatctgtgctctccaggccgccatggacggctaccaagtggcaagactcgacgatgtgatcggtgaggcggacatcttcatcacggccacgggctgcttcgatgtcataaccgccgacgacatgcaaaagatgaagcaccaggcgatcgtcggcaacatcgggcacttcgacaacgagatcgatatggcgggcctcgctgctctgccgggcgtcacgcgcaagacgatcaagccgcaggttgacgagtggaccttcgccgatggccgcagcattatcgtgctgtccgagggtcgtttgctgaacctcggtaacgccaccggacacccgtcgttcgtgatgagtaactcgttcacgaatcaagtgctcgctcagatcgaactgttcaccaaacgtgacgagtacccgatcggtgtgtacacgctgcccaagcacctcgacgagaaggtggcgcgcctgcacctcgatgcgctcggcgtgcgcctgaccgagttgaacaagcagcaggcggagtacctcggtgtggacgttgccgggccctacaagccggaccactaccgctactag

SEQ ID NO: 261119 - DNA, 816 bp, Unknown
  Bacterial polypeptide expressing nucleotide sequence isolated from the Sargasso Sea
aatgccaggtcttatgtcaacacgtaacaagtacggtccagaaaaaccattgaaagggaaaaaattaacaggatcattgcatatgactgttgaaacagctgttctaattgaaactctggttgatcttggtgcagatgttcgctgggccagttgcaatattttttcaactcaggatcatgccgcagcagttattgcagactctggtatacctgtttatgcgtggaagggggaaacacttgaagaatattggtggtgtacacttcaagcacttacatttcctgatgggtctggtccagatctaattgttgatgatggaggagatgctactttgttgattcacaaaggatatgagcttgagaacttttatgctaaatatggcaacgtacctgacataaccaccaaggttgaggaagaaataattatagaaaaacttctgagagaagtattagaaaaggatcctaatcactggcataaggtaaaagaaaatgtgattggtgtctccgaagagacaaccacaggagtacacagacttgttcagatggaaaaagatggacacctcttattcccagcttataacgttaacgattctgtaacaaaatctaaattcgataacgtttatggatgtaaggaatctttagcagatggtttgaaaagagcactagatatcatggtagctggcaaaacagttgtaatatgtggctatggtgacgttggaagaggatgtgctcaatcgatgcgtggttatggtgccagggtaattgtaactgagattgacccaatctgtgctctccaagcagcgatggaaggatttgaagt

SEQ ID NO: 261120 - DNA, 893 bp, Unknown
  Bacterial polypeptide expressing nucleotide sequence isolated from the Sargasso Sea
gaaaaagaatacaaaaggtaaatctcccttaaaaggagcaaaaatattaggatgtttacacatgactattcagaccgcggtgttaatagaaacattagttgatcttggagcagaggtaagatggtcttcatgtaatattttttcaactcaagaccatgcagctgctgccatagcaaaagcaggtattcctgtatttgcgtggaagggcgagactgaggaagagtattggtggtgcgtaagacaaaccattgaaggtaaaaaagactggaaggcaaatatgatattagacgatggtggagatcttacagcacttatgcataaagattataaggaattattaaaaaacgtaaaaggtttgagcgaagagacaaccacaggtgttttagcgttaaaaaaaatggaagagcagggaacacttatggtacctgcaattaacgtaaatgactcagtaacaaaatcgaaattcgataatttgtatggatgcagagaaagtttagttgatggtataaagagagcaactgacgtaatgatgtcaggaaaagtggcaattgttgctgggtttggtgatgtcggaaaaggtagcgcggcatctttaagacaaagcggcgcaagagtgatgataacagaaacagatcctatttgtgctcttcaagcagcaatggagggatatgaagttgttcttatggatgaaatgatttctcaagcagatattgttgttactgctaccggtaataaggatatagttacagctgatcacatgagagccatgaaagacaggtcaattctatgtaatattggacactttgataatgaaatacaagttgaggcattaaaaaattataagtgggatgaaataaaaccgcaagttcatgagattacttttccagaataat

SEQ ID NO: 261121 - DNA, 788 bp, Unknown
  Bacterial polypeptide expressing nucleotide sequence isolated from the Sargasso Sea
aaataaaacattaatggttcccgcgataaacgtaaatgactcagtcacaaaatctaaatttgataatttatacggatgtagagaaagtttagtagacggaattaaaagagctacagatgttatgatgtcaggtaaagtagcaatagttgcaggatttggcgatgttggaaaaggaagtgctgcatctttaagacaaagtggtgcaagagttatggttacagaaacagatccaatttgtgcgcttcaagcggccatggagggttacgaggtagttcttatggatgaaatgattaaagaagcagatatagttgtaacagcaacaggaaataaagatattgtaacagcagaccatatgagagacatgaaggatagagctattctatgtaatattgggcactttgataatgaaatacaagttgatgctctaaaaaattataaatgggacgaaattaaaccacaagttcatgaaataacattaccaagtgataagaggataattttattagccgaagggagacttgtaaatttaggttgtgcaactggacaccctagctttgtaatgagtgcttcatttacaaatcaagtgacagcacagatcgaattatggaataattctaataaatatgaaaataaagtctatgttcttccaaaacatcttgatgaaaaagttgcaaaattacatttagaaaaagttggtgctaaactaactaaaatgtctaaagatcaagcagattacataagcgtagccccagaaggcccttacaaacctgatgcgtatcgctactaat

SEQ ID NO: 261122 - DNA, 326 bp, Unknown
  Bacterial polypeptide expressing nucleotide sequence isolated from the Sargasso Sea
attaagaaaagagtataaaggaaaaagtccacttaaaggtgcaagaattttaggatgtcttcacatgacaatccaaactgcagttctgatcgaaactcttgtagatttaggagcggaagtaagatggtcttcatgtaatattttttcaacacaggatcatgcagcagcagctatcgcaaaggcaggcataccagtgtttgcatggaaaggtgagactgaagaggaatattggtggtgtgtgaagcaaactattgaaggaaagaaggactggaaaccaaatatgattcttgatgatggtggtgatttaacatgcacttatgcataaa

SEQ ID NO: 261123 - DNA, 265 bp, Unknown
  Bacterial polypeptide expressing nucleotide sequence isolated from the Sargasso Sea
aacttaggttgtgcaacaggtcatccaagttttgttatgagcgcatcatttacaaatcaagtcacagcccaaattgaattatggaataactctgaaaactacgaaaaaaaagtttatgttttaccaaaacatcttgatgaaaaagttgcaagactccaccttgataaagttggagctaaactaacaccattatcaaaagatcaagctgactatatcagtgtaaaacaagatggaccctacaaacccgacgcttatcggtactaga

SEQ ID NO: 261124 - DNA, 397 bp, Unknown
  Bacterial polypeptide expressing nucleotide sequence isolated from the Sargasso Sea
aggtcactttgataatgaaattcaagtcgaggctttaaaaaactataaatgggacgagattaaaccccaagtacatgagattgaacttcctagtaaaaaaagaattatactattagcagaaggcagactagtcaacttaggctgtgcaaccggacacccaagttttgtcatgagcgcctcatttactaatcaagtaatagcgcagatcgaattatggaacaattcagataaatacgaaaaaaaagtttatgttttacccaagcatcttgatgagaaagtagctatgcttcatttagaaaaagtgggggcaaagctaacaaaaatgtcaaaagatcaagcggattatattagcgttaaaccatcagggccattcaaaccagatacttaccgctactaa

SEQ ID NO: 261125 - DNA, 496 bp, Unknown
  Bacterial polypeptide expressing nucleotide sequence isolated from the Sargasso Sea
atgagtgattataaagttaaagatatatcccaagcagaatttggaagaaaagagatctccctagcagagacggaaatgccaggattgatggcattaaggaaagaatataaaggaaaaaatcctcttaaaggagcaagaattttaggatgtcttcacatgacaattcaaactgcagttcttatagaaactcttgtagatttaggagcggaagtaagatggtcttcatgtaatattttttcaacacaagatcatgctgcagcagccattgctaaggtaggaataccagtatttgcatggaagggtgagacagaagaggaatattggtggtgtgtaaaacaaacaattgagggaaagaaagattggaaaccaaatatgatccttgatgatggtggtgatttaaccgcgcttatgcataaagattataaagatttattaaaagatattaaaggattatctgaagaaacaacaactggagtattggcgcttaaaaaaaatg

SEQ ID NO: 261126 - DNA, 892 bp, Unknown
  Bacterial polypeptide expressing nucleotide sequence isolated from the Sargasso Sea
gcagaatttggtaggaaagaaatttctttagcagagacagagatgcctggactaatggctataagaaaagaatacggtaaaaaaaaacctctcaaaggagcacgtatattaggttgtttacacatgacaattcagacagctgtattaattgaaacgttagtagaattaggtgcagagtgcagatggtcatcttgtaacatattttctacacaagatcacgctgcagcagcaattgcaaaagcaggagtgcctgtatttgcttggaaaggagagactgaaaaagagtattggtggtgcgttaaacaaacaattgaaggaaaaaaagattgggtacccaatatgattttagacgatggaggagatctcacggccttaatgcacaaagaatataaaaatcttctcaaaaatgttaaaggtgtttctgaggaaaccaccactggtgttttagcacttaaaaagatggaagcaaataaacaattactaattccagctataaatgtaaatgactcagtgacaaaatccaaatttgataacctatatgggtgcagagaaagtctggtagatggaattaaaagagctactgatgtaatgatgtcaggcaaggtagccattgttgcagggtatggtgatgtgggaaaagggagcgccgcttctttaagacaagcaggagcaagagttctagttacagaaaccgaccctatttgcgcacttcaagctgctatggaaggttacgaagttgtattaatggatgatgcaattaaagatgcagatattgttgtaacagcaactggtaacaaagatattgttactgctgatcatatgagaaatatgaaagacagagctattctttgtaacataggtcacttcgataacgagattcaagtcgaagctc

SEQ ID NO: 261127 - DNA, 718 bp, Unknown
  Bacterial polypeptide expressing nucleotide sequence isolated from the Sargasso Sea
ggtgaagaagaagttattatagagaaattattacaaaaatttcataaaaaaaatccacactactggcatacaattgtaccaaatattattggtgtatcagaagaaactactacaggtgtattaagattagagcaaatggaaaaagataataaattattgtttgctgcatttaacgttaatgattctgctacaaaatcaaaatttgataatctctatgggtgcagagagtctcttgcagatgggattaaacgctctactgaaataatgttagcaggaaaaacagtagtagtttgtggttatggtgatgttggaaaagggtgtgcacaatcaatgaagtcttatgggtgcaaagtaatagtcactgagattgatccaatttgtgcattacaggcatctatggaaggtttcccagttaaaaagattgaagatactctaaatgaaggaaatatttttgtcactgctacaggcaatagagatattatcactttaaaacatatgaaaaaaatgaatgatcaagcaatcgtatgtaatattggtcattttgataatgaaattgagatggatgcattaaataaatcaaatgctaagaaagaagaaattaaacctcaatatgattgctatacattcccaaatggaaaacaaatttttattctatcagaaggacgattagtcaatctaggttctgcaacaggacatgcaagttttgtaatgtccactt

SEQ ID NO: 261128 - DNA, 929 bp, Unknown
  Bacterial polypeptide expressing nucleotide sequence isolated from the Sargasso Sea
tcggggtgtaatatttttctcaactcaagaccatgcagccgccgcaatagccgaatctggtgtgccagtatttgcctggaaaggacaaacggaagaagaatttaactggtgtatcgagcaaacaatattgtttgaaggaaagccttgggatgcaaatatgatcctcgatgatggaggagacctgacagcaatggctcatgaaaagtatcctgagatactagaacacattcatggcataacggaagaaaccactacaggtgttgttcgtcttaatgaaatgattgaaaggggtgagttaaaagttcctgcaataaatgttaatgactcagttactaaatctaaaaacgacaataagtacggaactaggcatagtctcaatgatggtattaaaagaggaacagacatgttcttggcaggaagaaaggctttagtcattgggtacggggatgtcggaaaaggatcagcacaaagcttaaagcaagagggcatggttgtacgtgttactgaaattgaccccatatgtgcaatgcaagcatgcatggatgggtatgaggttgtttcaccttatatagatggtgtaaacaacaatgatgagaaatctataaataaagatttattagaagatacagatttaattgttaccactactggaaattacaaagtttgtgataaacatatgttaaaagctttaaaaaaaggagctgtggtttgcaacatcggacattttgacactgagatagatacccaatttatgagagataattgggcttgggaagaagttaaacctcaagttcataaaatcttcagagatactaaaactagcaaatctcctaatctagatagtgaagactatttgatccttctttcagaaagaaggttggtaaatctaggaaatgctactggtcaccctttcagaataatggatggat

SEQ ID NO: 261129 - DNA, 367 bp, Unknown
  Bacterial polypeptide expressing nucleotide sequence isolated from the Sargasso Sea
atgacacaggattataaagtaaaagatattaatcaggcagatttcggcagaaaagaaatttctttagcagaaacagaaatgccaggattgatggctttgagaaaagaatataaaggcaaaaaacctttaaagggcgcaaaaattctaggttgtcttcacatgacaatacaaacagcagtattaattgaaacgttagtagaattgggagctgaagttagatggtcctcatgtaatatattttcaacacaagatcatgcggcagcagcgatagctaaagctggcattcctgtttttgcctggaaaggtgaaaccgaagaagaatactggtggtgtgttaaacaaactattgaaggaaaaaaagattgaa

SEQ ID NO: 261130 - DNA, 263 bp, Unknown
  Bacterial polypeptide expressing nucleotide sequence isolated from the Sargasso Sea
tcttggaaatgcgactggtcatccatcttttgtaatgtccgcaagctttagtaatcaagtcctagcccaaatcgagctgtggaaaaatggtaaaaattattccaatagcgtatacacgctgccaaaacatctggatgaaaaagttgcaaggttgcacttggagaaaataggagtgaaacttacaaaactagagaaagatcaggctgattatattggcgttaatgaggccggaccatttaaaagcgacagctatcgctattaat

SEQ ID NO: 261131 - DNA, 859 bp, Unknown
  Bacterial polypeptide expressing nucleotide sequence isolated from the Sargasso Sea
aatggaaaatgactataaagttgctgatataaatcttgctgaatttggaagaagagaaatttctcttgctgagaatgaaatgccagcattaatggctttaagagacaaatatagatctgagcaaccacttgctggtgctaaaattatgggctgcatccacatgacaattcaaacagctgtcttgatggagacactgattgatcttggtgctgagctgagatggtcgtcatgtaatattttttcaactcaagatcatgctgcggctgctatggctgcaaaaggaattccaacttttgcatggaaaggcgaaacagaagaagaatttgagtggtgtatagaacagactatttgtaaggatggtaaaccatgggatgcaaatatgattcttgatgatggtagtgatcttactgccatggttcatgaaaaatttccagatatgcttgaaacaattcatggtgtatcagaagaaactacaactggagttcatagactaaaagaaatgcttgaaaaaggtgaactcaaaattcctgccattaatgttaatgattcagtaacaaagtcaaaaaatgataataaatatggttgtaggcatagcctaaatgatgcgcttaaaagaggaactgatatgttgctctctggtaaaaaaggtcttgttattggatatggtgatgttggcaagggctcagcattaagcctagctcaagaaggaatgatagttagcgttgttgaatcagatccaatttgtgcaatgcaagcatgtatggatggattttctgtggtttcttgttataaagatggggttgttaccagagatactaaagatattaatgtgcaagttatggagatactgacctggtag

SEQ ID NO: 261132 - DNA, 463 bp, Unknown
  Bacterial polypeptide expressing nucleotide sequence isolated from the Sargasso Sea
atggttatcgcgaattcaattaaaaagtcagttccagccttcgtaatttctgacattgcgttatcagcttttggtcgtaaagaaattaaaatcgcagaaactgaaatgccaggattaatggcacttagagttaaatatcaatctgaaaagccacttaaaggtgcaaaaatagctggaagccttcatatgacaattcagacagcagtattaatagaaactcttgtcgatcttggtgcagaagtgaaatgggcttcttgtaatattttctcaacccaagatcatgcagctgcagctattgcagatcaaggaatctcagtatacgcaaaaaaaggtgagacgcttgatgaatattggcaatacacccactatattcttgattggggttcagaatctccaaatatgattcttgatgatggaggggacgcaactggattattgatacttggtagcaaggcagaaaaag

SEQ ID NO: 261133 - DNA, 605 bp, Unknown
  Bacterial polypeptide expressing nucleotide sequence isolated from the Sargasso Sea
tatggttcaagattataaagtaaaagatattaacgaagcagattttggaagaaaagaaatttctttagcagaaacagaaatgccaggactcatggctctccgaaaggagtacaaaggtaaaaaacctttaaaaggtgcaaaaatcttaggctgtcttcatatgactatacaaacagcggtgttaattgaaactttagtggaattgggagcagaggttagatggtcttcttgtaatattttttcaacacaagatcatgcagctgccgcaatagccaaagcgggaattcctgtctttgcatggaaaggtgagacagaagaggaatactggtggtgcgttaagcaaactattgaaggaaaaaaagactggaaaccaaatatgatcttagacgacggtggtgaccttactgctttaatgcataaagaatataaaaatttattaaaagatgttaagggtgtttcagaagaaactacaacaggtgttttagcacttaaaaaaatggaggctgctcaagagctattaatacctgctataaatgtaaacgattcggtgacaaaatctaaattcgataacctttatggttgtagagaaaagttagtagacggga

SEQ ID NO: 261134 - DNA, 886 bp, Unknown
  Bacterial polypeptide expressing nucleotide sequence isolated from the Sargasso Sea
ctgtcttcacatgacaattcaaaccgctgtgcttatagaaacactagttgatttaggtgccgaagttagatggtcatcatgtaatattttttcaacacaagatcatgctgcagctgctattgcaaaagcaggaataccggtatttgcgtggaaaggagagaccgagaaagagtattggtggtgtcttgaacaaaccattgagggtaaaaaagattggaaacctaacatgatcttagacgatggaggcgacctcacggctttaatgcataaagattataaggaactacttaaaaatgttaagggattatcagaagagactacaacaggtgttttagctttaaaaaaaatggaggcaaataatcaattattagttccagctattaatgtaaatgactcagttacaaaatctaagtttgacaatttatatggatgtagagaaagtttagtagatggtattaaaagagcaacagatgttatgatgtcaggcaaagtagctattgttgctggatttggagacgtaggtaaaggaagcgctgcatcattacgccaagctggcgcgagagtaatggttacagaaacagatccaatttgtgctcttcaggctgctatggaaggttatgaagtagttttaatggatgatgcaattaaagatgcagatatagttgttacagcaactggcaacaaagatatagttactgcagaccacatgagaaatatgaaagatagatccatactttgtaacattgggcattttgataatgagatacaagttgaagctttaaaaaattataagtgggacgaaattaaaccacaagttcatgaaattgaattaccaagtaaaaaaagaattattttattggctgaaggaaggctagtaaatttaggt

SEQ ID NO: 261135 - DNA, 316 bp, Unknown
  Bacterial polypeptide expressing nucleotide sequence isolated from the Sargasso Sea
tatggagagttctactgttgcccaaaacaaatctcttggctatttagtagcagacattggtcttgctgaatttggaaggaaggaaatagaaatcgcagagcatgaaatgccagggctaatgtcaattagaaatgaatactcgaacgacaaacccctggacggaatcaggatcactggttcccttcacatgacagtacaaacagcagtgttgatcgagactctcgtagatttaggagcatcagtcagatgggctagctgcaacatcttctctactcaggaccatgctgcagcggcaatcgcaaagtctgggactcca

SEQ ID NO: 261136 - DNA, 301 bp, Unknown
  Bacterial polypeptide expressing nucleotide sequence isolated from the Sargasso Sea
caaaagaattattttattagccgagggaatattggttaacttaggctgtgcaactggtcatccaagttttgtaatgagtgcttcttttacaaaccaagtaacagcgcaaattgaactttggaataattctgttaaatatgaaaataaagtatatgttttacctaaacatttagatgagaaagttgcaaggctacaccttgaaaaagttggagctaaattaactcctttatcaaaagatcaagcagattatattagtgttaaaccagaaggtccatataagccagatgcatatcgctactag

SEQ ID NO: 261137 - DNA, 256 bp, Unknown
  Bacterial polypeptide expressing nucleotide sequence isolated from the Sargasso Sea
agattagcagaggcagaaatgccaggtcttatgtcattaagagaagagtatggagactctaagcctcttgcaggagctagaattgcgggatgtcttcacatgaccattcaaacagctgttttgattgaaacacttgttgagcttggagctgaagtgacttggtcttcttgtaatatttctttctacacaagatcaagcagcagcagctatagccgcttctggtgttcctgtttatgcatggaaaggaatgaatgat

SEQ ID NO: 261138 - DNA, 798 bp, Unknown
  Bacterial polypeptide expressing nucleotide sequence isolated from the Sargasso Sea
tatgctcttagatgacggtggtgatttaactgcaatcatgcataacgagtatcaagatttgatgaaagatattaaaggtgtttctgaagaaaccacaactggaatcaaagctttaaataaaatggaaaaagataactcacttttagtgccagcaatcaatgtaaatgattctgtaacaaaatcaaaatttgataatttgtatggttgtagagaaagtttagttgatggaattagaagagctacagatgttatgatgtcaggaaaaattgcaattgttgcaggttttggagacgtaggtaagggaagtgctgcatcattaagacaaagtggagcaagagttttagtaacagaggctgatccaatttgtgctcttcaagctgcaatggaaggttatgaagttgttttaatggaagaagctattagtcgagcagatattgttgtaactgcaactggcaataaagacatagttacagctgatcatatgagagatatgaaagatagagcaattttatgtaacattggtcattttgataacgaaatacaagttgaggcattgaaaaattataaatggacagaggttaaaccacaagttcacgaaatagaattgccaagtaaaaaaagaattattctattagcagagggaagattagtaaatttgggttgtgctactggtcacccaagttttgtaatgagtgcttcatttacaaatcaagtaattgcacaaatagagctttggaataatcataaaaactatgaaaacaaagtttatgttcttcctaaacatttggatgaaaaagt

SEQ ID NO: 261139 - DNA, 763 bp, Unknown
  Bacterial polypeptide expressing nucleotide sequence isolated from the Sargasso Sea
atcaatgtcaatgactcggtcacaaaatcaaaaattgacaatctctatggatgtcgcgaatcacttgtagatgggatcaagagagcaaccgatgtcatggtagctggaaaaattgctgttgttgctggatacggggacgttgggaaaggctcagcgcagagtctcagaggccttggtgctacagtttggataaccgaaatcgacccaatatgtgcacttcaagctgcgatggaaggatatcgagttgtaactatggatgatgcttgcactcaagcagatatctttgttactgccactggaaactacaatgttattgataaacatcacttagaacagatgaaggatcaagcaatcgtctgcaatattgggcattttgataatgaaatcaacgtagaatccataaaagatcatgagtggataaatatcaaacctcaagttgatcacattgtcttccctgatggcaaaagaatcattctccttgctgaaggacgtttggtaaatttaggttgtggcacaggccatccgagtttcgtgatgtctaactcattctgtaatcaaactcttgcgcaaatagaattattcaaaaacagttcaaattatgagaatcaagtttatgttctaccaaagtcgttggatgaaaaagttgcaaaacttcatcttgataagataggagctaaactgaccaaattgactactgaacaagctgaatatattggtgttaaggaatcaggaccatataagcctgatcattacagatactgat

SEQ ID NO: 261140 - DNA, 328 bp, Unknown
  Bacterial polypeptide expressing nucleotide sequence isolated from the Sargasso Sea
catgcaaaatagagtcaaaaatactgaaattgctaaaaatgatttcaaagtagctgacctcagtttagctgaacttggccggaagagtattaccatggcagaacatgaaatgccgggtctaatgatgcttcgcgatgagtataaagataaaaagcctcttgcaggggctcgtattacaggatcattacatatgacagttgaaactgctgttttgatagaaactctaataattcttggagccgaagttcgctggtcttcatgtaatatattttcaactcaggatgaggctgcagctgcaatggctgaagcaggtgtacccgtatttgcc

SEQ ID NO: 261141 - DNA, 784 bp, Unknown
  Bacterial polypeptide expressing nucleotide sequence isolated from the Sargasso Sea
cctatatgtgccagctatcaacataaatgactcagtcacaaagtcaaaatttgacaataaatatgggtgtagagaatccttagtagatggtatcagaagagctaccgatgtcatgattgctggaaaggtagcagtagttgctggtttcggggatgtaggtaaaggttcggctgaatctttgagaggagctggagctagagtcatagtaacagaaattgatccaatttgtgcacttcaagcagctatggaagggtatgaggtaaagaaaatgaaagatgcaattccagaagctgatattgtagtaaccgctacaggcaataaggatatcatttcaggagagcattttgaaattatgaaagataaaactatagtttgtaatattggtcacttcgataacgaaattgatgtagcatggctaaacgataattggggtgaatcaaaagataccatcaagcctcaagttgataaatacaccattggaaatcacgatattatattattagcagagggtcgattaattaacttaggttgtgccactggtcacccttcatttgtcatgtctgcttctttcactaatcaggtgattgctcaaatcgaattgtggaataatatcgataattacgaaaagaaagtgtacactttacccaagcacttagatgaaaaagttgctcgtctacatttagctaaaattggagttgagttagatgagttagataaagatcaggcagactacattggtgttccagtaaatggtccatataagcccgattattacaggtactaa

SEQ ID NO: 261142 - DNA, 754 bp, Unknown
  Bacterial polypeptide expressing nucleotide sequence isolated from the Sargasso Sea
tcaacacaagaccatgcagctgctgcgatagctaaagcaggcatacctgtttttgcatggaaaggtgagacagaagaagaatattggtggtgtgtgaaaaaaacaattgaaggtaaaaaagattggaaagccaacatgattcttgatgatggaggagacttaactgctttaatgcataaagattataaagatatgttaaagaatataaaaggactttctgaagaaacaacaacaggtgtattagctcttaaaaagatgcagtcacagggtacattattagttccagcaattaatgttaatgactctgttacaaaatcaaaatttgataatttatatgggtgcagagagagtttagttgatggaattaaaagagccactgatgttatgatgtcaggaaaagttgcaatagttgcaggttttggcgacgttggaaaaggaagtgcagcatctttaagacaaagtggagcaagagttatggttactgaaactgatccaatttgtgctcttcaagctgccatggaaggttacgaagttgttattatggatgaaatgatcaaagaagcggatatagttgtaacagctacaggtaataaagatattgttacggctgaccatatgagagatatgaaagatagagcaatactttgtaatattgggcactttgataatgagatacaagtagaagctttaaaaaattacaaatgggatgaaattaaaccccaagttcatgaaataactttacccagtaaaaaaa

SEQ ID NO: 261143 - DNA, 642 bp, Unknown
  Bacterial polypeptide expressing nucleotide sequence isolated from the Sargasso Sea
ttgcaggttttggtgatgtgggtaaaggtagtgcggcatctttgagacaaagtggagcaagagttttagtaacggaagctgatccgatttgtgctctacaagctgcaatggaaggttatgaagttgtattaatggaagaagcaataagtagagccgatatagttgtaacagccacaggaaataaagatattgtgactgctgatcacatgagagacatgaaggatagagcaatattatgtaacattggccattttgataatgaaatacaagttgaagctctaaaaaattataaatggacagaggtaaaaccccaagttcatgaaatagaacttcctagtggtaagagaattatacttttagcagaaggaagattagtaaatttaggatgtgcaactgggcatccaagctttgttatgagcgcatcatttacaaatcaggttatagctcagatagagctttggcataatcataaaaattatgaaaataaagtatatgttttaccaaaacatttagatgaaaaagtagccacattacacttgaaaaaagttggagcaaagctaaccaagctatcaaaagagcaagcggattatatcagtgttaaaacagaaggtcctttcaagccagatgcctatcgctattaaa

SEQ ID NO: 261144 - DNA, 412 bp, Unknown
  Bacterial polypeptide expressing nucleotide sequence isolated from the Sargasso Sea
atggttatcgcaaattcagttaaaacctctacacctaattacgtaattgccgatatttcattgtcagattttggtcgtaaagaaattaagattgccgaaactgaaatgcctggattaatggcacttagagataaatatcaatctgaaaagccactaaaaggtgcaaaaatagctggcagcctacatatgactattcagacggcagttttaatagaaactcttgttgatctcggtgcagaggtgaaatgggcttcatgtaatattttttcaactcaagatcatgcggctgcagccatagcagatcaaggaatctctgtatatgcaaaaaaaggtgaaactcttgatgaatattggcaatatacccactgtattcttgattggggttcagactctccaaaatatgattcttgat

SEQ ID NO: 261145 - DNA, 221 bp, Unknown
  Bacterial polypeptide expressing nucleotide sequence isolated from the Sargasso Sea
tatggaagattacaaagttaaagacatatcagaagcagaatttggaagaaaagagatttccttagcagaaactgaaatgcctgggttaatggcattaagaaaagaatacggtcaaactaagcctttaaaaggtgcacgaattgtagggtgtttacatatgacaattcaaactgctgtactaattgaaactcttgttgaactgggtgcagatgtcagatggt

SEQ ID NO: 261146 - DNA, 916 bp, Unknown
  Bacterial polypeptide expressing nucleotide sequence isolated from the Sargasso Sea
gccctgcgcgccgaatatggcgaaagccagccgctcaaaggctcgcgcatcgttggctcgcttcacatgacgatccaaaccgccgttttgattgaaacgctggttgcgctgggcgcggatgtccgttgggcttcgtgtaacattttttcgacccaagaccacgccgccgctgcgattgccgatgggggcacgccggtgtttgccatcaaaggccaaacattgaccgagcattgggattacctcgaccggtcgttccaattccccgagggggccaacctgatcctcgacgatggcggcgatgcgacgctatatgttttgcttggcgcgcgggtcgaagcgggcgaaaccggattgatcgaagtgccgacctcggaagaggaagaggcgattttcgcccaaatcaaaaagcgcatggccgaaagccccggttggttcaccaaaacccgtgacgccatcaaaggtgtttcggaggaaaccaccaccggcgtgcaccgcctttatgatcttcataagaaaggccaattgcctttccctgcgatcaacgtgaacgattctgtcaccaagtcgaaattcgacaataaatacggctgtaaagagagcctcgtggacggtatccgccgtgccaccgatacaatgatggccggtaaggtctctgtcgtgtgcggttatggcgatgtgggcaaaggttgtgccgcgtctctcagcggtgcaggtgcccgcgtcaaagtcaccgaggtcgatccgatttgtgcgttgcaagcggcaatggacgggtttgaggtggttttgctcgaagatgtggtcgatagcgccgacattttcatcaccaccaccggcaacaaagacgtcattcgcatcgaacacatgcgtgcgatgaaggatatggcaatcgtcggcaacatcggccacttcgata

SEQ ID NO: 261147 - DNA, 919 bp, Unknown
  Bacterial polypeptide expressing nucleotide sequence isolated from the Sargasso Sea
attttacaggagattattataatgagcagttcttacattgttaaagatataaatttggctggttttggaaaaaaagaaattctgattgcagagacagaaatgccaggattagttgctaccgttgatgaattgggggaaaaaaaacctttaagcggtgctaaaatagcaggttgtctccatatgacaattcaaactgcagttttaattgagactttagttaaactaggagcccaagtaagatgggcaagctgtaatatattttccacacaagaccatgcagcagcagcaattgctgcccaagaaattccggtatttgctaagaaaggtgaaactttaaaagaatattgggaatatgtagataaaatttttcattttgacgacggttttgctaatttaattttagatgatggtggtgatgccactatgtacattatattaggagccagagctgagtcaggagacgtagattttttaaaagccccaaattcagaggaagaggagtttttatttgaaaccataaaaatgcgtttagaaaagagtccaggttggttttctaaacaaaagtcctcaataaagggtgtttcagaagaaactacaacaggagttcatagattatatcaaatgatggaaaacaatgatcttccttttcctgccataaatgttaacgatagtgtgacaaagtcaaagtttgacaataaatacggttgtagagaatctcttgttgatggtattcgaagagcaaccgatactatgataagtggaaaaacagctgttgtttgtggttatggtgatgttggaaagggctcagctgcctctttaagaggagctggggcaaaagtagtagtaacagaagttgatccaatttgtgcattacaaggttcaatggatggatttgatgtagtaacacttgatcaagttg

SEQ ID NO: 261148 - DNA, 841 bp, Unknown
  Bacterial polypeptide expressing nucleotide sequence isolated from the Sargasso Sea
atgatacttgatgatggtggagatttaacagcattaatgcacaaagattataaagaattaatgaaattaattaaaggtttgtcagaggaaacaacaactggagttttagctttaaaaaaaatgcaatctgaaggaaaattacttgttccagcaattaatgttaatgattctgtgacaaaatctaaatttgataacttatatggttgtagagagagtttagttgatggaataaaaagagctacagatgttatgatgtctggaaaagtagcaattgttgctggatttggagatgtcggaaaaggaagcgctgcatctttaagacaaagtggtgctagagttatggtaacagaatcggatcctatatgtgctcttcaggctgctatggaaggttatgaagtagttttaatggacgaaatgattaaagaggcagatgttgtagttacagcaacgggaaataaagacatagttacagcagatcatatgagagagatgaaagatagggcaatactatgtaatattggacattttgataatgaaattcaagtagaagctttaaaaaactataaatgggatgaaataaagccacaagtccatgaaataacgtttccagataaaaaaagaattatattgttagccgaaggaagattggtaaatttaggttgtgccacaggacatccaagttttgttatgagtgcttcatttacaaatcaagtaactgcacaaatagaactttggaacaattcagataagtatgaaaaaaaagtatatgtactgccaaaacatcttgatgaaaaagtagcaagattacacttagataaagtaggtgcaaaactaactaaac

SEQ ID NO: 261149 - DNA, 232 bp, Unknown
  Bacterial polypeptide expressing nucleotide sequence isolated from the Sargasso Sea
taatgtagtgcatcgttttacaaatcaagtaactgctcaaatagaactttggaataattcttctaaatatgaaaaaaaggtttatgttttaccaaaacatcttgatgaaaaagtagctatgttacacttagataaagtgggcgcaaagttaacaaaactgtcaaaagaacaggctgattacataagtgtaaaacaagaaggaccatataagccagatgcttaccgctactaa

SEQ ID NO: 261150 - DNA, 539 bp, Unknown
  Bacterial polypeptide expressing nucleotide sequence isolated from the Sargasso Sea
catgagtgaagattataaagtaaaagatattagtttagctgatttcggaaacaaagaaattgcaattgctgaaactgaaatgccgggtttaatggcaatacgtgaagaatatggagataaaaaacctcttcaaggtgccagaattgtcggttgtcttcatatgactatccaaacagcagtattaattgaaacattggtttatttaggtgcaacagtaagatggagctcatgcaatatattttcaactcaagatcatgctgcggcagctatagcagctaaaggtattcctgtattcgcttggaaaggtcagacagaagaagaattttggtggtgtattgaaaaaacattagagggaccagatggatggcaaccaaatatgattctagatgatggaggagatgcaactaaaattattcatgaaaaatatcctaaaatgcttgaaaatattttaggtttatctgaagaaactacaacaggtgtccatcgcttaaaagaaatggaaaaaaagggtttactgaaagtaccagctataaatgtaa

SEQ ID NO: 261151 - DNA, 613 bp, Unknown
  Bacterial polypeptide expressing nucleotide sequence isolated from the Sargasso Sea
gagtgccgcatcattaagacaaagcggagctagggtaatggttaccgaagcagatcctatttgtgctctacaggctgctatggagggttacgaggtagttttaatggatgaagcaataggtagtgctgatatagtagttacagcaactggtaataaagatattgttacagcggatcatatgagaaaaatgaaggaccgctcaatactttgtaacattgggcatttcgataatgagattcaagtagaggctttaaaaaattataaatggaacgagataaaaccccaagtacatgaaatagaatttccggataagaaaaggattcttctattagctgaaggacgtttagtcaacttaggttgtgcaacaggtcatccaagttttgttatgagcgcatcttttacaaatcaaactattgctcaaatagaactttggaacaattctgataaatatgaaaacaaggtatatgttttacctaaacatttagatgaaaaagttgcgatgcttcatttaaataaagttggagccaaattaacaaaacttacaaaaaatcaagccgattatattagcgtcggcgttaaaggcccctttaaacctgatagttatcgctactaa

SEQ ID NO: 261152 - DNA, 829 bp, Unknown
  Bacterial polypeptide expressing nucleotide sequence isolated from the Sargasso Sea
aataacttaggtccaaatcttattgtagatgatggtggcgatgcaacattattaattcataaaggatatgaattagaaaactattttaataaacataaaaaacttccaaaaatcactacacaagttgaagaagaaattgtcattgaaaaacttttaaggaaagttcataaacttaatccaaatcattggcataatattgttcctgaaattgtaggtgtttcagaagaaacaacaacaggcgtagctagattgcagcaaatggtagaagatgctactttgttatttccagcatttaatgttaatgatgcagcaactaaatcaaaatttgacaatctttatggttgtagagaatctttagcagatggtattaagcgctcaacagaaattatgcttgctggtaaaaccgtagttgtttgcggttatggagatgtggggaaaggatcagctcagtcaatgaaatcatatggttgtaaagttatcataactgaaattgacccaatatgtgcactgcaagcagcaatggaaggatttgaagtaagaagactagaagatgttttagatagaggaaatatttttgtaacaactacaggtaataaagatatcattacattaaaacatatgaaaaaaatgaaggatcaggccattgtttgtaatattgggcactttgataatgaaattcaagtagaagcgctaaataagtcaaatgctaaaagagatcaaataaaacctcaacttgatagatatactttcaaaaatggtaggcaaatatttattttggcggaaggtagactagttaacttaggatgtgcaacaggccatgcaagttttg

SEQ ID NO: 261153 - DNA, 172 bp, Unknown
  Bacterial polypeptide expressing nucleotide sequence isolated from the Sargasso Sea
taaaaattacgaaaacaaagtttatgttttaccaaaacatttagatgagaaagtagctacacttcatcttaaaaaagttggtgctaaattaactaaactttctaaagatcaagcagattatatcagtgtaggggtagagggacctttcaaacctaatgcctatcgctactaa

SEQ ID NO: 261154 - DNA, 595 bp, Unknown
  Bacterial polypeptide expressing nucleotide sequence isolated from the Sargasso Sea
ccgctgggcgagctgcacatcttctcgacccaggaccaggccgccgcggcgatcgccaaggccgggacctcgtcggtgttcgcgtggaagggcgagacgcttgaggagtattggtggtgcacggagcagatgctcacgtggccgggcaaggacggcccggacttgatcgttgatgatggtggcgacgctacgatgctcatccacgagggccggaaggccgaggagaagtacgcgaaggacggcacccttcctgacccggcctcgacgacgaatgctgagttcaagtgcgtgctcgcattgattcgcgagtccatcaagaaggacccgaagaagtggaccaagatgtccaagtgcgtccgcggcgtcagcgaggagaccaccaccggcgttcaccgcttgaagcagatggcggcgaagggcgagctcctcttcccggcgatcaacgtgaacgactgcgtgaccaagtcgaagttcgacaacgtctacgggtgccgccactcgctcacggatgggatcatgcgggccaccgacgtcattcatggcggcttattcgacggggaggatgttgcgttgctgaaaaatgatgacacgtaat

SEQ ID NO: 261155 - DNA, 193 bp, Unknown
  Bacterial polypeptide expressing nucleotide sequence isolated from the Sargasso Sea
attgaacttctggaataattcagataagtatgaaaagaaagtatatgttttaccaaaacatttagatgaaaaagttgcaagacttcacttagaaaaagttggggctaaattaaccaagttatctgaagatcaagctcaatatattagtgtaacaacagaaggaccatacaagcctgatgcgtatcgctactaa

SEQ ID NO: 261156 - DNA, 793 bp, Unknown
  Bacterial polypeptide expressing nucleotide sequence isolated from the Sargasso Sea
atgtcacaggattttaaagtcaaagatattaatcaggcagaatttggtagaaaagaaatttctatagctgagactgaaatgccaggtttaatggcattgagaaaagaatatcaaggaaaaaaacctcttaaaggagcaaaaattttaggttgcttacacatgacaattcaaactgcagttctaatcgaaactttagtggagcttggagctgatgttagatggtcatcatgtaatattttttctacacaagatcatgcagcagcagcaatagcaaaagcaggaatacccgtctacgcttggaaaggtgagaccgaggaagagtattggtggtgtataaaacaaactatagaaggaaagaaagactggaaaccaaatatgttattagatgacggaggagaccttacagctttgatgcataaagattataagaatcttttaaaatccgtaaaaggtttgtccgaagaaacaactactggaattaaagcactaaaaaaaatggaagcagaaaaaaaacttttagttcccgcaattaatgttaatgactcagtaacaaaatcaaagtttgataatttatatggttgtagagaaagtttagttgatggaattaaaagagcaactgatgtcatgatgtctggaaaaacagctatagttgctggatttggcgatgttggaaaaggaagcgctgcttctcttcgacaaagtggtgcaagagtaatggtaacagaagcagatccaatttgtgcgctacaggccgctatggaaggatatgaagtggttttgatggatgaagcga

SEQ ID NO: 261157 - DNA, 781 bp, Unknown
  Bacterial polypeptide expressing nucleotide sequence isolated from the Sargasso Sea
aggaacagatatgttgctttcaggtaaaaagggtcttgtaattggctatggtgatgttgggaaaggatccgctgcaagtttggctcaagaggggatgattgtaagtgtagttgaatcagacccaatatgtgccatgcaagcttgtatggatggattttctgttgtttcttgttacaaagatggaatagttacaagaaaacctgacgatataaatatgtctgtgatgggggatactgatttaattgttaccacaactggtaatgtaaatgtatgtgattcagctatgttgagtactcttaaaaatacagctgtggtttgtaacattggtcattttgataatgagattgatacagcatttatgagagaacaatattattgggatgaaataaagcctcaagttcatagggtgtttagggataccgccccagatggaactccagacttatcaagtaaaaattatattattcttttagcagaaggcaggctggttaatcttggaaatgctactggtcatccaagcaggattatggatgggtcttttgcgaatcaagtcttagcccaaatacatttatttaaacagggttttgcaaatgtaaatgatgctgacaaaaaagctgaaatgataactgttgaagttcttccaaaaaaacttgacgaagaagttgcaagtcttatggttgagggctttggcgggatggtaactaagcttactaaagatcaagcagactacattaatgtgcctcaagagggtccatttaaagaggaaagttacaaatactaa

SEQ ID NO: 261158 - DNA, 328 bp, Unknown
  Bacterial polypeptide expressing nucleotide sequence isolated from the Sargasso Sea
aatggtcacaaaaaacgaaaaaataagcaaaattggaactgattataaagtagctgatatatctttagctgaatttggaaaaaaagaaattaagattgctgaaacagaaatgcctggattgatggcaattagagaagagtataaaaaccagaaaccactcaaaggtgcaaatatacttggttgtcttcacatgactatccagacagctgttcttattgagacgcttggtgatttaggtgcttctgttagatggtcttcttgtaatattttttcaactcaggatcatgcagcagctgcaatagcaagtcaaaatattcctgtatatgca

SEQ ID NO: 261159 - DNA, 322 bp, Unknown
  Bacterial polypeptide expressing nucleotide sequence isolated from the Sargasso Sea
catggcgaaccaggccatcgacataacgaaaaaagaaaatgactataaggttgctgatatcagtcttgctgattggggtagaaaagagattacaatcgctgaatcagagatgcctgcacttattgctcttcgtgaaaaatatcgctcagagcaaccactcgctggggccaaaatattaggttgtattcatatgacgattcagactgcagttttaattgaaactcttgagtcattgggtgctgaagtgagatggacgtcttgtaatatattctctacccaagatcatgctgctgcagcaattgctgctaacggcacgcctgtc

SEQ ID NO: 261160 - DNA, 340 bp, Unknown
  Bacterial polypeptide expressing nucleotide sequence isolated from the Sargasso Sea
atgagtgactataaagtaaaagatataaatcttgcagaatttggtagaaaagaaatttcattagcagaaactgaaatgcctggtttaatggcactaagaaaagagtataaaggaaaaaacccactaaagggtgctagaattcttggatgtttacatatgacaatccaaactgctgttttaatagaaacattagtggaattaggagccgaagtaagatggtcttcttgtaatattttttcaactcaagatcatgcagctgcagctattgcaaaagcaggtatccctgtatttgcatggaaaggtgagacagaggaggaatattggtggtgtgtaagacaaa

SEQ ID NO: 261161 - DNA, 358 bp, Unknown
  Bacterial polypeptide expressing nucleotide sequence isolated from the Sargasso Sea
attggaattcaatgattacaaagttgctgatatagggcttgcggactggggaagaaaagaaatagaaatcgctgaaacagaaatgcctggtttgatcaccctaagaaatgagttaagcaaatctaaaccgttaaaaggagcaaatattgttggttgcctccatatgacaattcaaactgcagtattgattgaaactctaattgacttaggggcaacagttagatggtcatcctgtaatattttctctactcaagaccatgctgcggcagcaatagctattaaaagtatacctgtttttgcttggaaaggtgaaacagaagaagaatatgagtggtgtattagacaaacaattgaaggg

SEQ ID NO: 261162 - DNA, 901 bp, Unknown
  Bacterial polypeptide expressing nucleotide sequence isolated from the Sargasso Sea
ttaatggcattaagaagtgaatataaagggaaaaaaccacttgatggcgcaagaattcttggttgtcttcacatgaccattcaaactgctgtactaattgaaacattagtggaactaggcgcggatgtaagatggtcatcttgtaatatattttctacgcaagatcatgcggcagctgcaatagccaaagcaggtataccagtttatgcttggaaaggtgaaacagaagaagaatattggtggtgcgtaagacaaacgatcgaaggtaaagagggttggaaaccaaatatgattcttgacgacggtggcgatctcacaagtttgatgcataaagaatataatgaactattgaaagaagttaaaggcctctctgaagaaacaacaacaggcgtacttgctctaaaaaaaatggagaacgatggaacgttaatggtgccagccattaatgtaaatgactcagttactaaatctaaatttgataatctttatggatgtagagaaagtttagttgatgggattaaaagagctactgatgttatgatgtcaggaaaagttgctatcgtcgctggttttggtgatgttggtaaaggcagtgcagcgtcattacgtcaaagtggtgcaagagtaatggttaccgagacagacccaatttgcgcattacaggcggctatggaaggctatgaagttgtattgatggatgaaatgatcaaagaagcagatatagttgttactgctactggaaataaagatattgtaactgcagaccatatgagagatatgaaagatagagcaattttatgcaacataggtcacttcgataatgaaattcaggttgatgcactaagaaattatagatgggacgagatacaagccacaagttcacgaaatcacattccctgac

SEQ ID NO: 261163 - DNA, 516 bp, Unknown
  Bacterial polypeptide expressing nucleotide sequence isolated from the Sargasso Sea
gatggcgggtgacgcaactctatttgtgcatttaggtgttcaggcggaggaaaatccttctattttagataaaaagcctggaagtcatgaagaaaaaatcctattttcacagttaaaaaaatctttgaaaaaagatcctaaaagattttcaagaatatcaagaatgattctaggtgtatctgaagaaactactacaggagttcatcgtctttacaaaatgcacgaacgaaatgaattattatttcctgctattaatgtcaatgactccgtgactaaaagtaaatttgataatttatatggatgtaggcattcccttgttgatgcaataatgagatcaaccgatataatgatttccggtaaaattgcagttgtagctggttatggtgatgtaggaaaaggctccgttcaatctcttaaaggtcaaggtgcacgtataatagtgactgaaatcgacccagtatgcgctttgcaagcttctatggagggttacgaagtaatggctatggatgatgcact

SEQ ID NO: 261164 - DNA, 841 bp, Unknown
  Bacterial polypeptide expressing nucleotide sequence isolated from the Sargasso Sea
cctctaaaaggtgcaagaattttaggttgtcttcatatgacaattcaaacagcagttttgattgaaactctggttgatttaggtgcagaatgtagatggtcatcatgcaatatattttcaacacaagatcatgcagcagcagcaattgcaaaagctggtatcccagtatttgcttggaagggtgagacagaggaagaatactggtggtgtgtaaaacaaacaattgagggtaaaaaagattggatacctaacatgattttagatgatggtggagatcttactgctcttatgcataaggattacaaagatttattaaaaggtataaaaggtttaagtgaagaaacaacaacaggggttctagcacttaaaaaaatggaagaacagggtcaattgttagtcccagcaattaacgtaaacgactcagtcacgaaatcaaaatttgataacttatatggatgtagggagagtttagttgatggaattaaaagagctactgatgtaatgatgtcaggaaaagttgcaatcgttgcaggctttggtgatgttggaaaaggtagtgcagcatctttaagacaaagcggagcaagagtattagttacagaaactgatcctatttgtgcattgcaagctgcaatggaaggttacgaagtagttttaatggatgaaatgattggtcaagcagatattgtcgtaactgctactggaaataaagatgtggtaacggcagatcatatgagagctatgaaagatagatctattctatgtaatatcggtcactttgataatgaaatacaagttgaggctctgaaaaactataaatgggatgaagtaaaaccccaag

SEQ ID NO: 261165 - DNA, 868 bp, Unknown
  Bacterial polypeptide expressing nucleotide sequence isolated from the Sargasso Sea
atcgcaaattcagttaaagcctctacacctaacttcgtaattgctgacatctccctttcagattttggccgtaaagaaattaaaattgccgaaacagaaatgcctggattaatggcacttagagataaatatcaatcagaaaagccactcaaaggtgcaaaaatagccggaagtttgcatatgactattcagactgcagtcttaatagaaactcttgttgatcttggggcagaagtgaaatgggcttcatgcaatattttttcaactcaagatcatgcggcggcggctattgcagatcaaggaattcctgtatacgcaaaaaaaggtgagacacttgatgaatattggcaatatacccactacattcttgattggggttcagactctccaaatatgattcttgatgatggtggggatgcaactggtttattgatactcggcagtaaagcggaaaaagatttgtccgttttagataatcccggtaatgaagaagaaattgctttattcaattctattaagtctaaattagaaaatgatagtaacttttattctagaattaaaagtaatatcattggtgtcactgaagaaacgacaactggagtcgcaagactttatcaactgcaaaagcaaaatgctttacctttccctgcgatcaacgttaatgattcagtaactaagagcaaatttgataatttatacggctgtcgcgaatctttagttgatagtataaagcgtgcaactgatgtgatgattgctgggaaggttgctttggtaatgggttttggtgatgtaggtaaaggctcagcccagtcattgcgtggacttggtgcaatcgtaaaagttgctgaagttgatcccaatttgtgct

SEQ ID NO: 261166 - DNA, 307 bp, Unknown
  Bacterial polypeptide expressing nucleotide sequence isolated from the Sargasso Sea
tagtggtaaaagaattattcttttatctgaaggaagattagttaatcttggttgtgcgactggacatccaagttttgttatgagtgcatcatttactaatcaagtaattgctcaaatagaactttggcataatcataaaaattatgaaaataaagtttatgtccttccaaaacatttagatgaaaaagtagcaactttgcatttaaaaaaagttggagcaaaactaacaaaattatcaaaagagcaagctgattatataagcgttggaacagaaggtcctttcaaaccagatgcctatcgctattaa

SEQ ID NO: 261167 - DNA, 805 bp, Unknown
  Bacterial polypeptide expressing nucleotide sequence isolated from the Sargasso Sea
catggaagattataaagtaaaagacatatctcaagcagactttggtagaaaagaaatttcaatagctgaaagtgaaatgcctggtttaatggctttaagagaggagtattccaaggaaaaaccattaaaaggtgcaaaaattattggatgtctacatatgacaattcaaacagctgtattaattgaaactttagttgcactaggtgctgaagtaagatggtcttcttgtaatattttttcaactcaagatcatgcagctgcagccattgctaaagctgggattcctgtttacgcttggaaaggtgaaacagaagaagaatatttatggtgcataaaacaaactatagtgggaaaaccagattggaaacccaacatgttattagatgatggtggagatttaactgctatcatgcacaatgagtatcaggatttaatgaaagatataaagggtgtttcagaagagactaccactggaattaaagcacttaataaaatggaaaaagataaattgcttttagttccagcaataaacgtgaatgactctgtcacaaaatcaaaatttgataatttatatggatgtagagaaagcttggtagacgggataagaagagctactgatgtaatgatgtctggaaaaattgctattgttgctggttttggagacgttggaaaaggaagtgctgcatctttaagacaaagtggagctagagttttagttacagaagcagatccaatttgtgctcttcaagctgcaatgaagggttatgaagtagtattaatggatgaggcaataagcagagctgat

SEQ ID NO: 261168 - DNA, 720 bp, Unknown
  Bacterial polypeptide expressing nucleotide sequence isolated from the Sargasso Sea
attgatattaacaatttcaaaaatggaacaagattataaagtaaaagatataaatttagcagatttcggcaggaaagaaatttccttagctgaaaccgaaatgcctggtttaatggcattgagaaaagaatataaaggaaaaaaaccattaaagggcgctagaattttaggttgtctacatatgacgatccaaacagctgtactaatagagacattagttgaccttggtgccgaggtaagatggtcatcatgtaatattttttctacacaggatcatgccgccgctgcaatagctaaggcaggtataccagtttttgcttggaaaggtgaaaccgaggatgaatattggtggtgtgttaagcaaacaattgaaggtaagaaaaattggaaaccaaatatgattttagatgatggaggagatctaacaggtttaatgcataaagattataaggacatgttgaaagaagttaagggtgtttctgaagagacgactactggtgtgttagcattaaaaaaaatggagtctaataatcaattactcataccagcattcaatgtgaacgactcagtaacaaaatcaaaattcgataatctatatggctgtcgagagagtttagttgatggtattaaaagagcgacagatttaatgatgtcaggtaaagtggcgattgttgcaggttttggagatgtaggaaaaggaagtgctgcttctttgcgtca

SEQ ID NO: 261169 - DNA, 385 bp, Unknown
  Bacterial polypeptide expressing nucleotide sequence isolated from the Sargasso Sea
taacgaaattcaagttgaagctcttaaaaattataagtggactgaagtaaaacctcaagttcatgaaatagagctgcctagcggtaaaagaattattcttttagctgaaggaagattggttaatcttggttgtgcaactggacatccaagttttgtaatgagtgcatcttttactaatcaagttattgctcaaatagaactttggcataatcataaaaattatgaaaataaagtttacgtacttccaaaacatttagatgaaaaagtagcaactttgcatttaaaaaaagttggggcaaaactaacaaaattatcaaaagaacaagcagattatataagtgttggaacagaaggtcctttcaaaccagatgcctatcgctattaa

SEQ ID NO: 261170 - DNA, 478 bp, Unknown
  Bacterial polypeptide expressing nucleotide sequence isolated from the Sargasso Sea
catggattataaagttaaagatatttctcttagtgattggggcttaaaagaaatcgctatagctgagaccgaaatgccaggcttaatggctctcagagaagaatatggtaaaactaaacctttaagtggagctaagatagtaggctgcttgcatatgactattcaaacagctgttttaattgaaacattagttcatttaggtgcttcagtcagatggagttcatgcaatattttttcgactcaagatcaagcagctgcagcaatagcatcaaaaggcatacctgtatttgcttggaaaggtcagaatgaagaagaattctggtggtgcattgagcaaactctttctggtccagataattggaaaccaaatatgattttagatgatggcggtgatgctacacaaataattcataaaaaatacccagaacttcttgaagaaataaaaggtctatctgaagaaactacaactggagttctt

SEQ ID NO: 261171 - DNA, 754 bp, Unknown
  Bacterial polypeptide expressing nucleotide sequence isolated from the Sargasso Sea
catgggtgatttcaaagtaaaagacatatctgaagctgaatttggaagaaaagaaatttcgatagcagaaagtgaaatgccaggattgatggctttaagagaggagtattctggtaaatctcctttgaaaggtgctaaaatcattggctgtttacacatgactattcaaacagctgttttaatagaaacattggtagatcttggtgctgaagtaagatggtcatcatgtaatatattttcaacacaagatcatgctgctgctgcaattgcggaggcaggtattccagtttatgcatggaaaggtgaatcagaagaagaatatctttggtgtataaaacaaacaatagttggcaacaaaaattggaaacctaatatgctacttgatgatggtggtgatctgaccgctataatgcataatgaatataaagatttattaaaagatgtaaaaggtgtttcggaggaaacaactactggaattaaagctcttaataaaatggaaaaagagaattcacttttagttccagcaattaatgttaatgactctgttacaaaatcaaaatttgataatttatacggttgtagagagagcttagtagatggaattagaagagcgaccgatgtgatgatgtcaggtaaaattgctatagttgcaggttttggtgatgtgggcaaaggtagtgcagcatctttaagacaaagtggcgctagagtaatggtaacagaagctgatccaatatgtgctttgcaagccgct

SEQ ID NO: 261172 - DNA, 733 bp, Unknown
  Bacterial polypeptide expressing nucleotide sequence isolated from the Sargasso Sea
aaatttgataatttttatggatgcagagaaagtcttgtcgatggcctaaaaagagcaactgatgtcatgttagctggaaaagttgcagttgtttgtgggtttggggacgttggaaaaggttctgcagaatcacttcgttcgcaaggggctagagtaattgttacagaaattgatccaatttgtgcgcttcaagcctctatggaaggctatgaggtatcaaccgtagatgatgtgactaagtcagcagatatttttgttacagcaacaggtaataaagatgttattacgcttgaacatatgcgagaaatgaaagatcgagcgattgttgcaaatattggccacttcgatagtgaaatccaagtctcaaaattaaaaaatttcaaatgggataatataaagccacaagttgatgagatagaatttcctgatggtaaaaaaattattttattagctgagggaagattagttaacttaggctgtgcaactgggcatcctagttttgttatgagtgcctcattttcaaatcaagtattagcacagattgaaatttggaataattataagaattatgaaaataaagtttatgtcttacctaaacacctagatgagaaagtagcatatattcatttagaaaaacttggtgttaaattgactgaattgagtgatgatcaagcagattatttaagtctaaataaagaaggtccatttaaaccagaccattatagatattaaa

SEQ ID NO: 261173 - DNA, 765 bp, Unknown
  Bacterial polypeptide expressing nucleotide sequence isolated from the Sargasso Sea
ctataaatgtgaatgactcagttacaaaatctaaatttgataataaatatggatgtagagaaagcttggttgatggtataagaagagccacagatgttatgatggcagggaaaattgcagttgttgctggttatggtgatgttgggaaaggatcagctgaaagtttgagaaatgctggctgtcgagttttaataactgagattgatcctatttgtgctttacaggcggcaatggatggatacgaggttatcacaatggatgaggcttccaaaaaggcagatatttttgttactgcgactggaaatgttgatgttataacagttgatcatatgagagatatgaaagaccgaagtattgtttgtaacataggacattttgactcagagatacaaattgaatcattaaaaaactttaaatggaataatatcaaacctcaagtagacgaaattgagtttccagatggaaaaaaaattattgtgcttgcagaaggtaggcttgttaatctaggttgtgctactggtcatccaagttttgttatgtctgcatctttttgtaatcaagttcttgcgcaaatagaactttggaaaaattttgttaaatataaaaataaggtttatgttttaccaaaacatctggatgaaaaggtggcaatgattcatttggataaagttggtgctatgttaactaaacttactgaaaaacaaggaaagtacattaatgttccagttaatgggcctttcaagaccgatgaatatagatactagg

SEQ ID NO: 261174 - DNA, 739 bp, Unknown
  Bacterial polypeptide expressing nucleotide sequence isolated from the Sargasso Sea
aagagcaaatttgataatttatatggttgccgagaatctctagttgatagtataaagcgtgccactgatgtgatgattgctggtaaggtcgctttagtaataggttttggagatgtaggtaaaggttcagcccagtctctgagaggacttggtgcaattgtaaaagttgctgaagttgatccaatttgtgctctccaagcggcaatggaaggttttagcgttgttacattagatgatgttgtggaagatatagatatatttgttacagcaactgggaactatcaggtaataacaaacgaaaatcttgttaagatgaaaaatgaggccatagtctgtaacatcggtcatttcgataatgagattgatgtagcttcattaaaagattatccatgggaaaatatcaagccgcaggtagatcacataactttaccgagtggcaataaaataatccttttagctgaaggtagattagtaaatctaggttgtgctactggacatcccagttttgttatgagtaactcttttactaatcaagtactagctcaagttgaacttttcaataagtcagaaaaatattctaagaaggtttatgttttaccaaaacatttagatgaaatggtagctagattacatcttgataaaattggtgcaaaattaacaaaattaactaaggaacaagctgattatattaatgtctcagttgaagggccttataaaccagagctttatagatactaag

SEQ ID NO: 261175 - DNA, 334 bp, Unknown
  Bacterial polypeptide expressing nucleotide sequence isolated from the Sargasso Sea
catgagcgattataaagtaaaagatatcaacctagctgaatttggtagaaaagaaatttccttagcagaaacagagatgccaggattaatggcattgagaaaagaatataaaggaaaaaatcctcttaaaggagcaagaattttaggatgtcttcacatgacaattcaaaccgcagttcttattgaaactcttgtagatttaggagcagaagtaagatggtcttcatgcaatattttttcaactcaagatcatgcagcagcagctattgcaaaagtaggcattcctgtttttgcctggaaaggtgagactgaagaggaatattggtggtgtgtt

SEQ ID NO: 261176 - DNA, 744 bp, Unknown
  Bacterial polypeptide expressing nucleotide sequence isolated from the Sargasso Sea
catgagtgaagattttaaggttaaagacataagtttagctgatttcggcgataaagaaattgcaatagctgaaacggaaatgcctggtttaatggcattaagagaagagtatggtgactctaaacccctagatggggcaagaattgtaggttgtttacatatgacaatacagactgctgttttgattgagactctggtattcttaggtgctactgttagatggagctcatgtaatattttttctactcaagatcacgctgctgcagcaatagctgccaaaggcattccagtatttgcttggaaaggaatgacagaggaagaattttggtggtgtattgagaaaacattagaaggcccagatggttggaagccaaatatgattttagatgatggtggagatgctacaaaaataattcatgaaaagtatccaaaaatgttggaagaaatcttaggtttatctgaagaaacaactacaggtgtccaccgtttaaaagaaatggaaaaaaatggaacattaaaggtgccagcaataaatgttaatgactcagttactaagtctaaatttgacaacttatatggttgtaaggaaagtttagtagatggaataagaagaggtactgatgtaatgatggctggtaaaatagccgttgtagctgggtatggtgatgttggtaaaggttcagcagctagcttaagaggtgcaggtgcacgtgtttgtgtgactgaaatagatccaattaatgc

SEQ ID NO: 261177 - DNA, 451 bp, Unknown
  Bacterial polypeptide expressing nucleotide sequence isolated from the Sargasso Sea
tgtaacagcagatcatatgcgtgatatgaaagatcgagcaatattatgtaatattggtcactttgataatgaaattcaagtcgaagctttgaaaaattacaaatggaatgaaattaaacctcaggtccatgaaatagaattacctaataaaaaaagaattattttattggctgaaggaaggctagtcaacctaggttgtgctactggtcacccaagctttgtaatgagtgcgtcttttacaaatcaagttattgcacagatagaattatggaataactcagataagtatgaaaagaaagtatatgtattaccaaaacatttagatgaaaaagttgccatgttacacttagataaggttggagcaaaattaactaaaatgtcaaaagaacaagcagactatattagcgttaaaccatcaggaccttttaaaccagatacttatcgctactaa

SEQ ID NO: 261178 - DNA, 426 bp, Unknown
  Bacterial polypeptide expressing nucleotide sequence isolated from the Sargasso Sea
catggatgattataaagtaaaagatattactcaagctgaatttgggagaaaagaaatatcaatagctgaaagcgaaatgcctggtttaatggctctaagagaagagtattctaaagaaaaaccattaaagggcgcaagaattataggatgtcttcatatgacaattcaaactgcagtactaatcgaaaccttagttgctttaggtgctgaagttcgttggtcttcttgtaatattttttcaactcaagatcatgctgctgctgcaattgcaaaggctgggatacctgtttatgcctggaaaggtgaaacagaagaggaatatttatggtgtattaaacaaactatagatggaaaaccagactggaaacccaacatgttattagatgacggtggtgatttaacagctatcatgcacaatgaatatca

SEQ ID NO: 261179 - DNA, 625 bp, Unknown
  Bacterial polypeptide expressing nucleotide sequence isolated from the Sargasso Sea
atgagtaatgactacaaagtagctgatatcgaacttgctgattttggaagaagagaaatttctcttgctgaaaatgaaatgcctgcactaatggcactaagggagaaatacaaaactgagcaacctctcgctggtgcaaagattatgggctgtattcatatgactatccaaaccgcagtattgatggaaacattagttgatcttggagctgagcttagatggtcaggatgtaatattttttcaactcaagatcatgctgctgcagctatggcaaaagctggtatcccagtttttgcatggaaaggacaaaccgacgaagaatttgattggtgtattgagcaaacaatcctaaaagatggaaaaccatgggatgcgaacatgatcttagatgatggaggagatcttactcatatggttcatacaagatttgcagaaatgcttgaaacaatccatggaatatcagaggaaaccactacaggagttcatagactcaaagcaatgcttgaaaaaggcgagcttaaggttccagctattaatgtaaatgactctgtcacaaaggcaaaaaatgataataagtatggttgtagacatagtcttaatgacggaataaaacgaggaactgata

SEQ ID NO: 261180 - DNA, 347 bp, Unknown
  Bacterial polypeptide expressing nucleotide sequence isolated from the Sargasso Sea
attggaattcaatgattacaaagttgctgatatagggcttgcggactggggacgaaaagaaatagaaatcgctgaaacagaaatgccaggtttaatcacgctgagaaatgagttaagtaaatccaagcccctaaaaggagcaaatattgttggctgtcttcatatgaccattcaaactgcagtattaattgaaactttaattgatttaggtgcaacagtcagatggtcatcctgtaatattttctctactcaagaccatgctgcggctgcaatcgctagcaaaaatatacctgtttttgcttggaaaggtgaaactgaagaagaatacgattggtgtattagacaaa

SEQ ID NO: 261181 - DNA, 736 bp, Unknown
  Bacterial polypeptide expressing nucleotide sequence isolated from the Sargasso Sea
atgccagattataaagtaaaagacatatcccaagctgaatttggaagaaaagaaatttctttagctgaaactgagatgccaggtttaatggcactgagaaaagagtataagggtaaatctccattaaaaggtgccaaaattcttggttgtcttcacatgactattcaaactgcggttttaatcgaaacattagtagatcttggggccgaggtaaggtggtcttcatgtaatatattctctacacaagatcacgcagcagcagctattgcaaaagctggtattccagtttttgcttggaaaggtgaaacagaagaagagtattggtggtgtgtaaaacaaactattgaaggcaaaaaagattggaaacctaatatgatattagatgatggtggagatcttactgctctaatgcataaagactataaagaattattaaaagatataaaagggttaagtgaagagacaacgacgggagttttagctctcaaaaaaatggaagagcaaggaactttgatggtgccagcaataaatgtgaatgactcagttacaaaatcaaaatttgataacttgtatggatgtagagaaagtttagtagatggtatcaagagagctacagatgtgatgatgtcaggaaaagttgcgatcgttgcaggatttggtgatgttggtaaaggaagcgctgcatctttaagacaaagtggtgcaagagtaatgataacagagacagacccaattt

SEQ ID NO: 261182 - DNA, 867 bp, Unknown
  Bacterial polypeptide expressing nucleotide sequence isolated from the Sargasso Sea
tgcatggaaaggagagaccgaagaggaatattggtggtgtgtaaaacaaacaattgaaggaaaaaaagattggaaaccaaacatgatccttgatgatggtggtgatttgactgcacttatgcacaaagactacaaagatttattaaaagatattaaagggttatctgaagaaacaacaactggagtgctagcacttaaaaaaatggaagcccaaggaactttgttagttccggctatcaatgtaaacgactcggttactaaatctaaatttgataatttatatggttgtagagaaagtttagtagatggaattaaaagagctacagatgtaatgatgtcaggaaaagttgcaattgttgcaggatttggtgatgtaggaaaaggaagtgccgcttctttaagacaaagtggagcaagagttatggttacagaaactgatccaatatgtgctcttcaagctgcaatggaaggctatgaagttgtgctaatggacgaaatgattaaagaggcagatatagttgttacagcaacaggaaacaaagacatagtaacagctgaccacatgagagatatgaaagatagagctatactttgcaatattgggcacttcgataatgaaattcaagttgaagcattgaaaaattataaatgggacgaaattaaaccacaagttcacgaaataactttgccaagtaagaaaagaataatattacttgctgaaggaagactggttaacttaggttgtgccactggtcatccaagttttgtaatgagtgcttcatttaccaaccaggtaactgcccagatagaattatggaataattcagataagtacgaaaagaaagtttatgttttaccaaaacactt

SEQ ID NO: 261183 - DNA, 778 bp, Unknown
  Bacterial polypeptide expressing nucleotide sequence isolated from the Sargasso Sea
tcttttagttccagcaatcaatgtaaatgactccgtaactaaatctaaatttgataatttatatggttgtagggaaagtttagtagatggaattcgaagagcgaccgatgtaatgatgtcaggcaaaattgctattgtagctggatttggtgatgtaggaaaaggaagtgctgcatctttaagacaaagtggagctagagttttagttacagaggcagatcctatttgtgcgttgcaagcagccatggaaggttatgaagtagttttaatggaagaagcaattagtaaagctgatattgttgtaaccgcaacaggtaataaagatattgtaacagcagatcatatgagagatatgaaggatagagctatattatgtaatattggccactttgataatgaaattcaagtagaagctctaaaaaattataagtggacagaggtaaaaccccaagttcatgagatagagctacccagtaaaaaaagaataattcttttagcagaaggaagattggtcaatctaggatgtgcaactggacaccctagttttgtaatgagtgcatcttttacaaatcaggtaatagctcaaatagaactttggaataattataaaaattatgaaaataaagtttatgttttgccaaaacatcttgatgaaaaagtagcaactttacacttaaaaaaagtgggagcaaaactaaccaaactatctaaagaccaagctgactatataagtgttggagtagagggtccatttaaacctaatgcatatcgctattag

SEQ ID NO: 261184 - DNA, 724 bp, Unknown
  Bacterial polypeptide expressing nucleotide sequence isolated from the Sargasso Sea
aaagatattaatttagcagaatttggaagaaaagaaatttcattagcagaaactgagatgccaggtttgatggcattaagaaaagaatataaaggtaatcaaccactaaagggtgcaagaatattaggctgtcttcatatgacaattcaaactgcagtactaatagagacattagcagaattgggagcagaaataagatggtcttcttgtaatatattttcaacacaagatcatgcagctgcagcaatagctaaagctggaattccagtttttgcttggaaaggtgaaacagaagaagaatattggtggtgtgttaggcaaactatcgaaggtaaaaaagattggaagcctaatatgatcttagatgatggtggagatctaaccgcattaatgcataaagattacaaagaaatgctaaaatcaattaaaggattatcagaagaaactaccactggagttttagctttaaaaaaaatggaatcagaaggaacattgatggtaccagccataaacgtaaatgactctgtaacaaaatcaaaatttgataatttgtatggatgtagagaaagtttagttgatggtattaaaagagcaactgatgttatgatgtcaggaaaagttgcaattgtcgcgggttttggagatgtaggaaaaggtagcgcagcatctttaagacagagcggagctagagttatggtaaccgaaaccgacccaatatgtgcat

SEQ ID NO: 261185 - DNA, 661 bp, Unknown
  Bacterial polypeptide expressing nucleotide sequence isolated from the Sargasso Sea
tccatttgtgctatgcaagcctgtatggatggtttttcagttgtatcatgttataaagatggaatagttactagaaatcctgatgatattaatatggctgtgatgggtgatactgatctaatagttacaacaactggtaatgtaaatgtctgtgattctgcaatgttaagtaccgtcaaaaatacagctgttgtatgtaacattggtcattttgataatgaaattgatacagcatacatgcgtgaaaatttctactgggatgagatcaaacctcaggtccacagagtattcagagatacctcccctgatgggactccagacctgtccagcaaagattatataattcttctagccgaaggtagattggtaaatctaggaaatgccacaggtcatccaagtagaattatggatggatcatttgcaaatcaggtgcttgcacaaattcatttattcaagcaagggtttgcaaatataaatgatgcggacaaaagatctgaaatgataactgtagaagttcttccaaaaaaacttgatgaagaagttgcgagtctcatggttgctggctttggtggaatggtaacaaagcttaccaaagatcaagcagactacataaatgttcctcaagatggtccatttaaagaagaaagttataaatattaat

SEQ ID NO: 261186 - DNA, 229 bp, Unknown
  Bacterial polypeptide expressing nucleotide sequence isolated from the Sargasso Sea
atgtcggcaagctttactaatcaggttttggctcaattagaactttggacgaattcagaagaatataagaatgaagtttatgttttgccaaaaaagctagatgaaaaagttgcaatgttacatcttaacaaaataggtgtaagacttacggacctagaaaaggatcaagctgactatattggggtggataaatcaggaccctttaagccagatcactatagatattaat

SEQ ID NO: 261187 - DNA, 376 bp, Unknown
  Bacterial polypeptide expressing nucleotide sequence isolated from the Sargasso Sea
atgagtgattataaagttaaagatataaatgaagcagaatttggaagaaaagaaatttctttagcagagactgaaatgccaggcttaatggctttaagaacagaatataagggaaaacatcctcttaaaggtgcaagaattttaggctgtttacacatgacaattcaaacagcagttttaattgagactttagtcgatcttggtgcagaagtaagatggtcttcatgtaatatattttctacccaagatcacgctgcagcagcaatcgcaaaagcaggaattcctgtatttgcatggaagggagagacggaggaagaatattggtggtgtgtaagacagacaatagaaggtaaaaaagatggaaacctaatatgat

SEQ ID NO: 261188 - DNA, 870 bp, Unknown
  Bacterial polypeptide expressing nucleotide sequence isolated from the Sargasso Sea
atatgtgtagaaaatttaccatataaggtgaaagatttgtcactttccgaggatggaaggaaggcacttgacatagccgaaaaagaaatgccaggtcttatgtcaacacgcaacaaatatggtccagaaaaaccattaaaaggaaaaaaattaacaggatcattacatatgactgttgaaacagctgttttaattgaaaccctggtagatctcggtgcagatgtccgttgggccagttgcaatatcttttcaacccaggatcatgccgcagcagttattgcagactctagtatacctgtttatgcatggaagggggagacgcttgaagaatattggtggtgtactctccaggcacttacatttcctgatgggtccggtccagatctgattgttgatgatggaggagatgctactctgttgattcacaaaggatatgagcttgagaacttttatgctaaatatggcaatgtacctgacataactaccaaggttgaggaagaaataattatagaaaaacttctaagagaagtattagaaaaggatcctaatcactggcacaaagtacaagagaacgtaattggtgtatctgaagaaacaaccacaggggtacatagacttgttcagatggaaaaagatggacacctcttattcccagcttataacgttaatgattctgtaacaaaatctaaatttgataacgtttatggatgtaaggaatctttagcagatggtttgaaaagagcacttgatatcatggtagctggtaaaacagttgtaatatgtggctatggtgatgttggaaggggatgtgctcaatcaatgcgcggttacggcgctagggttatagtaactgaaattgaccccatctgt

SEQ ID NO: 261189 - DNA, 621 bp, Unknown
  Bacterial polypeptide expressing nucleotide sequence isolated from the Sargasso Sea
gaaaaggaagtgccgcatctttgagacaaagtggagctagagttttggtcacagaagcagatccaatttgtgctcttcaagctgcaatggaaggttatgaagtggttttgatggaggaggctataagtagggctgatatagttgtaacagcaacggggaataaagacattgttaccgcagatcatatgagggatatgaaagatagagccatcttatgtaatattggccactttgataatgaaatacaagttgaagctcttaaaaattataagtggactgaagtcaaaccacaagtgcatgaaatagagttgcctagcggtaaaagaattattcttttagctgaaggaagattagttaatcttggttgtgcaactggacacccaagctttgtaatgagcgcttcatttaccaatcaagttattgctcaaatagaactatggcataatcataaaaattatgaaaataaagtttatgtacttccaaaacatttagatgaaaaagtagcaactttgcatttaaaaaaagttggggcaaaattaacaaaattatcaaaagaacaagcagattatataagcgttggaacagaaggtcctttcaaaccagatgcctatcgctattaaa

SEQ ID NO: 261190 - DNA, 637 bp, Unknown
  Bacterial polypeptide expressing nucleotide sequence isolated from the Sargasso Sea
ggttttgaagatgtaggtaaaggttcagcccagtctctaagaggacttggtgcaattgtaaaagttgctgaagttgatccaatttgcgctcttcaagcggcaatggagggttttagcgttgttacgttagacgatgttgtgaaagatatagatatatttgttacagcaactgggaactatcaggtaattacaaacgaaaatctcgtcaagatgaaagatgaggccatagtttgtaatattggtcattttgataatgaaattgatgtggcttcattgaaagattatccatgggaaaatattaagccgcaggttgatcacataactttaccaagtggcaataaaataattcttttagccgaaggtagattagttaacttaggctgtgccactggacatccaagttttgttatgagtaattcttttactaatcaagtattagctcaaatcgaacttttcaataagtcagaaaaatatgctaaggaggtttatgttttaccaaagcatttagatgaaatggtagctagattacatcttgataaaattggtgcaaaattaacaaaattaactaaggaacaagctgattatattaatgtctctgtagaaggaccttacaaaccagagctttatagatactaag

SEQ ID NO: 261191 - DNA, 955 bp, Unknown
  Bacterial polypeptide expressing nucleotide sequence isolated from the Sargasso Sea
aaagattcaaagccgcttgaaggagcaagaatagttgggtgtcttcacatgactatacaaactgcagttctaatagaaacattaacatttttaggtgcagaagttagatggtcatcttgcaatatattctctactcaagatcatgcagctgcagcaatagctgacagtaatattcctgtttttgcttggaaaggagaaactgaagaagaattttggaattgtatcgaaaaaactataactggtcctaatgaatggagacctaatttaatactagatgatggtggggatttgacaaaaataatgcatgataaataccctgatctattaaaaaatattagagggcttagtgaagagactacaacaggtgttcatagattatatgaaatggaaaaggaaaatagtctattagttccggcaattaatgtaaatgattctgttactaaatctaaatttgataatttatacggatgcagggaaagtttagttgatggaatcagaagagcaaccgatgtcatgatgtccggtaaagtagcagttgtagctgggtatggtgacgttggcaagggatcagcagcttcactaaaaaatgcaggtgcacgagtattagttacagaaatagatccaatatgtgcattgcaagcttcaatggaaggttatgaagttgttacaatggaaaatgcagcaaaaattgcagatatttttgttacagctaccgggaattgtgacgtaattaatattgaccatatgagagaaatgaaggatagagccataatatgtaatattggacactttgattctgaaatagagatatctagtttaaaaaactatccatgggaggaaataaaacctcaagttgaccaagtaacatttcctgatggtaaaaaaattatttgtttggctgaaggaagattagttaatttaggatgtgccactggtcatcctagttttgtatgag

SEQ ID NO: 261192 - DNA, 750 bp, Unknown
  Bacterial polypeptide expressing nucleotide sequence isolated from the Sargasso Sea
ttgatccacgaaggttacaaggcggagattgagttcgccaagtccggcgccgtcccggacccggcctccaccgacaacgccgaaatgaagtgcgtcttgaagatcatcgctgagaacttgaagaccaacccgaaccgctggcacaagatcgtcgagacctgcgtcggtgtctctgaagagaccaccactggcgtcaagcgtctctacgaaatgcaaaaggcgggcgaacttttgttcccggccatcaacgtcaacgactccgtgaccaagtgcaagttcgacaacctctacggttgccgacactctctcccggacggtatcatgcgtgccactgacgtcatgattgcgtccaagacctgctgggtcgccggctacggtgacgtcggtaagggttccgccgccgcgctcaaggccgccggcgcccgtgtgattgtgtccgaaattgacccgatctgcgcgctccaagccgccatggaaggttaccaagttgccccgatcgaagatgtcgtcgaccaagtcgacatcttcatcaccaccacgggtaacaaggacatcattatggttaagcacatggaaaagatgaagaacaacgccatcgtcggtaacattggtcacttcgacaacgaaatcgacatggccggcctcgagtccttcccgggcatcaagcgtcaaaacatcaagccgcaatgcgaccgattcgaattcccggatggccacggcatcatcatgctcgccgaaggtcgtctcctc

SEQ ID NO: 261193 - DNA, 823 bp, Unknown
  Bacterial polypeptide expressing nucleotide sequence isolated from the Sargasso Sea
atccttgatgatggtggtgatctcacagcattaatgcacaaagattatcaagatctattaagtggagttaaaggtctttcggaagaaactacaacaggtgttttagctctaaaaaaaatggaaagcgaaggtaaactattggtaccagctataaatgtaaatgactcagttactaaatctaagtttgataatttatatggttgtagagagagtttagttgatggcatcaaaagagcgacagatgttatgatgtcaggtaaagttgctatagtagctggttttggagatgtaggtaaaggaagcgctgcctcattaagacaatcaggcgcaagagtgatgataacagaaactgaccctatctgtgcattacaggcagcaatggaaggttatgaagtagttaccatggacgatatgattgaacatgccgatatagttgttactgcaactggtaataaagatattgtaacagcagaccacatgagagaaatgaaagatagagcaattttatgtaatattggacatttcgataatgaaatacaagtagaagctttaagaaattataaatgggatgaaattaaaccacaagttcacgaaataactttacctagcaataaaagaataattttattagccgaaggaagacttgtaaatttaggatgtgccactggtcatccaagttttgttatgagtgcctcatttacaaatcaaacaattgcacaaattgagttgtggaataattctgacaattataaaaataaggtgtatgttttaccaaaaaaacttgatgaaaaagttgcaatgcttcaccttgaaaaagttggag

SEQ ID NO: 261194 - DNA, 587 bp, Unknown
  Bacterial polypeptide expressing nucleotide sequence isolated from the Sargasso Sea
ggctagagtaatgataactgaaactgaccctatttgtgcattacaagcagcaatggagggctatgaagtagtaactatggatgatatgatagggcaagcagatatagttgtaactgcaacaggaaataaagatatagtaaccgctgatcacatgagagaaatgaaagatagagcgatactatgtaatattggtcatttcgataatgaaatacaggtagatgcattaagaaattataaatgggatgaaatcaaaccccaggttcatgagattactttgcctagtaaaaaaagaatcattttattagctgaaggcagacttgtaaatttaggatgtgcaactggccacccaagctttgttatgagcgcttcatttacaaatcaaacaatagctcaaattgagttgtggaataattctgacaactatgaaaataaagtgtatgttctaccaaaaaaactcgatgaaaaagtagcaatgcttcatcttgaaaaagttggggctaaacttactaaactttcaaaagatcaagcagagtatataggtgtatcagaacaaggaccatataaacctgaagcatatcgttattaaa

SEQ ID NO: 261195 - DNA, 770 bp, Unknown
  Bacterial polypeptide expressing nucleotide sequence isolated from the Sargasso Sea
tgctgcgatagcaaagtctggtgtaccagtttatgcctggaaaggtgagacagaggaagagtattggtggtgtataaatcaaacaattaatggcgacaaatcttggaaacctaaccttatacttgatgacggaggtgatctaacaggtctgctacataaaagttataaggacttattaaaatcaatcaaaggtgtttctgaggagacaaccacaggtgttcttgctttgaagagaatggaaagggaaaagaaattattaattccagcaataaacgtaaatgattcggtcacaaaatcaaaatttgataatctatatggctgcagggaaagtttagtagatgggattaagagagctacagatgtaatgatgtcaggaaaagttgcaattgtggctggctttggcgatgtggggaaaggaagtgcagcttcattaagacaaagtggtgctagagttttaataaccgaaactgatcccatttgtgctttgcaggcagcaatggaaggctacaaagttgttttgatggacgaagcaattaaagaagctgatatagttgtaacagctactggtaataaagatattgttaccgccgatcacatgagaaacatgaaagatagagcaatactttgtaacataggacattttgataatgagattcaagttgaggcattaaaaaactacaaatggaatgaaattaagccacaggttcatgaaattgaactgccaagtaaaaaaagaataattttattggctgaaggaaggcttgttaatt

SEQ ID NO: 261196 - DNA, 688 bp, Unknown
  Bacterial polypeptide expressing nucleotide sequence isolated from the Sargasso Sea
attaaaagagcaacagatgttatgatgtcaggaaaagttgcaattgttgctggctttggagatgttggaaagggaagcgcagcatcattacgccaaagtggtgccagagtaatggttacagaaacagatccaatatgtgcacttcaggctgctatggaaggttatgaggtagttttgatggatgagatgattggacaggcagatatagttgttactgccacagggaataaagatatagtaaccgcagatcatatgagggatatgaaagatagatcaatcctatgtaatattggccatttcgataatgaaatacaagtagaggcgttaaaaaattataaatgggatgaaattaaaccacaagttcatgaaattacttttccagataataaaagacttattttattagctgaaggaagacttgtaaatttgggatgtgcaactggccatccaagctttgtaatgagtgcatcattcactaatcaggttacggcacaaatagaattatggaataattctgaaaagtatgaaagaaaagtatatgtgttaccaaaacaccttgatgagaaagtggcgaggttacatttagaaaaagttggagcaaaattaactaaattgtcaaaagatcaagctgactatattagtgtaacaacagaaggaccttataaaccagatgcttaccgctactaaa

SEQ ID NO: 261197 - DNA, 427 bp, Unknown
  Bacterial polypeptide expressing nucleotide sequence isolated from the Sargasso Sea
aatgaaagatagagctatactttgtaacattggtcactttgataatgaaatccatgtagatgcaatgaaaaattataaatggactgaaatcaaacctcaggtacatgagattgaattgcctgacaagaaaagaataattcttttagctgagggtagattagtgaatttaggatgtgcaacaggacaccctagctttgttatgagtgcatcttttactaatcaggtaatggctcaaatagaactttggaataattataaaaaatatgaaaaaaaagtttatgtgctacctaagcacttggatgaaaaagttgcaatgttacacttaaataaagtaggagctaaactaacaaaactttcaaaagatcaagcagattatattggcgtaaatactaaaggaccgtttaaatctgatagttatcgctactaa

SEQ ID NO: 261198 - DNA, 400 bp, Unknown
  Bacterial polypeptide expressing nucleotide sequence isolated from the Sargasso Sea
actgaaatgcctggtctaatgcaaatcagagaggaatataaagattctaaacctttaaaaggtgcaaatatagttgggtgccttcatatgacaattcaaactgcagtattaatagaaactcttaaacatcttggcgcaagtgtaagatggtcctcttgtaatattttttcaactcaagaccatgcagctgctgcaattgctaggaaaggaatacctgtttttgcttggaaaggtgaaaccgaggaagaatattggtggtgtataagacaaactattgagggtaataaaaattggaaaccaaatatgattttagatgatggcggtgatctcacagccattttgcataaagattataaagaattaattaaagatattagaggtgtctctgaggagacaacaa

SEQ ID NO: 261199 - DNA, 727 bp, Unknown
  Bacterial polypeptide expressing nucleotide sequence isolated from the Sargasso Sea
atgaaaaataaaacagataataaatacgttgcatacagagttaaagatatctctttagctgaatggggaagaaaagagataaaacttgcagaagcagagatgccagggctaatggctttaagagatagatttaaaaaagagaaacctcttaaaggttctagaattgctggttgtcttcatatgacaattcaaacttcagttttgattgaaacattagttgatctaggcgctgaggtaacatggagttcatgtaatatattttctacacaagatcatgctgcagctgctatcgcggataacggaatttctgtatatgcttggaaaggtatgacagaggaggaatttaattggtgtattgaacaaacactattttttggtgaagaaaaaaatccattaaatatgatacttgacgatgggggtgatcttacaaatatggtacttgatgagtatccagagcttgtatctgctatcaaaggtttatctgaagaaacaactacaggagttcataggctatatgatagaatgaagaatggcactttaccacttcctgctattaatgttaatgattctgttacaaaatctaagtttgataataaatatggttgtaaggagagcgcagttgatgctgtaagaagagcaacagatattatgcttgcaggaaagagagtagttgtttgtggatacggagatgttggtaaaggaactgctgcctcattcagaggcgcag

SEQ ID NO: 261200 - DNA, 922 bp, Unknown
  Bacterial polypeptide expressing nucleotide sequence isolated from the Sargasso Sea
actgggggtgcataggttaaaagagatgctagaaaaaggcgaactaaaaattcctgctattaatgtaaatgactcagttacaaaagcaaaaaatgataataaatatggatgcaggcatagtcttaatgatgctctaaaaagaggaaccgatatgttgctttctggtaagaaaggattagtaattggttatggagatgttggtaaaggttcggctgcaagtttggctcaagaaggcatgatagtaagtgttgttgagtcagatccaatttgtgctatgcaggcttgcatggatggatttgcggttgtttcatgttacaaaaatggtgtagttacaagagatcctaaggatattaatatggatgtcatgggtgatacggatctaatagtaactaccactggtaatgtaaatgtttgtgattctgcaatgataagcactttaaaaaatactgcggttgtatgtaatattggtcattttgataatgagattgatactgcttatatgagagaaaactactactgggatgaaattaagccccaggttcatagagtttttagagatacagctccggacggaactcctgatttgtctagcaaaaactatattattttgctagctgaaggaagattagtaaatctcggaaatgcaacagggcatcctagtagaattatggatggatcttttgccaaccaagttcttgcacaaattcatttatataaacaaggctttgcaaatgtaaatgatgctgataaaaaagcagaaatgttaagcgttgaggtattacctaagaaacttgatgaagaagttgctagtctcatggttgaaggttttgggggaacggtaactcaacttactaaagaacaagctgattatattaatgttcctcaagatgggccttttaaagaagaaaagttacaatactaa

SEQ ID NO: 261201 - DNA, 690 bp, Unknown
  Bacterial polypeptide expressing nucleotide sequence isolated from the Sargasso Sea
tatgagtaacgattataaagtaaaagatatttcattaagtgattggggattaaaagaaatagccattgcagaaacagaaatgccaggtttgatggcattaagagatgagtttaaggatagcaaaccattaaaagatgctaaaattgttggttgtctgcatatgactatacaaacagctgttcttattgaaacccttgttcatttaggcgcttctgtaaggtggagctcttgtaatatattttctacacaagaccaagcagcagcagcaattgcagctaaaggaattccagtgtttgcatggaaaggaatgagtgaagaagaattttggtggtgcattgaacaaaccttaaaaggacctgatggttggaagccaaacatgattttggatgatggaggagacgcaactaaaattatacacgataaatacccagagatgttgaaagaaattaaaggcttgtcagaagaaacaacaacaggtgttcatcgtttaaaagaaatggaaaaacaaggcacactaaaagttccagcaattaatgtaaatgattcagttacaaaatctaaatttgacaatctgtacggatgtaaagaaagtttggttgacggaatacgtagaggcactgatgtaatgatggcaggtaagatagctgttgttgcaggatatggagatgtaggcaaaggttctgcggctag

SEQ ID NO: 261202 - DNA, 804 bp, Unknown
  Bacterial polypeptide expressing nucleotide sequence isolated from the Sargasso Sea
attaaaattcacacagaatatccagaaatgcttaaccatattcatggcatctctgaagagactaccactggagtaaagcgtttgaaggaaatgttggctaatggcaagctaaaagtaccagctataaatgtcaatgactcaattactaagtcaaaaaatgataacaagtatggctgtcgacatggtctagatgatgctattaagcgtggtacggatatgctgctttctggcaaaaaagccttagtcataggttatggtgatgttggtaaaggctcagcagactcattaatgcaacaaaaaatgattgttgatgttacagaagttgatccaatctgtgctatgcaggcttgttttgatggcttctctgtagtgtctgcatacaaagatggtaaagtttcaaatgatggcacaaatttagatgaggaacttttaaaaaaatatgatcttgttgtcactactactggcaatattaatgtattggataaatatatgcttgatgctttaagatctggatgtgttgtatgcaatattggtcattttgataatgaaatagatgtaaaacatctaaaatcttttgactggtatgaggttaaaccaggcgttcataaggtgataagagcgaaaaatgattatctgttgctccttggagaaggacgtttagttaatttagctctagctactggacacccaagtcgagttatggatggatcattttgcaatcaagtcttggcacagattatattgtttaaagagggctttgcctcaaaaaaacccaaagaaaaacggttatatgtaaaagttctc

SEQ ID NO: 261203 - DNA, 315 bp, Unknown
  Bacterial polypeptide expressing nucleotide sequence isolated from the Sargasso Sea
aatggatgattttaaagtaaaagatatttctcaagcagaatttggtcgaaaagaaatttcaatagccgaaagtgaaatgccaggtttaatggcattaagagaagaatacaaaggcaaacaaccattaaaaggagcaaaaataattggatgtttgcacatgactattcaaacagctgttttgattgaaacattaaaagatttaggtgctgacgtaagatggtcttcctgtaatatattttcaactcaagatcatgctgctgcagcaatagcaaaagctggtataccagtttatgcttggaaaagtgagactgaaga

SEQ ID NO: 261204 - DNA, 705 bp, Unknown
  Bacterial polypeptide expressing nucleotide sequence isolated from the Sargasso Sea
tgagaccgaagaggaatattggtggtgtgttaagcaaactattgagggaaaaaaggattggaaaccaaatatgattcttgatgatggtggtgatttaactgcgcttatgcataaagattataaagatttattaaaagatattaaaggattatcagaagaaacaacaactggagtgttagcgcttaagaagatggaggctcagggaacattattagtcccagcaatcaatgttaacgattctgtaacaaagtctaaatttgataatttatatggttgtagagaaagcttagtagacggaattaaaagagcaacggatgttatgatgtcaggaaaagttgcaatcgttgcaggatttggtgatgttggaaaaggaagcgctgcttcattaagacaaagtggagcgagagtaatggttaccgaaactgatccaatatgtgctctacaagccgcaatggaaggttatgaagttgtgctcatggacgaaatgattaaagaggcagatatagtcgttactgcaacaggaaacaaagacatagtgactgctgatcatatgagagaaatgaaagatagagcaatattatgtaatattggacactttgataatgaaattcaggttgaagcattgaaaaattacaaatgggatgaaattaagccacaagttcacgaaataactctacctagtaagaaaagaataattttgcttgc

SEQ ID NO: 261205 - DNA, 856 bp, Unknown
  Bacterial polypeptide expressing nucleotide sequence isolated from the Sargasso Sea
aatgaaagatataaaaggtgtttcagaagagactaccactggaataaaagcacttaataaaatggaaaaagataaatcccttttagttccagcaataaatgtgaatgactctgttacaaaatcaaaatttgataatttatatggatgtagagaaagcttagtagacggaataagaagagctactgatgtaatgatgtctggaaaaattgctattgttgctggttttggagacgttggaaaaggaagtgctgcatctttaagacaaagtggagctagagttttagttacagaagcagatccaatttgtgctctccaagctgcgatggaaggttatgaagtagtattaatggaggaggctataagtagagctgatatagttgtaacagcaactgggaacaaagacattgttacagcagatcatatgagagacatgaaggatagagctatattatgtaatattggtcattttgataacgaaattcaagttgaggctcttaaaaattataagtggactgaagtaaaacctcaagttcatgaaatagagttgcctagtggtaaaagaattattcttttagctgaaggaagattggttaatcttggttgtgcaactggacacccaagttttgtaatgagtgcatcttttactaatcaagttattgctcaaatagaactttggaataatcataaaaattatgaaaataaagtttatgtacttccaaaacacttagatgaaaaagtagcaactttgcatttaaaaaaagttggggcaaaactaacaaagttatcaaaagaacaagcagaatatataagtgttggaacagagggtcctttcaaaccagatgcctatcgctattaa

SEQ ID NO: 261206 - DNA, 736 bp, Unknown
  Bacterial polypeptide expressing nucleotide sequence isolated from the Sargasso Sea
atgtctcaagattttaaagtaaaagatattaatcaagctgaatttggcaggaaagaaatttctctagctgaaacagaaatgcctgggttaatggcgttaagaaaagaatacaaaagcaaaaaacctttaaaaggagcgcgaatacttggatgtctacatatgactattcagaccgctgttttaattgaaactttagtagagttaggagcggaagttagatggtcatcttgcaatattttttctacacaagatcatgcggctgcagcaattgctaaagctggcatacctgtatttgcttggaaaggtgagaccgaagaagagtattggtggtgtgttaaacaaactatagagggcaagaaagattggaagccaaatttgattttagatgatggtggagatcttacagctttaatgcataaagatcataaagatttactcaagaatgttaaaggtgtttctgaagaaacaacaaccggtgttttagcacttaagaaaatggaagctaaaaaagaacttttaatacctgcaatcaatgtaaacgactcagttactaaatctaaatttgataatctttacggctgcagagaaagtttagtagatggaataaagagagcaactgatgttatgatgtctggtaaagtagcaatagttgctggatttggtgatgttggaaaaggaagcgcagcatctttaagacaagccggtgctagagttatggtgacagaaactgacccaa

SEQ ID NO: 261207 - DNA, 637 bp, Unknown
  Bacterial polypeptide expressing nucleotide sequence isolated from the Sargasso Sea
tggttttggagatgttggtaagggaagtgcagcatctttaagacaaagcggagcaagagtaatggttacagaaacagatccaatttgtgcattacaggctgcaatggaagggtatgaagttgttttaatggacgacatgattaaagaagcagacatagttgttactgctacaggtaataaagatattgttacagctgatcacatgagagagatgaaagatagagcaatactttgcaatatcggacattttgataacgaaattcaagttgaggcattaaaaaactataagtgggatgaaataaaaccgcaggttcatgaaataactttaccaagcaataaaagaataattttattggccgagggaagactagtgaatttaggatgtgctacaggacatccaagttttgtaatgagcgcatcatttactaatcaagtaacagctcaaatagagctttggaataattcagaaaaatatgaaaataaggtttatgttttaccaaaacacttagatgaaaaagttgctagattacacctagaaaaagtaggagctaaattaacccaaatgtcaaaagatcaagcagattatattagtgtaacacctgagggaccatacaagccagatacatatcgatattaa

SEQ ID NO: 261208 - DNA, 724 bp, Unknown
  Bacterial polypeptide expressing nucleotide sequence isolated from the Sargasso Sea
gttagatggtcatcttgcaacattttttcaacccaagatcatgctgctgccgcaatagcaaaagcaggcacaccagtgtatgcatggaaaggtgagactgaggaagaatatttatggtgtataaaacaaacgattgttggcagaaaagattggaaaccaaatatgcttttggatgatggtggtgatctcactgcaataatgcataaagaatataaagatttgttaaaggaagtgaaaggtgtttcagaagagaccacaacaggtattaaagccttgaataaaatggaaaaagataaaactcttttagtcccagcaattaacgttaatgactcagtaactaaatcaaaatttgataatttatatggatgtagagaaagtctggtagatggcatcagaagagcaacagatgtcatgatgtcgggaaaaattgcaattgtagcaggttttggagatgttggaaaaggaagcgctgcttctttaagacaaagtggtgctagagttttagtgacagaagctgatccaatttgtgcattacaagctgcaatggagggttatgaagtagttttaatggatgaagcaataagtaaagctgatatagtagttactgctactggtaacaaagatattgttacagctgatcatatgagagatatgaaagatagagctattttatgcaacattgggcattttgacaatgaaatacaagtagaagctttaaaaaatt

SEQ ID NO: 261209 - DNA, 616 bp, Unknown
  Bacterial polypeptide expressing nucleotide sequence isolated from the Sargasso Sea
tatctgtgcaatgcaagcttgctttgatggtttttcagtagtttcaccttataaaaatggagaagttgatgaggcaggaaaaaatttagactctaagctactaaaaaaatatgatgttgttgttacaacaacaggaaatattaatgttcttgataaatttatgttagatgcgttacgttcaggctgtgttgtgtgcaacattggacattttgacaatgaaattgatgttgaatatttgaaaacttttgaatggtatgaagtaaagtcaggtgttcataaagttttaagatcaaacaaagattaccttttacttttaggagagggaaggttagttaatttggcactggcaacaggccatccaagcagagtgatggacggatcattttgtaatcaagttttagctcaaattttgctttacaaagaagcatttgcaaataaagataaaaataagaaagaaccatatgtaaaagtcttaccaaaagagcttgatgaggaagttgcacatttaatggttaaaggctttggtggtactttgactaagctcacaaagcagcaagaagattatatatctgtcaatattaatggacctttcaaagatgatacttatagctattag

SEQ ID NO: 261210 - DNA, 802 bp, Unknown
  Bacterial polypeptide expressing nucleotide sequence isolated from the Sargasso Sea
catggaagattataaagtaaaagacattgctcaagctgaatttggtagaaaagaaatatcaatagctgaaagtgaaatgcctggtttaatggctttaagagaagagtattctaaggaaaaaccgttaaagggtgcaaggattataggatgtcttcatatgacaattcaaacggctgtactaatcgaaactttagttgcattaggcgctgaagttcgttggtcttcttgtaatattttttcaactcaagatcatgcagctgctgcaattgcaaaggctgggatccctgtttatgcttggaaaggtgaaacagaagaggaatatttatggtgcattaaacaaactatagttggaaaacctgactggaagcccaacatgttattagatgacggtggtgatttaacagctatcatgcacaatgaatatcaggatttaatgaaagatattaagggtgtttcagaagagactactactggaattaaagcattaaataaaatggaaaaagataaatcgcttttagttccagcaataaacgtgaatgactctgtcacaaaatcaaaatttgacaacttatatggatgtagagaaagtttagtagacggcataagaagagctactgatgtaatgatgtccggaaaaattgctattgttgctggttttggagacgttggaaaaggaagtgctgcatccttaagacaaagtggagctagagttttagttacagaggcagatccaatttgtgcccttcaagctgcgatggaaggttatgaagtggtattaatggatgaggctataagtagagcg

SEQ ID NO: 261211 - DNA, 937 bp, Unknown
  Bacterial polypeptide expressing nucleotide sequence isolated from the Sargasso Sea
gctaaagctggtattccagtatttgcttggaaaggtgaaaccgaggaggaatattggtggtgcgttaggcaaactattgaaggtaagaaagattggaaacctaacatgattttagatgatggtggtgatcttacggctttaatgcataaagattataaagaattaatgaaaaatattaagggtttatcagaagaaacaacaactggtgtattggcacttaagaaaatggaacaagaaggcacacttttagtacctgctatcaatgttaatgactcagtaacgaaatcaaaatttgataatctatatggttgcagggaaagtttagtagatggaattaaaagagcaacagatgttatgatgtcaggtaaagttgcaatagtagcaggttttggtgatgtaggtaagggtagcgcagcctcactaagacaatcaggtgcgagagtaatggtaactgaaactgatccaatttgtgcacttcaagctgcgatggaaggttatgaagttgttacaatggatgacatgattagccaagcagatataattgttactgcaacaggtaacaaagacattgttacagctgatcatatgagagaaatgaaagatagagcaatattgtgtaatattggacacttcgataatgaaattcaagtagatgcattaaaaaattataaatgggatgagatcaagccacaagttcatgaaattactttaccaagtaacaaaaggataattttgcttgcagagggaagattggttaatttaggttgtgcaactggtcatcctagttttgtaatgagtgcatcattcactaaccaagttacagcacaaatcgaattatggaacaattcagataaatatgaaaaaaaggtttacgttctgccaaaacatcttgatgagaaagtagccatgttacacttagaaaaagttggggcaaaac

SEQ ID NO: 261212 - DNA, 763 bp, Unknown
  Bacterial polypeptide expressing nucleotide sequence isolated from the Sargasso Sea
agaaatttcaatagctgaaagtgaaatgccaggattgatggctttgagggaagagtatgttggaaagcatcctcttaaaggagcaaaaattgttggctgtctacacatgacaatacaaacggcagtgttaattgaaacattagttcatcttggagctgaggtgagatggtcatcttgtaatattttctcaacccaagaccacgcagcagcagcaatagcaaaagccggaataccagtatatgcatggaaaggcgaaacagaggacgaatattggtggtgtgttaaacaaactatcgaaggcaaaaaagattggaaaccaaacatgattctggatgatggaggagatttaacagctttaatgcataaagaatataaagatttaatgaaagatgtgaaaggtttatctgaggagactaccactggtgtattagcgctaaaaaaaatggaaaaggagaaaactttgttagtgcctgcaattaatgttaatgactctgttacaaaatcaaaatttgataatttatacggatgtcgagagagtttagttgatggaattaaacgagctacagatgtaatgatgtcaggaaaagtagcaattgtagcaattgtagcaggctttggagatgttggaaaaggcagtgcagcatctttaagacaatcaggtgcaagagtaatgattacagaaacagatccaatatgtgcattacaagcagctatggaaggatatgaggtagtaacgatggacgatatgataagtgaagcaaaa

SEQ ID NO: 261213 - DNA, 943 bp, Unknown
  Bacterial polypeptide expressing nucleotide sequence isolated from the Sargasso Sea
gaaatctcaatagcagaatcagaaatgccgggtcttatggcgcttcgtagagagtataaaggaaagaagccactcaagggagcaaagattttaggatgtttgcatatgacaatacaaactgcagtgttgatagaaactttagttcatcttggtgccgaggtgagatggtcttcttgtaatattttttctacacaagatcatgcagctgcagctatagctaaagaaggaataccagtttttgcatggaaaggtgaaacagagaaagaatattggtggtgtgttaaacaaacaattgagggtaaaaaagattggaagccgaatatgattttagatgacggaggagatcttactgcattaatgcataaagaatataaagatttattaaaaaatgtaaaaggtgtttcagaggaaacaaccacaggcgttttagctttaaaaaaaatggaagcaagcaaacaattaatgataccagctattaatgtgaatgactctgtcacaaaatcaaaatttgataatctttatggttgtagagaaagtttagtagatgggattaaacgagcaacagatgtaatgatgtcagggaaagttgcaatcgtcgctggatttggtgacgtaggtaaaggaagcgccgcgtctctgagacaagcgggtgcaagagtaatgataacagaaacggatccaatatgtgccttgcaagctgcaatggaaggatatgaagtcgttctaatggacgaagcaattaaagatgctgatattgttgtgacagcaacaggcaataaagatattgttactgcagatcacatgagagatatgaaggatagagcaattttatgtaatattggacattttgataacgagatacaagttgatgcattaaaaaattataagtgggatgaaattaaacctcaggtacacgaaatagaattgccaagtaaaaagagaa

SEQ ID NO: 261214 - DNA, 299 bp, Unknown
  Bacterial polypeptide expressing nucleotide sequence isolated from the Sargasso Sea
tatgccagaagattttaaagtaaaggatataaagcaagctgattttggccgcaaggaaatatcaatagccgaaacagaaatgccagggctcatggcattaagaaaagaatttaaagaaaaaaaaccacttaagggagcaaatattttaggttgtcttcatatgacaatccaaactgcagttttaattgaaaccttagttgaattaggagccgatgtaaggtggtcttcttgtaatattttttcaacacaagatcatgcagcagcagctatagctaaagctggagttccggtttatgcct

SEQ ID NO: 261215 - DNA, 784 bp, Unknown
  Bacterial polypeptide expressing nucleotide sequence isolated from the Sargasso Sea
acattattagttccagcaattaatggttataatgactctgtgactaaatcaaaatttgataatctttacggatgtagagaaagtttagttgatggcattaaaagagctacagatgttatgatgtcaggcaaagtagctatagtagcaggttttggtgatgttggaaaaggtagtgcagcatctcttaggcaaagtggggctagagtaatggtgactgaaactgatccaatttgtgcactccaagcagctatggaaggttatgaagttgttttaatggatgaaatgattagtcaagcagatattgttgttactgctactggcaataaagatattgttaccgctgatcacatgagagatatgaaagatagagcaatactttgcaacattggacactttgataatgaaattcaggtagaagcattaaaaaattacaaatgggatgaaattaaaccgcaagttcatgaaattacatttccagataataaaagattaattttattagctgaaggaagacttgtaaatttaggttgtgcaactggccatcctagctttgtaatgagcgcttcatttactaatcaagttacagcacaaattgagctttggaataattcagaaaaatacgaaaataaagtatatgttttaccaaaacatctagatgaaaaagttgctagacttcaccttgaaaaagttggagcaaaacttacaaagttatcaaaagatcaagctgactatataagtgttaaaacagaaggaccatacaaacctgatgcctatcgctactaaa

SEQ ID NO: 261216 - DNA, 637 bp, Unknown
  Bacterial polypeptide expressing nucleotide sequence isolated from the Sargasso Sea
atggaagattataaagtaagagatttatcacaagcagaatttggacgaaaagaaatttcaattgctgaaagtgaaatgccaggacttatggctttaagggaggagtacgctggaaaatctcctttaaagggagcaaaaattataggttgtttgcatatgacaatacaaacagcagtattaattgaaacgttagtagatttaggcgcagaagtaagatggtcatcttgtaacattttttctactcaagaccatgcagcagcagcaattgcaaaagctggtattccagtttatgcgtggaagggagaaacagaggaggaatatgtttggtgtataaaacaaaccattgaaggtaagaaaagttggaaacctaacatgcttttagatgatggcggggatttaacagcaatgatgcacaatgaatataaagatttattaaaagatgtgaaaggagtttcagaggagacaaccacagggataaaagctttgaataaaatggaaaaagaaaattctttgttggttccagcgattaatgtgaatgattctgttaccaaatcaaaatttgataacttatatgggtgtagagaaagtttagttgatggaattagaagagccactgatgtaatgatgtcaggaaaaa

SEQ ID NO: 261217 - DNA, 613 bp, Unknown
  Bacterial polypeptide expressing nucleotide sequence isolated from the Sargasso Sea
agcgccgcttcattgagacaagcaggagcaagagttcttgttacagaaacagatcctatttgcgctcttcaagctgctatggaaggttacgaagtagtattaatggatgatgcaataaaagatgctgatattgttgttacagcaactgggaataaagatattgttactgctgatcacatgagaaatatgaaagatagagctattttatgtaacataggtcactttgataacgaaattcaagttgaagctctcaaaaattataaatgggatgaaattaaacctcaggtacacgagatagaactacctagtaagaaaagaattattttacttgctgaaggcaggcttgtaaatttaggctgtgctactggtcatccaagttttgtaatgagcgcttcttttacaaatcaagttattgcccaaattgaattatggaataattcagataattatgaaaataaagtttatgttttaccaaaacatttagatgaaaaagtagcaatgttacatttagaaaaagtaggtgcaaaattaacaaaaatgtcaaaagatcaagcagattatattagcgttaaacaatcagggccattcaaaccagatacttaccgctactaaa

SEQ ID NO: 261218 - DNA, 335 bp, Unknown
  Bacterial polypeptide expressing nucleotide sequence isolated from the Sargasso Sea
tatggttatcgcaaattctgttaaaacctctacacctaattacgtaattgcagatatttctttgtcacattttggtcgcaaagaaattaaaatcgctgaaacagaaatgcctggactaatggcacttagagaaaaatatcaatctgttaagccattaaaaggtgcaaaaatagctggaagtcttcacatgactattcagacagcggtcttaatagaaactcttgttgatcttggtgctgaagtgaaatgggcttcatgcaatattttttcgactcaagatcatgcggctgcggctatcgcagataaaggaatttctgtatacgcaaaaaaaggtg

SEQ ID NO: 261219 - DNA, 473 bp, Unknown
  Bacterial polypeptide expressing nucleotide sequence isolated from the Sargasso Sea
tatgagccagaaatatatcgtgaaagacatctctttatctgattttggccgcaaggaattaagtatagctgaaacagaaatgcctggattgatggcgctgcgctcggaatatggagaaagcaaacctttaaaaggtgcgcgaatcgtcggttcacttcacatgactattcaaacagcagttttaattgaaacacttgtggcattaggcgcagatgtgcgttgggcttcctgcaacattttttctacccaagaccatgcagccgcagcaattgccgcagcaaatattcctgtgtttgctatcaagggtcaatctttagaagagcattgggattacttggataaatcttttatgtttcctgatggcccaaatatgattttagatgatggtggtgacgcaactttgtatgtgcttcttggtgcgcgcgctgaagcaggtgaagacatcattccggttccccaatcagaggaagaag

SEQ ID NO: 261220 - DNA, 538 bp, Unknown
  Bacterial polypeptide expressing nucleotide sequence isolated from the Sargasso Sea
gtaagagctttagaagcattaatgcatggctatgaagtgaaaaccagcattaatgctgcaaagattgccgatgttattgtttcagtaacaggcaacatgcatgcattagataagcaacattttgatgttatgaaagatggagttgctttagcaaatgcaggccattttgatgttgaaataaaccttaatgcactcaaagaacacagttcaagcattgatagggtgagagaacatgttgaaagctataaatacaacaataaagagatcttagttcttgctgaaggaagattagtgaatttagctgcagcaactggacacccagcatctgttatggatatgtcttttgcaaaccaggctcttgcagctgagtggataaaagataattacaaaaatctagaatcaaaagtttatacactacctaaagaagtagatttgaaaatagctgcaacgaaattaggactcatgggtggtgagttagagatccttactgaggaacaaattaattatcttgactcatgggagcatggcactagctaaa

SEQ ID NO: 261221 - DNA, 490 bp, Unknown
  Bacterial polypeptide expressing nucleotide sequence isolated from the Sargasso Sea
gctgacattgtagtaacagctaccggcaataaagatattgttactgcagaccatatgcgagatatgaaagatagagcaatcttatgtaatattggtcattttgataatgaaattcaagtagaagctttgaaaaattataaatgggatgaaattaaaccccaggtgcatgaaattgaactaccaagtaaaaaaagaattattttattagctgaaggcagactggtaaatttaggttgtgctacaggacacccaagctttgtgatgagcgcttcttttactaatcaagttattgcacaaattgaactatggaataattcagataaatatgaaaagaaagtttatgtcttaccaaaacacctagatgaaaaagttgcaatgttacatctggataaagtcggagctaaattaacaaaaatgtcgaaagatcaagcagactatattagcgttaaacaatcaggaccatttaagtcagatacttaccgctactaaa

SEQ ID NO: 261222 - DNA, 436 bp, Unknown
  Bacterial polypeptide expressing nucleotide sequence isolated from the Sargasso Sea
tatgagagcaatgaaagatagatcaatcctttgtaatataggacactttgataatgagatacaagtcgatgcattaaaaaactataagtgggatgaaataaaaccacaagttcatgaaattacttttccagataataagagacttatattattagctgaaggaagacttgtaaacttaggttgtgcaacaggacacccaagttttgttatgagtgcttcatttacaaatcaagttacagctcaaatagagttatggaataactcagataattacgagaataaagtatatgtacttcctaaacatttagatgaaaaagtagctagattacatttagaaaaagttggagctaaattaacacctttatctaaggaccaagctgattatattagcgttaaaactgaaggaccatataagccagatgcttaccgctactaa

SEQ ID NO: 261223 - DNA, 265 bp, Unknown
  Bacterial polypeptide expressing nucleotide sequence isolated from the Sargasso Sea
agccacagatgtaatgatgtcaggcaaagttgcaattgttgcaggattcggagatgttggcaaaggtagtgcagcgtctttacgccaagcaggtgccagagttatggtgacggaaacagatccgatttgtgcattacaagcagcaatggaaggttacgaagttgttcttatggatgaagcaattaaagatgccgacatagtagtcacagcaactggaaataaagatatagttacagctgatcatatgagtagaaatgaaagatag

SEQ ID NO: 261224 - DNA, 427 bp, Unknown
  Bacterial polypeptide expressing nucleotide sequence isolated from the Sargasso Sea
aatgaaagatagagccatattgtgtaatattggtcatttcgacaatgagattcaagtcgaagctttgaaaaactataaatgggacgaggttaagcctcaagttcatgaaatagaattaccaagtaaaaaaagaataatattattggcagagggaagactggttaatcttggatgtgcaacaggccacccaagctttgtaatgagcgcatcattcactaatcaagtaattgcacaaattgaactttggaataattctgataaatacgaaagaaaagtttatgttttaccaaaacatctagacgaaaaggttgcaatgcttcatttagataaggttggagcaaaattaacaaaaatgtcaaaagatcaagcagattacattagcgttaaaccatcgggaccatttaaaccagatacttatcgctactaa

SEQ ID NO: 261225 - DNA, 517 bp, Unknown
  Bacterial polypeptide expressing nucleotide sequence isolated from the Sargasso Sea
aatgtatgtgattcagcaatgctttcaacgcttaaggatggggctgttgtatgtaatattggccattttgataccgaaatagatacaaaatatatgcagaaagaatggtattgggaagaagtaaaaccacaagttcatagaatattcagagattgttcgcctgatcaggaacctgacttatcaagcaagaattatctaatacttttagccgaaggaagactggtgaaccttggaaatgccacaggtcatccaagcagaattatggatggctcatttgcaaaccaagttcttgcccaaatgcatctctactcagctggttttgcaaatgtaaatgatgaagataaaaagaaagaattaattcaagtagaggtccttcctaaaaaacttgatgaggaagttgcctcccttatggttcaaggttttggcggtgttgttacaaagcttactgaagagcaagctgattacataaatgtcccgcaagatggtcctttcaaagaagattcttataagtactaga

SEQ ID NO: 261226 - DNA, 412 bp, Unknown
  Bacterial polypeptide expressing nucleotide sequence isolated from the Sargasso Sea
cattttatgtaatatcggacatttcgacaatgaaattcaggttgacgcattaaaaaatttcaaatggactgaagtaaaaccccaggtccatgaaatagaattgcccagcaaaaagagaattattttattggcagagggtagattagtaaatttgggatgtgctacagggcacccaagttttgtaatgagtgcttcttttacaaatcaagttattgctcaaatagaattgtggaataactacaaaaactatgaaaacaaagtttatgttttaccaaagcatttagatgagaaagtagctacacttcatcttaaaaaagttggcgctaaattaaccaaactttcaaaggatcaagcagattatattagcgtaggagtagagggacctttcaagcctaatgcctatcgctattaa

SEQ ID NO: 261227 - DNA, 700 bp, Unknown
  Bacterial polypeptide expressing nucleotide sequence isolated from the Sargasso Sea
tttagttgatggcataagaagagctacagatgttatgatgtctggaaaaattgctatagttgctggatttggagatgttggtaaaggaagtgctgcatctttaagacaaagcggtgctagagtattggttacagaggctgatccaatctgtgcgttgcaggcggcaatggagggttatgaagtagttttgatggaagaggcaattagcaaagctgacatcgtcgttacagcaactggtaacaaagatattgttacagctgatcatatgagagaaatgaaagatagagcaattttgtgcaacataggacactttgacaacgaaattcaagttgaagctttgaaaaattataaatggactgaagtaaaacctcaagttcacgagatagaattaccaagtaaaaaaaggattatattattagcagagggtagattagttaatttaggttgtgccacaggtcacccaagttttgtaatgagcgcatcgtttactaaccaagtgattgcccagatagagctttggaataatcataaaaactatgagaacaaagtttatgttttaccaaaacatttagacgagaaggttgccacacttcatcttaagaaagttggagcaaaattaaccaaattatcacaagaacaggcggactatataagtgtcggagtcgaaggtccttttaaacctaatgcctaccgctattaa

SEQ ID NO: 261228 - DNA, 631 bp, Unknown
  Bacterial polypeptide expressing nucleotide sequence isolated from the Sargasso Sea
atggaatttaaagattataaagtagcagacataaatttagctgattggggtagaaaagaaataattcttgctcaagccgagatgccagctcttatgaaattaagaaaaaggtatggtgaagaaaagcctctcaagggagcaaaaataatgggttgcattcatatgacaattcaaacagcagttttaattgagactcttgttgagcttggtgctgaggtcagatggtcttcttgtaatgttttttctactcaagatcatgctgcagctgctattgcagcagcaggcatacccgtattcgcatggaaaggaatgaacgatgaagaatttgactggtgcatagaacaaacaatacttaatggtgaaaagccatgggatgcaaatatgattcttgatgacggcggtgatctgactgaaatggttcatgataagtttcctgagatgcttgaaagtattcacggaatctctgaagagaccacaacaggcgttcatcgattaaatgaaatggtcgagaaaggagaactcaaagttccagcaatcaatgtaaatgattcagttactaaatcgaaaaatgataataaatatggctgtagacacagtcttaatgatgctattaaaagaggaactgacatgc

SEQ ID NO: 261229 - DNA, 623 bp, Unknown
  Bacterial polypeptide expressing nucleotide sequence isolated from the Sargasso Sea
catgcccttcgatcattgcaagatcgccgatcccagcctctccgattggggccgcaaagaaatgaatatcgccgagatcgaaatgccaggtctcatggctttgcgcgaggaatacggcgaagcccagccactgaagggcgcaaagatcgcaggctccctgcatatgacgattcagacggccgttctgatcgaaacgctgacggccttgggtgccgaagttcgctgggcgtcatgtaacatcttttcgacccaggaccatgccgccgccgccatagcagcaacaggtgtgccggtgttcgccacaaagggcgaaaccctggaagaatattgggaatacgcccacaacatcttcgaatggcatgacggcagtacgccaaacatgatcctagatgacggcggcgacgccacgcttttggtgcatctgggcattaaggctgagaaggatctctccgtcctagataaccccaccaatgatgaggaacaagccctttacgccgccatccgcaagcgggtcgaagcgaagtccggctggtactcggaactaggcgctgccatcaagggcgtgaccgaagaaaccactaccggcgtgcaccgtctgcagcacatggccgaagatggtacgc

SEQ ID NO: 261230 - DNA, 811 bp, Unknown
  Bacterial polypeptide expressing nucleotide sequence isolated from the Sargasso Sea
gtttttgcaattaagggtcaatctttagaagagcattgggattacttagatcaatcttttatgtttcctgatggcccaaatatgattttagatgatggtggtgacgcaactttgtatgtactacttggtgctcgcgcggaagaaggtgaagatattattcctgttccccaatcagaggaagaagaggttataaaggcgcagataaagaagcgtatggaacaatcacctgggtggtttacgaaaacacgtgacgccatcaaaggtgtttcagaagaaacaacaaccggtgttcatcgtctttacgaattggttaaaaacggccagcttcccttccctgccattaacgtgaatgactccgtgacaaagtcaaaatttgacaacaagtatggttgtaaagaatctttagtggacggtatccgtcgtgcaactgacacaatgatggccggcaaaactgctgttgtatgcggatatggagacgttggtaaagggtctgcagcatcccttcgtggtgctggagcacgcgtcaaggtgacagaggttgatccaatttgcgccctacaggctgctatggatggttttgaagtggtaaccttagaggataccttagaaagcgccgatattttcattacaacaacaggcaataaagacgtcattcggatagagcacatgcgtgaaatgaaagatatggcaattgttggtaatattggccacttcgacaatgaaatccaagttgcccatcttaaaaatcacaaatggacgaatattaaagagcaagtagacatgatcgaaatgccatctggaaatagactga

SEQ ID NO: 261231 - DNA, 371 bp, Unknown
  Bacterial polypeptide expressing nucleotide sequence isolated from the Sargasso Sea
tatgactgataccaatgattataaagttgctgatatagaacttgctgagtttggcagaaaagaaatttcactagctgaaactgaaatgcctggcctaatggctttaaggagtgagtatggaaatgaaaaacctttaaaaggtgctagaattgttggttgtcttcatatgacaatacaaacagctgtacttattgaaacattggttgaattaggtgcggacgtaagatggtcatcatgtaacattttctctactcaagatcatgcagctgctgcaattgccaaagcgggcattccagtatttgcttggaaaggtgaaactgaagaggagtattggtggtgtgtgagacaaactattgaaggaaaagatggat

SEQ ID NO: 261232 - DNA, 908 bp, Unknown
  Bacterial polypeptide expressing nucleotide sequence isolated from the Sargasso Sea
aatagctgaaacagagatgcctggtttaatggcattaagagaagagtacggtgattctaaacctctagatggggcaagaattgtaggttgtttacacatgacaatacaaactgctgttttgattgaaactttggtatttttaggtgctactgttagatggagctcatgtaatattttttccactcaagatcatgctgctgcagcaatagctgccaaaggcattccagtatttgcctggaaaggaatgacagaagaagaattttggtggtgtattgagaaaacattagaaggcccagatggttggaagccaaatatgattttagatgatggtggagatgctacaaaaataattcatgaaaagtatccaaaaatgttggaagaaattttaggtttatctgaagaaacaactacaggtgtccatcgtttgaaagaaatggaaaaaaatggaacattaaaggtcccagcaataaatgttaatgactcagttactaagtctaaatttgacaatttatatggttgtaaggaaagtttagtagatggaataagaagaggtactgatgtaatgatggctggtaaaatagccgttgtagctggttatggagatgtcgggaaaggttcagcagctagcttaagaggtgcaggtgcgcgtgtttgtgtgactgaaatagatccaattaatgcacttcaagcggcaatggaaggttacgaagttgtcacaatggatgatgcttgtaaatatggtgatatatttgttactgccactggtaatcttgatgtgattacacaagatcatatgagacaaatgagagatcgtgctatagtttgtaatattggacattttgataacgaaatacaaacagaagctcttcaaaattataagtctgatgagattaaaccacaagttagag

SEQ ID NO: 261233 - DNA, 485 bp, Unknown
  Bacterial polypeptide expressing nucleotide sequence isolated from the Sargasso Sea
agcaagagttttagttactgaaattgatcctatttgcgcacttcaagctgcaatggaaggatatgaagtagtttctatggaaaaagctgctaagatcggggatatttttgtaacagcaacgggaaactgtgacgtaattaatttggaccatatgagagatatgaaagatcgtgctatagtctgtaatattggccattttgattcagaaattgagatttcatctttacaaaattataaatgggaagaaataaaaccacaagttgaccaaattacctttcctgatggtaaaaaattaatagttttagcaaaaggaagattagtaaatttaggatgtgcaactggccatccaagctttgtaatgagcgcttcatttaccaatcaagttttagcacaaattgaactgtggcaaaactatgcttcttatgaaaataaagtttatacgcttccaaaagaattagatgaaaaagtagcccatctacattgaa

SEQ ID NO: 261234 - DNA, 361 bp, Unknown
  Bacterial polypeptide expressing nucleotide sequence isolated from the Sargasso Sea
atgaatgaagattttaaagtaaaagatataagtcaagcagattttggtcggaaagaaatttcaatcgcagagtcagagatgcctggtcttatggcactaagaaaagaatataaaggtaaaaaacctttgaaaggtgcaaaaattttaggatgcctccacatgactattcaaactgcagttttaattgaaactttagtagaattaggcgcagatgtaaggtggtcttcttgtaatattttttccacccaagaccatgcagctgcagcaatagcaaaagcaggaattcctgtttatgcatggaagggagaaacagaggaagaatattggtggtgtattaaaaaaactatcgaaggaaaaaaag

SEQ ID NO: 261235 - DNA, 470 bp, Unknown
  Bacterial polypeptide expressing nucleotide sequence isolated from the Sargasso Sea
catgagtgattacaaagttaaagatatatcccaagcagaatttggaagaaaagagatctccttagcagagactgaaatgcccggactaatggcattaagaaaagaatataaaggaaaaagtcctctcaaaggagcaagaatcttaggatgtcttcacatgactattcaaactgcggttcttattgaaactcttgtagatttaggagcagaagtaagatggtcttcgtgcaatattttttcaacgcaagatcatgccgctgccgctattgcaaaggcaggtataccagtttttgcatggaaaggtgagactgaagaagaatattggtggtgtgtaaaacaaacaattgaggggaagaaggattggaagccaaacatgattcttgatgatggtggtgacttaactgcgcttatgcataaagattataaagatttattaaaagatatcaaaggattgtctgaagaaacaacaa

SEQ ID NO: 261236 - DNA, 838 bp, Unknown
  Bacterial polypeptide expressing nucleotide sequence isolated from the Sargasso Sea
agttgttacaaaccgcatcttatgagtgattacaaagtaaaggatatcaatcaagcagaatttggaagaaaagaaatttctttagcagaaactgagatgcctggcttaatggcactaagaaaagaatatcaaggaaaaaaccctcttaaaggcgcaagaattttaggttgtttgcacatgacaattcaaacagcggtattaattgaaacattggtagacctaggtgcagaagtaagatggtcttcatgtaatatattttctacacaagatcatgcagctgcagcaatagctaaagcaggtattcctgtattcgcgtggaagggtgagacggaggaagaatactggtggtgcgtaaaacaaacaattgaaggcaaaaaagattggaagcctaatatgattttagatgatggtggtgatcttactgccctaatgcacaaagattataaagatttaatgaaggatataaaaggtttaagtgaggaaacaactacaggcgttttagctctgaaaaaaatggaagagcagggaacacttttagtacctgcaatcaacgttaacgactcggtcacaaaatcaaaatttgataatctctatgggtgtagagaaagtttagttgatggtataaaaagagctactgacgtcatgatgtctggaaaagttgcaattgttgctggttttggtgacgttggaaaaggaagtgctgcatcacttagacaaagtggtgcaagagtaatggtaactgaaactgatccaatttgtgcgctacaagcggctatggaaggttatgaggttgtcttaatggatgagatgattggtcaagctgatatagttgttacag

SEQ ID NO: 261237 - DNA, 429 bp, Unknown
  Bacterial polypeptide expressing nucleotide sequence isolated from the Sargasso Sea
catgccattcaaggtcaaggatattaatcttgcaggagacggaagaaaagcacttgatattgctgaaaaagaaatgccaggactgatgtccacgcgtaataaatatggacccgaaaaacctcttgcgggaaaaaaactgacaggttcattacatatgactgtggagactgcagtactaattgaaacattagtcgagttgggtgcagatgtacggtgggcgagttgtaatatcttttcaacccaagatcatgctgctgcggtcattgctgaatctggggtgccagtttatgcatggaaaggagaatcacttgaggaatactggtggtgtactcttccagcacttactttccctgatggttctggtccagacctgattgtagatgatggcggtgatgccacattattaattcataaagggtatgaattaga

SEQ ID NO: 261238 - DNA, 745 bp, Unknown
  Bacterial polypeptide expressing nucleotide sequence isolated from the Sargasso Sea
accggaccgctggacgccgaatatgattctcgatgatggcggcgacctgacagtttacttgcacgacaagtttccggagcttatggacgacgtcaagggcctgtcggaagaaacaacgacgggcgtcaaacgcctgtacgatatgcagaaagacggctccctggcctgcccggcattcaacgtcaacgactctgtaaccaagtccaagttcgacaacctgtacggttgccgcgaatcgctcgttgacggtatcaaacgtgccaccgacgtcatgatcgccggcaaaatcgccatcgtttgcggctttggcgatgtcggcaaaggctccgcccagtcactgcgcggactcggcgcgacggtctgggtaaccgaaatcgatcccattaatgccctgcaggccgcgatggagggctatcgcgtggtcgacttcgacgaagtctgcgaccaggccgatatcgtcgtcacggccacaggcaatttccacgttgtaagtggcgcacaaatggaacgcatgaaagaccaggcgattctctgcaacattggtcatttcgataacgagattgatgtcgcgcacctacagcagtacgagtgggagaacatcaagccgcaagtcgatcacatcatcttccctgacggcaagcgcatcatactgctggcggaaggccgactggtgaacctgggctgcgcgaccggccacccgagcttcgtgatgtccaattcgttcaccaaccaggtgctggcgcag

SEQ ID NO: 261239 - DNA, 625 bp, Unknown
  Bacterial polypeptide expressing nucleotide sequence isolated from the Sargasso Sea
gttggtaaaggaagtgctgcatctttaagacaaagtggtgctagagtattagttacagaagctgatccaatttgtgcattacaagcagcaatggagggttacgaagtggttttgatggaagaggcaattagcaaagctgacatcgtcgttacagcaactggtaacaaagatattgttacagctgatcatatgagagaaatgaaagatagagcaattttgtgtaatataggacactttgataacgaaattcaagttgaagctttgaaaaattataaatggactgaagtgaaacctcaagttcacgagatagaattaccaagtaaaaaaaggattattttattagcagaaggtagattagttaatttaggttgtgccacaggtcatccaagttttgtaatgagcgcatcgtttactaatcaagtgattgcccagatagagctttggaataatcataaaaactatgacaacaaagtttatgttttaccaaaacatttagatgagaaggttgccacacttcatcttaagaaagttggagcaaaattaaccaaattatcaaaagaacaggcggactatataagtgtcggagtcgaaggtccttttaaacctaatgcctaccgctattaaa

SEQ ID NO: 261240 - DNA, 649 bp, Unknown
  Bacterial polypeptide expressing nucleotide sequence isolated from the Sargasso Sea
aatgtcagaaaaaggggatctaccttttcctgctataaatgtcaatgacagtgttacaaagtcaaagtttgataatttatatggttgcagagaaagcttggtagatgggataaaacgtgccacagatgtaatgctagctgggaaggtagcagtagtttgtggttttggggatgttgggaaagggtcagcagcttcattgagacaaggtggtgccagggtcatggttactgaaattgatccaatttgtgctcttcaagcagcaatggaaggctatgaagttgtaacgatggatcaggctgcatcaagggcagatatttttgttactgcgactggaaataaagacgtaattactgttgatcatatgagagaaatgaaggatagggcagttgtttgtaatatcggccattttgactctgaaattcaaattagcggtttaaataatatgatatgggatgagatcaagccacaagtagatgaagtgaaatttccagatggtaaaaaaataatcatgcttgctaaaggaagattagtcaaccttggatgtgctacaggtcatcctagttttgtaatgtctgcctcatttactaaccaggttttagcccaaatggaaatatttaataataatgatgcttatgataataaagtttat

SEQ ID NO: 261241 - DNA, 772 bp, Unknown
  Bacterial polypeptide expressing nucleotide sequence isolated from the Sargasso Sea
gaagaagaatattggtggtgcgtaaaacaaacagtagagggtaaaaaagaatggaaaccgaatatgatcttagatgatggaggagatttgacggccttaatgcacaaagattataaagatttaatgaaagatattaagggcttatctgaggagaccaccactggtgttttagcacttaaaaaaatggaaaaagaaggcactttgttagtgcctgcaataaacgtaaatgactctgtaacaaaatctaaatttgataatctttatggatgtagagaaagtttagttgatggaattaaaagagcaacagatgtaatgatgtcaggtaaagtagctatcgttgcgggttttggagacgtaggcaaaggtagtgcagcatccttaagacaatcaggtgcacgagtgatgattacagaaactgatcctatatgtgcattgcaagctgctatggagggttacgaggtggtaacaatggatgacatgataagtgaagcagatattgtcgttactgcaacaggaaataaagatatcgtcacagcagaccatatgagagaaatgaaagacagagcaattttgtgtaatattggtcattttgataacgagattcaagtagatgcgttgaaaaattataaatgggatgaaataaaacctcaagttcatgaaattactttgcctagtaaaaaaagaataatattgctggctgagggaaggttggtaaactctaggttgtgcaacaggtcacccaagttttgtaatgagtgcttctttcactaat

SEQ ID NO: 261242 - DNA, 694 bp, Unknown
  Bacterial polypeptide expressing nucleotide sequence isolated from the Sargasso Sea
tgatggaataaaaagagctacagatgtaatgatggcaggaaaggtcgcagttgttgcaggttatggagatgttggtaaaggttcctcagaaagtttaagaagtgctggctgtcgagttttagtcactgaagtagatccaatctgtgcacttcaagctgcaatggatggttatgaagttacaacaatggaagatgcagtaaaaagatcagatatttttgtaactgcgacaggaaatgtagacgtaattacaatagatcatatgagagacatgaaagatagaagtattgtatgtaatattggacattttgattctgaaattcagattaatgctctaagaaatcacaaatggaataatattaaaccacaggttgatgaaatagaatttcctgatggaaaaaaaataattgttttagctgagggaaggttagtaaatttagggtgtgcgactggacatccaagttttgttatgtctgcttctttcagcaatcaagtattagcacaaattgaactttggcagaataataataaatatgaaaataaagtatacgttcttcctaaaaaattagacgaaaaagtcgctaaacttcatttagataaaattggtgcaatgctaactcaactatcagaaaagcaaggaaagtatattaatgttcctatcaatggaccatttaaaaatgacgaatatagatattaa

SEQ ID NO: 261243 - DNA, 895 bp, Unknown
  Bacterial polypeptide expressing nucleotide sequence isolated from the Sargasso Sea
gtcgcggacattgatttggctgactggggacgccgagagatagagattgcggaaggggaaatgcccgcacttatggctcttagagaaaaatatcgaacggaaaaaccgttggcaggcgctaaaatacttgggtgtatccatatgaccattcagaccggtgtattaattgaaacacttgtggatcttggggcagaagtacgttggtcctcctgcaatattttttctacacaagatcatgcagccgcagccatcgcggcagctggaatagcggtctttgcttggaagggagaaaccgaggaagagtacgactggtgtatagagcagacaattcaaaaagatggcaggccttggtctgcaaatatggtgctagatgacggtggcgatctcaccgcaatgcttcacgaaaaattcccttcaatgctcaaccaaatccatggcatcacggaagaaacaactactggggttcaccgcctacaggaaatgttgaatgacggcaccctcaaggttcccgcaattaacgtaaatgattctgttacaaaatcaaaaaacgataataaatatgggtgccgccatagcctaaatgatgcgattaaaagggctctcgatcacctcttggccggaaaacgtgctctggttatcggatatggtgatgtcggaaaaggctcggcgcaatcgctccgtcaggaagggatgattgtccgaattgcagagattgaccctatctgtgcaatgcaggcgtgtatggatggatttgaagtagtatcaccattcataaacggaataaatgatggtacagaggctagcgtagatgaaagtttacttggagctaccgaccttttggtcacaacgacaggtaacgtcaacgtttgcaatggccatttctcaaagctctaaa

SEQ ID NO: 261244 - DNA, 310 bp, Unknown
  Bacterial polypeptide expressing nucleotide sequence isolated from the Sargasso Sea
tatgaataaagatttcaaagttgctgatatctcacttgctgattttggaaggagagaaatatctctggctgaaaatgagatgccagctctaatggctttacgagaaaaatataaagatgatcagcctttagcaggtgcaaagattatgggttgtatacatatgacaattcaaacagcagtattgatggaaactttagttgatcttggtgccgagctcagatggtcatcatgtaatattttctcaactcaagatcatgcagccgcagccatggcagcaaatgatattcctgtatttgcctggaaaggagaa

SEQ ID NO: 261245 - DNA, 640 bp, Unknown
  Bacterial polypeptide expressing nucleotide sequence isolated from the Sargasso Sea
tgcaggatatggtgatgttggtaaaggttcagcagaaagcctaagaaatgctggatgtcgagtagttgtaactgagatagacccaatttgtgcacttcaagctgctatggatgggtttgaagtgaacactatggacaatgttgcagataaagcagatatttttgtaacagcaaccggaaatgttgatgtaataactattgatcatatgagaaaaatgaaagacagaagtattgtatgtaacattggacacttcgattccgaaattcagattgaagctctaaagaactataaatgggataacattaaaccacaagttgacgaaattgaatttcctgatggaaagaaaataatagttcttgcagagggtcgtttagtaaatttaggatgtgcaactggtcatccaagctttgttatgtcagcttctttttcgaatcaggttttggctcaaatagagttatggaaaaactatagtaaatataaaaataaagtttatgttcttccaaaaaaactagatgaaaaagtagctagaatacaccttgataagattggtgcaaagctaaccaagctatcgaaaaatcaaggagattacataaatgttcctgtgggtggaccatataaaagcgaagaatatagatattaa

SEQ ID NO: 261246 - DNA, 418 bp, Unknown
  Bacterial polypeptide expressing nucleotide sequence isolated from the Sargasso Sea
agagctatcttatgtaatattggtcactttgataatgagatacaagttgaagctcttagaaattataagtggaccgaagtaaaacctcaagtgcatgaaatagagcttcctagtggtaaaagaattattcttttagctgaaggaagattagttaatcttggttgtgcaactggacatccaagttttgtaatgagtgcatcatttaccaatcaagttattgcacaaatagaactttggcataatcataaaaattataaaaataaagtttacgtacttccaaaacatttagatgaaaaagtagcaactttgcatttaaaaaaagttggggcaaaactaacaaaattatctaaagatcaagcagattatataagcgttggaacagaaggtcctttcaaaccagatgcctatcgctattaga

SEQ ID NO: 261247 - DNA, 253 bp, Unknown
  Bacterial polypeptide expressing nucleotide sequence isolated from the Sargasso Sea
tgctacaggtcacccaagctttgttatgagtgcttctttcacaaaccaagtgatagcccaaatagaattatggaataattcagaaaaatataaaaaacaagtttatgttttacctaaacacctggatgaaaaagttgcgatgcttcatttagataaggttggagcaaaactaactaaaatgtcaaaagatcaagcagactatattagtgtaaaacaatcaggaccatttaaaccagatacttatcgctactaa

SEQ ID NO: 261248 - DNA, 277 bp, Unknown
  Bacterial polypeptide expressing nucleotide sequence isolated from the Sargasso Sea
atggaagattataaagtaaaagatatttcacaagctgattttggaagaaaagaaatttctatcgcagaaagtgagatgccaggattgatggctttaagagaagaatattcaaaaaacaaaccccttaaaggtgctaagattattggctgtttacatatgacaatacaaacggctgtactaatcgaaacattagttgatttaggagctgaagtaagatggtcatcttgtaatattttttcaactcaagatcatgctgccgctgctattgctaaagcag

SEQ ID NO: 261249 - DNA, 385 bp, Unknown
  Bacterial polypeptide expressing nucleotide sequence isolated from the Sargasso Sea
aatgagtcaagattacaaagtaaaagatatgaagttagctgaatggggcttaaaggaaattgcgattgctgaaacagaaatgccaggcttaatggctcttagagaagagtatggtgatagcaaacctcttgatggggctaaaattgttggatgtcttcatatgactattcaaactgctgtattgattgaaacccttgttcatcttggtgcttccgtaagatggagttcttgtaatatattttcaactcaagatcaggctgctgctgctatagcttcaaaaaacatacctgtatttgcttggaaaggaatgtcagatgaagagttctggtggtgtatagagcaaaccttaagtgggccagatggttggaaacctaatatgattttg

SEQ ID NO: 261250 - DNA, 430 bp, Unknown
  Bacterial polypeptide expressing nucleotide sequence isolated from the Sargasso Sea
tatgacagattataaagtaaaagacatcaacgaagcagaatttggaagaaaagaaatttcattagcagaaacagaaatgccaggtttaatggcattaagaaaagaatataaaggaaaatatccattaaaaggtgcaaaaatattaggatgtctacatatgacaatccaaacggcagttttaatagagactttagtggatcttggagctgaagtaagatggtcctcatgtaacattttttctacacaagatcatgcagcagctgcaatcgcaaaagcaggtattccagtatttgcatggaaaggtgaaacagaagaggaatattggtggtgtgtaagacaaactattgagggtaaaaaagattggaagcctaatatgattttggatgatggtggagatcttactgcacttatgcataaagattataaagat

SEQ ID NO: 261251 - DNA, 823 bp, Unknown
  Bacterial polypeptide expressing nucleotide sequence isolated from the Sargasso Sea
aatgagtgaagatttcaaagttaaagatattagtttagctgatttcggtgataaagaaattgcaatagctgaaacagaaatgccaggtttaatggcattaagagaagagtatggagattctaaacctctagatggagcaagaattgtaggttgtttacatatgacaatacaaactgcagttttgattgaaactttagtatatctgggtgctaccgttagatggagctcatgtaatattttttctacacaagatcacgctgctgcagcaatagctgcaaagggtattccggtatttgcctggaaaggaatgacagaagaagagttttggtggtgtattgaaaaaactctagaaggtccagatggttggaaaccaaatatgattttagatgatggtggagatgctacaaaaataattcatgaaaagtatccaaaaatgttggaagaaattctaggtttatctgaagaaactacaactggtgttcatcgtttgaaagaaatggaaaaaaacggaacattaaaggtgccagcaataaacgttaacgactcggttaccaagtctaaattcgataacttatatggctgtaaggaaagtttagtagatggaataagaagaggtacagatgtaatgatggctggtaaaatagctgttgtagctggatatggagatgttggtaaaggttcagcagctagcttaagaggtgcaggtgcacgtgtttgcgtaactgaaatagatccaattaacgcacttcaagcagcaatggaaggttacgaagttgtcacaatggatgatgcttgtaaatatggtgatatatttgttactgcc

SEQ ID NO: 261252 - DNA, 342 bp, Unknown
  Bacterial polypeptide expressing nucleotide sequence isolated from the Sargasso Sea
aatgagtaagcaagattacaaagtaaaagatatttctcttgcagaatatggaaggcaagaaattttattagctcaagatgaaatgcctgctttaatgcaattaagagataattacagagataaacaacctcttaagggcgcaaaaataatgggctgtatacatatgactgttcaaactgctgtgttaattgagactttgattgaattaggtgctgaggttagatggtcttcatgtaacattttttcaactcaagaccatgcagctgctgcaattgctgatcaaggcattcctgtttttgcttggaaaggcgaaacagaagaagagtatgaatggtgcttaga

SEQ ID NO: 261253 - DNA, 548 bp, Unknown
  Bacterial polypeptide expressing nucleotide sequence isolated from the Sargasso Sea
tggtattagaagaggaactgatgttatgatggctggtaaagtggctgtagtagctggatatggagatgttggaaaaggatctgcagcaagtttgagaggagcaggggcaagggtatgtgtaacagaaattgatcccattaatgctttgcaggcagctatggaaggatatgaagttgttacaatggatgatgccgcttcttatggtgatatttacgttactgctacaggaaatttagatgtaataactctagagcatatgagaaagatgcgtgacagaacgatagtttgtaatattggacactttgataatgaaattcaaactgaggcattacaaaattataaatcagatgagattaagcctcaagttagagaagtagaatttcctgatggaaaaaaaatattactattatctgaaggtcgtttagttaacttaggtaatgccacaggtcatccaagctttgtaatgagtgcttctttttctaatcaagtgattgctcaaatcgaactatgggaaaattataaaaattatgaaaataaagtatatgttt

SEQ ID NO: 261254 - DNA, 616 bp, Unknown
  Bacterial polypeptide expressing nucleotide sequence isolated from the Sargasso Sea
atgactgattacaaagtaaaggatatatctcaagccgaatttggtagaaaagaaatttcaattgcagaaagtgaaatgccagggttaatggcattaagagaagaatataaaggaaagaccccattaaagggagcaaaaattattggatgtcttcatatgacaattcagactgctgttttgattgaaacgttggtaaatttgggagcagaggtaaggtggtcatcttgtaatattttttcaactcaagatcatgctgcagctgcaattgctaaagcaggcattcctgtttatgcatggaaaggtgagacagaggaagaatatttatggtgtattaaacaaacaattgatggcaacaaagactggaaaccaaatatgcttttggatgatggtggagaccttactgcaataatgcataaagattataaaaatttactaaaagatgtgaagggagtttcagaggaaaccacaacgggaataaaagctttaaacaaaatggaaaaagaaaaatctcttttagttcctgctattaacgtaaatgactcagtcactaaatctaaatttgataatttatatggatgcagagaaagtttagttgatgggattagaagagccactg

SEQ ID NO: 261255 - DNA, 229 bp, Unknown
  Bacterial polypeptide expressing nucleotide sequence isolated from the Sargasso Sea
tatgagtgcatcatttacaaatcaagttatggcacagctagagttatggcaaaattacaaaaactatgaaaacaaagtatacgtattaccaaagcatttagatgaaaaagtagctttgttacatcttaaaaaagttggtgcaaagttaacaaccttatcagaaaaacaagctgaatacataggtgttaaaaaacaaggaccatttaaagatgactcatatagatattaa

SEQ ID NO: 261256 - DNA, 511 bp, Unknown
  Bacterial polypeptide expressing nucleotide sequence isolated from the Sargasso Sea
atgtcagaagattttaaggtaaaagatattaatctagcagactttggaagaaaagaaatttcaattgctgaaaccgagatgccaggattgatggcgctcagagaagaatttaataaaaaaaaaccacttaaaggggcaaaaattttaggttgtttacacatgacgatacaaacagctgttttgattgagactttaattgatttaggtgccgaagtgagatggtcttcctgtaatattttttcaacacaagatcacgccgccgctgctattgcaaaagcaaaaattccagtctttgcttggaagggtgaaaccgaggaagagtattggtggtgtataaagcagacaatagaggggaaaaaagactggaaaccaaacatgttgttagacgatggtggtgatttaaccgacctaatgcataaaaaatataaggacttgctaaagtcagtccgtggcttatcggaagaaacaacaactggtattaaggctttgaataaacttgagaaagaaaaaa

SEQ ID NO: 261257 - DNA, 475 bp, Unknown
  Bacterial polypeptide expressing nucleotide sequence isolated from the Sargasso Sea
tgggtataaggatattgtcaatcaaagttcatttatgatgatgaaggataaaactatagtatgtaatattgggcattttgataatgaaatagatatggattggcttgagtctaactttgggagccagaaaacaactattaaacctcaagttgattcttacagaataaacaaggataaagaaatcataatattagctgagggaaggctagtgaatttaggatgtgcgacaggccacccaagctttgtaatgagtaactcgtttacaaatcaagtacttgctcaaattgagttatggaataattcaaaaaactatgagaataaagtatatatgcttccaaagaacttagatgaaatggttgcaaaacttcatttagataaacttggtgtagaacttgaagatctttcagaagaccaagctaaatatattggtgttaaggtaaacggaccctacaaaccagaatattatagatactaa

SEQ ID NO: 261258 - DNA, 412 bp, Unknown
  Bacterial polypeptide expressing nucleotide sequence isolated from the Sargasso Sea
gcatactttgcatattggacactttgataatgaaattcaagttgaagcattaaaaaattataaatgggatgaaattaagccacaagttcacgaaataactttaccaagtaaaaaaagaataatattacttgctgaaggaagactggttaacttaggttgtgcaacaggacatccaagttttgtaatgagcgcttcgtttacaaaccaggtaactgctcagatagaattatggaataattcagataagtatgaaaaaaaagtttacgttttgccaaaacatcttgatgaaaaagtagcaagattgcacttagaaaaagtaggagccaaactaacaaaaatgtctaaagaccaggcggactatattagtgtaacgcccgatggaccttacaaaccagatgcctatcgctactaa

SEQ ID NO: 261259 - DNA, 814 bp, Unknown
  Bacterial polypeptide expressing nucleotide sequence isolated from the Sargasso Sea
acagattataaagtaaaagatattaacgaagcagaattcggaagaaaagaaatttcattagcagagactgaaatgccaggtctaatggcattaagaaaagaatataaaggtaaacaccccctaaaaggtgcaagaattttaggttgtttacatatgacaatccaaacagcagttctaattgagacattagtagatttaggtgcagaagtaagatggtcttcatgtaatattttttctactcaagatcatgcagctgctgcaattgcaaaagctggtatacccgtatttgcttggaagggagaaaccgaagaagaatattggtggtgcgtaagacaaaccattgaaggtaaaaaagactggaagccaaatatgattttagatgacggtggagatcttacagcgcttatgcataaagattataaagatttattaagggatattaaaggcttgagtgaagaaactactacaggagttttagctctaaaaaaaatggaggaacaaggaacacttcttgtgccagctatcaatgtaaatgactctgtcacaaaatcaaaatttgataatttatacggatgtagggagagtttagttgatggaattaagagagctacagacgttatgatgtcgggtaaagttgctatagttgctggatttggagatgttggtaaaggaagtgctgcttcattaagacaaagtggtgcaagagtaatggtaactgaaactgatccgatatgtgcattgcaagcagcaatggagggttatgaagttgttttaatggatgaaatgataggacaagctgatatcgttgtaacag

SEQ ID NO: 261260 - DNA, 663 bp, Unknown
  Bacterial polypeptide expressing nucleotide sequence isolated from the Sargasso Sea
atcctatctgcgcgatgcaagcttgtatggatggtttttcagttgtttcttgctataaagatggggtgtttacaagagacgctaatgacataaatatggctgttatgggtgatactgatttagtagtaacaacaactggtaatgtgaatgtttgcgattctgcaatgattagtactcttaaaaatactgccgtggtatgtaatattggccattttgataatgaaatagatacagccttcatgagagaaaattactattgggacgaaattaagccacaagttcatagagtatttagagatactgctccagatggaactcctgatctttcgagcaaaaactacataatcttacttgctgaaggaaggctagttaatttaggaaatgcaacagggcatcctagtagaattatggatggctcttttgctaatcaggtcctggcacaaatacatttatacaaacaaggctttgctaatgtaaatgatgcagataaaagagcggaaatgataactgttgaagtgcttccaaaaaaattagatgaagaggttgcaagtttaatggttgaaggctttggtgggactgtaacaaagcttactcaggatcaagcagactatattaatgtccctcaagatgggcccttcaaagaagaaagttataaatattaaa

SEQ ID NO: 261261 - DNA, 930 bp, Unknown
  Bacterial polypeptide expressing nucleotide sequence isolated from the Sargasso Sea
taaagattttgtaataaaggatatctcactcgctgattttggcgacaaagaaatagagctggcaaaaaacgagatgccgggtttagtagctttagctgatgagtataaaaatcaaaaaccgttgtctggagctagaattgttggatgtctacatatgacaatacaaacagctgtattgatagaaactcttgttgaattaggtgcaaaagttcgttgggcttcttgcaatatattttcaacgcaagatcatgccgcggcagctattgcaaagaaaaagattcctgtatttgcatacaagaatgaaagcctcgaagaatattgggaatttgtcgatagaatatttcaatgggaagatggtgatcctaacatgatattagatgatggtggggatgctacgatttatatcattctcggtgcaaagtatgaaaaaaataagagcgtcattgataaaccccagaacgaggaggaggaagtactattcaaacagataaaaaaaagatctgatttaagcccaaactggttttcaaaaataaaagatcaaattattggagtaaccgaagaaacgaccacaggtgtaaatcgactgaaaatgatggagaatgataacacactaccgtttgcagcaataaacgttaataattctgttacaaaatcaaagtttgataatctttatggttgccgtgaaagcttgatagacggaattagaagagcaacagatgtgatgattgctggcaaacttgcagtcgttgccggatatggagatgttggcaagggttgtgcttcttcacttaaagccgccggggccagagttgtcgtaaccgaaatagacccaatatgcgctctgcaagcagcattggaaggtttcgaagtgagaactattgacgaggtatcaaaaattgctgacatctttgtgaccgcaacaggcaacaa

SEQ ID NO: 261262 - DNA, 439 bp, Unknown
  Bacterial polypeptide expressing nucleotide sequence isolated from the Sargasso Sea
aatcttgtcaagatgaaagatgaggccatagtctgtaatattggccattttgataatgaaattgatgtagcttcattgaaagattatccatgggaaaatattaagccgcaggttgatcacataactttaccgagtggcaataaaataatccttttagctgaaggtagattagttaacttaggttgtgctactggacatccaagttttgttatgagtaattcttttacaaatcaagtgctagctcaaattgaacttttcaataagtcagaacaatatgctcgagaggtttatgttttaccaaaacatttagatgaaatggtagctagattacatttagataaaattggtgcaaaattaacaaaattaactaaagaacaggctgactatattaatgtctctattgagggaccttataaaccagaactttatagatactaaa

SEQ ID NO: 261263 - DNA, 955 bp, Unknown
  Bacterial polypeptide expressing nucleotide sequence isolated from the Sargasso Sea
aataaacaaggaagagatagagtggaatgggcttataaagatatgccagttcttcaagaaataaatggttctatgtccaaaaggaagccattaaaaggtatgaatatctctgcatgtcttcacataacaactgaaacagcaaatcttcttattactttaaaaaatgcaggtgctaaagtttcatgctgtgcatcaaatcctttaagtacacaagatgatgttgctgctcacttatcaaaggattatggaatagaaacctttgcaatcaaagggattaataataaaggatattataagcacattattgactcattaaaaattggcccaaatttaactatggatgatggttgcgatctagttacagttgttcacaaatcacataaaaagtatcttcctaatattattggtggaacagaggaaaccactacgggtgtcataagattgaaaagtatgtcagataataatgttttgaaatatccaatcatagctgttaataacgctttcactaaacatttattcgataatagatatggaacaggccagagtgttatggatagtattatgagggcaacaaataggttagtttctgggaaaaactttgttgtatgcggatacggatggtgcggtaaagggcttgctatgagagctcacggacttggtgctaatgtaattgtaacagagattgatccaaccaaagctttagaggctaaaatggatggatttagagtaatgtcaggaaatgaagcttttatgattgcagactttatttgctctgtaaccggcaatttaaatgttatcgataaacatcattttaaaaatatgaaagatggcgtaatcgtttcaaatgctggtcattttaatgttgagataaatattgattcacttaagaaaatgtctactaaaagaaaaaaaattagaaatgacattgaagaatatagtatagggaaaaaagaag

SEQ ID NO: 261264 - DNA, 895 bp, Unknown
  Bacterial polypeptide expressing nucleotide sequence isolated from the Sargasso Sea
atgcataaagattacaaagatttattaaaaggtgtaaaaggtttaagtgaagaaacaacaacaggtgtcttggcacttaaaaaaatggaagaacaaggtcaattgttagtcccagcaattaatgtaaacgactcagtcacaaaatcaaaatttgataacttatatggatgtagggaaagtctagttgatggaattaaaagagctactgatgtaatgatgtcaggaaaagtggcaatcgttgcaggttttggtgatgttggaaaaggtagtgctgcatccttaagacaaagtggagcaagggttttagtaactgaaactgatccaatttgtgcattgcaagccgctatggaaggttacgaagtggttttaatggatgaaatgataggtcaagcagatattgttgtaactgcaactggaaataaagatgtagtaacagcagatcatatgagagctatgaaagatagatctattctatgtaatatcggtcactttgataatgaaatacaagtggaggctctgaaaaactataaatgggatgaagtaaaaccccaagttcatgaaataacattcccagatgacaaaagattaattttgttagctgaaggaagacttgtaaatttaggttgtggaactggtcacccaagttttgttatgagtgcatcatttactaaccaggtaattgctcaaattgagctttggaataattcagataactatgaaaataaagtttatgtgcttcctaaacacttagatgaaaaggttgcaagacttcacttagataaagttggtgcaaaattaacaccattatctaaagaccaagctgattatataagtgtaacactcagagggaccatacaagccacatgcttaccgctactagaagtggcaaaataaa

SEQ ID NO: 261265 - DNA, 526 bp, Unknown
  Bacterial polypeptide expressing nucleotide sequence isolated from the Sargasso Sea
ttacgaagttgttcttatggatgaagcaattaaagatgccgacatagtagtcacagcaactggaaataaagatatagttacagctgatcatatgagagaaatgaaagatagagccatattgtgtaatattggtcatttcgacaatgagattcaagtcgaagctttgaaaaactataaatgggacgaggttaagcctcaagttcatgaaatagaattaccaagtaaaaaaagaataatattattggcagagggaagactggttaatcttggatgtgcaacaggccacccaagctttgtaatgagcgcatcattcactaatcaagtaattgcacaaattgaactttggaataattctgataaatacgaaagaaaagtttatgttttaccaaaacatctagacgaaaaggttgcaatgcttcatttagataaggttggagcaaaattaacaaaaatgtcaaaagatcaagcagattacattagcgttaaaccatcgggaccatttaaaccagatacttatcgctactaa

SEQ ID NO: 261266 - DNA, 780 bp, Unknown
  Bacterial polypeptide expressing nucleotide sequence isolated from the Sargasso Sea
tatgtcagaagatttcaaagtaaaagatatcaaactagcagattttggtcgtaaagagatatcaatagctgagagtgaaatgcctggtttaatggcattaagaaaagagtatgataaaaagaaacctttaaaaggcgctaaaatacttggatgtctgcatatgacaattcagacagcagttttaatagagacactagtggatttaggcgctgaagtcagatggtcgtcctgtaatatattctcgactcaagatcacgcagcagcagctatagctaaagcgggaattccagtatttgcttggaaaggtgaaacggaggaagattattggtggtgtgttaagcaaactattgaaggtaaaaaaaattggaaaccaaatatgattttagatgatggaggagatcttacaggtttgatgcataaagaatataaggatcttttgaaaaacgtaaaaggagtttctgaagagactacaacaggagttttggcattaaaaaaaatggagtcgaataaacaattattaattccagcttttaatgttaacgactcagttacaaaatcgaaatttgataatctttatggttgcagggaaagtttagttgatgggattaaaagagcaacagatgtcatgatgtcaggtaaagtagccatagtagcgggctttggtgacgttggaaaaggaagtgcagcttcacttcgtcaagcaggagctagagtactagtaacagaaacagatcccatatgcgctctacaggcagcgatggagggttatgaggttgtatt

SEQ ID NO: 261267 - DNA, 869 bp, Unknown
  Bacterial polypeptide expressing nucleotide sequence isolated from the Sargasso Sea
gcttaaaggagcaaaaattgtaggctgtctacatatgacaatacagactgcagttttaatagaaactttagttgagttaggtgctgaagttagatggtcatcttgcaatatattttcaacacaagatcatgctgccgcagcaattgcaaaagcaggaattccagtttttgcctggaaaggtgaaactgaagaagaatattggtggtgtgtaaaacaaacaattgaaggtaataaaaattggaaacctaatatgattcttgatgatggtggtgatcttactgcactaatgcataaagattataaagatttattaaaagacatcaaaggtctttctgaagagactacaacaggagtattagctcttaaaaaaatggagagtgaaggtaaattactggtaccagcgattaatgtgaacgactctgtcactaaatctaaatttgataatttatatggttgtagagaaagcttagttgatggaattaaaagagcaacagatgttatgatgtctggtaaagttgcaatagttgcaggttttggagatgtaggcaaaggtagtgctgcttctttaagacaatcaggtgccagagtaatgataacggaaaccgatcctatatgtgccttacaggcagcaatggaaggttatgaagtagtcactatggacgatatgataggacaagcagatattgttgtaactgcaactggaaataaagatattgtaactgcagatcatatgagagaaatgaaagatagagcaattttatgtaatattgggcatttcgataatgaaatacaagtagaagctttaagaaattataaatgggatgaaattaaaccccaagtacatgagataactttgcctagtgaaaaaa

SEQ ID NO: 261268 - DNA, 664 bp, Unknown
  Bacterial polypeptide expressing nucleotide sequence isolated from the Sargasso Sea
gatgtctggaaaaattgctattgttgctggttttggagacgttggaaaaggaagtgccgcatctttaagacaaagtggagctagagttttggttacagaagcagatccaatttgtgctcttcaagctgcaatggaaggttatgaggtggtattgatggaggaagctataagtagggccgatatagttgtaacagcaacggggaataaagacattgttacagcagatcatatgagggatatgaaagatagagccatcctatgtaatattggccacttcgataatgaaatacaagttgaagcacttaaaaattataagtggactgaagtaaaacctcaagtgcacgaaatagaactgcctagtggtaaaagaattattcttttagctgaaggaagattagttaatcttggttgcgcaactggacatccaagttttgttatgagtgcatcatttactaatcaagttattgctcaaatagaactttggcataatcataaaaattatgaaaataaagtttatgtacttccaaaacatttagatgaaaaagtagcaactttacatttaaaaaaagttggggcaaaactaacaaaactatcaaaagagcaagctgattatataagcgttggaacagaaggtcctttcaaaccagatgcatatcgctattaa

SEQ ID NO: 261269 - DNA, 739 bp, Unknown
  Bacterial polypeptide expressing nucleotide sequence isolated from the Sargasso Sea
atgacacaagattataaagtaaaagatatttcccaggcaaagtttggtagaaaagaaatttctctagcagagacagaaatgccaggacttatggctttgagaaaagaatataaaggtaaaaaacctttaaagggtgcaaaaatcctaggttgtcttcatatgacaattcaaactgcagttttaattgaaactctagtagagttaggagcagaggtaagatggtcatcttgcaacatattctctacacaagatcacgcagcagcagcaatagctaaggcaggtattcctgtatttgcttggaaaggggagaccgaagaagagtactggtggtgtgttaaacaaactattgagggaaaaaaagattggaaaccaaatttgattttagatgatggtggcgatcttacagctttaatgcataaagaatataaaaatttattaaaagatattaagggagtttcagaagaaactacaacaggagttttagcacttaaaaaaatggagtctaataatgaattattaattcctgctataaatgtaaatgactcagttacaaaatctaaatttgacaacctctatggttgtagagaaagtttagtagacggtataaaaagagcaacagatataatgatgtcaggtaaagttgctattgtagctggattcggtgatgttggcaaaggaagcgcagcttcattacgtcaaaacaggtgcaagagtaatggtaaccgagacagaccctaat

SEQ ID NO: 261270 - DNA, 382 bp, Unknown
  Bacterial polypeptide expressing nucleotide sequence isolated from the Sargasso Sea
aaaattcaagtagaagctcttaaaaattataaatgggatgaaataaaacctcaagttcatgaaatagaacttccaagtaaaaaaagaataattttacttgcagaaggaaggcttgtaaatttaggatgtgctactgggcacccaagttttgttatgagtgcttcctttacaaatcaagtaattgctcaaattgaattatggaataattcagacaagtatgaaaataaagtttacgtattaccgaaacatttagatgaaaaggtagcaatgctgcatcttgaaaaagtaggtgctaaattaacaaaaatgtcaaaagatcaagcagattatattagcgttaaacaatcagggccatttaaaccagatacttatcgctactaaa

SEQ ID NO: 261271 - DNA, 739 bp, Unknown
  Bacterial polypeptide expressing nucleotide sequence isolated from the Sargasso Sea
tatgagtaatgatttcaaagtagctgatatcgaacttgctgattttggaagaagagaaatttctcttgcggaaaatgaaatgcccgcactaatggcgttaagggaaaagtataaaactgagcaacctcttgctggtgcaaagattatgggctgtattcatatgactatccaaaccgcagtattaatggaaacattggttgatcttggagctgagcttcgatggtcagggtgtaatattttttcaactcaagatcatgctgctgccgctatggctaaggctggtattccagtttttgcatggaaaggacaaactgacgaagaatttgattggtgtattgagcaaacaatcctaaaagatgggaagccgtgggatgcgaatatgatcttagatgatggaggagatcttactcacatggttcatacaagatttgcagaaatgcttgaaacaatccatggaatatcagaggaaactactacaggagttcatagactcaaagcaatgcttgaaaaaggtgagcttaaggttccagcgattaatgtaaatgactctgtcacaaaggcaaaaaatgataataagtatggttgtagacatagtcttaatgacggaataaaacgaggaactgatatgctcctttcaggtaaaaaagcacttgtcattggttatggtgacgttggaaaagggtcggcagcaagtcttgctcaagaaggaatggtagttcgagttactgagtctgatcca

SEQ ID NO: 261272 - DNA, 472 bp, Unknown
  Bacterial polypeptide expressing nucleotide sequence isolated from the Sargasso Sea
atgaccgctgattacaaagtaaaagatatatctttaagtgaatggggaagaaaagagattgcaatagcagaaactgaaatgccaggattaatggcaataagggaagaatatggcaatagcaaacctcttgaaggagctagaatagttggctgtctccacatgactattcaaactgcggttttaatcgagactttagtacatttaggagcttccgttaggtggagctcttgcaatatcttttcaactcaagatcaggcagcagcagcaatagcagctgaaggtatacctgtgtttgcttggaagggtatgaatgatgatgaattttggtggtgcatagaacaaactctatcaggtcctaaaggttggcaaccaaatatgatattagatgatggtggagatgcaactggtattatccatgaaaaatttccagaaatgataaatgatataaaaggactttcagaagaaacaacca

SEQ ID NO: 261273 - DNA, 793 bp, Unknown
  Bacterial polypeptide expressing nucleotide sequence isolated from the Sargasso Sea
tatgacagattataaagtaaaagatatcaatgaagcagaatttggaagaaaagaaatttcattagcagaaacggaaatgccaggtttaatggcattaagaaaagaatataaaggaaaacatcctttaaaaggtgcgagaattttaggttgtctacacatgacaattcaaacagctgttttaattgaaactttagttgatcttggcgctgaggttagatggtcttcatgtaacattttctccacccaagaccatgcagctgctgccattgcaaaagctggaattccagtatttgcctggaaaggtgaaacagaagaagaatattggtggtgtgtaagacaaacgatagagggtaaaaaagattggaaaccaaacatgattctagatgatggtggagatcttactgcgcttatgcacaaagattataaagatttgatgaaagatgttaaaggattaagtgaagaaactactacaggagtattggctcttaaaaaaatggaggaacaaggaacacttttagttcctgccataaatgttaatgactcagttactaaatcaaaatttgataacttatatggatgcagagagagcttggtcgatggaataaaaagggctacagatgtaatgatgtcaggaaaagttgcaatcgttgcaggatttggcgatgtaggaaaaggcagcgctgcgtctttaagacagagcggtgcaagagtaatggtaaccgaaacggatccaatttgtgccctacaggccgcaatggagggttatgaggtagtattaatggatgagatgata

SEQ ID NO: 261274 - DNA, 991 bp, Unknown
  Bacterial polypeptide expressing nucleotide sequence isolated from the Sargasso Sea
tctcgatgatggtagcgatttgaccgccatggtacatgaaaaatttcctgacatgttagaaacaattcatggtgtttcagaagaaactactacaggagttcataggctaaaagagatgctagagaaaggcgagcttaaaatacctgcaattaatgtaaatgactctgttacaaaagctaaaaacgataataaatacggttgtaggcatagtcttaatgatgctctaaaaagaggaaccgatatgttgctatctggcaaaaaaggtcttgttattggttatggtgatgttggaaaaggatcggctgccagtttggctcaagaaggaatgatagtgagagtggtcgaatcagatccgatatgtgccatgcaagcatgcatggatggcttttcagtagtttcttgttacaaagatggagttgttactagagatcccaaagatattaatatggaaattatgggggatactgacctaatagttacaacgactggcaatgttaatgtatgcgattcagcgatgttaagcactttaaaaaatactgcggtagtatgtaatattgggcattttgataatgaaattgatactgcttttatgagagaaaactattattgggatgaaattaaacctcaagtacatagggtttttagagatactcctcctgatgggacaccggatctatcaagtaaaaactacatcatattgcttgcagagggaagattggtaaatcttggaaatgctacaggtcacccaagcaggattatggatggatcatttgcaaaccaagttttagcacaaattcatttatataaacaaggcttcgccaatgtgaatgatgcagacaaaaaagctgaaatgttaactgttgaggttctgccaaaaaaattagatgaagaggtagctagtcttatggttcagggttttggtgggactgtgactcaacttactaaagaacaagcagactatattaatgttccacaagatgggtcattttag

SEQ ID NO: 261275 - DNA, 769 bp, Unknown
  Bacterial polypeptide expressing nucleotide sequence isolated from the Sargasso Sea
atgacagattataaagtaaaagatattaacgaagcagaatttggaagaaaagaaatctctctagcagagactgaaatgccaggattaatggcagtaagagccgaatataaaggcaaaaatcctcttaaaggagcaagaattttaggttgtcttcatatgacaattcaaacagcagttttgattgaaactttagttgatttaggtgcagaatgtagatggtcttcatgcaatatattttcaacacaagatcatgcagcagcagcaattgcaaaagctggtatccctgtatttgcttggaagggtgaaaccgaagaagaatactggtggtgtgttaaacagactattgagggtaaaaaagattggatccctaacatgattttagacgatggtggagatcttactgctctaatgcataaagattataaagatttattaaaaggcataaaaggtttaagtgaagaaacaacaacaggagttctagcacttaaaaaaatggaagaacaaggacaattattagtgcccgcaattaatgtaaacgactctgttacaaaatcaaaatttgataacttatatggatgtagggaaagtctagttgatggaattaaaagagctactgatgtaatgatgtcaggaaaagttgcaatcgttgcagggtttggtgatgttggaaaaggtagcgcagcatctttaagacaaagtggagcaagagttttagtaactgaaactgatcctatttgtgcattgcaagctgctatggaaggttacgaag

SEQ ID NO: 261276 - DNA, 637 bp, Unknown
  Bacterial polypeptide expressing nucleotide sequence isolated from the Sargasso Sea
atgagtaagcaagattacaaagtaaaagatatttctcttgcagaatatggaaggcaagaaattttattagctcaagatgaaatgcctgctttaatgcaattaagagataattacagagacaaacaacctcttaagggcgcaaaaataatgggctgtatacatatgactgttcaaactgctgtcttaattgagactttaattgaattaggtgctgaggttagatggtcttcatgtaacattttttcgactcaagaccatgcagctgctgcaattgctgatcaaggcattcctgtttttgcttggaaaggcgaaacagaagaagagtatgaatggtgcttagatcagaccatcaataaagatggcaaaccttggggcgctaatatgattttggatgatggaggtgacctcagtcttaaagttcataaagaataccctgaaatgctttcaaaaatacatggaatttctgaagaaacaacgactggggttaagcgacttaaagaaatgctagaaagtggtgaattgaaagttccagcaataaatgtaaatgactccattactaaatcgaagaatgataataaatatggatgtaggcatggtctggacgatgctatcaaaccgaggaacagacaatgctctt

SEQ ID NO: 261277 - DNA, 322 bp, Unknown
  Bacterial polypeptide expressing nucleotide sequence isolated from the Sargasso Sea
tatgagtgaagatttcaaggtaaaagacattagtctagcagattttggtaataaggaaatagcaatagctgaaacagaaatgccagggttaatggcattgcgtgatgaatataaagacacaaaaccattaatgggagctagaattgttggatgcttgcatatgacaattcaaacagcagttcttattgaaacattagtctatcttggagcaacagttaggtggagttcgtgtaatattttttctactcaggatcatgctgcatcagcaatcgctgctaaaggtataccagtttttgcatggaaaggaatgactgaggaagag

SEQ ID NO: 261278 - DNA, 664 bp, Unknown
  Bacterial polypeptide expressing nucleotide sequence isolated from the Sargasso Sea
gatggccggtaaggttgcggttgtcgccggattcggcgatgtcggcaagggatccgctgaaagcctccgcagtgccgggtgccgggtgctcgttactgaagccgaccctatttgcgcccttcaggcggccatggaaggtttcgaagtggtgaccatgaatgacgccgcaccaagggccgatatcttcgtcaccgcgaccggcaatattgacgtcatcaccctcgaccatatgcgtgagatgaaggaccgagcaatcgtctgtaacatcggccacttcgactcagaaattcaggttgaagccctgcgcaattacaagtgggataacgtcaaaccgcaggtcgacgaaattgagtttccgggcggaaagcggctgattctgttagcggagggccgcctcgtgaatctcggctgcgcgaccggccaccccagctttgtgatgagcgcttctttcgccaaccaggtcttggcgcagatcgagctatggcagaacgccagcgattacgaccgcaaggtctacgtcctgcccaagcatttggacgagaaggtcgctgccttgcacctcgccaaactcggagcaaaactgacggaactctcggctgaacaggcggcttatatagggatagggcaagacggtccgttcaagacggaacagtaccgctactga

SEQ ID NO: 261279 - DNA, 816 bp, Unknown
  Bacterial polypeptide expressing nucleotide sequence isolated from the Sargasso Sea
aaagaatatcctcaattgatgaaaaatattaaaggtgtttcagaggagacaacaactggaattaaagctttgaataagatggagcaagaagggaaattattagtgcctgcaataaatgtaaatgattcagttactaaatcaaaatttgacaatttatatggttgcagagaaagtttaacagatgggattaaaagagctaccgatgtaatgttatcaggaaaagttgcaattgttgcaggattcggagatgttgggaaaggcagtgcagcttctcttagacaaaatggcgcaagagttctagtcactgaagcagatccaatctgcgcacttcaggctgcgatggagggctatgaggtagtactcatggaggatgcaatcaaagatgctgatttagttgtaacagcaacaggaaacaaagacgtggtaacagctgaccatatgagaatgatgaaagatagagctatcttatgtaatattggccatttcgataatgagattcaagtcgaagctcttaaaaattataaatggaatgaaattaaaccccaggttcatgaaatcgaattaccaagcaaaaaaagaataattcttttggcggagggaagattagttaatttaggttgtgctacagggcatccaagttttgtgatgagcgcttcgtttacaaatcaagtaattgctcaaatagaattatttcataattcaaaaaaatatgaaaataaagtttatgtattaccaaaacatttagatgaaaaagttgcaactttacatttagaaaaagttggggctaaacttacaaaattatccaaggagcaagca

SEQ ID NO: 261280 - DNA, 457 bp, Unknown
  Bacterial polypeptide expressing nucleotide sequence isolated from the Sargasso Sea
ggaaaaggttctgctcaatcaatgaaatcatatggttgtaaggttattgtaactgaaattgatccaatatgcgctcttcaagcagcaatggaaggatttgaagttagaagattagaagatgttttaaatagagggaatatttttgttacaaccacaggaaataaagatattataactttaaaacatatgaaaaaaatgaaagatcaagccattgtttgcaatattggacactttgacaacgagattcaggtagatgcactaaataagtcaagcgcgaaaaaagatcaaataaaaccacaacttgatagatatacttttaagaatggtaagcaaatattcttattagctgaaggacgattagtaaatttaggatgcgcaacaggccatgcaagctttgtaatgtcaacttcattttcaaatcaagttttagctacaggtatttttagcaaaaaataaa

SEQ ID NO: 261281 - DNA, 791 bp, Unknown
  Bacterial polypeptide expressing nucleotide sequence isolated from the Sargasso Sea
catgggggcagaacccagtgaaatgcggaaatacatggaaatggcgctcgatttaaaaccacatctggtgatcgatgatggaggagatctggtggaaatcctccatgaaacgcgaaccgacctgttggaagggatgttaggtgcctgcgaagagacgaccaccggtgtgctgcgagcgcaggcaagggcgaaggctgatcagcttcaatttccggtgatgctcgtcaatgaagcccgctgcaaatatctctttgataacgtccacggcaccggacagtccgtctgggatgcggtgatgcgcagtaccaatcttgttcttgccgggaaaacggtggtggtggcaggctacggatggtgcggaagaggttgtgcgttgagggcacaggggatgggtgcatcggtgattgtctgtgaagtggacccggtcaaggcttgtgacgcattgatgaacggatgccgtgtgatgcccttgatggaagcctgtaaagaggcagatgtggttttaagtgtcaccggggtacgccacaccataagaaaggagcattttaaggtgattaaggacaatgctcttttggccaacgcaggacacttttgggaggaaatcgacgtagaggggctgtccgggatgtcaaaggacagaaagcagatgagaacgaacgtggaaggatttcttttgcaggatggacgttggctgaatttattgggaaatggaaatatcgtcaatattgcctgtgccgacggacatccggcggaaatcatggataccagtttcgcactccaggcattgtccg

SEQ ID NO: 261282 - DNA, 364 bp, Unknown
  Bacterial polypeptide expressing nucleotide sequence isolated from the Sargasso Sea
ttaaaaaattataaatgggatgaaattaagccacaagttcatgaaataactttgcctagtaaaaaaagaataatactgcttgctgaaggaagattagttaatttaggttgtgctactggacatccaagttttgtaatgagcgcttcatttactaatcaggtaactgctcagatagaactatggaataattcagataagtacgaaaagaaagtttacgttttaccaaaacacttggatgaaaaagttgctagattacacttagaaaaagttggcgcgaaacttacaaaaatgtctaaagaccaggcagactatatcagtgtaacacctgatggaccttacaaaccagatgcctatcgctactaaa

SEQ ID NO: 261283 - DNA, 664 bp, Unknown
  Bacterial polypeptide expressing nucleotide sequence isolated from the Sargasso Sea
gatgtcaggaaaagttgctatcgttgcaggatttggtgatgtaggaaaaggaagtgcagcgtcattaagacaaagtggtgcaagagtgatggtcacagagacagatcctatttgtgcacttcaggctgcaatggaaggttatgaagttgtattaatggatgagatgattggtcaagcagatattgttgtaacagcaactggaaataaagatattgttacagcagatcatatgagagcaatgaaagatagatctatcctctgtaatattggacattttgataatgagatacaagttgatgcattaaaaaattataaatgggatgaaataaaacctcaagttcatgaaatcactttccctgataataaaagactaattttgttagcagaaggaagacttgtaaatttagggtgtgcgactgggcatccaagctttgttatgagtgcctcatttacaaaccaagttacggctcaaatagaattatggaacaattctgataattacgagaacaaagtatacgtacttcctaaacatttagatgagaaagttgcaagattacatttagaaaaagttggagcaaaattaactcctttatctaaagatcaagctgattatatcagtgttaaaactgaaggaccatataagccagatgcttaccgctactaa

SEQ ID NO: 261284 - DNA, 384 bp, Unknown
  Bacterial polypeptide expressing nucleotide sequence isolated from the Sargasso Sea
aatgaaaactcaagattataaaatcgccgacatcacgcttgctgactgggggcgaaaagaaatcgccatcgctgaaactgaaatgcctggattaatggccctgcgtaaagagtttgctggcaaagcaccactccaaggagcgcgcattactggctgcttgcatatgaccattcaaaccgctgtgcttatcgaaacactcaccgcactaggggctgaggttcgctggtcttcttgcaatatttactcaactcaagaccatgctgctgcggctatcgccagcacaggcgtgccggtatttgcgtggaaaggggaaaccgaagccgagtacgaggaatgtatcatcaacaccattactggcccagatggctggcggcctaacctttt

SEQ ID NO: 261285 - DNA, 946 bp, Unknown
  Bacterial polypeptide expressing nucleotide sequence isolated from the Sargasso Sea
aaagatatcaccgaagcagaattttggaagaaaagaaatttcattagcagaaacagaaatgccaggtttaatggcattaagaaaagaatataaaggaaaacatcctttaaaaggtgcaagaattttaggttgtctacacatgacaatccaaacagcagttttaatcgaaactttagttgatttaggagctgaagtaagatggtcttcatgtaacattttttccactcaagatcatgccgccgccgcaatcgcaaaagctggcatcccagtatttgcatggaagggtgaaactgaggaggagtattggtggtgtgtaagacaaactatcgaaggtaaaaaagattggaagccaaatatgattttggatgatggtggagatcttactgcacttatgcataaagattacaaagatttaatgaaagatataaaaggattgagtgaagaaacaactacaggggtattagctcttaaaaagatggaagaacaaggaacacttttggtccctgcaataaatgtaaacgactcagttacaaaatcaaaatttgataatctatatgggtgtagagaaagtttagttgacggaataaaaagagctactgatgtaatgatgtctggtaaagttgctattgttgcaggatttggtgatgtaggaaaaggaagtgcagcgtcattaagacaaagcggtgcaagagtaatggtaacagaaacagatcctatttgtgcacttcaggctgcaatggagggttatgaagttgtattaatggatgagatgattagccaagctgacattgttgttacagcaacaggtaacaaagatattgttactgcagatcatatgagagcaatgaaagatagatcaatcctttgcaatattggacactttgataacgagatacaagtagatgcattaaaaaattataaatgggatgaaataaaaccaacaagt

SEQ ID NO: 261286 - DNA, 583 bp, Unknown
  Bacterial polypeptide expressing nucleotide sequence isolated from the Sargasso Sea
tatgagtaaggttgttgaaaaaattggaccagactataaggttgcagatatttcgctttcagcgtggggtaataaagaaataaaaatcgcagaaacagaaatgcctggtcttatggctttaagagagaaatatgcaaaagagcaaccacttaaaggagcaaggattgttggttgccttcatatgacaattcaaacagcagttctaattgagacgctagttgcgctcggggcaagcgttagatggtcttcttgtaacatttattccactcaagatcatgcagcagcagctattgctgaaaaaggtatacctgtttttgcttggaaaggtgagactgaggaggaatatttgtggtgtattgatcaaactattataggcgacccaagctggaaacctaatatgatattagatgacggcggtgatttaacatcaataatacacaagaaatatcctgaaatgcttagccatattagtggtttatccgaggagactactaccggtgttcatagattatatgaaatggttgaaaaaaatgaattaaaagtaccagcatttaatgttaatgattccgtaacaaaaatcaaa

SEQ ID NO: 261287 - DNA, 820 bp, Unknown
  Bacterial polypeptide expressing nucleotide sequence isolated from the Sargasso Sea
agatggtcttcatgtaatatattttcaactcaagaccatgctgcagctgcaattgctaaagcaggtataccagtgtttgcttggaagggcgagaccgaggaagaatattggtggtgcgttaagcaaactattgaaggaaaaaaagactggattcctaatatgattttagatgatggaggggatcttactgcactgatgcataaagattataaagaattattaaaaaatgttaaaggtttaagtgaagagacaacaacaggtgttttagcacttaaaaaaatggaagagcaaggaacccttttagtaccagcaattaacgtaaacgattcagttacaaaatcaaaatttgataacttatacggatgtagagaaagtttagttgatggaataaaaagagccactgatgtaatgatgtcaggaaaagttgcaattgttgcaggttttggcgatgttggaaaaggtagtgccgcttctttaagacaaagtggtgcaagagttttagtaacagaaacagacccgatttgtgcacttcaagctgcaatggaaggttatgaagttgttttaatggacgaaatgataggtcaggcagatatagttgtaactgcaactggaaataaagatgtagtaacagctgatcatatgagggctatgaaagatagatcaattttatgtaatattggacactttgataatgaaattcaggttgatgctctaaaaaattataaatgggatgaagtaaaacctcaagtccacgaaataacatttccagatgaaaaaagattaatattgttagcagagggaagacttgtaaatttaggtt

SEQ ID NO: 261288 - DNA, 654 bp, Unknown
  Bacterial polypeptide expressing nucleotide sequence isolated from the Sargasso Sea
aagtggcaattgttgcaggatttggtgacgtaggcaaaggcagtgcagcatcattgaggcaatctggagcaagagttatgattaccgaaactgatccaatatgtgccttgcaggcagcgatggaaggttatgaagtagtcttaatggatgaaatgattaaagaggctgacatagtggtaactgcgactggcaataaagatattataacagcagatcatatgagagatatgaaggatagagcgatactatgtaatattggacactttgataatgaaatccaagttgaggcattaaaaaattataagtgggatgaaattaaaccacaagtgcacgaaatagaattaccaagcaaaaaaagaattattcttttagcagaaggtagacttgtaaatcttggatgtgcaacaggtcacccaagttttgtaatgagcgcatcttttacaaatcaagtcactgctcaaatagaactttggaataattcttctaaatatgaaaaaaaggtttatgttttaccgaaacatcttgacgaaaaagtagctatgttacacttagagaaagtaggagcaaagttaacaaaactatcaaaagaacaggctgactacattagcgtaaaacaagaaggaccatataagccagatgcttaccgctactaat

SEQ ID NO: 261289 - DNA, 691 bp, Unknown
  Bacterial polypeptide expressing nucleotide sequence isolated from the Sargasso Sea
aggttctgccgcttctctgcgtcaggaaggcatgatcgttaaagtaactgagatcgatcctatttgtgctatgcaggcgtgcatggacggctttgaagtcgtttctccgtacatcaacggtgaaaacaacggtacgctggaatgcgtcgacgcggacctgctgggcaaaaccgacctgatcgtaacgaccacgggtaacgtgaacgtgtgcgacaaaaacatgcttcagaagctgaagagcggcgccgttgtctgtaacatcggccacttcgataacgagatcgacaccgcgtacatgcgcgagaactggaagtgggacgaagtgaagccacaggtacacaaggtttaccgtgatgaagccgcggatgaccacctgatcctgctgtctgaaggccgcctggtaaacctgggtaatgcaaccggccacccttcacgtatcatggatggctcattcgccaaccaggtactggcgcagatctatctgtacgagcgcaagttcgccgacatgatggaagccgagaagaaagaaagcatctacgtgaaagttctgcctaaaaagctggatgaagaagtggccaaagacatggtcgaaggctttggtggcgtgatcactaagctgaccggtgatcaggcgagctacattaatgtggatgtggatggcccgtacaagccagaagcctataaatattga

SEQ ID NO: 261290 - DNA, 705 bp, Unknown
  Bacterial polypeptide expressing nucleotide sequence isolated from the Sargasso Sea
atacaaacagctgtattaattgaaacattagttgatttaggagctgaagtaagatggtcatcttgtaatattttttcaactcaagatcatgctgccgctgctattgccaaagcaggtattcctgtttatgcatggaagggcgaaactgaagaagaatacttgtggtgtatcaagcagactattgttggaaaatctgattggaaaccaaatatgttattagatgatggtggcgacctaactgccattatgcataacgaatataatgagttaatgaaagatgttaaaggggtttcagaagaaacgactactggaattaaggcacttaataaaatggaaaaagataaatctcttttagtgccagcaattaatgtcaacgactctgtaactaaatcaaaatttgataacctttatggttgtagagaaagtttagtagatggcataagacgagcaactgatgtaatgatgtcaggtaaaattgcaattgtagcaggctttggagatgttggaaaaggaagtgctgcatctttaagacaaagtggagcaagagtattagtcacagaagcagatccaatttgtgctcttcaagctgcaatggagggttacgaggttgttttaatggaagaagctataagtagagcagatatagttgtaaccgcaacaggaaataaagatatcgtaaccgcagaccacatgagagacatgaaa

SEQ ID NO: 261291 - DNA, 738 bp, Unknown
  Bacterial polypeptide expressing nucleotide sequence isolated from the Sargasso Sea
aatctaaatttgataatttatatggatgcagagaaagtttagttgacggaattaaaagagctactgatgttatgatgtctggtaaagttgcaatagttgctggatttggtgatgttggaaagggaagcgcagcttctctgagacaggcgggggctagagttatggttacagaaacagaccctatttgtgccttacaggcagccatggaaggatacgaggtagttttaatggatgatgccattaaagttgcagacattgtagttactgctacaggaaacaaagatatagtcacagcagatcatatgagagatatgaaagatagagcgatattatgtaatattggtcactttgataatgaaattcaagttgaggctttgaaaaactataaatggaatgaagttaaacctcaggttcacgaaatagaattaccaagtaaaaaaaggattatattattagctgaaggcagattggtaaatttgggttgcgcaacaggacatcccagttttgttatgagtgcatcttttacaaatcaagtaatagcacaaatagaattatggaagaattcagaaaaatataaaaataaagtttatgtattgccgaaacatttagatgaaaaagttgcaatgttacatttagataaagttggagcaaaattaactaaaatgtcaaaagatcaagcagactatattagcgttaaacaatcaggaccatttaaaccagatacttatcgctactaaa

SEQ ID NO: 261292 - DNA, 297 bp, Unknown
  Bacterial polypeptide expressing nucleotide sequence isolated from the Sargasso Sea
catggaagattataaagtaaaagacatagctcaagctgaatttggtagaaaagaaatatccatagctgaaagtgaaatgcctggtttaatggctttaagagaagagtattctaaagaaaaaccattaaagggtgcaaggattataggatgtcttcatatgacaattcaaacggctgtactaatcgaaaccttagttgcattaggtgccgaagttcgttggtcttcttgtaatattttttcaacccaagatcatgcagctgctgcaattgcaaaggctgggatccctgtttatgcctg

SEQ ID NO: 261293 - DNA, 397 bp, Unknown
  Bacterial polypeptide expressing nucleotide sequence isolated from the Sargasso Sea
cgataacgaaatcgacatgtccgggctagaaaaaatgtcggatgtgcagcgacgcaacatcaagccccaagtcgatgaatacatttttcccaacggaaacagcatcctggttctggcagaaggccgtctagtgaacttgggatgtgccacgggccatccgagcttcgtaatgtcaatgagtttcaccaaccaggtactcgcccagattgagttgcacgcgaacgccgactctcttgcaaacgaagtacaccttctccccaagcacttagacgaagaagttgcgagacttcatctcgacaagctgggtgtaaaactcacaaccctcaccgaagagcaagcaaattacataggcgtcccagtggaagggccattcaaacccgaccactaccgctattga

SEQ ID NO: 261294 - DNA, 574 bp, Unknown
  Bacterial polypeptide expressing nucleotide sequence isolated from the Sargasso Sea
cgttgctgaggtcgatccgatctgcgctctgcaggccgccatggaaggcttccgcgtcgttcgcctcgaagacgtggtggaccagatggacatcttcgttacggcgactggcaacttccaggtgatccgccatgagcacctggtgcgcatgaaggatgaggccatcgtctgcaacatcggccacttcgataacgagatcgatgtggcgtccctcaagcagtacgagtgggacaacatcaagccgcaggtggatcacatcaccttgcccagcggcaacaagatcatccttctggccgagggccgtctggtgaatctgggctgcgccaccggccaccccagcttcgtgatgagcaactcgttcaccaaccaaaccctggctcaaatcgagctgttcaccaagcgcgatcagtacgagaacaaggtgtatgtgctgccaaagcacctcgatgagatggtggctcgcctccacctcgacaagatcggcgccaagctcaccgaactcaccagcgagcaggccgcttacatcaacgtgccggtggaaggcccttacaaggtggatcactaccgctactga

SEQ ID NO: 261295 - DNA, 358 bp, Unknown
  Bacterial polypeptide expressing nucleotide sequence isolated from the Sargasso Sea
catggaagattacaaagtaaaagacattacattagctgaattcggaagaaaagaaatctctctagctgagactgaaatgccaggacttatggcgttaagaaaagagtataaaggaaagtttcctcttaaaggtgcaagaattttaggatgtcttcatatgactattcagacggcagtattaattgaaacattagttgagttaggagctgaagttagatggtcatcttgcaatattttttcaactcaagatcatgcagcagcagcaattgctaaagcaggcatacccgtatttgcctggaaaggtgaaacagaagaagaatattggtggtgtgttagacaaacaatagaaggtaaaaag

SEQ ID NO: 261296 - DNA, 681 bp, Unknown
  Bacterial polypeptide expressing nucleotide sequence isolated from the Sargasso Sea
taagagttactgagatagaccctatttgtgctatgcaagcctgcatggacgggtatgaagtagtatcgccctatatcgatggcattaacaatgactctgaggagtccatgaatctcgctttgctagaagatactgatcttattgtaacaacgactggtaactacaaggtatgtgacaaacatatgcttaaagctgtaaaaaatggagctgtaatctgcaacataggtcactttgatactgagatagacacccaatatatgcgtgatgaatggtgctgggaagaggtaaaacctcaagttcataaaatctttagagataccaaagcaggagacacacccaatctagatagcgatgactacatcattctcttgtcagaaggtcgtcttgtaaatttaggaaatgcaacgggtcatccatcacgaataatggacggctcttttgccaatcaggtccttgcacagatgtatttgtttgagaagaagtttgctcatataaacgatgaggataaaaaacaagaactaatcaaagtagaagttttacctaagaagctcgatgaggaagttgcctcttatatggttgaaggttttggtggagtcatgaccaaactatcttccgatcaagctgagtacatcaatgtacctgaagaaggacccttcaagtcagaaatatataaatattagt

SEQ ID NO: 261297 - DNA, 553 bp, Unknown
  Bacterial polypeptide expressing nucleotide sequence isolated from the Sargasso Sea
atgagtttagattacaaagtaaaagatataaaattagcagactggggtagaaaagaaatagccattgctgaaacagaaatgcctggacttatggcaattcgagaagaaaataaaggacaaagcccacttaagggtgcaagaattgttggatgtttgcatatgacaatacaaacagctgttcttattgaaactttagtagagcttggagcatcagtaagatggagctcatgtaatattttttcaacgcaggatcaagctgctgcagcgattgctgcaaagggaatacctgtatttgcttggaaaggtatgaatgatgaagaattttggtggtgtattgaacagacattacaaggtccaaacgattggaagccaaatatgattttagatgatggtggagatgcaacaaaaattattcatgaaaaatatccaaaattattagatgatattagaggtttatctgaagaaactaccacaggtgttcatcgtcttaaagatatggaaaaaaatggattgcttaaagttccagcaataaatgttaatgactcagttacta

SEQ ID NO: 261298 - DNA, 481 bp, Unknown
  Bacterial polypeptide expressing nucleotide sequence isolated from the Sargasso Sea
atggggctgttgtatgtaatattgggccattttgataccgaaatagatacaaaatatatgcaggaaaaatggtattgggaagaagtaaaaccacaagttcatagaatattcagagattgttcgcctgatcaggaacctgacttatcaagcaagaattatctaatacttttagccgaaggaagactggtgaaccttggaaatgccacaggtcatccaagcagaattatggatggctcatttgccaaccaagttcttgcccaaatgcatctctactcagctggttttgcaaatgtaaatgatgaagataaaaagaaagaattaattcaagtagaggtccttcctaaaaaacttgatgaggaagttgcctcccttatggttcaaggttttggcggtgttgttacaaagcttactgaagagcaagctgattacataaatgtcccgcaagatggtcctttcaaagaagattcttataagtactaga

SEQ ID NO: 261299 - DNA, 559 bp, Unknown
  Bacterial polypeptide expressing nucleotide sequence isolated from the Sargasso Sea
cctatttgtgctcttcaagcagctatggaaggctatgaagttgttttaatggatgagatgattggacaagcagatatcgttgttactgctacaggcaataaagatattgtaacagcagatcatatgagagcgatgaaagatagatcaatattatgtaatattggacactttgataatgaaatacaagtagaggctcttaaaaactacaagtgggatgaaataaaacctcaagttcacgaaattacttttccagataacaaaagaattattttattagctgaaggaagattggttaacttaggatgtgcaactggtcatccaagttttgtaatgagtgcttcttttacaaaccaagtaacagcgcaaattgaactttggaataattctgataaatatgaaaataaagtatatgttttacctaaacatttagatgagaaagttgcaaggctacatcttgagaaagttggagctaaattaactcctttatcaaaagaccaagcagattatataagcgttaaaccagaaggtccgtataaaccagatgcatatcgctactagt

SEQ ID NO: 261300 - DNA, 954 bp, Unknown
  Bacterial polypeptide expressing nucleotide sequence isolated from the Sargasso Sea
aacagcagtattaatagaaactttaattgagttaggagctgaggttaggtggtcgtcttgtaatattttttcgacacaagatcatgcagccgcagctatagcaaaggccggtataccagtttatgcatggaaaggtgagaccgaaaaagagtattggtggtgtataaaacaaacaatcgaaggaaaaaaagattggaaaccaaatatgttattagatgatggtggagatttaaccgctctgatgcataaagattacgaagatctattaaaatctgtaagaggactatcagaggaaaccactacaggaatcaaagcattaaaacaaatggaaaaagaaaaaaaattactcgttccagcaataaatgtaaacgactcagtaactaaatcgaaatttgataatttgtatggatgtagagagagtttggttgatgggataaagagagcaactgatgttatgatgtcaggtaagacagcaatagttgctggttttggtgacgtaggtaaaggtagtgctgcttcgttaagacaaagtggtgcaagagttatggtgaccgaaactgatccaatttgtgcactccaggccgcaatggaaggctacgaggtagtacttatggaagacgcaattgagtatgcagatatagtagtcacagcaacaggaaataaagacatagttaccgctgatcatatgagaaaaatgaaagatcgatcaatattatgtaacattggacactttgataatgagatacaggtagatgctttaaaaaattataaatgggtagaaatcaaaccgcaagttcatgagattgaatttccagataaaaaacgaataatccttctcgctgagggtagattagtaaatttaggttgtgcgacaggtcatccaagttttgttatgagcgcatcatttactaatcaagtaatagctcaaatagagctgtggaataattataaaaa

SEQ ID NO: 261301 - DNA, 559 bp, Unknown
  Bacterial polypeptide expressing nucleotide sequence isolated from the Sargasso Sea
atggctgaaacagcaaaagaaaataaaattgatttgatggatgacttcaaagtggcagatatttctctagccgaatggggcgagaaggaaattaagatcgcagaaactgaaatgcctggattgatgagcatcagagaggaatttggtgcagaaaaaccattgaagggtgccaggattgccggatgtttacacatgacaattcagacagcagtattgattgaaactctcattgagcttggtgccgatatcaggtggtcttcttgcaatatcttttcgacgcaagaccatgccgcagctgcgcttgctgaaaaagggattcctatattcgcatggaaagatgagagtgaagaagaatactggtggtgtgttgagcaaacaatcaaaggaccaaatggttggacgccaaaccttatacttgatgatgggggtgatttaacaggtctcatgcatgataagtatcctgaattaatgaaagatataatcggtgtttcggaagaaaccacaacaggagttcttcgtctttataacatggaaaaagatggaacactcatgtgtccag

SEQ ID NO: 261302 - DNA, 490 bp, Unknown
  Bacterial polypeptide expressing nucleotide sequence isolated from the Sargasso Sea
atgtcagaaactttaactcaatccatcgtggatgccatgccatacaaggtgaaggatattaatcttgcaggagacgggagaaaagcacttgatattgctgaaaaagaaatgccaggactaatgtccacgcgtaataaatatggacccgaaaaacctcttgccgggaaaaaactaacaggttccttacatatgactgtcgagactgcagtacttattgaaacattagtcgatttaggtgcagatgtacggtgggcaagttgtaatatcttttcaacccaagatcatgctgctgcggtcattgctgaatccggggtgccagtttatgcatggaaaggagaatcacttgaggaatactggtggtgtactcttcaagcacttaccttccctgatggttctggtccagacctgattgtagatgatggtggtgatgcaacattattaattcataaaggatatgaattagaagaatacttttccaaaatatggtgat

SEQ ID NO: 261303 - DNA, 817 bp, Unknown
  Bacterial polypeptide expressing nucleotide sequence isolated from the Sargasso Sea
aggtgtccaccgtttgaaagaaatggaaaaaaatggaacattaaaggtgccagcaataaatgttaatgactcagttactaagtctaaatttgacaacttatatggttgtaaggaaagtttagtagatggaataagaagaggtactgatgtaatgatggctggtaaaatagccgttgttgctgggtatggagatgttggtaaaggttcagcagctagcttaagaggtgcaggcgcacgtgtttgtgtgactgaaatagatccaattaatgcacttcaagcggcaatggaaggttacgaagttgtcacaatggatgatgcttgtaaatatggcgatatatttgttaccgccactggtaatcttgatgttattacgcaagatcatatgaggcaaatgagagatcgtgctatcgtttgtaatattggacattttgataacgaaatacaaacagaagctcttcaaaattacaagtctgatgaaattaaaccacaagtaagagaagtagaatttccagatgggaagaaaatattattattatcagagggaagacttgttaatctaggaaatgctactggtcatccaagttttgttatgagcgcatcattcactaatcaggtcttagcgcaacttgaactttggaaaaattctaaaaattatgaaaataaagtttatgttttaccaaaacatttagatgaaaaagttgcatcattacacttaaagaaagttggagcaaaacttacagaattaactgataaacaagcagaatatattggtgttagtaagcagggtccatttaaagataatacttacagatattag

SEQ ID NO: 261304 - DNA, 401 bp, Unknown
  Bacterial polypeptide expressing nucleotide sequence isolated from the Sargasso Sea
tatgagccagcaatatatcgtaaaagatatttctttatctgattttggtcgcaaggagttaagtatagctgaaacagaaatgcctggattgatggcgctgcgttcggaatatggagaaagcaaacctttaaaaggtgcgcgtatcgtcggctcacttcacatgactattcaaacagcagttttaattgaaacacttgtggcattaggcgcagatgtgcgttgggcttcctgcaacattttctcgacccaagaccatgcagccgcagcaattgccgcagcaaatattcctgtgtttgctattaagggtcagtctttagaagagcattgggattacttagataaatcttttatgtttcctgatggcccaaatatgattttagatgatggtggcgatgcaactt

SEQ ID NO: 261305 - DNA, 576 bp, Unknown
  Bacterial polypeptide expressing nucleotide sequence isolated from the Sargasso Sea
tatgtttcaagattataaagtaaaagatattaaccaggctgaatttggcagaaaagaaatttctctagctgaaacagaaatgccgggtttgatggcgttaagaaaagaatataaaggcaaaaatcctttaaagggcgctcatattcttgggtgtctccacatgactattcaaactgcagttttaattgaaacattggtagagctaggtgcagaagttagatggtcatcatgtaatattttttctactcaagatcacgcagccgcagcaatagctaaagctggtatacctgtatttgcttggaaaggtgaaacagaggaagagtattggtggtgtgttagacaaactattgaaggaaaaaaagattggaaaccaaatatgattcttgatgatggaggagatctcacagctttaatgcataaagattataaagatatgttaaaaaatattaaaggtgtttcagaagaaacaacaacaggagtactagcattaaaaaaaatggaagaaaaaaaagaacttttgattccagcaattaacgtcaacgactctgttacaaaatcaaaatttgataatttata

SEQ ID NO: 261306 - DNA, 472 bp, Unknown
  Bacterial polypeptide expressing nucleotide sequence isolated from the Sargasso Sea
atgatcaaggattataaagtaaaagatattaacgaagcagattttggaagaaaagaaatttctttggcagaaaccgaaatgccaggacttatggctcttcgaaaggagtacaaaggtaaaaaaccattaaagggagcaaaaattttaggctgtcttcatatgacaatacaaacagcagtgttaattgaaactttagtagaattgggagcagaggttaggtggtcttcttgtaatattttttcaacacaagatcatgcagcagctgcaatagccaaagcgggtattcctgtctttgcatggaaaggtgagacagaagatgaatattggtggtgcgttaagcaaactatcgaaggaaaaaaagactggaaaccaaatatgattttagatgacggtggtgatcttacagctttaatgcataaagattataaaaatttattaaaagatgttaagggggtgttcagaggaaaccaca

SEQ ID NO: 261307 - DNA, 697 bp, Unknown
  Bacterial polypeptide expressing nucleotide sequence isolated from the Sargasso Sea
attaacgtgaatgattctgttaccaaatcaaaatttgacaacttatatgggtgtagagaaagcttagttgatggaattagaagagctactgatgtaatgatgtcgggaaaaattgcaatcgttgctggttttggtgatgttggaaaaggaagtgctgcatcattaaggcaaagtggggctcgtgtattggttaccgaagcagacccaatatgtgcattgcaagctgcaatggaaggttatgaagttgttttaatggatgaagcaattagtaaagcagatattgttgtaactgctacgggtaataaagatatcgttacagctgatcacatgagagatatgaaggatagagctatcttgtgtaatattggtcactttgataatgaaattcaggttgaggctttaaaaaattacaaatggactgaagtaaaacctcaagtacacgaaattgaattacctagcaaaaaaagaataattttattggcagaaggtagattggtaaatctgggttgtgcaacagggcatccaagttttgtgatgagcgcttctttcacaaatcaagttattgctcaaatagaattgtggaataatcataaaaattataaaaacaaagtttatgttttaccaaaacatttagatgagaaagtagctacacttcatcttaaaaaagttggtgctaaattaactaaaactttctaaa

SEQ ID NO: 261308 - DNA, 724 bp, Unknown
  Bacterial polypeptide expressing nucleotide sequence isolated from the Sargasso Sea
atgacagattataaagtaaaagatattaaagaagccgaatttggaagaaaagaaatttcattagccgaaactgaaatgccaggtcttatggctttgaggaaagagtataaagataagaaaccattaaagggtgcaagaattgttggatgtttgcacatgacaattcaaaccgctgtattgatagaaactttagttgaattaggcgctgaagtacgttggtcctcttgcaatattttttcaacacaagatcatgcggcagcagcaattgcaaaggttggaataccagtttttgcttggaagggcgaaactgaggaagaatactggtggtgtgttagacaaactattgaaggtaaaaaggactggaaaccgaacatgattttagatgatggaggtgatcttactgctttaatgcataaagactataaggaattaatgaaagatattaaaggattgtctgaagagactacaacaggtgttttggctttaaagaaaatggaacaagaaggaacattattagtgcctgcaataaatgtaaacgactccgtcacaaaatcaaaatttgataatttatatggatgtagagaaagcttagtcgatggaataaaaagagcaacagacgtaatgatgtctggtaaagttgcaattgtagcaggttttggtgatgttggaaaaggcagcgctgcatctttaagacaatctggagctagagttatggtaaccgaaa

SEQ ID NO: 261309 - DNA, 256 bp, Unknown
  Bacterial polypeptide expressing nucleotide sequence isolated from the Sargasso Sea
aatgcaactgggtcatccatcttttgtaatgtccgcaagctttagtaatcaagtcctagcccaaatcgagctgtggaaaaatggtaagaattattccaatagcgtatacacgctgccaaaacatctggatgaaaaagttgcaaggttgcacttagagaaaataggagtgaaacttacaaaactagagaaagatcaggctgactatattggtgtaaatgaggccggaccatttaaaagcgacagctatcgctattaa

SEQ ID NO: 261310 - DNA, 784 bp, Unknown
  Bacterial polypeptide expressing nucleotide sequence isolated from the Sargasso Sea
cccgcgataaatgttaatgactcagtaaccaagtcaaagaacgacaacaaatacgggtgccgacatagccttaacgatggcatcaagcgagggaccgatatgctgctatccggcaagcacgctttagtaatcggctacggcgatgtaggcaaaggatctgctcagagtctccgccaggaagggatgatagtaaaggtcgcggaaatagatccaatttgtgcgatgcaggcatgcatggacggctttgaagtcgactccccctacaagtcgggtgaaaacacgggcgacgaatctgccataaacaaagcacttttatctaagatggacatgatagtcactgccactgggaacataaatgtttgcgataagcgtatgttgcagaatgtaaagcgtggcgcaattatctgcaacattggacactttgataatgaaattgatacggccttcatgagagagtcatgggaatgggaggaagttaaaccccaagttcacaaaatttatcgtagtggtttgaatgtcaaggatgactatctgcttttattatcagaaggacgacttataaaccttgggaacgccacaggtcatccgtctcgcattatggacggctcctttgcaaaccaggtcctagcccagattcatctgtttgcaaagaagtttgcggacaacagcaaggaatttaaggattctaatattgaggtagaggtcctacccaaacatctcgatgagcaagttgcagcccttatggtagaggggtttggtggagtaatgaccaagcttacaccta

SEQ ID NO: 261311 - DNA, 493 bp, Unknown
  Bacterial polypeptide expressing nucleotide sequence isolated from the Sargasso Sea
atgagtgatgactttaaagttaaagatattagtttagccgattttggcaataaagagatagcaattgcagaaacagaaatgcctggattaatggctattcgtgatgaatatggagataaaaaacctcttgaaggagctaaaatagttggatgtcttcatatgacaattcaaacagcagttttaattgagacattagtatatttaggggcgacagtaagatggagttcatgcaatattttctcaactcaagatcacgcagcagcagcaattgctggtaaaggcatacctgtattcgcttggaaaggtcaaactgaggaagatttttggtggtgtattgaaaaaacattagaaggtccaaatggatggaaaccaaatatgattctggatgatggtggagatgcaacaaaaattattcatgaaaaatacccaaaaatgctcgaggatattttaggtttgtctgaagaaacaacaacgggtgttcatcgtttgaaag

SEQ ID NO: 261312 - DNA, 415 bp, Unknown
  Bacterial polypeptide expressing nucleotide sequence isolated from the Sargasso Sea
gctattggtggctaatattggacatttcgatagcgaaatccaagttgcagaattaaaaaactttaaatgggataatattaagcctcaagttgatgagatagagtttcctgatggcaaaaaaattattttattggctgaaggtcgattggttaacctaggatgtgctactggacaccctagttttgtaatgagcgcatcattttcaaatcaagttttagcccaaattgaaatttggaataattatgaaaattatgaaaataaagtatatgtcctacctaaacatttagatgaaaaagtagcatatatccaccttgagaaattaggagtcaagttaactgagctgagcaatagccaagctgattatctaaatttgagtaaagaaggtcccttcaaaccagatcattacagatattaa

SEQ ID NO: 261313 - DNA, 400 bp, Unknown
  Bacterial polypeptide expressing nucleotide sequence isolated from the Sargasso Sea
tatggttatcgcaaattcagttagtaccatcacaccaaattatttaattgccgacatctccttatcagattttggccgtaaagaaattaaaattgctgaaacggaaatgcctggattaatggcacttagagataaatatcaatcagaaaagccactcaaaggtgcaaaaatagctggaagtttgcatatgactatacagactgcagtcttaatagaaactcttgttgatcttggggcagaagtgaaatgggcttcatgcaatattttttcaactcaagatcatgcggcggcggctatagcagatcaaggaatccctgtatacgcaaaaaaaggtgagacacttgatgaatattggcaatatacccactacatttctgattggggctcagactctccaaat

SEQ ID NO: 261314 - DNA, 649 bp, Unknown
  Bacterial polypeptide expressing nucleotide sequence isolated from the Sargasso Sea
tatgtcaaaagattataaagtaaaagatattgcccaagctgactttggaagaaaagaaatttcaatagccgaaactgaaatgccaggcttaatggctttaagaaaagaatataaaaacaaaaaccctcttaaaggcgcaaaaattttaggttgtttgcatatgacaattcaaacagcagttttaatagaaactttagttgaacttggagctgatgtgagatggtcttcttgtaatattttttcaacacaagatcacgcagccgcagcaatagcaaaatctggaattcctgtttatgcatggaaaggtgaaacagaagaagaatattggtggtgtataaaacaaaccatagaaggtaaaaaagattggaaaccaaacatgttgttagatgatggaggagatcttactgctttgatgcataaagaatataaaaatcttcttaaagatgtaaaaggagtttcggaggaaacaacaacaggtgtaatggctctaaaaaaaatggaagcaaacaaaacacttttggtaccagcaattaatgttaatgactctgtaaccaaatctaaatttgataatttgtatgggtgcagagagagtctggttgatggaattaaaagagctacagatgttatgatgtcaggcaaaactgcaata

SEQ ID NO: 261315 - DNA, 992 bp, Unknown
  Bacterial polypeptide expressing nucleotide sequence isolated from the Sargasso Sea
gattgcaaagctggcatccctgtatttgcttggaaaggtgaaactgagaaggagtattggtggtgtgtaaaacaaactattgaaggaaagaaagactggaaaccaaatttgatattagacgatggaggtgatcttactggattaatgcacaaagaatataaagatttattaaaaaatataaaaggtgtttctgaagaaaccactactggtgttttagctcttaaaaagatggagtcaaataaagaattattaattccagcttttaatgtaaatgactcagtaaccaaatctaagtttgataatttatatggatgtagagaaagtttagttgacggaattaaaagagcaactgatgtaatgatgtcaggtaaagtagcaattgttgctggatttggcgatgtaggaaaaggaagtgctgcttccttacgtcaagcaggcgcaagagttatggtaaccgagacagacccgatatgcgcgttacaggctgctatggaaggctacgaagttgttgttatggatgaagctatcaaagatgctgatatagttgtaaccgcaacaggaaataaagacatagttacagctgatcatatgagagatatgaaagacagagcgatactttgtaatattggtcacttcgataatgaaattcaagttgaggcactaaaaaattacaaatgggatgagataaaacctcaagtacacgaaatagaattacctagtaaaaaaagaataattcttttagctgaaggaagactggttaacctaggatgtgctactgggcatcctagctttgttatgagtgcttcatttacaaatcaagtaatagctcaaattgaattatggaataactcagataagtatgagaagaaagtttacgtgcttccaaaacatcttgatgaaaaagttgcaatgcttcatttagaaaaagtaggtgctaaattaaccaaaatgtcaaaagagcaagccgaatatataagcgttaaaccatcagg

SEQ ID NO: 261316 - DNA, 361 bp, Unknown
  Bacterial polypeptide expressing nucleotide sequence isolated from the Sargasso Sea
tctggaagacgtcgtcgcgaccgccgatatcttcgtcaccaccaccggcaacaaggacatcatccgcatcgagcatatgcgcgagatgaaggacatggcgatcgtcggcaatatcggccattttgacaacgagatccagatttcctcgctgcggaactacacctggaccaatgtgaagccgcaggtcgacatgatctcgtttcccgacggcaagcgcatcctgctgctttcggaaggccgcctgctgaacctcggcaatgccaccggccacccctccttcgtgatgtcggcctcgttcaccaaccaggtgctggcccagatggaaatcttccagaaccacgacaaatacgagaacacggtc

SEQ ID NO: 261317 - DNA, 949 bp, Unknown
  Bacterial polypeptide expressing nucleotide sequence isolated from the Sargasso Sea
actatttgaaggtaaaaaagattggaaacctaatatgattttggacgatggtggagatcttactgctctaatgcataaagattataaagaattattaaaagatattaagggattaagcgaagaaacaactacaggagttttagctctcaaaaaaatggaagagcaaggaactttaatggttccagcgataaatgtaaatgactcagttacaaaatcaaaatttgataacctttatggatgtagagagagtttggttgatggaattaaaagagcaactgatgttatgatgtcaggaaaagttgcaatcgttgcaggttttggcgatgttggtaaaggaagcgctgcatctttaaggcaaagtggcgcaagagttatgataacagagacggaccctatttgcgcacttcaagctgcgatggaaggatacgaagttgttcttatggatgagatgataggacaagctgatatagttgttacagctacaggtaataaagatatagtaacagccgaccatatgagagctatgaaagatagatcaatattatgcaatatcggccactttgataatgaaattcaagttgaagctttaaaaaattataaatgggatgaaattaaaccacaagtacatgaaattacttttccagataacaaaagattaattctactagcagagggtagattggttaatttgggatgtgcaactggtcatccaagttttgttatgagtgcttcttttacaaatcaggttacagcacaaatagaattatggaataactcagaaaaatacgaaaaaaaagtttatgttttaccaaaacatcttgatgaaaaagttgccagattgcatttagaaaaagttggagctaaacttacacctttatcaaaagatcaagcagattacataagcgtaaaaccagaaggtccatacaaaccagatgcgtatcgctactaa

SEQ ID NO: 261318 - DNA, 841 bp, Unknown
  Bacterial polypeptide expressing nucleotide sequence isolated from the Sargasso Sea
ggtttaagtgaagagacaacgactggcgttcttgcacttaaaaaaatggaagaacaaggacaattgttagtaccagcaattaatgtaaatgactcagtcacaaaatcaaaatttgataacttatatgggtgtagagaaagtttagttgatggaattaaaagagctactgatgtaatgatgtcaggaaaagttgccattgttgcgggctttggtgatgttggaaaaggtagtgcagcatctttaagacaaagtggagcaagagttttagtaactgaaactgatcctatttgtgcattgcaagctgcaatggaaggctacgaggtggttctaatggatgaaatgataggccaagcagatattgtcgtaactgcaactggaaataaagatgtagtaactgcagaccatatgagagctatgaaagatagatctattctttgtaatattggacactttgataacgaaattcaagtagaggctttgaaaaattataaatgggatgaagtaaagcctcaagttcacgaaataacattcccagatgacaaaagattaattttgttagccgaaggaagacttgtgaatttaggttgtggaactggtcacccaagttttgttatgagtgcatcatttacaaaccaggttattgctcaaattgagctttggaataattcagataattatgaaaataaagtttatgtacttcctaaacacctagatgaaaaggtggcaaggcttcacttagataaggttggtgcaaaattaacaccactatcgaaagagcaagctgactatataagtgtaacaccagagggaccatacaaacctcatgcttatcgctactaga

SEQ ID NO: 261319 - DNA, 526 bp, Unknown
  Bacterial polypeptide expressing nucleotide sequence isolated from the Sargasso Sea
tatgaggttgtattgatggatgatgccattagtaatgccgatatagtagttacggctactggcaacaaagacattgtcaatgcagatcatatgagaaaaatgaaagatcgagctatactctgtaatattggtcactttgataatgaaattcaagttgatgcattaaaaaattataaatggaccgaaatcaaacctcaggttcatgaaatagagcttacagacaaaaaaagaataattcttttagccgaaggaaggttggtaaacttaggttgtgcaaccggacatcctagttttgttatgagtgcatcttttaccaatcaggttatggctcaaatagaactttggaacaattataaaaaatatgagaaaaaagtttatgttttacctaaacatttggatgaaaaagttgcaatgttacatttaaataaagttggagctaaattaacaaaactttcaaaagatcaagcggattatattggcgtagatactaaaggaccatttaaatctgatagttatcgctactaaa

SEQ ID NO: 261320 - DNA, 715 bp, Unknown
  Bacterial polypeptide expressing nucleotide sequence isolated from the Sargasso Sea
ggatgtagagagagtttagttgatggaattaaacgagccacagatgtaatgatgtctggaaaagtagcaattgtagcaggttttggagatgttggaaaaggcagtgcagcatctttaagacaatcaggggcaagagtaatgattacagaaacagatccaatatgtgcattacaagcagctatggaagggtatgaagtagtaacgatggacgatatgataagtgaagcagatattgttgttactgcaactggcaataaagatattgttacagctgatcacatgagagaaatgaaagatcgggctattttatgtaatattggacattttgataatgagatacaggttgatgcgcttaaaaattataaatgggatgaaattaaacctcaagtacacgaaataactttaccaagcaaaaaaagaataattttacttgcagagggcaggttagtaaatttaggttgtgcaacaggacaccctagctttgttatgagcgcttcatttacaaatcaagttattgcacaaatcgaattatggaataattctaaaaattacgaaaaaaaagtttatgtattgccaaaacacttggatgagaaagttgccacattacatcttaaaaaggtaggtgcaaagttgactaaattatcaaaggatcaggcagattatattagtgttaaagttgaaggcccttataaaccagatgcttaccgctactaag

SEQ ID NO: 261321 - DNA, 305 bp, Unknown
  Bacterial polypeptide expressing nucleotide sequence isolated from the Sargasso Sea
cggaaagaaaattatacttctctcaaaaggtagactggttaacttaggaaatgcgatgggacaccccagttttgtaatgagtgcatctttctctaatcaagttcttgcgcaaatagaactatggaataaccctcaaaagtatgaaaagaaagtatatgttttgccaaaaaatttagatgaaaaagtagcggctatccatttggataaacttggggctaagttaacaaaactaactaaagaacaatcagattatatcggtgtagataatactggtccctttaagcctgaatattataggtactaga

SEQ ID NO: 261322 - DNA, 376 bp, Unknown
  Bacterial polypeptide expressing nucleotide sequence isolated from the Sargasso Sea
atgtcagaagattttaaagtaaaagatattaatcaagcagaatttggcagaaaagaaatttcaatagccgagactgaaatgccaggtctaatggctttgagaaaagaacacaaaggaaagaagccacttaaaggagcaagaattttaggatgtcttcacatgactatccaaacagcagtcttaatcgaaactcttgtagaattaggcgccgaagtaagatggtcatcttgcaacattttttcaacacaggatcatgcagcagcagctatagcaaaagttggaattccagtttatgcatggaaaggtgaaaccgaagaagagtattggtggtgtattaaacaaactattgaggcaaaaaaaaattggactcccaata

SEQ ID NO: 261323 - DNA, 115 bp, Unknown
  Bacterial polypeptide expressing nucleotide sequence isolated from the Sargasso Sea
tcggttacaaagtctaaatttgataatttatatggatgtcgagaaagtttagtagatggaattaaaagaacaacagatgtaatgatgtctggtaaagttgcaatagtagcaggtt

SEQ ID NO: 261324 - DNA, 250 bp, Unknown
  Bacterial polypeptide expressing nucleotide sequence isolated from the Sargasso Sea
catggtggcagcgcccacgagtccggctgagctcaagctctccggcgatcacgtcatcgccgatatcaacctggctgacttcggtcgcaaggaactcgatatcgccgagaccgagatgcctggtctcatggcacttcgtcagaaatacggcaaggagaagcctctcaagggtgcgcgcattgccggctccctgcacatgacgatccagacggcaagtctgatcgaaacccttgtggagcttggtgccgag

SEQ ID NO: 261325 - DNA, 802 bp, Unknown
  Bacterial polypeptide expressing nucleotide sequence isolated from the Sargasso Sea
atgagtgaagattttaaggttaaagatattaatttggctgattttggtaataaagaaattgcaatagctgaaacagaaatgccaggtttaatggcattaagagaagagtatggagattctaaacccttagatggagcaagaattgtaggttgtttacatatgactatacaaactgctgttttaattgaaaccctagtatttttaggagctactgtaagatggagttcatgtaatattttttctacccaagaccacgctgctgcggcaatagctgcaaaaggcattccagtatttgcttggaaaggaatgtcagaagaggagttttggtggtgtattgaaaaaacactagaaggtccagatggttggatgccaaatatgattttagatgatggtggagatgctacaaaaatcattcatgaaaaatatccaaaaatgctggaagacattttaggtttatctgaagaaacaactactggtgtccatcgcttgaaagagatggaaaaaaatggatcacttaaggtaccggcaataaatgttaatgactcagttactaaatctaaatttgacaacttatatggttgtaaggaaagtttagtagatggaataagaagaggtacagatgtaatgatggctggcaaaatagccgttgttgctggatatggtgatgtaggaaaaggttctgcagcaagtctaagaggagctggagcacgtgtttgtgtaactgaaatagatcctataaacgctcttcaagctgctatggaagggtatgaagttgtaactatggatgatgcatgtaagtatg

SEQ ID NO: 261326 - DNA, 658 bp, Unknown
  Bacterial polypeptide expressing nucleotide sequence isolated from the Sargasso Sea
gatgatcgtaaaggttgtcgaagtcgatccaatctgcgccatgcaagcctgtatggatggctacgaaatcgtgtctccctatatgaatggcatcaatgatggatcgctcgagaacatagatagaaggctcatgggcaatatcgacctgctggtcacctgtaccggtaacgtgaacgtctgtgacagtaacatgctgcgcagcctgcaatcgggcgcgatcgtctgcaatattggacacttcgataccgagatcgatacccactacatgcgtgacaattggcgctgggcggaggtcaaagagcaagttcacatggtctatcggagcgataatcctcgcgactacctgattctcctctcggaaggtcgattggtaaaccttggtaatgcgaccggacacccgtccagaatcatggatggttcattcgccaatcaggtgctcgcccagatctatctgtacgaacgcaagtgggctgatcacgacgacgatcaacgtgaacccatcaccgttgaagtgctccccaagaagctggacgaggaagtcgccagcctcatggtcgcagggttcggcggtgtgcttacaaagctcactcagaaacaggcggactatatcaacgtgcctgtgacaggtccttacaagattgaacagtacaagtactag

SEQ ID NO: 261327 - DNA, 600 bp, Unknown
  Bacterial polypeptide expressing nucleotide sequence isolated from the Sargasso Sea
cctgggaaaaaaccgacaaagtagctgccttgcagcgtgtgttaaaataggaggaatacaaatgacgatgacgcttgaaaaacaaaaaatggattatcacgttcgtgatatgtcactggctgattttggcaggaaggaaatcgatattgccgaaatggaaatgcccggcctgatggctacgcgcgaaaaatacgggccggataagcctttggccggcgtaaagatcatgggctcactgcacatgactatccagaccgctgtgctgatcgagaccctcgtcgagttaggtgctgatgtccgttggtgctcctgtaacatattctccacgcaagaccatgcggctgcggccattgcggctgcgggagttccggtatttgcctggaagggggagactctggaagaatactgggattgcacttttaaagctctcacttggccggatggttccgggccggatcaaatcgttgacgatggcggggatgcaacgctgctgatccacaaggggctggagttggaaaacggtagtgattgggttgattctaaatctgacagtgaggaagaacaggtttatcaaaacctgcttaaaaaggtgaatgctga

SEQ ID NO: 261328 - DNA, 448 bp, Unknown
  Bacterial polypeptide expressing nucleotide sequence isolated from the Sargasso Sea
attggaatttaatgattacaaagttgctgatataggacttgcggactggggacgaaaagaaatagaaatcgctgaaacagaaatgcctggtttaatcacgctaagaaatgagttaagtaaatccaagccactaaaaggagcaaatattgttggctgtcttcatatgacaattcaaactgcagtattgattgaaactctaattgatttgggtgcaacagttagatggtcatcctgtaatattttctctactcaagaccatgctgctgctgcaatcgctagtaaaaatatacctgtttttgcatggaagggtgaaactgaagaagaatacgattggtgtattagacagacaattgaagggtcatcagattggaaaccaaatatgattctagatgacggcggtgacttaacaaagataaaacatgaagaataccaagatttattagatgat

SEQ ID NO: 261329 - DNA, 601 bp, Unknown
  Bacterial polypeptide expressing nucleotide sequence isolated from the Sargasso Sea
ctcttcgtcatccggcgctagagttttagtaacagagacagatcctatatgcgccctgcaagctgcgatggaaggctacgaagttgtcttaatggaagatgcaattaaagatgcggatattgtagtcactgcgactggtaacaaagatatagtaacagctgatcacatgagagacatgaaagatagagctattctttgtaatataggtcactttgataatgaaattcaggttgaagctttaaaaaattacaaatgggatgaaataaaacctcaggttcatgaaattgaacttccaagcaaaaaaagaattattttattagctgagggaagactagtaaatcttggatgtgcaacaggtcatcctagtttcgtaatgagcgcatcatttacaaatcaggttattgcacaaatagaactttggaataactctgataaatatgaaaataaagtctacgtattaccaaaacatttagatgaaaaagttgcgatgttacatctagaaaaagttggagcaaaattaactaaaatgtcaaaagaacaagcagattatattagcgttaaaccatcaggaccatttaaaccagatacttaccgctactaa

SEQ ID NO: 261330 - DNA, 427 bp, Unknown
  Bacterial polypeptide expressing nucleotide sequence isolated from the Sargasso Sea
tgacacaaaccatatgataaatatgaaggacggagcaattatagctaatagtgggcattttaatgttgaaattaatattccaggactacaagacatatcttcatcttccaaagttacaagacaatacatcgaacaatttactgtacgagataaaaaaataaatttacttgcagaagggcgattagtaaatcttgccgctgctgaaggacatccttctagtgtaatggatatgagttttgctaatcaggcgttatgcgtagaacatataattaaatttagtgaaaaattatcaatttctgttcatgatgtaccaaaagaaatagatgaagaaataggaagactcaaattatccaccatgggtgtatctatagacaatttaactcaagaacaaattaaatatctacatagctggactacaggaacttag

SEQ ID NO: 261331 - DNA, 226 bp, Unknown
  Bacterial polypeptide expressing nucleotide sequence isolated from the Sargasso Sea
tcagcttcatttacaaaccaagttcttgcgcagattgagctttggaaaaagggcggcgagtataaaaacgatgtttatattctacccaagcatttagatgaaaaggttgcccgactgcatttggagcgtattggtgtgaaattgacaaaattagctacagatcaggcagagtatattggcgtaacacccgaggggccttttaagccagaacactatcgttattgag

SEQ ID NO: 261332 - DNA, 715 bp, Unknown
  Bacterial polypeptide expressing nucleotide sequence isolated from the Sargasso Sea
tggttgtagagagagcttagttgatggaattaaaagagctacagatgttatgatgtctggaaaagttgctattgttgctggatttggagatgttggaaaaggtagtgcagcatctctaagacaaagtggtgcaagagttatggtaacagaaacagatccaatatgtgcacttcaggctgccatggaaggttatgaagtagttttaatggatgaaatgattaaagaggcagatattgtagttactgccacaggaaataaagacatagttacagcagaccatatgagagatatgaaagatagggcaatactttgcaatattggacactttgacaatgagattcaagttgaagctatgaaaaattataaatgggatgaaataaaaccccaagttcatgaaataacatttccagataataaaagaattattttactagcagaaggaagattggtcaatttaggttgtgcaactggtcatccgagttttgtaatgagcgcttcatttacaaatcaggtaactgctcaaatagaattatggaacaattctgataaatatgaaaataaagtatatgttctgccaaaacatcttgatgaaaaagtagcgatgttgcatttagataaagttggtgcaaaattgacaaaattatcaaaagatcaagcagattatatcagcgtaacaccagagggaccttataagccagatacctatcgttactaa

SEQ ID NO: 261333 - DNA, 946 bp, Unknown
  Bacterial polypeptide expressing nucleotide sequence isolated from the Sargasso Sea
tggtggtgcattgaaaaaactttatcagggccaaatgattggaaacctaatatgattttggatgatggaggagatgcaacaaaaattattcatgaaaaatacccaaacttgcttgaaggtattagaggtttatcggaagaaacaacaacaggagttcatcgtttaaaagacatggaaaaaaaaggctcacttaaagttcctgctataaatgttaatgattctgttacaaaatcaaagtttgataatctatatggatgtaaagaaagtttagttgatggtattagaagaggtacggatgtaatgatggctggaaaaatagctgtggttgcaggatatggagatgttggcaaaggttctgcagcaagtttaagaggggctggagcgagggtttgtgttacagaagttgatcctattaatgctttgcaagccgcaatggagggatatgaagttgtaacaatggatgatgcatgtgagtatggagatatatttgttacagctactggaaatgtcgatgttataacactagatcatatgagaaaaatgagagacagagcaatagtttgcaatattggacactttgataatgaaattcaaactgaagcgcttagaaattacaaaacagaagaaattaagccccaagttgatgagatagaatttcctgatggaaaaaaattgatattattatctcagggaaggctagttaatttaggtaatgcaacaggacaccctagttttgttatgagtgcttcttttactaatcaagtaatggctcaaatcgaattgtgggaaaatcatgctaattacgaaaataaagtttatgttttgcctaaacatttagatgagaaagtcgcatttttgcatcttaaaaaagttggtgctaaattgactaatttaagcgataaaacagctgagtatattggcgtgaaaaaggaaggccctttttaag

SEQ ID NO: 261334 - DNA, 146 bp, Unknown
  Bacterial polypeptide expressing nucleotide sequence isolated from the Sargasso Sea
cttgcctaaggaattagatgaaaaagttgcacgcttgcatttagataaattgggagtaaagcttgaacagctctctgagcggcaagcaagttatatgggtgttgctactgagggaccctacaagccgggtcactataggtactaat

SEQ ID NO: 261335 - DNA, 618 bp, Unknown
  Bacterial polypeptide expressing nucleotide sequence isolated from the Sargasso Sea
agggttcggcccagtccctgcgtggtcttggtgccaccgtctgcattgctgaagtggatccgatctgcgccctgcaggccgcgatggagggttaccgcgttgtccgtctggaggatgtggtcgaggagatggacatcttcgtgaccgcaaccggtaactaccaggtgatccgcaacgagcacctggtcaagatgaaggatgaggccatcgtctgcaacatcggtcacttcgacaatgagatcgatgtcgcctcactcaaggagtacgagtgggagaacatcaagccgcaggttgaccacatcaccctgcccagcggcaacaagatcatcctgttggctgaaggccgcctggtcaacctgggctgcgccaccggccaccccagcttcgtgatgagcaactctttcaccaaccaagtattggcacagatcgagctgttcaccaagggcgacgaatatggcaaagaggtttatgtgctgccgaaacatcttgatgagatggtggctcgccttcacctaggtcgcatcggggccaagctcaccgagctgagcaaagatcaggctgactacatcaatgtgcctgtggaaggcccttacaagccagaccactaccgctactgat

SEQ ID NO: 261336 - DNA, 858 bp, Unknown
  Bacterial polypeptide expressing nucleotide sequence isolated from the Sargasso Sea
aaagaaatttctatagccgaaacagaaatgccaggcttaatggctttaagaaaagagtataaaggaaaaaaaccacttaatggagcgagaattttaggttgtttacacatgacaattcaaactgctgtacttattgaaactttagttgagcttggagctgatgttagatggtcttcttgtaatattttttcaacacaagatcatgctgcagcagcaatagcaaaagctggggtgccagtttatgcttggaaaggtgaaactgaagaggaatactggtggtgcataaaacaaaccatagaaggtaaaaaagattggaagccgaatatgttgttagatgatggaggcgatctgaccgctttaatgcataaagattataaaaatcttttaaaatctgtaaaaggtttatcagaagaaacaactacaggaattaaagcattaaaaaaaatggaagcagaaaataaacttttagtaccagcaattaatgttaatgattctgtaacaaaatcaaaatttgataatttatatggttgtagagaaagtttagtcgatggaataaaaagagccacagatgtgatgatgtcaggtaaaactgctattgttgcaggatttggcgatgtaggaaagggtagcgccgcatcgttaagacaaagtggtgctagagtaatggtaaccgaagcagatcctatttgtgctctacaagccgctatggaaggctatgaggtagtattaatggatgaagcaattagtaatgctgatatagtagttacagcaacaggaaacaaagatattgtaacagcagatcatatgaggaaaatgaaagatcgatctatactttgtaatataggacactttgacaat

SEQ ID NO: 261337 - DNA, 194 bp, Unknown
  Bacterial polypeptide expressing nucleotide sequence isolated from the Sargasso Sea
ctttatcgccgaatccgaaatgccagccctgatgggcctgcgccgcaagtacgccgctgagcagccgctcaagggcgccaagattctcggctgcatccacatgaccatccagactgccgtgctgatcgaaaccctggttgctctgggtgccgaagtgcgttggtcgtcctgcaatatcttctcgactcaagacc

SEQ ID NO: 261338 - DNA, 469 bp, Unknown
  Bacterial polypeptide expressing nucleotide sequence isolated from the Sargasso Sea
catggaagattttaaagtaaaagatatatctcaagcagaatttggacgtaaagaaatttcaatagctgaaagtgaaatgccaggattaatggcattaagagaagagtattcaggaaaatcgccattgaaaggagcgaaaatcattggctgtttgcatatgacgatacaaacagctgtattaattgaaactttagtagatttaggtgctgaagtaagatggtcgtcttgtaatattttttcgactcaggatcatgcagctgcagcaattgctaaagcaggtgttcccgtttacgcatggaaaggtgaaacagaagaagaatatctttggtgtattaaacaaacaatagttgccaaaaaagattggaagccaaatatgttgttagatgatggtggagatttaacggccataatacataatgaatataaggatttattaaaagatgtaagaggtgttcagaggagacaacaa

SEQ ID NO: 261339 - DNA, 809 bp, Unknown
  Bacterial polypeptide expressing nucleotide sequence isolated from the Sargasso Sea
ggcttcatgcaatattttctcaactcaagatcatgcggctgcagctatcgcagatcaaggcatttctgtatatgcaaaaaaaggcgaaactcttgatgaatattgggaatatactcactgtatcctagattggggttcagactccccaaatatgattcttgatgatggaggagatgcaactggcctattgatactcggtagtaaagcagaaaaagatttatctgttttagataatcccggtaatgaagaagaaattgctttattcaattctattaagtctaagttagaaaatgatagtgacttctattctagaattaagagtaatatcattggtgtcactgaagaaactacaacgggagttgcaagactttaccaactgcaaaagcaaaatgctttacccttcccggctatcaacgttaatgattcagtaactaagagcaaatttgataatttatatggttgccgagaatctttagttgatagcataaaacgtgctactgatgtgatgattgctggaaaggttgctttagtcattggttttggagatgtaggtaaaggttcagctcagtctctaaggggacttggtgcaattgtaaaagttgctgaagttgatccaatttgtgctcttcaagcggcaatggaaggttttagcgttgttacattagacgatgttgtggaagatatagacatattcgtaacggcaactgggaattatcaagtaataacaaatgaaaatcttatcaagatgaaaaatgaggctatagtctgtaacatcggtcatttcgataatgaaattgatgtggcttcat

SEQ ID NO: 261340 - DNA, 187 bp, Unknown
  Bacterial polypeptide expressing nucleotide sequence isolated from the Sargasso Sea
gctttggaacaattcagacaactatgaaaataaagtttatgtgcttcctaaacacttagatgaaaaagtggcaagacttcacttagataaagttggtgcaaaattaacaccattatcaaaagagcaagctgattatataagtgtaacaccagagggaccatacaagcctcatgcttatcgctattag

SEQ ID NO: 261341 - DNA, 886 bp, Unknown
  Bacterial polypeptide expressing nucleotide sequence isolated from the Sargasso Sea
aactgaagaggaatataaatggtgcattgatcaaacaataaatggaccagaaggatggaaaccaaatatgttattagatgatggtggtgatctaactggaattatacatgaagaacataaagaacttcttgatgatattcttggtgtctcagaggaaaccactactggtgttcatagattatatgagatggaaaaaaataatgaactaaagatgcctgcgatgaatgttaatgactccgttacgaaatctaaatttgataatctttatggttgcagagaatctcttgttgatggaattaagagagccacagacacaatgatagcaggtaaattagctgtggtatgtggatatggtgatgttggcaaaggatcagctggttctttaagaggtcttggtgcaaatgttcttattacagaagtagatcctatttgtgccttacaagcttcaatggagggttacaaggttgtagatatgaatgattatattgaggaaattgatatatttgtcacagcaactggaaattttaatgtaattaaccatgatcaaatggttaaaatgaaaaatggcgcaatagtttgtaatattggacattttgataatgaaattgatgtagaaggattaaaaaaatatcaatgggaaaatatcaaaccacaagttgatcatataatatttccagatggcaaaagaattatattgctagctgaaggcagactcattaatttgggctgtgctacaggacatcctagttttgtaatgtcttgttctttcactaatcaagttatggcacaaatagagctatggaataatcataaaaaatatgaaaacaaagtatatgttctcccgaaagatctagatgaaaaagttgcaagattacatttagaaaaa

SEQ ID NO: 261342 - DNA, 661 bp, Unknown
  Bacterial polypeptide expressing nucleotide sequence isolated from the Sargasso Sea
gactgctgattataaagtaaaagatatttcattgagtgattggggcaggaaagaaatagcaattgctgaaactgaaatgcccggtttgatggcattaagagaagaatatggtaatactaaacctctggatggcgcaagaatagttggatgtctccatatgacgattcaaacagcagtattaattgaaacattagttcatttaggggcttcagtaagatggagctcatgcaacattttttcaactcaagaccaagctgctgcagctatagctgcaaaaaatattccagtttttgcttggaagggcatgaatgatgaagagttttggtggtgtatagagcaaactttatcaggaccaaataattggaagcctaacatgattttagatgacggaggtgatgcaactggaattattcatgaaaaatttccagaaatgttagaagaaattagaggtttatcggaagaaacaactaccggagtgcaccgtttaaaagaaatggaaaaagaaggtaaattaaaagtgcctgcaattaatgtaaatgactctgttaccaaatctaaatttgataatttatatggttgtaaagaaagtttagttgacggaattcgcagaggaacagatgtgatgatggctggaaaaatagctgtagttgctggttatgga

SEQ ID NO: 261343 - DNA, 831 bp, Unknown
  Bacterial polypeptide expressing nucleotide sequence isolated from the Sargasso Sea
tatgaaaaataaaacactaacagaatatgtcccatataaggtaaaagacataagtcttgcggaatggggcaaaaaagaaattaaattagcagaggctgaaatgccaggcctaatggcacttagggctaggcttaaaaaagaaaagcctctaaaaggagcaagaattgcaggatgtctgcatatgacaattcaaaccgctgttttaatagaaacattaatagaccttggagctgaagttacctggagttcatgtaatattttctcaacacaagatcatgctgctgctgctatagcatcaatgggaattcctgtatacgcttggaaaggaatgaatgaaaaggaatttaactggtgtattgagcaaacattattttttggagagaaaaaagaaccattaaatatgattcttgatgatggaggagatttaactaatatggttcttgatcaatatcctgaacttgttccaggaataaaaggtctttctgaagagacaactactggagttcataggctatacgagagaatgaaaactggacagttaccccttcccgcaattaatgttaatgattctgtaactaaatcaaaatttgataataaatatggttgtaaagaaagtgcggtagatgcaattagaagagctaccgatattatgatagcaggtaaaagagttgttgtttgtggttatggtgatgtagggaaagggaccgcagcttcttttagaggagctggtgcaattgtaactattacagaaattgatccaatatgtgcactgcaagcatcaatggatggttatgaggtaaaaaagcttaatacggttgttaaagatgcaga

SEQ ID NO: 261344 - DNA, 791 bp, Unknown
  Bacterial polypeptide expressing nucleotide sequence isolated from the Sargasso Sea
aaaaaaaaataaattattagtaccggctattaatgtaaatgacagtgttacaaaatcaaaatttgataatttgtacggatgtagagagagtttagttgatggtattagaagagcgactgatattatgctttcaggtaaagttgcagttgtctgtggatacggtgatgttggtaaagggtctgctgctagtttaagaaatggtggcgctagagtaatggtaactgaaattgatccaatttgcgccctacaggcctctatggaaggatatgaagttgttaaaatagaagatgttttgaaaaaaggagatattttttgtacagcaaccggaaatgtagatgttattacattagaacatatgagaaaaatgaaagatagagcaattgtatgtaatatcgggcattttgatagtgaaatacaaattgatgcattaaaaaattataagtgggatgaaattaaaccacaagttgacgaagttcaatttccagatggaaaaaaattaattgttttatcaaaaggaagattagtaaatttaggaaatgcaacggggcatcctagctttgttatgagcgcatcttttacaaaccaagttttagctcaaatagaactgtggaaaaaagctaaatcatataaaaataaagtatatgttttacctaaagaacttgatgaaaaagttgcagaattgcatttaggaaaattaggatctaaattaactaaattatcaaaaaaacaagcaaaatatattaatgtaaatgaaaatggtccttttaaaccgggctactacagatattaaa

SEQ ID NO: 261345 - DNA, 481 bp, Unknown
  Bacterial polypeptide expressing nucleotide sequence isolated from the Sargasso Sea
atggttatcgcaaattcagttaaaacctctacaccaaatttcgtaattactgatatctctttatcagattttggtcgtaaagaaattaaaattgccgaaacggaaatgcctggattaatggcacttagagataaatatcaatctgaaaaaccactaaaaggtgcaaaaatagctggaagtcttcatatgactattcagacagcagtcttaatagaaactcttgttgatcttggtgcagaagttaaatgggcttcatgcaatattttttcaactcaagatcatgcggctgcagctattgcagatcaaggaatttctgtatatgcaaaaaaaggtgagactcttgatgaatattggcaatatacccactatatccttgattggggttcagagtctccaaatatgattcttgatgatggaggagatgcaactggcttgttgatactcggtagtaaagcagaaaaagatttatctgttttagata

SEQ ID NO: 261346 - DNA, 725 bp, Unknown
  Bacterial polypeptide expressing nucleotide sequence isolated from the Sargasso Sea
taatctatatggatgtagagaaagtctagttgatggtataaaaagagctacggatgttatgatgtcaggaaaagtagctatagttgcaggttttggcgatgttggtaaaggaagtgctgcatccctaagacaaagtggagccagagtaatggttactgaaactgatccaatttgtgcacttcaagcagcgatggaaggatatgaagtagttctaatggacgaaatgataggacatgcagatattgttgttactgccactggcaacaaggatattgttacagcagatcacatgagagctatgaaagataggtctatactttgcaatattggacactttgataatgaaatacaagtagaggcattaaaaaattataagtgggatgaaattaaacctcaagttcatgaaataacatttccagataataaaagaattattttgttagcagaaggtagattggtaaatttaggttgcgcaacaggccatcctagttttgtaatgagtgcatcattcacaaatcaagttacagcccaaatagaattatggaataattcagaaaaatatgaaaaaaaagtatacgtgctgccaaagcatcttgatgaaaaagtagcaagacttcatttagaaaaagttggtgcaaaattaacaaaattatctgaagatcaagcagattatataagtgttaaaacagaaggaccttacaaaccagatgcctatcgctactaaa

SEQ ID NO: 261347 - DNA, 337 bp, Unknown
  Bacterial polypeptide expressing nucleotide sequence isolated from the Sargasso Sea
acctatcaaacctcaagttgaccaatatacgttcccatctgggaactctatttttcttcttgctgagggccgattggttaacctaggatgcgctactggccacccttcttttgttatgagtaattcatttactaaccaagccttagctcaaatagacctttgggaaaaagagtatgaaataggtgttttcacactgccaaagcacttagatgaggaagtggcccgtctccacttagatgctttaggtgctcgtttaactgttttaagcaaagaccaatctgagtacatagggattccgatagaaggcccgtataaatctgatttatatcggtattaa

SEQ ID NO: 261348 - DNA, 649 bp, Unknown
  Bacterial polypeptide expressing nucleotide sequence isolated from the Sargasso Sea
atgacagactataaagttaaagatattaatgaagctgaatttggtagaaaagaaatttcactagctgaaacagaaatgccaggcttaatggctcttagaaaagaatataaaggcaaaaatcctttgaagggtgctagaatagttggatgccttcatatgacaattcaaactgcagtattaattgagactttagtcgagcttggtgcagaggttagatggtcatcttgcaacatattctcaacgcaagatcatgcagctgcagctatagctaaagctggtattccagtatttgcttggaaaggcgaaaccgaggaggaatattggtggtgtgttagacaaactatcgaaggtaagaaagattggaaacctaacatgattttagatgatggtggtgatcttacggctttaatgcataaagattacaaagaattaatgaaaaatattaagggtttatcagaagaaacaacaactggtgtattggcacttaagaaaatggaacaagaaggtacactcttagtacctgctatcaatgttaatgactcagtaacgaaatcaaaatttgataacctatatggttgcagggaaagtttagtagatggaattaaaagagcaacagatgttatgatgtcaggtaaagttgcaatagtag

SEQ ID NO: 261349 - DNA, 511 bp, Unknown
  Bacterial polypeptide expressing nucleotide sequence isolated from the Sargasso Sea
gatggacgaaatgatcaaggaagcagatatagttgtaactgctaccggaaataaagacattgtaactgcagaccatatgagagatatgaaagatagagcaattttatgtaacattggtcacttcgataatgaaattcaggttgatgcactaagaaattataaatgggacgagatcaagccacaagttcacgaaatcacattccctgatgaaaaaagaattattttattagctgagggaagactagttaatttaggttgtgctactggtcatccaagttttgtaatgagtgcttcttttacaaatcaagtaacagcacaaatcgaattatggaataattcagaaaattacgaaaaaaaagtttatgtgcttccaaagcatttagatgaaaaggttgcgcgtctccatttagaaaaggtaggagctaaacttacacaattatcaaaagatcaagctgactatattagtgtaactccagagggtccttataaacctgaagcttatcgatactaa

SEQ ID NO: 261350 - DNA, 510 bp, Unknown
  Bacterial polypeptide expressing nucleotide sequence isolated from the Sargasso Sea
tggatgaagcaattagtaaagcagatatagttgtaactgcgactggtaataaagatattgttacagctgaccatatgagagatatgaaggatagagcaatcttatgtaatatcggacatttcgataatgaaattcaggttgaagctttgaaaaattacaaatggactgaagtaaaaccccaagtacatgaaattgaactacctagcaaaaaaagaataattttattagcagagggtagattagtaaatttgggctgtgctactgggcatccaagttttgtaatgagtgcttctttcacaaatcaagttattgctcaaatagaactatggaataatcataaaaattatgaaaacaaagtttatgttttaccaaaacatttagatgagaaagtagccacacttcaccttaaaaaagttggtgctaaattaactaaactttctaaagatcaagcagattatatcagtgtaggggtagagggaccttttaaacctaatgcctatcgctactaaa

SEQ ID NO: 261351 - DNA, 751 bp, Unknown
  Bacterial polypeptide expressing nucleotide sequence isolated from the Sargasso Sea
gcaactttatatattatactgggtgctaaagcagaaagtggtgaacaaattttacccaaccctgctaatgaagaagaagaggctcttaaggcacaaattttatccagacttgaaagttctccaggatggtttactaaagttaaaaatagtataaaaggagttacagaagaaacaactactggagttcttagattatatcaaatggcagaaaaaggtgatcttcctttcccagcaattaacgtgaacgactcagttacaaaatctaaattcgataatctttatggatgtagagaatctctggtagatggcattagaagagccactgatgtgatgttatctggtaaagtggctgtggttgcaggctatggtgacgttggcaaaggatctgctgcttctcttcgtcaaggtggggctagggtaattgtaactgaaattgatcctatttgtgcattacaagctgcaatggaaggatacgaagtgtgttctatggaagaggcatgctctagaggtgacatatttgttacagcaactgggaataaagatgttatcactgtggatcatatgagggaaatgaaagacagagcaattgtgtgtaacattggtcactttgattcagaaattcaagttgaatcacttcaaaatatgaaatggtcagaggttaagccacaagtggatgaggttgagtttcaagatggtaaacgtttaatagttttagcaaaaggtagattggtaaacctaggatgtgctactg

SEQ ID NO: 261352 - DNA, 820 bp, Unknown
  Bacterial polypeptide expressing nucleotide sequence isolated from the Sargasso Sea
tataaagaattattaaaaaatattagaggagtttcagaagagaccactactggagttttagctctaaaaaaaatggaaaaaaataatcagcttttaatacctgcaataaatgtaaacgatagtgtaactaaatcaaaatttgataatctgtatggttgtagagaaagtcttgttgatgggattaaaagagctacagatgtaatgatgtctgggaaagttgcaatagttgcaggatttggtgatgttggcaaaggtagtgctgcttcattaagacaagcaggcgcgagagtgatggtgacagaaactgatccaatttgtgcgttgcaagctgccatggaaggttatgaagtagtgttaatggaagatgcaattaaatatgctgatattgtcgttaccgcaactggaaacaaagatattgttacagcagaccacatgagagagatgaaagatagggcaattctctgcaacattggtcacttcgataatgaaattcaggttgatgcactgaaaaattacaagtggaacgaaattaaaccacaagtccatgaaatagaattaccaagcaaaaaaagaattattttattagcagagggaaggcttgtaaacttaggatgtgctacaggtcacccaagttttgttatgagcgcctcatttaccaatcaagttattgctcaaatcgaattgtggaataactacatgaaatacgaaaaaaaagtttacgtattaccgaaacatttagatgaaaaagttgccatgctacatctagaaaaagttggagcgaaattaaccaaaatgtcaaaagatcaagcagattacatta

SEQ ID NO: 261353 - DNA, 757 bp, Unknown
  Bacterial polypeptide expressing nucleotide sequence isolated from the Sargasso Sea
gcgagaatattaggttgtctgcatatgacaatacaaacagcggttttaattgaaactcttgtcgacttaggtgcagaggttagatggtcttcgtgtaacatattttcaactcaagaccatgcagcagcagcaattgctaaagccggaataccggtatttgcatggaaaggtgaaacagaagaagaatattggtggtgtgttaaacaaacaattgaaggtaagaaagattggataccaaatatgatcttagacgatggtggagatcttactgctttaatgcacaaagaatataaagatttattaaaaggaataaagggattaagtgaagaaacaacaactggtgtgttagctttaaagaaaatggaagaacaagggacgctactagttccagcgatcaatgttaatgactcagtaacaaaatcaaagtttgataatttgtatggatgtagagagagcttagttgatggaattaagagagcaactgacgtaatgatgtcaggaaaagttgcaatagtagcaggatttggtgatgttggaaaaggaagtgcagcatcattgaggcaaagtggagctagagtaatggtaacggaaactgatccaatttgtgctcttcaggcagctatggaaggctatgaggtcgttttaatggatgaaatgattggggaggcagatattgtagtaactgcaactgggaataaagatgtcgtaacagctgatcatatgagagctatgaaagatagatcaattttatgtaata

SEQ ID NO: 261354 - DNA, 687 bp, Unknown
  Bacterial polypeptide expressing nucleotide sequence isolated from the Sargasso Sea
aacgatcattagatgtaatggttgcaggaaaaacagtggtggtgtgtgggtacggcgatgtaggtcgtggatgtgctcagtctatgcgtggatatggagctagagtcataatcactgaaattgaccctatctgtgctctccaagcagcaatggaaggttttgaagtaaccacactagaaaatgcacttagtgaaggtcatatttttgtaacgactacaggtaataaggatgtgataagaaaagaccatatgtattcgatgagagaccaagcaatagtttgcaatatcggtcattttgataatgagatacaagtgaatgcattgaacgatgatgaaaaggttattagagaaataattaagcctcaggttgatcgctatcaatttccagatggacatcaagttttcctccttgctgaaggaagattagttaatttgggctgtgctacaggtcacccaagttttgtcatgtcaaactcattcacaaaccaggtcatggcacaaattgcattggctaaagatgctccagaaattggtgtttatatgctaccaaaggaattagatgaagaggttgcaagacttcatttggatcatttaggtgttactttgacagaattgacggatgagcaagctgactatattggtgtgccgaaagagggtccttataagcctgatcattatagatattaat

SEQ ID NO: 261355 - DNA, 809 bp, Unknown
  Bacterial polypeptide expressing nucleotide sequence isolated from the Sargasso Sea
gatggagctcttgcatattttttctactcaagaccatgcagcagctgcagtagcagattccggggtaccagtattcgcctggaagggtgagtctgaggaagagttttggtggtgtattgaacagactatcactggcccaaacaactggacccccaatatgattttggatgacggaggcgatctgacaaagctcatgcatgagaaataccccaccctaatcgcaaacgtgaaaggggtttccgaagagacaacaactggtgtccatcgactgtatgaaatggagcatgatggctccttaaaagtcccagcctttaacgttaacgattccgtgactaagtctaagttcgacaatttatatggctgccgagagagtttagtagacgggattcggcgggccacagacgttatgttatctgggaaggtagccgtggtatgcggttatggaggcgtcggcaaaggctccgcggagtcccttcgatcggctggcgctcgggtcctcattactgagattgaccccatttgcgccctgcaagcagcgatggaaggatacgaggttgtagacatgagtgtcgctgccgcccgaggggatatttttgtaactgcaactggcaatgtggacgtgattactctggaccacatgcgcgagatgaaagatttggccataatttgcaatattggccacttcgactcagaaattcagattgattctctatcaaaccttgaatggacagaaataaagcctcaggtggaccaggtgacttttcctgatgggaaacgactaatagttctagctcaagggcgcttggtga

SEQ ID NO: 261356 - DNA, 763 bp, Unknown
  Bacterial polypeptide expressing nucleotide sequence isolated from the Sargasso Sea
aagggtgttaccgaggagaccacgacaggtgtgcaacgtctctaccaaatgcaaaaaaaaggcgaactaccttttcctgcaattaatgttaatgactcggtaactaaatcaaaatttgacaatctttacggctgtcgtgaatctttagttgatggtataaaacgtgcaaccgacgttatggttgccggaaaaattgctttggtgcttggttacggtgatgttggtaaaggttgtgcccagtcacttcggggtcttggtgctactgtatgggtaacagaaattgatccaatttgtgccttacaggcagctatggaaggttaccgcgttgttaaaattgatgatatatgcgacaaggttgatatttttgtcactgctacaggtaattttaatgttattcaacatgaccatatgctcaaaatgaaagaccaagctattgtgagtaacatcggacactttgataatgaaattgatgtggcgagtattgaaaaatacgagtgggtggaaatcaaaccacaggttgaccatgttatatttccagatggcaagcgaattatactattagcaaagggacgtcttgtaaatttgggttgtgcaacaggtcatccaagctttgtgatgtctaattcattcaccaatcaggtgttagcacagattgagttatttacttctaatgaaaattataaaaaggatgtttatgttcttccgaaacatcttgatgaaaaagtagctcgattacacttggaaagaattggtgcgaacttaa

SEQ ID NO: 261357 - DNA, 784 bp, Unknown
  Bacterial polypeptide expressing nucleotide sequence isolated from the Sargasso Sea
cgtgaatatggccgattaaaaccattacaaggggccagaattgctggttgtttacatatgaccattcaaacggctgttttgattgaaacactgacagagctaggggccgaggttcgttggtcttcttgtaatattttttctactcaagaccacgctgctgcagcaatcgctgcaacaggggttcctgtatttgcttggaagggaatgaatgaggaggagtttgattggtgtattgaaaagactcttcggtggcctgatggaaaggggctaaatatgattttggatgatggtggggatttgaccaatatggttcatgataaatgtccagagcttatttctgaaattaggggactttctgaggagacgacgacaggagtgcatcgtttatatgagaggcaaagaaaagggacactgaagatgccggcgattaatgttaatgactctgttacaaagtcaaagtttgataatttatatggctgtcgtgagtcacttgttgatggaattaaaagagcgacagatgtcatgattgctggaaaaacttgtgtggtggccggttatggtgatgtaggaaaaggttctgcaggctcctttaaggggcttggcggccgtgtggttgtcacagagattgaccccatttgtgctttacaggcagcaatggaaggttatgaagtgatgaagatggaggacgcagcaaagataggggatatttttgtaacaacaacaggttgtgtagatgtcattaatggcagtcacttagatgcaatgaaggacggggcgattgtct

SEQ ID NO: 261358 - DNA, 721 bp, Unknown
  Bacterial polypeptide expressing nucleotide sequence isolated from the Sargasso Sea
ttgtatggatgtagagaaagcttagttgatggaattaaaagagcaactgatgtaatgatgtcaggtaaagttgctatagtagctggtttcggtgacgtgggtaaaggaagtgctgcatctttaagaatgagtggagcaagagtaatggtaactgaaacagatcctatatgtgcactgcaagcagccatggaaggttacgaagttgttagaatggatgatatgataggggaagcagatataatttgtactgctactggaaataaagatatcgtaacagcagatcacatgagagcaatgaaggatagagcaattctttgtaacattggacactttgataacgagatacaagttgaagcattaaaaaattataaatgggacgagattaaacctcaggtacatgagattacttttccagacgataaaagaattatacttttagctgaaggaagactagtgaatttaggatgtgcgacaggacatcctagctttgttatgagtgcatcgtttacaaaccaagttaccgcccaaattgaactttggaataactcagcaaattatgaaaaaaaggtttatgtgcttcctaaacatttagatgaaaaagttgcaatgcttcatttagaaaaagtaggtgcaaaacttacaaaactttcaaaagatcaagcagattatataagcgttaaacaagaaggaccttataaacctgacgcctatagatactagc

SEQ ID NO: 261359 - DNA, 841 bp, Unknown
  Bacterial polypeptide expressing nucleotide sequence isolated from the Sargasso Sea
ttgatactcggtagtaaggcagaaaaagatttatccgttttagataatcccagtaatgaagaagaaattgctttatttaagtctattaagtctaaattgcaagaagataatgaattctattcgagaattaagagtaaaatcattggtgttactgaagaaactactactggagtggcaagactttatcaattgcaaaagcaaaatgcattaccttttcctgcaataaacgttaatgattcagtaaccaaaagcaaatttgataatctatatggctgccgagaatctttagtagatagtattaagcgtgcgactgatgtgatgattgctgggaaggttgctttagttatgggatttggtgatgtaggcaaaggttcagctcagtcattaagaggactgggtgcaattgtcaaagttgctgaagtcgatccaatttgtgctcttcaagcagcaatggaaggttttagcgtggttaaactagacgatgttgttgaagacatcgatatatttgttacagccactggtaactatcaggtcataacacactcaaatcttgtaaaaatgaaagatgaggcgatagtttgcaatattggacatttcgataatgaaattgatgtggcttcattgaaagattatccttgggacaatattaagcctcaggttgatcacattactttaccgagtggaaacaaaattattcttttagctgaaggtagattagttaacttaggttgtgctactgggcatccaagttttgttatgagtaattcttttacgaatcaggtgctagcccaaattgaacttttcaacaagtcagaacaatatagtaataaggtttatgttt

SEQ ID NO: 261360 - DNA, 585 bp, Unknown
  Bacterial polypeptide expressing nucleotide sequence isolated from the Sargasso Sea
tatgagtaaggttatagaaaaaattggaccagattacaaagtagcagatatttctttagctgattggggtcacaaagaaatgagaattgctgagactgaaatgcctggattaatggcattaagagaaaagtatggaaaaggtcagccattgaaaggcgcaagaatagtaggctgtttgcacatgacaattcaaacagcagtattaattgaaactttagttgaccttggagcaagtgttcgatggtcatcttgtaatatttattcaacacaagaccacgcagcagcagctatcgcagaaaaaggcattccagtgtttgcctggaaaggtgagacggagaaggagtatctttggtgtatagatcaaaccattattggagacccaggatggaaaccaaatatgattcttgatgatggtggtgatttaacatcaataattcatgaaaaatatccagagcttcttttggaggtaaagggcctttcggaagaaacaacaacgggtgttcatcgtttatatgaaatggttaaaaagggagagctcaaagttcctgcttttaatgtaaatgactcagtaacaaaatcaaaatt

SEQ ID NO: 261361 - DNA, 773 bp, Unknown
  Bacterial polypeptide expressing nucleotide sequence isolated from the Sargasso Sea
tcttttaaagtcggttaagggagtttctgaagaaactacaacgggtataaaggcattaaaaaaaatggaatccgaaaaaaaacttatgatacccgcaatcaatgttaatgactcagtaactaaatctaaatttgataatttatatggatgcagagaaagtttagttgatggaatcaaaagagccacggatgttatgatgtcaggaaaaaccgccattgttgcgggatttggtgatgttggtaaaggaagcgcggcctcactaagacaaagtggagctagagtgatggttacagaagctgaccctatatgtgccttacaagcagctatggaaggatacgaggttgttttgatggatgaggcaatttctggcgctgatatagttgtaacagcaacaggtaataaagatatagttactgcagatcacatgcgtaaaatgaaagatcgttcgatattatgcaatatagggcactttgataatgaaattcaagttgaagctttaaaaaactataagtggaccgaaataaaacctcaggttcatgaaatagaatttcctgataaaaaacgtatattgcttttagccgaaggtagattggttaacttaggatgcgcaacaggccatccaagttttgtaatgagtgcatcatttactaatcaaacaatagctcaaatagaactttggaataatagtgaaaaatatgaaaataaagtttatgttttaccaaagcatcttgatgaaaaagtggccttgcttcatttaaacaaagtaggagcta

SEQ ID NO: 261362 - DNA, 345 bp, Unknown
  Bacterial polypeptide expressing nucleotide sequence isolated from the Sargasso Sea
catggaagattataaagtaaaagatatttcacaagctgattttggaagaaaagaaatttctatcgcagaaagtgaaatgccaggattgatggctttaagagaagaatattcaaaaaacaaaccccttaaaggtgctaagattattggctgtttacatatgacaatacaaacggctgtactaatcgaaacattagttgatttaggagctgaagtaagatggtcatcttgtaatattttttcaactcaagatcatgctgccgctgctattgctaaagcaggtattcctgtctatggctggaaggtgaaactgaagaagaatacttatggtgtattaaacagactatc

SEQ ID NO: 261363 - DNA, 804 bp, Unknown
  Bacterial polypeptide expressing nucleotide sequence isolated from the Sargasso Sea
taaaaaaaatggaagagcaaggcactcttttagtacccgcaataaatgtcaacgactcagtaacaaaatcaaaatttgataatttatatggctgcagagaaagcttagtagatggtattaaaagagctacagatgttatgatgtcaggtaaagttgcaattgttgctggttttggagacgttggaaaaggaagtgctgcttctttaagacagagtggagcaagggttatggttacagaaaccgatcctatttgtgcgcttcaagcagcaatggagggttatgaagtagttttaatggatgagatgattggtcaagctgatatagttgtaacagcaactggtaataaagacatagttacagcagatcatatgagagctatgaaagatagatctatattatgtaatattggccactttgataatgaaatacaagttgaagctttaaaaaattataggtgggatgaaattaaaccacaagttcacgaaatcacttttccagataataaaagacttattttgttagctgaaggaagacttgtaaaccttggatgtgctacaggccacccaagttttgtaatgagtgcatcgtttacaaatcaagttactgcacaaatagagctatggaataattcagacaagtatgaaaataaagtttatgtattaccaaaacacttagatgaaaaagttgcgagacttcatcttgaaaaagttggtgcaaaactaactcctttatcaaaagaacaagctgattatataagtgttaaaactgaaggaccttacaagccagacgcctacagatattaga

SEQ ID NO: 261364 - DNA, 871 bp, Unknown
  Bacterial polypeptide expressing nucleotide sequence isolated from the Sargasso Sea
tcgttgggcaagttgtaatattttttcaacacaagatgaagctgcagctgcaattgcaaaaactaaaactccagtttttgcatggaaaggtgaaacacttgaagattattgggaatgtacactacaagctttgacttttaaaaataatttaggtccaaatcttattgtagatgatggtggagatgcaaccctactcattcataaaggatatgagctagaaaaacattataatgaaaataaaaaaattccaaaaattactacaaaaattgaggaagagatcgttattgaaaaacttttaagaaaagtacataaaaagaatccaaatcattggcacagtattgtgcctgaaattataggagtttcagaagaaacaacaacaggtgtagctcgtcttcaacaaatggttgaagatgcttcattgctgtttccagcatttaatgtaaatgatgcagccacaaaatctaaatttgacaacctctatggatgtagagaatctttagcggatggtattaagcgctcgactgaaataatgcttgctggaaaaactgtggttgtttgtggatatggagatgttggtaaaggttcagcacaatctatgaagtcttatgggtgtaaagtaatagtaacagaaattgacccaatatgcgctcttcaagcagcaatggaaggatttgaagtcagaagattagaagatgttttaagaaggggaaatatttttgtaacaactacaggtaataaagatataatcacattaaagcatatgaaaaaaatgaaagatcaagctattgtttgtaacattggacattttgataatgaaattcaagtagatgcattaaataaatcggaagctaaaagagataaaataaaaccc

SEQ ID NO: 261365 - DNA, 764 bp, Unknown
  Bacterial polypeptide expressing nucleotide sequence isolated from the Sargasso Sea
tataaagttaaagatatatcacaagcagaattccggaagaaaagaaatctctttagcagagactgaaatgccaggactaatggcattaagaaaagagtataaaggaaaaagtcctctaaaaggtgcaagaattttaggatgtcttcatatgacaattcaaactgcagttcttatcgaaactcttgtagatttgggagcagaagtaagatggtcttcatgtaatattttttcaacacaggatcatgcagcagcagctattgcaaaggcaggcatacccgtttttgcgtggaaaggtgaaacagaagaagaatattggtggtgtgtaaaacaaacaattgaaggaaagaaagattggaaaccaaatatgatacttgacgatggtggtgatttaactgcgcttatgcacaaagattacaaagatttattaaaagatattaaaggactatctgaggaaacaacaacaggagtattagcacttaaaaagatggaagcccagggaacattgttagttccggcgattaatgtaaacgactcggttacaaaatctaaatttgataatttatatggttgtagagaaagtttagtagacggaataaaaagagcgacagatgttatgatgtctggaaaagttgctattgttgcaggatttggcgatgttggaaagggaagtgccgcttcattaagacaaagtggagcaagagtaatggtaactgaaactgatccaatatgtgctctacaagctgcaatggaaggttatgaagttg

SEQ ID NO: 261366 - DNA, 458 bp, Unknown
  Bacterial polypeptide expressing nucleotide sequence isolated from the Sargasso Sea
catcatccgagtcgagcatatggagaagatgctcgaccagtcgatcgtgtgtaacattgggcatttcgacaacgagatccagatagccgccctggaagattttccggggatcgggaaggaagagatcaagccgcaggtcgacaagtatacgttccctgatgggcgagcgattttcatcctcgctgaaggccgtctggtcaacttgggctgcgcgacagggcacccatcgttcgtgatgtccaattctttcaccaatcaggttctcgcacaaatcgatctttggaaatacgatcgggaggtcgacgtgtatcgactacctaagcatttggatgaagaggttgctaggctccacctcaagaagctcggtgtgaagcttacgacgctgtcggaggaccaggcagagtatatcggggtgaagttaggggggccgtacaagcctgatcactacaagtactaag

SEQ ID NO: 261367 - DNA, 844 bp, Unknown
  Bacterial polypeptide expressing nucleotide sequence isolated from the Sargasso Sea
tttccggaagagacaacaacaggtgttcacagactctaccagatggttgaagacggctcacttcttttccctgcaataaatgtcaacgattcagtcaccaagtcgaaattcgataatctgtatggatgccgggagtccctcgttgacggtataaagcgagccacagatgtgatgatttccggaaagacagcagtagtatgtggctatggagacgttggaaaggggtcagcacaagcactcaagtcacaaggtgcgaaggtgatagttactgaggttgatcctatttgcgcattgcaggcctccatggagggcttcaatgtacaaaccgtggaagaaacacttggagtggcagatatctatgtcacggctactggaaacagagacgtaatcacccttgagcatatggaatctatgaaggatcagaccattgtttgcaacattggacacttcgataatgagatacaggtagagaggttggaaacaagtaatgcttcccacaccaatattaaacctcaagtagacaaatacacctttgattccggaaatagcatattccttcttgcttctggtaggctagtaaatctgggttgtgccaccggacatccgagtttcgtcatgtccactagttttgccaaccagacactggctcagatagacttactggaaaataggggttcttatgagaataaggtatacacactacccaaaaagttggacgaagaagtagctaggctgcatttggacaaaataggcgccaaattaaccgtgctcaccaacgatcaggcagattatatcgacgtgcctgttcatggcccctacaagaagacagaatatagatactaat

SEQ ID NO: 261368 - DNA, 643 bp, Unknown
  Bacterial polypeptide expressing nucleotide sequence isolated from the Sargasso Sea
ggttatggatggtgtggtagaggtctcgcatcaagagcacaaggaatgggtgccagaacagttgtatgtgaagttgattcggttaaggctttagaagcaataatggataatcatgaagtaatgactatggaagaagcaagtaaaattggggatatatttgtgacggttactggtggtcttcatgcagtagataaagagcattttgaacttatgaaggacggagcaatagttgctaattcaggtcattttaatgttgaactgaacttagaggccctagaaaaaatgactgaaaatagaagaagggtacgagaaaatgttgaagaatacacccttgagacaggaaagcatgtaattgttttaggtgaaggaaggcttgtaaatttagctgctgctgaaggacatccgccgagtgtaatggatatgagctttgcaaaccaagctcttgcaagtgaatacatcgtaaagaatcataaaggatttaaaaacgaagtttacactttacctaaatcagttgaccaagaaatagcagctttaaaaattagatcctttggtaagaatttcgataaacttaaagccaaacaagaaaaatacttgaatagttgggaactgggtactggttcgtcacaggagggcctagaatgag

SEQ ID NO: 261369 - DNA, 902 bp, Unknown
  Bacterial polypeptide expressing nucleotide sequence isolated from the Sargasso Sea
gatggctttaagagaagaatattataataaaaaaccacttaaagatgctagaattattggttgtctgcacatgacaatccagacagctgtattaattgaaacacttgttgatttaggagcagaagtaagatggtcatcttgtaatattttttcaactcaagatcatgcggcggctgctattgctaaagcaggtattcctgtttatgcatggaaaggtgagacggaagaagaatacttgtggtgcatcaagcagactattgttggaaaatctgattggaaaccaaatatgttgttagatgatggaggtgacttaacagccattatgcataacgaacataaagaattaatgaaagatgttaaaggtgtttcagaggaaacaaccactggaattaaagcactcaacaaaatggaaaaagataaatctcttttagtgccagcaattaatgtcaacgattctgtaaccaaatcaaaatttgataacctatatggttgtagagaaagtttagtagatggcataagacgagcaacagatgttatgatgtcaggtaaaattgcaattgtagcaggttttggagatgttggaaaaggaagtgctgcatctttgagacaaagtggagcaagagtattagtcactgaagcagatccaatttgtgctcttcaagctgcaatggagggttacgaggtagttttaatggaagaagctataagtagagcagatatagttgtaaccgcaacaggaaataaagatattgtaaccgctgatcacatgagagagatgaaagatagagcaatattatgtaacattggtcactttgacaatgaaatacaggttgaagctttgaaaaattataagtggactgaagtaaaaccccaagttcacgaaattgaattaactagcggta

SEQ ID NO: 261370 - DNA, 686 bp, Unknown
  Bacterial polypeptide expressing nucleotide sequence isolated from the Sargasso Sea
catgactgataaacaagattttaaagtagcagatattggacttgctgagtttggaagaaaagaaatttctcttgcagaaacagaaatgccaggcttaatggctttgagaaaagaatacaatggtaaaaaaccattaaaaggctctagaatagttggctgccttcacatgacaattcaaacagcagttttaattgaaactttagttgatttaggtgctgatgttagatggtcttcttgtaatattttttcaacacaagatcatgccgctgctgctattgctaaagctggaattccagtatttgcgtggaagggtgaaactgaagaagaatattggtggtgtgtcagacaaactattgaaggaaaagaaggatggacaccaaacatgattctcgatgatggcggcgatctgactgcattaatgcataaagactataaagaactacttaaggatgtgaaaggtttatcagaagagactaccactggagtgttggcgctaaaaaaaatggaactagatggaagtttactagttccagcaattaatgttaatgattcagtaactaaatcaaaatttgataatctatatggttgcagagaaagtttagttgatggtatcaaaagagctactgatgttatgatgtctggaaaagtagcaattgttgctggttttggtgatgttgggaagggta

SEQ ID NO: 261371 - DNA, 801 bp, Unknown
  Bacterial polypeptide expressing nucleotide sequence isolated from the Sargasso Sea
tatgactgattataaagtaaaagatataaatttagccgattttggaagaaaagaaatttctcttgcagagaccgaaatgccaggtcttatggctttacgaaaagaatataaaggcaagaatccattggagggtgcaaagatattaggatgtttacacatgacaatacaaaccgcagttttaatcgaaactttggttgacctaggcgctgagtgcagatggtcatcttgtaatatattttctacccaagatcatgcagctgccgctatagcaaagtctggaacaccagttttcgcatggaaaggtgagaccgaagaagagtattggtggtgtgtaagacaaactattgaaggaaaaaaagattggaaaccaaacatgattttagatgatggtggagatctaacagctttaatgcataaagattataaacatctaatgaaagatattaaaggattgtcagaagaaacaacaacaggtgttctagctttaaaaaaaatggaaagcgagggaactcttttagtcccggccataaatgttaatgactctgttacaaaatcaaaatttgacaatttatatggttgcagggaaagtttagtagacggaattaaaagagcaacagatgtgatgatgtcaggaaaagttgctatagtagccggcttcggtgatgtaggaaaaggtagcgctgcatcgttaagacaggctggtgcaagagtaatgataacagaaacagacccaatttgcgcactacaagcggctatggaaggttatgaagtagtcttaatggatgacatgatccagcatgc

SEQ ID NO: 261372 - DNA, 712 bp, Unknown
  Bacterial polypeptide expressing nucleotide sequence isolated from the Sargasso Sea
tgtagagaaagtttagtagacgggataaaaagagcaacagatgtaatgatgtcaggtaaggtagccattgtagctggattcggagatgttggcaaaggaagcgcagcttcattacggcaagcaggtgcaagagtaatggttaccgagacagacccaatatgtgcgttacaagctgctatggaaggatacgaagttgttgttatggatgaagctataaaagatgctgacatagttgtaactgcaacaggaaacaaagacatagttacagcggatcatatgagaaatatgaaagacagagcaatactttgtaacattggtcactttgataacgaaatacaagttgaagcgttaaagaattataagtgggatgaaataaaacctcaagttcatgaaatagaattacctagtaaaaaaagaattatccttttagctgaaggtagattggttaaccttggatgcgctacaggacacccaagtttcgtgatgagtgcttcatttacaaatcaagtgattgctcaaattgagttatggaacaattctgataaatatgagaagaaagtttatgtgcttccaaaacatcttgatgaaaaggttgcaatgcttcatttagaaaaagtgggagctaaattaacaaagatgtcgaaagagcaagccgattatattagcgttaaaccatcaggaccatttaaaccagatacttatcgctactaaa

SEQ ID NO: 261373 - DNA, 349 bp, Unknown
  Bacterial polypeptide expressing nucleotide sequence isolated from the Sargasso Sea
aaaaactgaaataaaaccacaagttgatctttataaaattaataatggtgtagaaatcattgtgttagcagaaggtagactggttaatttaggatgtgctacagggcatcctagctttgtaatgagtaactcatttaccaaccaagtattggctcaaatagagctttggaaaaatcatgcgaattacgagaatgatgtttatactctacctaaacatcttgatgaaaaggttgctaaacttcaccttaaacatcttggagtcgagctggaagatttatccgaagaccaagcaaaatatataggagttaaaaaatcaggtccttacaagcccgattattataggtattaa

SEQ ID NO: 261374 - DNA, 808 bp, Unknown
  Bacterial polypeptide expressing nucleotide sequence isolated from the Sargasso Sea
atgagtgaagattttaaggttaaagatataagtttagctgattttggtgataaagaaattgcaatagctgaaacagaaatgcctggtttaatggcattaagagaagagtatggtgattctaaacctctagatggggcaagaattgtaggttgtttgcatatgacaatacaaactgcggttttgatagagacccttgtatttttaggtgctactgtcagatggagctcatgtaatattttttctactcaagatcatgctgctgcagcaatagctgccaaaggcattccagtatttgcttggaaaggaatgacagaagaggaattttggtggtgtattgagaaaacattagaaggcccagatggatggaaaccaaatatgattttagatgatggtggagatgctacaaaaataattcatgaaaagtatccaaagatgttggaagaaattttaggtttatctgaagaaacaaccaccggtgttcatcgattgaaagaaatggaaaaaaacggacagcttaaaattcctgctataaatgtaaatgattcggtaactaagtctaaatttgataacttatatggctgtaaggaaagtttagtagatggaataagaagaggtacagatgtaatgatggctggtaaaattgcggtagttgctggttatggagatgttggcaaaggttctgcagcaagcttaagaggtgcaggtgcacgtgtttgtgtcactgaaatagatccaatcaatgctcttcaagcagcaatggaaggttacgaagttgttacaatggatgatgcttgtaaatacgggtgat

SEQ ID NO: 261375 - DNA, 376 bp, Unknown
  Bacterial polypeptide expressing nucleotide sequence isolated from the Sargasso Sea
atggaaaacaatcaaagcagtccagaaacgaattttagtgattataaaattgcagatttatcactctcagatttgggacgcagaaaaattggtatcgcggaaggagaaatgccgggtttgatggcgttgagaaaggaatacgggaacgaaaagcctcttgccggggcaaggattacgggttcattgcatatgacggttgaaactgcagttttgatcgagactttagtagaattgggggctgaagtacgctggtcttcctgtaatattttttctacccaggatgaagctgctgcggccattgctgcagcaggaattccggtttttgcatggaaaggagagaccgaggaagaatactggtggtgtatgaacaaaccct

SEQ ID NO: 261376 - DNA, 321 bp, Unknown
  Bacterial polypeptide expressing nucleotide sequence isolated from the Sargasso Sea
aaatagaattaccaagcaaaaaaagaattattttattagctgaaggaagattggttaatttaggttgtgctacaggtcacccaagttttgttatgagtgcctctttcactaaccaagtaattgcacaaattgaattatggaacaactctgataaatatgagaaaaaagtttacgttttaccaaaacatttggatgaaaaagttgcaatgttacatttagggaaagttggagcaaaattgacaaaaatgtcaaaagaacaagccgactacataagcgttaaacaatccgggccatttaaaccagatacgtatcgctactaat

SEQ ID NO: 261377 - DNA, 451 bp, Unknown
  Bacterial polypeptide expressing nucleotide sequence isolated from the Sargasso Sea
tgtcactgctgaccacatgagaaaaatgaaagatcgctccatactttgtaatattggtcattttgataatgaaatccaggtggaagctctcaaaaattataagtggactgaaattaaaccacaagtgcacgagatagaatttcctgataaaaaaagaatattgcttttagccgaaggaagattagttaatctaggctgtgcgacgggtcatccaagttttgttatgagcgcgtcatttactaatcaagtaattgcacagattgagctttggaaaaattctgaaaaatacgagaaaaaagtttatgttttacctaaacatttggatgaaaaagttgcgatgcttcatttaaataaagttggagccaaattaacaaaacttacaaagggtcaggctgaatatataagcgttgatactaatggcccatttaaatctgatagttatcgctactag

SEQ ID NO: 261378 - DNA, 328 bp, Unknown
  Bacterial polypeptide expressing nucleotide sequence isolated from the Sargasso Sea
ttgaccatatttgtctttccggatgggaaaagaattatcctgcttgctgaaggtcgcttggttaatttagggtgtggcacgggtcatccaagttttgtcatgtctaattcattctgcaatcagactcttgctcaaattgaactattcaaaaacagctcgaattacgataaacaggtctatgtccttccaaaatcacttgatgaaaaagttgcaaaacttcatctggacaagattggagctaaattaacaaaactgaccactgaacaggcggaatatattggtgttaaagagtcaggaccctacaaacctgaacattaccgatactgat

SEQ ID NO: 261379 - DNA, 418 bp, Unknown
  Bacterial polypeptide expressing nucleotide sequence isolated from the Sargasso Sea
atggctgaaacagcaaaagaaaataaaatagatttgatgaacgattacaaagtcgctgatatctctctggctgaatggggcgagaaggaaatcaaaattgcagaaactgaaatgccaggcttaatgagcatcagagaagaattcggaaaggaaaagcctctgaaaggtgcaagaattgcaggctgtcttcatatgacgattcaaacagcagtactcattgaaacattgattgaacttggtgctgatatcaggtggtcttcttgtaatatcttctcaacacaagatcatgctgcagctgctctagcagctaaaggtattccaatatttgcatggaaggatgagagcgaagaagaatactggtggtgcgtagaaaagacaatcaacggtccaggcggttggacgccaaatcttatacttg

SEQ ID NO: 261380 - DNA, 924 bp, Unknown
  Bacterial polypeptide expressing nucleotide sequence isolated from the Sargasso Sea
aaaaatatcccagtatatgcatggaaaggaatgaatgaagatgaatttaattggtgtattgagcaaactctctttttcggaaaagatcgtaaacctttaaatatgattttagatgacggaggagatttaacaaatatggtttttgataaatttcctgaactaattcctgagattaaaggtctttctgaggaaacaactacaggggttcttagattgtatgaaagaatgaacaaagaaaaattacccattcctgccataaatgttaatgactcagttacaaagtctaaatttgacaataaatatggttgtaaagaaagtgccgttgatgctgtaagacgtgccactgatattatgctagctggtaaaagagttattgtttgtggatatggggatgttggaaaaggaactgctgcatcatttagaggagcaggagcaattgttacaattactgaaattgatcctatttgtgctcttcaagctgctatggatgggtttgaagttaaaaagctttcaaatgttattggatctgctgatatagttgttactgcaacaggcaacaaagatattattgaaaaggagtctttcctggcactaaaggacaaagctatagtttgtaatattggtcattttgacaatgaaattgatatgtcatggttaaataaaaactattcgcatactaaaactgaaattaaaccacaagttgatttatatacattagaaaacaataaacaattaattattttggcagaaggaaggttagttaatttgggatgtgcaactggtcaccctagtttcgttatgagtacatcatttacaaatcaggttttggcccaaatagaactttggaatcactcaaaaaaatatgaaaataaagtttatatgctacccaaacatttagatgaaaaagttgcctctcttcatctt

SEQ ID NO: 261381 - DNA, 835 bp, Unknown
  Bacterial polypeptide expressing nucleotide sequence isolated from the Sargasso Sea
gccctggtcctgagatcaggcggagcccaggtttctgtcaccggaagtaatcctgaatcaaccaaagacgatgtcgtggcggctcttgccgaagaaggattgagagtctatgccaggcatggggcagaacccagtgaaatgcggaaatacatggagattgcgcttgatttaaaaccacatctggtgatcgatgatggaggagatctggtggaaattcttcatgaaacgcgaaccgacctgttggaaggaatgttaggtgcctgcgaagagacgaccaccggtgtgctgcgagcgcaggcaagggccaaggctgctcagcttcaatttccggtgatgctcgtcaatgaagcccgctgcaaatatctctttgataacgttcacggtaccggacagtctgtctgggatgcagtgatgcgcagtacgaatcttgttctagccgggaaaacggtggtggtggcaggctacggatggtgtggaagaggttgtgcgttgagggctcaggggatgggtgcatcggtgattgtctgtgaagtggaccctgtcaaggcttgtgacgcattgatgaacggttgccgtgtgatgcccttgatggaagcctgtaaagaggctgatgtggttttaagtgtcaccggggtacgccacaccataagaaaagagcattataatgtgattaaagataatgcgcttttggccaacgcaggacacttttgggaggaaatcgacgtagaggggctgtccgtgatgtcaaaggacagaaagcagatgagaacaaacgtggaagggtttcttttgcaggatggacgttggctgaatttattgggaaatggaaacatcg

SEQ ID NO: 261382 - DNA, 502 bp, Unknown
  Bacterial polypeptide expressing nucleotide sequence isolated from the Sargasso Sea
gcaataagtaatgctgatattgtggttactgctactggtaataaagatattgtaacagctgatcatatgagaaaaatgaaagatcgctcaatactatgtaatattggacactttgataatgaaattcaagttgaagctttaaaaaactataaatggaatgaaattaagccccaagttcatgaaatagaatttcctgataaaaaaagaattttacttttagctgagggacgtctagtcaacttaggatgtgcaacaggtcacccaagttttgttatgagtgcatcttttactaaccaaacaattgcacaaatagaactatggaataattctgataaatatgaaaacaaagtttatgttcttccaaaacatctagatgaaaaagttgcaatacttcatctgaaaaaagttggtgcaaaactaaccaaattatcaaaagatcaagctgactatattagagttgatgttaaaggcccattcaaaccggatacatatcgctactaat

SEQ ID NO: 261383 - DNA, 499 bp, Unknown
  Bacterial polypeptide expressing nucleotide sequence isolated from the Sargasso Sea
atgagtaaagattataaagtaaaagatatttcgcaagcagattttggtagaaaagaaatttctctcgctgagactgaaatgcctggtcttattgctcttcgtaaggaatacaaaggtaagaaacctttaaagggagcaaaaattttaggttgtcttcatatgacaattcaaacagctgttttgattgaaactttagtagaactaggagcagaggtaagatggtcttcatgtaatattttttcgacacaagatcatgcagctgcagctattgcgaaagcaggaattccagtttttgcatggaaaggtgaaaccgaggaagagtattggtggtgtgttaaacaaactattgaaggaaagaaagattggaaaccaaatatgattttagatgatggtggtgatcttactgccttaatgcataaagaatataaaaatttattaaaagatgtaaagggagtttcagaagaaactacaacaggagttttagcacttaaaaaatgaa

SEQ ID NO: 261384 - DNA, 161 bp, Unknown
  Bacterial polypeptide expressing nucleotide sequence isolated from the Sargasso Sea
aaagaaagtttatgttttaccaaaacacctggatgaaaaagttgcaagattacacttagaaaaagtaggtgccaaacttacaaaaatgtctaaagaccaagcagactatatcagtgtaacacctgatggaccttacaaaccagatgcctatcgctactaaa

SEQ ID NO: 261385 - DNA, 463 bp, Unknown
  Bacterial polypeptide expressing nucleotide sequence isolated from the Sargasso Sea
atgagtgaagatttcaaagtacaagatataagtttagcagactttggtaataaagaaattgccattgcagagactgaaatgccaggattaatggctctaagggaggaatacggaaattctaaacctttagaaggagccagaatcgtgggttgccttcacatgactatacaaactgcagttttaattgaaaccttagtataccttggtgcaacagttagatggagttcatgtaatattttttcaactcaagatcatgctgctgcagcaattgctgcaaaaggcatacctgtatttgcttggaaaggtcagactgaagaggaattttggtggtgtattgaaaaaacattagaaggcccgaatggctggaagccaaatatgattttagatgatggtggtgatgcaacaaaaattattcatgaaaaatatcctaaaatgcttgaagatattttaggtttatctgaag

SEQ ID NO: 261386 - DNA, 517 bp, Unknown
  Bacterial polypeptide expressing nucleotide sequence isolated from the Sargasso Sea
tgttactttggaagatgcggtaagtacagcagatgtttttattaccgcaactgggaacaaagatgtcataaaaattgatcatatacgaaatatgaaaaatatggccatagttggtaatattgggcactttgataatgaaatcgaagtagcttctctcaaaaacaacaaatggacaaaaataaaagatcaagtagacatgatagaaatgtcttcagggaagaatattatacttctctcagaaggtaggcttttaaatttaggaaatgctacaggtcacccttcttttgtgatgtctgcaagctttagtaatcaggttttagcgcaaattgagctttggaaaaatactaagaactactcaaacgaagtttacactctgcctaagcatttggatgagaaggtcgcgcgcctacatcttgaaaaaatcggagttaaactgacaaaattagaaacagatcaggctgaatatattggcgtaaatgaaaacggaccatttaagagcgaaaattatcgatactaa

SEQ ID NO: 261387 - DNA, 640 bp, Unknown
  Bacterial polypeptide expressing nucleotide sequence isolated from the Sargasso Sea
aaagcttttgagagatgttcttgaaaaaaacccaaatcactggcgtccggtggccaaaaatattattggagtttctgaagaaacaacaacaggtgttcacaggctagtacaaatggagaaagatggccatctacttttcccagcatacaatgtcaatgactcagtgaccaaatcaaagtttgacaatgtttatggatgtagagaatccttagctgatggtttaaaacgttcgctcgatattatggttgccggtaagacggttcttgtttgtggttatggtgatgtcggtaaaggctgtgttcaatccttgcgcggttatggtgccagggtgctggtaacggaaattgatccaatatgtgccctccaggcggctatggaaggatatgaggttaccacaattgatgatgttattgatgatgtacatatttttgtcacaacaactggtaataaagatatcatcacgaaagatcatatgtacaaaatgagggatcaggctgttgtttgtaacattggtcactttgataacgaaattcaggtaaatgcggttaatgatgataaatccgttatgaaagaaaatattaagccgcagctggaccgctacacctttcctgatggtcatcagatttttatgctttgctga

SEQ ID NO: 261388 - DNA, 846 bp, Unknown
  Bacterial polypeptide expressing nucleotide sequence isolated from the Sargasso Sea
ggtgatgctactttacttattcacaaaggttatcaattagagaattattacaacaaaaataataaactaccaaagataactgcaacaatagaagaagaaatagttattgaaaagcttttgagaaaaattcacaaaaaaaatccaaatcattggcataatattgtacctgatattattggtgtttcagaggaaacaacaactggagttgcaagattgcaacagatggttgaaaatgcatctctcctctttcctgcctttaatgtaaatgacgcagctacaaaatctaaatttgataacttatatggatgtagagaatcattagctgatggaatcaaaaggtcaacagaaatcatgttagctggaaaaactgttgttgtttgtggatatggtgatgttggaaaaggctcagctcaatcaatgaagtcttatggttgcaaagtcattgttacggaaattgatccaatatgtgcattacaagctgcaatggaaggatttgaagtaagaaaattggaagatgttttagatagaggtaatatttttgttacaaccacaggtaataaagatatcattactttaaaacatatgagaaagatgaaagatcaggcaattgtatgcaatataggtcattttgataatgaaattcaggttgatgctctgaatgcttcaaatgcaaagagagacacaattaaacctcagcttgatagatatacttttaagaatggaaaacaaatctttttattagcagaaggaagattggtaaatcttggctgcgccactggtcatgcaagttttgtaatgtccacttcattttcaaacccaagttcttgctcaaatatttttagcaca

SEQ ID NO: 261389 - DNA, 292 bp, Unknown
  Bacterial polypeptide expressing nucleotide sequence isolated from the Sargasso Sea
tatggatgattataaagtaaaagatatatcccaagcagaattcggaagaaaagaaatttctcttgcagaaactgaaatgcctggattaatggctcttagaaaagaatataagggaaaatctcctttaaaaggagctagaattttaggctgccttcatatgactattcaaactgcagttttaattgaaactttagttgatcttggtgcagaagttagatggtcttcatgtaatattttttccacccaagatcatgcagcagcggctattgcaaaagctggtattcctgtattt

SEQ ID NO: 261390 - DNA, 818 bp, Unknown
  Bacterial polypeptide expressing nucleotide sequence isolated from the Sargasso Sea
tatgcaagctttaacatggcctgatggctcaggtcctgatttgatagtggatgatggtggtgatgctacgcttcttattcacaaagggtacgagcttgaagaattttatgaaaaaaacaattatgttcctgaaattaaaaccactattgaggaagaaattgttattgaaaagttgattagagaagttcttaaaaaagattctagtcattggagaagtgtagccaaaaatatcataggcgtttctgaagaaactactacaggagttcacaggcttgttcaaatggataaagatggtcatcttctttttccagcatacaacgtcaatgactcagtaacgaaagctaagtttgacaatgtttatggttgccgtgagtctcttgctgatggattgaagagatctcttgatattatggtagcaggaaaaacagttttagtttgtggatatggtgatgttggtaaaggttctgctcagtctctgagaggatatggtgcaagagtattgatttctgaaatagaccctatttgcgcacttcaggcagctatggaaggctatgaagttgtcactatagaggatgtaattgatcaagttcacatttttgtaaccgctactggtaataaagacattattaccaaagatcatatgtacagaatgaaagatcaagctgttgtctgtaacattggtcatttcgataatgaaattcaagttaatgctgtaaatgatgacagctcagttaaaagagaaacaataaagcctcagcttgaccgttatacatttgaagatgggcatccagtatttatgcttgcagagggtaggctta

SEQ ID NO: 261391 - DNA, 760 bp, Unknown
  Bacterial polypeptide expressing nucleotide sequence isolated from the Sargasso Sea
atgaacactgccgttgagcaaagcgttttcgccgattacaaagtcgcagacattcatctcgccgattggggtcgcagagaactggggatcgccgagagcgaaatgcctgcgctgatggcgctgcgtgcgcactatagtgactcccaaccgctggcaggtgccaagatcctgggctgcattcacatgaccatccagaccggcgtattaattgagaccctcgtagcgctgggggcagaagtccgatggtcttcctgcaacatcttctcgacccaagaccatgccgcggcggccatcgctgcggctggcatcccagtttttgcttggaaaggcgaaacagaagaggagtacgactggtgcattgagcagacgatccttgccgatggcaagccctgggatgccaacatggtgctggatgatggcggcgatttgaccgccatgctccacgagcattacccggaaatgctcgagcgcatccacggcattaccgaagaaaccaccaccggcgtgcatcgcctctatgaaatgttggccaacggcgagctcaaggtccccgcgatcaatgtcaacgacgcggtcactaaatcaaagaacgacaacaagtacgggtgccgacacagcctgaacgatgcgatcaagcgcggcctcgaccacctgttggcgggcaagcgagcgctggtcattggctatggcgatgtgggtaaaggctcggcccagtcactgcggcaggagggcatgatcgtgcgggtcaccgaaatgtgat

SEQ ID NO: 261392 - DNA, 724 bp, Unknown
  Bacterial polypeptide expressing nucleotide sequence isolated from the Sargasso Sea
atggctgaaacagcaaaagaaaataaaattgatttgattaatgacttcaaagtagcggacatttctctagctgaatggggcgagaaggaaattaagatcgcagaaacggaaatgcctggattgatgagcatcagagaggaatttgggaaagacaaaccattgaagggtgctaggattgccggatgtcttcatatgacaattcaaacagcggtattgattgaaactctaatcgagcttggtgccgatattaggtggtcttcttgcaatattttttcaacgcaagaccatgcagcagctgcgcttgctgcaaaaggtattcctatatttgcatggaaagatgagagtgaagaagaatactggtggtgtgttgagcaaacaatcaatggaccaaatggttggacgccaaaccttatacttgatgatgggggcgacttaacaggcctcatgcacgataagtatcctgaattaatgaaagatataatcggtgtttcggaagaaactacaactggtgttttacgtctttacaacatggaaaaagatggaacgctcatgtgtccagcgattaatgtaaacgattcagttacaaagtcaaaattcgataatctatatggctgtcgtgaatcacttgttgatggtatcaaaagggcaactgatgttatggtggccggaaaaatagcaattgttgctggatatggagatgtggaaaaggttctgcacaaagtct

SEQ ID NO: 261393 - DNA, 754 bp, Unknown
  Bacterial polypeptide expressing nucleotide sequence isolated from the Sargasso Sea
aatgactcagtaacaaaatcaaaatttgataatttttatggatgcagagaaagtcttgtcgatggcctaaaaagagcaactgatgttatgctagccggaaaagttgcagttgtttgtgggtttggagatgttggaaaaggttcggcagaatcacttcgctcacaaggagctagagtaattgttacagaaattgatccaatttgtgcccttcaagcctctatggaaggctatgaagtatcaactgtagatgatgtgactaagtcagcagatatttttattacagcaacaggtaataaagatgttattacgctcgaacatatgcgagaaatgaaagatcgagcaattgttgcaaatattgggcacttcgatagtgaaatccaagtctcaaaactaaaaaactttaaatgggacaatataaaaccacaagttgatgagatagaatttcctgatggtaaaaaaattattttattggctgagggaagattagttaacctaggttgtgcaactggacaccctagttttgttatgagtgcctcattttcaaatcaagttttagcacagattgaaatttggaataattataagaattatgaaaataaagtttatgttttacctaaacacttagatgagaaagtagcttatattcatttagaaaaacttggggttaaattgactgaattaagtgatgatcaagcagattatctaagtctaaataaagaagggccatttaaaccagatcattatagatattaaa

SEQ ID NO: 261394 - DNA, 838 bp, Unknown
  Bacterial polypeptide expressing nucleotide sequence isolated from the Sargasso Sea
aaggaaatcaaaattgcagaaacagaaatgccaggcttgatgagcatcagagaagaattcggaaaggaaaagcctctgaaaggagcaaggattgcaggctgtcttcatatgacaattcaaacagcagtactcattgaaacattgattgagctcggtgctgatattaggtggtcttcttgtaatatcttctcaactcaagatcatgctgcagctgctctagcagccaaaggcattccgatatttgcatggaaagatgagagcgaagaagaatactggtggtgcgtagaaaagacaatcaaaggtccagacggttggacgccaaatcttatacttgatgacggcggagatttaacgggtctcatgcatgaaaaatatcctgaactgatgaaagacatcatcggtgtctcagaagagacaacaactggggtattgcgtctctataacatggagaaagatggaacgctcatgtgtcccgcaatcaatgtcaatgattcagtgacaaaatcaaagtttgataatctctatggctgtcgtgaatcactcgtagatgggatcaagagagcgaccgatgtaatggtggctggaaaaattgcagtagttgccggatacggggacgttggaaaaggctcagcgcagagtcttagaggccttggcgctacagtttggataaccgaaatcgacccaatatgtgcgcttcaagctgcgatggagggatatcgagttgtgacaatggatgatgcttgctctcaagcagacatctttgttactgccactggaaactacaatgtcattgataaacatcacttagaacagatgaaggatcaagcaatcgtctgca

SEQ ID NO: 261395 - DNA, 517 bp, Unknown
  Bacterial polypeptide expressing nucleotide sequence isolated from the Sargasso Sea
ccagacgctggacgacaccgccggccgcgccgacatctatgtgaccacgaccggcaacaaggacgtcatcaccgtcgatcacatgcggcagatgaagaacaacgccatcgtctgcaacatcggccacttcgactcggagattcaggtcgccggcctgaagaacttcaagtgggacgagatcaagccgcaggtccaccacgtcgagttcccggacggcaagaagatcatcctgctgtcggaaggccgcctggtgaacctgggcaacgccacgggccacccctcgttcgtgatgtcggcgtccttcaccaaccagacgctggcccagatcgaactgtggaccaacgccgacaagtacgagaacaaggtctacaccctgcccaagcacttggacgagaaggtcgccatgctgcacctggccaagctgggcgccaagctgacggtcctgaccaaggaacaggccgactacatcaacgtgccggtcgaaggcccgttcaaggcggatcactaccgttactaa

SEQ ID NO: 261396 - DNA, 631 bp, Unknown
  Bacterial polypeptide expressing nucleotide sequence isolated from the Sargasso Sea
cggagatgttggaaaaggtagtgcagcatctttacgccaagcaggtgctagagttatgataacggaaacagacccgatttgtgctttacaagcagcaatggaaggatacgaagttgttcttatggatgaagcaattaaagatgcagacatagtagtcacagcaactggaaataaggatatagtcacagctgatcatatgcgagaaatgaaagatagagccatattgtgtaatattggtcatttcgacaatgagatccaagtcgaagctttaaaaaactacaaatgggatgaggtcaagcctcaagttcatgaaatagaattaccaagtaaaaaaagaataatattattggcagagggaagattggttaatcttggttgtgcaaccggtcacccaagctttgtaatgagcgcatcattcactaatcaagtaattgcacaaattgaactttggaataattctgataaatatgaaagaaaagtttatgttttaccaaagcatctagacgaaaaagttgcaatgcttcatttagataaggttggtgcaaaattaacaaaaatgtcaaaagatcaagcagattacattagcgttaaaccatcgggaccatttaaaccagatacttatcgctactag

SEQ ID NO: 261397 - DNA, 403 bp, Unknown
  Bacterial polypeptide expressing nucleotide sequence isolated from the Sargasso Sea
atgagtaatgactataaagttgcggatattaaccaagctgattttggaaggcgagaaatatcacttgctgaaattgaaatgcctgcactaatggcattgcgaagtaaatataaagattcacaaccactaagtggtgcaaaaataatgggttgtatccacatgactgttcagactgcagtccttatggagacgcttgtagagcttggagctgaattgaggtggtcttcttgtaatatcttttctactcaagatcatgctgcagcagctatggctgctaagggaatcccagtgtttgcttggaaaggagaaactgaagaggaatttgaatggtgtattgaacaaactattctatcagatgggactccatgggatgccaatatgattttggatgatgggggtgatc

SEQ ID NO: 261398 - DNA, 852 bp, Unknown
  Bacterial polypeptide expressing nucleotide sequence isolated from the Sargasso Sea
aagaaattagaggattatctgaagaaactacaacaggtgttcatcgcttaaaagacatggaaaaaaatgggttattaaaagtacctgctataaatgtaaatgactcagtaacgaaatctaaatttgataatttgtatggatgtaaagaaagcctagttgatggcattagaagaggaacagatgttatgatggcaggtaaggttgctgttgttgctggttatggagatgttgggaaaggttctgccgcaagcttaagaggagcaggcgccagagtatgtgtaacagaaattgatcctattaatgcattgcaagctgctatggaaggttatgaagttgtaacaatggatgatgctgcttcttatggtgatatttttgttactgctacaggaaatttagatgtaataactctggatcatatgagaaagatgcgtgacagagctatagtttgcaatattggacattttgataatgaaatacaaactgaagctctacaaaattacaaatcagatgaaattaaacctcaagttagagaagttgaatttcctgatggaaaaaaaatattattattatctgaaggtcgtttagtcaatctaggtaatgccacaggacatccaagctttgtaatgagtgcttctttttcaaaccaagtcattgcacaaattgagctttgggaaaattataaaaactatgaaaataaagtatatgttttgccaaaaaaattagatgaaaaagttgctttattacatttgaaaaaagttggagcaaaattaactgagttaaatgaaaagcaagctgactatattggtgttagtaaagcaggaccatttaaagatgatacatatagatactagg

SEQ ID NO: 261399 - DNA, 280 bp, Unknown
  Bacterial polypeptide expressing nucleotide sequence isolated from the Sargasso Sea
atgagtgattacaaagtaaaagatatcaacctagctgaatttggtagaaaagaaatttccctagcagaaacagagatgccaggattaatggcattgagaaaagaatataaaggaaaaaatcctcttaaaggagcaagaattttaggatgtcttcacatgactattcaaactgcggttctcattgaaactcttgtagatttaggagcagaagtaagatggtcttcatgtaatattttttcaacgcaagatcatgcagcagcagctattgcaaaagcaggta

SEQ ID NO: 261400 - DNA, 904 bp, Unknown
  Bacterial polypeptide expressing nucleotide sequence isolated from the Sargasso Sea
gttgcattaggagcagaagtgagatggtcatcctgtaatatattttctacccaggatcatgccgctgcagcaattgcaaaagcaggcataccagtttttgcgtggaaaggtgagacagaggaggaatattggtggtgtgttaaacaaacaattgaaggcaagaaagaatggaaaccaaatatgattttagatgatggaggggatcttaccgcactaatgcataaagattataaagagttattaaaaaatgtaaaaggtgtttcagaagaaacaactacaggtgtgctagctttgaaaaaaatggaaactaataaaaaattattaatacccgcaataaatgtaaatgactctgtgacaaaatcaaaatttgataatttgtatggctgcagagaaagtctagttgatggcattaaaagagcaacagatgttatgatgtcaggaaaagtagcaatagttgctggtttcggtgatgttggtaagggtagcgcagcatcgttaagacaagcaggagcaagagttatggtaacagaaacagatccgatatgtgctttacaggcagctatggagggatacgaagtagttttaatggataaagcaataaaagatgccgatatagtagtcacagccacaggaaataaagatatagttacagcagatcatatgagagacatgaaagacagagctatattgtgtaatatcggtcactttgataacgaaattcaggtagaggctttaaaaaattacaaatggaatgagattaaacctcaagttcacgagatagagttaccaagtaaaaaaagaataatattattagccgaaggtagattagtaaatttaggatgcgctactggcccacccagttttgtaatgagtgcatcttttacaaatcaagtaatcgcacaaa

SEQ ID NO: 261401 - DNA, 732 bp, Unknown
  Bacterial polypeptide expressing nucleotide sequence isolated from the Sargasso Sea
ttttaaagtaaaagatatttcatttgctgaatttggaagaaaagaaatttctttagcggaaacagagatgccaggtttaatggccctaaggaaagaatacggaaataaaaaaccgcttaaaggagctcgcatattaggttgtttgcacatgactattcaaaccgcagtattaattgaaactcttacaaaattgggtgccgaatgcagatggtcatcttgtaatattttttcaacacaagatcacgctgccgcagctattgcaaaagcaggtgtcccagtttttgcttggaagggtgagacagaaaaggaatactggtggtgtgtgaaacaaacaatagaaggaaaaaaagattgggtgccaaatatgattttagatgacggcggagatcttacagcactgatgcacaaggaatataaagatttattgaaaaacgtcaaaggtgtttcagaagaaacaacaactggtgtattagcactaaaaaaaatggaggcaaacaaacaacttttaattcctgctatcaatgtaaatgactcggtaaccaaatcaaagtttgacaatctttatggatgcagagaaagcttagttgatggaattaaaagagcaactgacgtgatgatgtctggaaaggtagctatagtggctggatacggtgacgtaggtaaagggagtgcagcttcattaagacaggctggagcaagagtattagtaactgagactgatcctatttgtgc

SEQ ID NO: 261402 - DNA, 334 bp, Unknown
  Bacterial polypeptide expressing nucleotide sequence isolated from the Sargasso Sea
ccccaagttgaccatattgtctttccggatgggaaaagaattatcctgcttgctgaaggtcgcttggttaatttagggtgtggcacgggtcatccaagttttgtcatgtctaattcattctgcaatcagactcttgctcaaattgaactattcaaaaacagctcgaattacgataaacaggtctatgtccttccaaaatcacttgatgaaaaagttgcaaaacttcatctggacaagatcggagctaaattaacaaaactgaccactgaacaggctgaatatattggtgttaaagagtcaggaccctacaaacctgaacattaccgatactgat

SEQ ID NO: 261403 - DNA, 850 bp, Unknown
  Bacterial polypeptide expressing nucleotide sequence isolated from the Sargasso Sea
tggaagaaaagaaatttcaatagcagagagtgaaatgcctggcttaatggctttaagagaagaatactctggaaagtcaccgctaaaaggagcgaaaattattggatgtctgcacatgactattcaaacagctgttttaattgaaacactagttgctttaggtgcggaggtaagatggtcatcttgtaatattttttcgacccaagatcatgcagcagctgcaatcgccaaagctgggattccagtatatgcttggaagggagaaactgaagaggaatatatttggtgtattaaacaaactattgagggtaaaaaagattgggcgcctaacatgcttttagatgatggaggagacctcactgcaatgatgcatcaagagtataaagaattaattaaaaatgtgaaaggtgtttcagaggagacgacaacaggcattaaagctcttaataaaatggaaaaagataaaactttgttagtgcctgcaataaatgtaaatgattctgtcaccaaatctaaatttgacaatctctatggatgtagagagagtttagttgatggcataagaagagctacagatgttatgatgtctggaaaaattgctatagttgctggatttggagatgtcggtaaaggaagtgccgcatctttaagacaaagtggtgctagagtattagttacagaagctgatccaatttgtgcattacaagcagcaatggagggttacgaagtggttttgatggaagaggcaattagcaaagctgatattgtcgttacagcaactggtaacaaagatattgttacagctgatcatatgagagaaatgaaagatagagcaattttgtgtaacata

SEQ ID NO: 261404 - DNA, 646 bp, Unknown
  Bacterial polypeptide expressing nucleotide sequence isolated from the Sargasso Sea
cattgtggctggttttggagatgttggaaaaggaagtgctgcatctttgagacaaagcggtgcgagagttttagttacagaagctgatccaatttgtgctcttcaagcagcaatggaaggttatgaagtggtattaatggaagaggctataagtagagctgatatagtagtaacagcaacaggtaacaaagatattgttactgcagatcatatgagagacatgaaagatagagcaatcttatgtaatattggtcactttgataacgaaatccaagttgaagctcttaaaaattataagtggactgaggtaaaacctcaagtgcatgaaatagagttacctagtggcaaaagaattatccttttagctgaaggaagattagttaatcttggttgtgcaactggacatccaagttttgtaatgagtgcgtcatttactaatcaagttattgcacaaatagaactttggcataatcataaaaattatgaaaataaagtttacgtacttccaaaacatttagatgaaaaagtagcaactttgcatttaaaaaaagttggtgcaaaactaacaaaattgtcaaaagaacaagcagattatataagcgttggaacagaaggtcctttcaaaccagatgcctatcgctattaa

SEQ ID NO: 261405 - DNA, 889 bp, Unknown
  Bacterial polypeptide expressing nucleotide sequence isolated from the Sargasso Sea
gatgcaactgggtttattaattctaggtagtaaagcagaaaaagatttgtctgttttagataaccccagtaacgatgaagaaattgctttattcaattctattaagtctaagctgaaagtcgatagtgaattttattctagagttaaaagtaatattattggtgttactgaagaaactactactggagttgcaagactatatcaactgcaaaagcagaatgctttaccttttcctgctattaacgttaatgattcagtaactaaaagcaaatttgataatttatatggctgccgagaatctttagttgatagcataaagcgtgcaactgatgtgatgattgcaggcaaggttgctttagttatgggttttggtgatgtaggtaaaggttcagcacaatcattaagaggacttggtgcaattgtaaaagttgctgaagtagatccaatttgtgcccttcaagcagcaatggaaggttttagtgttgttacacttgatgatgttgtgcaagatatagatatattcgttacggcaactggtaactatcaggttataacacacaaaaatcttgtaaagatgaaggatgaggccatagtttgcaatattggacactttgataatgaaattgatgtagcttcattaaaaaattatccatgggaaaatattaagcctcaagttgatcacataactttaccaagtggaaacaaaattatccttttggctgaaggtagattagttaacctaggatgtgccacaggacatccaagctttgtcatgagtaattctttcactaaccaagtattagctcaaatcgaacttttcaataaagcggagcaatacgctaaagaggtttatgttttaccgaaacatttagatgaaatggtagctagg

SEQ ID NO: 261406 - DNA, 812 bp, Unknown
  Bacterial polypeptide expressing nucleotide sequence isolated from the Sargasso Sea
tttaattgaaactttagttgatcttggtgcagaagtaagatggtcttcatgtaatatattttctactcaggatcatgctgcagctgcaatagcaaaagcaggtatccctgtatttgcgtggaaaggtgaaactgaagaggaatattggtggtgtgtaagacaaacaattgaaggtaaaaaagactggaagcctaacatgattttagatgatggtggcgatcttactgctcttatgcataaagattataaagaattaatgaaagatataaaaggcctaagtgaagagacaacaactggagttttggctttgaaaaaaatggaagagcaaggaacacttttagtacctgctattaatgtaaatgactcagttacaaaatctaaatttgataatttatatggatgtagagaaagtttagttgatggaattaaaagagcaacagatgttatgatgtcaggaaaagttgcaattgttgctggctttggagatgttggaaagggaagtgcagcatcattacgccaaagtggtgctagagtaatggttacagaaacagatccaatatgtgcacttcaagctgctatggaaggttacgaggtagttttgatggacgagatgattggacaggcagatatagttgttactgcgacagggaataaagatatagtaaccgcagatcatatgagggatatgaaagatagatcaatcctatgtaatattggccacttcgataatgaaatacaagtagaagcgctaaaaaattataaatgggacgaaattaaaccacaagttcatgaaattacttttccagaataat

SEQ ID NO: 261407 - DNA, 325 bp, Unknown
  Bacterial polypeptide expressing nucleotide sequence isolated from the Sargasso Sea
aatgtacaagcagaaaaaaatgactgattataaagtaaaagatatcaatttagctgattttggaaggaaagaaatttctctcgcagaaactgaaatgccaggtctaatggcattacgaaaagaatataagggcaagagcccattaaagggcgcaaggattttaggatgtttgcacatgacaattcaaactgcagtcttaattgaaactttagttgaccttggtgctgagtgcagatggtcatcttgtaatatattttctactcaagatcatgctgccgcagctatcgcaaaatctggaactccagtttttgcatggaaaggtgaa

SEQ ID NO: 261408 - DNA, 769 bp, Unknown
  Bacterial polypeptide expressing nucleotide sequence isolated from the Sargasso Sea
ggttgtagacatagtctaaatgatgctctaaaaagagggaccgatatgttgttatctggcaaaaaaggtcttgttattggttatggtgatgttggaaaaggatcggctgccagtttggcccaagaaggaatgatagttagagtagtcgaatcagatccaatatgtgccatgcaagcatgcatggatggcttttcagtagtttcctgttacaaagatggagttgttactagagatcctaaagacattaatatggagattattggggatacagacttaatagttacaacaactggcaatgtaaatgtatgcgattcagcaatgttaagtactttaaaaaatactgcagtggtatgtaatattgggcattttgataatgaaattgatactgcttttatgagagaaaactactattgggatgaaattaaacctcaagtacatagaatttttagagacacgcctcctgatgggggaccagatctctcaagtaaaaactacatcatactgcttgcagagggaagattagtaaatcttggaaatgctacaggtcacccaagcagaattatggatggatcatttgcgaatcaagttttagcacaaattcatttgtataaacaaggcttcgctaatgtgaatgatgcagacaaaaaagcagaaatgctaactgttgaagttctgccaaaaaaattagatgaagaagtggctagccttatggtccaaggttttggtgagactgtgactcaacttactaaagaacaagcagactatataa

SEQ ID NO: 261409 - DNA, 484 bp, Unknown
  Bacterial polypeptide expressing nucleotide sequence isolated from the Sargasso Sea
atatttgtaacagcaactgggaacaaagatgttattactgtggatcacatgagagaaatgaaagacagagctatcgtttgtaacattggtcattttgattcagaaattcaagttgagtcacttcaaaatatgaaatggtcagaggtaaagcctcaagtagatgaggttgagtttcaagatggaaagcgtttaatagttttagcaaaaggaagattggtaaacctaggatgtgctactggacatcctagttttgttatgagtgcttcttttactaatcaagttcttgcacaaatagagttatgggaaaagccagaaaattatgaaaataaggtatataccttgccaagacatttagatgaaaaagttgctaaattacatcttgacaaagttggtgctactttaagtaagctttcaaatgaacaggctgattatattggggtcccagttcaaggaccttttaaatcagacaattatagatactaat

SEQ ID NO: 261410 - DNA, 367 bp, Unknown
  Bacterial polypeptide expressing nucleotide sequence isolated from the Sargasso Sea
agcgttaaaaaattataagtgggatgaaattaaacctcaagttcacgaaattacttttccagataataaaagacttattttattagcagaaggaagacttgttaatttaggatgtgcaactggccatccaagtttcgttatgagtgcatcatttactaatcaggttacggcgcaaatagaattatggaataattctgataagtatgaaaacaaggtatatgtattaccaaaacatttagatgaaaaagttgcaaggttacatttagaaaaagttggagcaaaattaactaaattatcaaaagaacaagctgattatattagtgttacaacagaaggaccttataaaccagatgcttaccgctactaa

SEQ ID NO: 261411 - DNA, 415 bp, Unknown
  Bacterial polypeptide expressing nucleotide sequence isolated from the Sargasso Sea
catgagcgctgtgatacagccccagtccgatcaggactatgtggtcgccgatatctccctggccgatttcggccgaaaggaaatcgcgatcgcggagaccgaaatgcccggtctcatggcccttcgagagaagtacggccccagccaaccgctgaaaggcgcgcgcgtcgccggcagcctgcacatgaccatccagaccgcggtcctgattgagaccttgcgggcgctcggagcagacgtgcgctgggcctcgtgcaacatcttctcgacccaggaccacgctgctgctgccattgccgcaggcggaaccccggtctttgcctataagggcgagaacctggtggagtactgggcttacacccatcgcatctttgagtggagcgatggcggcacccccaacatgattcttgacgat

SEQ ID NO: 261412 - DNA, 882 bp, Unknown
  Bacterial polypeptide expressing nucleotide sequence isolated from the Sargasso Sea
atgagtgattataaagttaaagatataaatgaagcagaatttggaagaaaagaaatctctttagcagagactgaaatgccaggcttaatggctttaagaacagaatataagggaaaacatcctcttaaaggtgcaagaattttaggctgtttacacatgacaattcaaacagcagttttaattgagactttagtcgatcttggtgcagaagtaagatggtcttcatgtaatatattttctacccaagatcacgctgcagcagcaattgcaaaagcaggaattcctgtatttgcatggaagggagagactgaggaagaatattggtggtgcgtaagacaaacaatcgaaggtaaaaaagattggaaacctaatatgatattagatgatggtggtgatctaactgctcttatgcataaagactataaagatttattaaaagatataaaaggcttaagcgaagaaacaactactggagttttggctttgaaaaaaatggaagagcaaggaacattgctagtacctgcaattaatgtaaacgactcagtgacgaaatctaagtttgataatttatatggttgcagagaaagtttagtggatggaattaaaagagcaactgatgttatgatgtcaggaaaagttgcaattgtggctggttttggagatgttggtaaaggaagcgccgcatcactacgtcaaagtggtgctagagtaatggttactgagacagatccaatatgtgcacttcaagctgcgatggaaggttatgaagttgttttgatggatgagatgattggacaggcagatattgttgttactgccactggaaataaagatatagttaccgcagatcacatgagagctatgaaggatagatctatatta

SEQ ID NO: 261413 - DNA, 913 bp, Unknown
  Bacterial polypeptide expressing nucleotide sequence isolated from the Sargasso Sea
atactggatgacgggggtgatctgactgcactaatgcataaagattataaagatttattaaaagacattaaaggcttatccgaggaaactactacaggcgttttggcacttaaaaaaatggagagtgagggaaaattattagttccagcaattaatgtgaacgactcggttactaaatctaaatttgacaatttgtatggttgtagagaaagcttggttgatggaataaaaagagcaacagacgttatgatgtcaggtaaagttgcaatagttgcgggttttggagatgtaggcaaaggtagcgccgcttctttaaggcaatctggtgctagagttatgataacagaaactgatcctatttgtgccttgcaggcagcaatggaaggttatgaagtagtcactatgaacgatatgataggacaagcagatattgttgtaactgcaactggaaataaagatattgttacagcagaccatatgagagagatgaaagatagagcaattttatgtaatataggacattttgataatgaaatacaagtcgaagctttaagaaattataagtgggatgaaataaaaccccaagttcatgaaataactttgccaagcaaaaaaagaataattttattagcagaaggaagacttgtgaacttaggatgcgctacgggtcatcctagctttgttatgagcgcttcatttacaaatcaaacaatcgcacaaattgagctttggaataattctgacaaatatgaaaataaagtgtatgttttaccaaaaaaacttgatgaaaaagttgcaatgcttcatcttgaaaaagttggagctaaactaacaaagctttcaaaagatcaggcagagtatataggtgtatcagaacaaggaccatacaaaccagaagcatatcgttactaaa

SEQ ID NO: 261414 - DNA, 658 bp, Unknown
  Bacterial polypeptide expressing nucleotide sequence isolated from the Sargasso Sea
gggaaagttgcaatagttgctgggtttggcgatgttggtaaaggaagtgctgcatctttaagacaaagtggagcgagagttatggttacagaaacagacccaatctgtgctcttcaagcagccatggaaggttatgaagttgttttattagatgaaatgatcaaagaggctgatatagttgttaccgcaacaggaaacaaagatatagttactgcagaccacatgagggaaatgaaagatagagcaatactttgtaacataggtcactttgataacgaaattcaagtggaagcattaaaaaattataaatgggacgaaataaaaccacaagttcatgaaataacactaccaagcaaaaaaagaataatattattagcagaaggaagattagtaaatttaggatgtgctacaggacacccaagctttgttatgagcgcttcatttacaaaccaagtgactgcacaaatagaactatggaataattctgataaatatgagaaaaaagtttatgttctaccaaaacatctagatgaaaaagttgcaagacttcatctggacaaggttggcgcaaaattaacaaagctatcaaaagatcaagcagattatattagtgtaaaacaagaaggaccatacaaaccagatgcctatcgctactaga

SEQ ID NO: 261415 - DNA, 916 bp, Unknown
  Bacterial polypeptide expressing nucleotide sequence isolated from the Sargasso Sea
aactattttgaaggaaaaaaagactgggaaaccaaatatgatcttagacgacggtggtgaccttactgctttaatgcataaagaatataaaaatttattaaaagatgttaagggtgtatcagaagaaactacaacaggtgttttagcacttaaaaaaatggaggctgctaaagagctactaatacctgccataaatgtaaacgactcagtgacaaaatctaaattcgataacctttatggctgtagagaaagtttagtagacggaattaaaagagcaactgatgtaatgatgtcaggtaaagtagctattgttgctggatttggtgacgttggcaaaggaagtgctgcttccttacgtcaagcaggtgcaagagttatggtaaccgagacagacccgatatgcgcgttacaagctgctatggaaggttacgaagttgttgttatggatgaagctatcaaagatgctgatattgttgttactgctacaggaaataaagacatagttacagctgatcatatgagagatatgaaagatagagcaatactttgtaacataggtcactttgacaatgaaattcaagttgaggcattaaaaaattacaaatgggatgaaataaaaccgcaagtacatgaaatagaattacctagtaaaaaaaggatcattcttttagctgaaggaagattggtaaacttgggatgtgctacagggcaccctagttttgttatgagcgcttcatttacaaatcaagtaattgctcaaattgaactatggaacaactcagataagtatgaaaagaaagtttatgtacttccaaaacatctcgacgaaaaagttgccatgcttcatttagaaaaagtaggtgcaaaattaactaaaatgtctaaagagcaagcagattatattagcgttaaacca

SEQ ID NO: 261416 - DNA, 742 bp, Unknown
  Bacterial polypeptide expressing nucleotide sequence isolated from the Sargasso Sea
tatgctcatgtcaggcaaaaaggcacttgtcattggctacggagatgtgggcaaagggtcagctcaaagcctaagacaagaagggatgattgttaaaattgttgaggtagacccgatctgtgccatgcaagcttgtatggatggttatgaagtagtttccgcctacaaaaatggaatcaatactggaaaggttgaatcaatagacaaagagctattggccacgaccgacgtattagtaacttgtacaggaaacgccaacgtttgtgattctgcgatgttaagcacgattaaatccggcgctatcgtttgtaacataggtcacttcgataacgagatcgatactgaatacatgagagataattggcgatgggaaaccgttaaagaccaggttcaccaaatctatcgctccgataatcgcgatgactatttgattttgttgtcagaaggtagactcgtgaatctgggcaatgcgatgggacacccgtcccggattatggatggttccttcgcaaatcaggttttggcacaaatgcacttgtacgaacaaaagtgggccgaccaacccgaaaaccaacgatctcctatttcagttgaagtcttacccaaaaaactggacgaagaggtagcgcagcttatggtggaaggatttggtgggctcattacgaaactgacagcagaccaagctgactatatcggagtgacaacagaaggccccttcaaaccagaagcttataagtattaa

SEQ ID NO: 261417 - DNA, 616 bp, Unknown
  Bacterial polypeptide expressing nucleotide sequence isolated from the Sargasso Sea
atgagtaaagattttatcgtgaaagatatcagtttggcctcattcggaagaaaagagatagctattgctgaaacagagatgccaggattgatggccataagaaaagagtttgaagggaaaaagccacttagaggggcaagaattgcaggaagcctccatatgacaattcaaacagctgtcttaatagagacactggttgatttaggtgcagatgttcgttgggcaagttgtaatattttttctacacaagatcacgctgcagcagctatagcggaaagcggtgttcctgtttttgcttataaaggtgaaaccctcgatgaatactgggaatatgctgataaaatatttctttttaaggaagaaacagcgaacctaatcctagatgacggcggtgatgctactatgtatgttctattgggatcgcgcgcagagagtggagacacggaatttttggaaaaaccatcttcagaggaagaggaagcgctttttaaacaaattaaaaagagattacaatcaagtaaaggctggtttacgaaacagaaggaagcaattcttggagtttcagaggagacaactactggtgtaaaccggttgtatcagttagagcgggaaggta

SEQ ID NO: 261418 - DNA, 397 bp, Unknown
  Bacterial polypeptide expressing nucleotide sequence isolated from the Sargasso Sea
catggtggcagcgcccacgtccccagctgaactgaagctcggcgtcgattgcgtcattgccgacatcaatcaggccgatttcggccgtaaggagctcgacattgccgagaccgagatgcccggtctgatggcgttgcgtgagaagtacggcagcgagaagccccttaagggcgcccgcatcgccggctccctgcacatgacgattcagaccgcggttctgatcgagaccctggtggagctcggggccgaagtgcgctgggcctcttgcaacatcttctccacccaggatcacgccgctgcggccatcgctgccagtggtgtccctgttttcgctgttaagggcgaaacccttgaggagtactgggactacacccatcgcatcctcgagtggggtgac

SEQ ID NO: 261419 - DNA, 562 bp, Unknown
  Bacterial polypeptide expressing nucleotide sequence isolated from the Sargasso Sea
aatggtcacaaaaaacgaaaaaataagcaaaattggaactgattataaagtagctgatatatctttagctgaatttggaaaaaaagaaattaagattgctgaaacagaaatgcctggattgatggcaattagagaagagtataaaaaccagaaaccactcaaaggtgcaaatatacttggttgtcttcacatgactatccagacagctgttcttattgagacgcttgttgatttaggtgcttctgttagatggtcttcttgtaatattttttcaactcaggatcatgcagcagctgcaatagcaagtcaaaatattcctgtatatgcatggaaaggagaaaccgaagaagaatacaattggtgtatcaaacaaactattgaaggtgataaagattggaaaccaaatctgttattagatgatggcggtgacttaacagctataatgcataatgattatccgcaattaatgagcgatattagaggtgtatctgaagaaactaccactggtgttcacagactctatgaaatggaaaaaaatattcactcaaagttccggctctaa

SEQ ID NO: 261420 - DNA, 562 bp, Unknown
  Bacterial polypeptide expressing nucleotide sequence isolated from the Sargasso Sea
cgacccaatatgtgcacttcaagctgcaatggaaggatatcgtgttgtgacaatggatgaagcttgttctcaagcagatatttttgtaactgccactggtaattataatgttatcgataaacatcacttagaacagatgaaggatcaagcaatcgtctgcaatattgggcattttgataatgaaatcaacgtagaatccatgaaagatcatgagtggatcaatatcaaacctcaagttgatcacattgttttccctgatggcaaaagaatcattctccttgctgaagggcgtttggtaaatctagggtgtggcacaggccatccgagtttcgtgatgtctaactcattctgtaatcaaactcttgcacaaatagaattattcaaaaacagctcaaattatgagaatcaagtttatgttctgccaaagtcattggatgaaaaagttgcaaaacttcatctcgataagataggagctaagctgaccaaattgactactgaacaagctgaatatattggtgttaaggaatcagggccatataagcctgatcattacagatactga

SEQ ID NO: 261421 - DNA, 421 bp, Unknown
  Bacterial polypeptide expressing nucleotide sequence isolated from the Sargasso Sea
aggacgaggcgatcgtctgcacatcggccacttcgataacgagatcgatgtcgcctccctgaaaacctacgaatgggagaacatcaagccgcaggtggatcacatcactctccccagcggcaatcggatcatccttctggctgaaggacgcctggtgaacctcggttgtgccacgggccaccccagcttcgtgatgagcaactccttcaccaatcaggtgctggcgcagatcgagctgttcacaaaaggcagcgaatacggcaaagaggtttatgtgctgcccaagcacctcgacgagatggtggcgcgtcttcacctcgatcgcatcggcgccaagctcaccgagctgagcaaggaccaggccgattacatcaacgtgccggtggaaggccccttcaagccagaccactaccgctattga

SEQ ID NO: 261422 - DNA, 796 bp, Unknown
  Bacterial polypeptide expressing nucleotide sequence isolated from the Sargasso Sea
atgagtaatgattttaaggtaaaagacataaatttagctgaattcggaagaaaagaaatatccatagcagagtcagaaatgccaggtctcatggctttaagaaaagaatttaaaggaaaaaaacctctaaagggagcaaatattttaggatgtcttcacatgacgattcaaacagcagttcttattgaaactcttgttgatctaggtgcaagtgtaagatggtcatcatgcaatattttttctacgcaagaccatgcagctgcagcaatagcaaaagctgggataccagtttttgcatggaagggcgaaacagaaaaagaatattggtggtgcgtagagcaaactatagaaggtgataaaaattggaaaccaaatatgattttggatgacggtggagatctaaccgggctaatgcataaaaaatataaggatcttttaaaaaatgttaaaggcgtttctgaggaaactactaccggggttttggcattaaaaaaaatggagtcaaataatgaattacttatcccagctataaacgttaatgactctgtaacgaaatcaaaattcgataatttatacgggtgtagagaaagtttggttgatggaattaagcgagccacagatgtgatgatgtcaggtaaagttgcaattgttgccggtttcggagatgttggcaaaggtagtgcagcatctttacgccaagcaggtgcaagagtaatggtcacagagacagatccaatttgtgctttacaagcagcaatggaaggatacgaagttgttcttatggatgaagcaatta

SEQ ID NO: 261423 - DNA, 817 bp, Unknown
  Bacterial polypeptide expressing nucleotide sequence isolated from the Sargasso Sea
gatgtgcgctgggcaagttgtaatatttttttctacgcaagatgaagctgctgctgctattgctaagaccaagactccagtatttgcttggaaaggtgaaacgcttgaagaatattgggattgtacactacaagcattaacctttaaaaataacttaggtccaaatctaattgtagatgatggtggcgatgcaacactgctcattcataaaggatatgaattagaaaactattttaataaacataaaaaactcccaaaaatcactactaaggttgaggaagaaattgtaattgaaaaacttttaaggaaagttcataaacttaatccgaatcactggcataatattgtacctgatattataggagtttcagaggaaacaacaaccggcgtagctaggttacaacaaatggttgaagatgcgagtttattgtttccagcatttaatgtaaatgatgcagcaactaagtctaaatttgataacctctacggttgtagagaatctttagctgacggaattaagcgttctactgaaatcatgcttgctggaaaaaccgtggttgtttgtggttatggagatgtaggaaaaggttcagcgcaatcaatgaagtcatatggttgtaaagttattgtaaccgagattgatccaatatgcgctcttcaagctgcaatggaaggatttgaagtaagaagactagaagatgttttaaatagaggaaatatttttgtaacaactacaggtaataaagatatcatcacattgaaacatataagaaaaatgaaagatcaagctattgtttgtaacattgacattttgata

SEQ ID NO: 261424 - DNA, 762 bp, Unknown
  Bacterial polypeptide expressing nucleotide sequence isolated from the Sargasso Sea
aattgaaactctagttgaattaggtgcagaggtaacttggtcatcttgtaatatattttctacccaagatcatgcagctgctgctattgctgaagctggtattcccgtttttgcctggaaaggaatgaatgatgaagaatttgattggtgcatcgaacagaccctaacggcattcgaaggaggtaaacccttaaatattatcttggatgatggaggagatttaaccaatatggtttttgataatttcccacatcttgctaaggatattaaaggtttgtctgaagaaactacaacaggagttcacagattatatgaaagagaaaaaaatggtactttggtaatgccagcaattaatgtaaatgattctgttacgaaatcaaagtttgataataaatacggatgtagagagtctttagtagatggtattcgcagagcaacagatgttatgatggcaggtaaagtagctgttgtcgctggatacggtgatgttggtaaaggttctgctgattctttacgtggagctggagcaagagttattgttactgaaatagatccgatttgtgctttacaagctgctatggaaggatttgaggtaaaaaatatggataatgcaataccagaagccgatattgttgtaaccacaacaggtaatttcaatataattgttggacgtcatttcgaagctatgaaagacaaagctattgtttgtaatataggacattttgataatgaaattgatatggcatggttgaatcaaaatta

SEQ ID NO: 261425 - DNA, 538 bp, Unknown
  Bacterial polypeptide expressing nucleotide sequence isolated from the Sargasso Sea
aagagcaacggacataatgttagctggaaaaagagttcttgttgctggttacggagatgtaggcaaaggaaccgccgcatcttttcaaggagctggttcaattgtcacaattagtgaaattgatccaatttgtgcattacaagcagcaatggatggttttgaagttaaaaaaataatgtcaataattgaaaatatggatattattgtaactgcaacaggaaacaaggatattattggtgaagatgcttttctcaaaatgaaagataaagctataatctgcaatattggtcattttgataatgaaattgatatgaactggctaaataaaaattttggacatactaaaactgagattaaaccacaagttgatatatatacgctaaaaagtagtaaacaattaattatccttgctgaaggtcgtcttgttaatttaggctgtgctaccggtcatcctagttttgttatgagtaattcattcacaaatcaaacccttgctcaaatagaactatggagttcatcaaaaaattatgaaaataag

SEQ ID NO: 261426 - DNA, 486 bp, Unknown
  Bacterial polypeptide expressing nucleotide sequence isolated from the Sargasso Sea
catggtcacagtgctagaagaaaacgatggcggagctgcattccaagtttcggatatttcgctttcggaatttggaaggaaggagattgaaatcgcggaacacgaaatgccgggattgatggcaataagggagaaatacgcctcggaaaagccgcttcaaggagtcagaatcaccggttctctgcacatgacaatacagactgcagttctgatcgagaccttggtggatctaggcgcgagcgtaaggtgggccagttgcaacatcttctccacgcaggatcatgccgcagctgcgatcgcgaaatcgggtgttcctgttttcgcttggaaaggaatgtccctcgaggaatattgggattgcaccctcaaggcgatttcccatccaggcggacttggtcccgagttgattgtggacgatggtggggacgccactctcctgatacacaagggatacgagctggaaaaaggtagtgattggatagacac

SEQ ID NO: 261427 - DNA, 938 bp, Unknown
  Bacterial polypeptide expressing nucleotide sequence isolated from the Sargasso Sea
attagcagaggctgaaatgccaggacttatggcgttaagagccaagcttaaaaaagagaagcctctcaaaggtgcaagaattgcaggatgtctacatatgacaattcaaactgctgttttaatagaaacattaatagatcttggggctgaggttacttggagctcatgtaatattttttcaacacaagaccatgctgctgctgctattgcatctatggggattcctgtctatgcatggaaagggatgaatgaagaggaatttaactggtgtattgaacaaacattattttttggagagaagagagatccattaaatatgattcttgatgatggaggtgatttaaccaatatggtacttgatcaatatcctgaacttgttcctggaataaagggcctttctgaagagactactactggagtacatagattatatgatagaatgaaagcaggaaaattgcctcttcccgcaattaatgttaacgattctgtaactaaatcaaaatttgataacaaatatggctgtaaagagagcgcagtagatgcagtcagaagagctactgatataatgcttgctggtaaaagagttgttgtgtgtgggtatggtgatgttggaaaaggtactgcggcttcttttagaggagctggttcaattgtaactgttactgaaattgaccctatatgtgcactacaagcatcaatggatggttatgaagtaaaaaagctaaatacagtaattaaaaatgctgatattgtaataacagcaactggaaataaagatattgttactaaggagcattttaaagccatgaaggataagactattgtttgtaatatcggccattttgataatgagatagatatggattggttaaattcaaactatggagatacaaaatctaatataaagcctcaagttgatatatatacaattgatagta

SEQ ID NO: 261428 - DNA, 613 bp, Unknown
  Bacterial polypeptide expressing nucleotide sequence isolated from the Sargasso Sea
ctcagcgcagagtcttagaggccttggcgctacagtttggataaccgaaatcgacccaatatgtgcacttcaagctgcgatggagggatatcgagttgtgacaatggatgatgcttgctctcaagcagacatctttgttactgccactggaaactacaatgtcattgataaacatcacttagaacagatgaaggatcaagcaatcgtctgcaatattgggcattttgacaatgaaatcaacgtagaatccatgaaagatcatgagtggatcaatatcaaacctcaagttgatcacattgttttccctgatggcaaaagaatcattctccttgctgaagggcgtttggtaaatttaggctgtggcacaggccatccgagtttcgtgatgtctaactcattctgtaatcaaactcttgcacaaatagaattatttaaaaacagttcaaattatgagaatcaagtttatgttctaccaaagtcattggatgaaaaagttgcaaaacttcatctcgataagataggagctaagctgaccaaattgactactgaacaagctgaatatattggtgttaaggaatcaggaccatataagcctgatcattacagatactga

SEQ ID NO: 261429 - DNA, 414 bp, Unknown
  Bacterial polypeptide expressing nucleotide sequence isolated from the Sargasso Sea
attgttactagtaatcggtgatatggagaaaaatatggactataaagttgcggatatcgggcttgcggaattcggcagaaaagaaatttttttggccgagaaagaaatgcccgccctaatagcaatcagaaaaaagtatgaaaaagaacagccactttctggtgctaagatcatcggctgtatccatatgactatacaaacggcagtcctaatagaaacactcgttcaccttggtgccgaagtaagatggtcgtcctgcaacattttctctacccaagatcacgcggcggcggccatggctgacgctggtatccctgtttttgcttggaagggcgaaacagaggaagagtatctacagtgcatcgagaatacgatattggtagacggtaagccttgggatgctaatcttctttt

SEQ ID NO: 261430 - DNA, 292 bp, Unknown
  Bacterial polypeptide expressing nucleotide sequence isolated from the Sargasso Sea
atggccaatgaagattttaaagtagcagatatagaacaagctgaattcgggaggaaagaaatatctttagctgagacagagatgccaggccttatggcgctaagggaagaatacaacggccaaaaacctctagatggtgcaagaatagtcggctgtcttcacatgactatccaaaccgcagtcttaattgaaacgttggtagaattgggagcagatgtaaggtggtcatcctgtaatattttttcaacacaagatcatgctgctgccgcaatagctaaagcaggcatcccag

SEQ ID NO: 261431 - DNA, 778 bp, Unknown
  Bacterial polypeptide expressing nucleotide sequence isolated from the Sargasso Sea
gatgggcttcttgcatattttttcaactcaagaccatgcggcttctgcaatagcggaaagtggtattcctgtttttgctgttaaaggagaaacacttgaggagtactgggaatacgctgacaaaatttttaattttgaagagggtacttgtaatcttattttagatgatggtggtgacgccactatgtatattttattaggagctagggctgaaaacggagatacacagtttctggaaaatccttcctctgaggaggagatttttctattctcacaaattagaaaaagaatagaaaataatccaggttggtttgttaagcagagagatgaaattttaggagtatcagaggaaacaacaaccggagttcatcgactttatcaactgatggaaaaaggagagttgccatttccagctataaatgtgaacgatagtgtgacaaagtctaaatttgataataagtatggctgcaaagaatctcttgtagatggtattagacgggcaacggatacaatgcttgctggaaaaacagctgttgtttgtggctatggtgatgtgggaaaaggttcagccgcaagtttaagtggttctggagctagggttaaagtaacagaagtcgatccgatttgtgcattacaggccgctatggatggttttgaggttataaagattgaagatgctttggaaacagcagatatctttattactgcaactggaaataaggatgtgataaagatagaccatatgagaaaaatgaagaatatggctatagttggaaat

SEQ ID NO: 261432 - DNA, 334 bp, Unknown
  Bacterial polypeptide expressing nucleotide sequence isolated from the Sargasso Sea
atggaagatttcaaagttaaagatttgaaccaagctgaatttgggagaaaagaaatttcaatagcagagagcgagatgcctggcttaatggctttaagagaggaatattcaggaaatttaccactcaagggagcaaaaattattgggtgtctgcatatgactattcaaacagctgtcttaattgaaacactcgtagccttaggtgcagaggtaaggtggtcatcttgtaatattttttcgactcaagatcatgcagcggctgcaatcgcaaaagctggaattcctgtgtacgcttggaaaggtgaaactgaagaagaatatatttggtgcataa

SEQ ID NO: 261433 - DNA, 879 bp, Unknown
  Bacterial polypeptide expressing nucleotide sequence isolated from the Sargasso Sea
gaagcagctttcatgactgattataaagtaaaagatattaacctagctgatttcggccgaaaagagatatcattggcagagactgaaatgcctggtttaatggcattaagaaaagaatacaaaggaaaaaatcctcttaaaggtgcaaaaattttaggatgtcttcacatgacaatccaaactgctgtattaattgaaacattagttgaattaggcgctgaggttcgatggtcgtcatgtaatattttttcaacacaagatcatgcagctgctgctattgcaaaagcaggaataccagtttttgcatggaagggtgagacagaagaagagtactggtggtgcgttagacaaactattgaaggtaaaaaagattggaaacctaatatgatacttgatgatggaggagatttaacagcgcttatgcacaaagactataaagaattaatgaaatcaattaaaggcttatccgaggaaacaacaactggagttttagctttaaaaaaaatgcaatcggaaggaacattacttgttccggcaattaatgttaatgattctgttacaaaatctaaatttgataatttatatggttgtagagagagcttagttgatggaattaaaagagctacagatgttatgatgtccggaaaggttgcaattgttgctggatttggagatgttggaaaaggaagtgctgcatctctaagacaaagtggtgctagggttatggtaacagaaacagatccaatatgtgcacttcaagcagctatggaaggttatgaagtagttttaatggatgaaatgattaaagaggcagatattatagttactgctacaggaaataaagacattgttacagcagaccatatgagggctatgaaa

SEQ ID NO: 261434 - DNA, 611 bp, Unknown
  Bacterial polypeptide expressing nucleotide sequence isolated from the Sargasso Sea
tatggttatagcaaattctattaagacctccctccctaattacgtaattgctgatatctccttgtcagattttggtcgtaaagaaattaaaattgccgaaacggaaatgccaggattaatggcacttagagataaatatcaatctgaaatgccattaaaaggtgcaaaaatagctggaagtcttcatatgactattcagactgcagtcttaatagaaactcttgttagtcttggcgccgaagtgaaatgggcttcatgcaatattttttcaactcaagatcatgcagcagcagccatcgcagatcaaggaattcctgtatatgcaaaaaaaggggagactcttgatgaatattggaaatatacccactatatccttgattggggttcagactctccaaatatgattcttgatgatgggggagatgcaactggcttattgatccttggtagtaaagcagaaaaagatttatctgttttagataatcctattaatgaagaggaaattgctttattcaattctattaagtctaagttgaaaaatgatagcgatttttattcaagaatcaaaagtaatatcatcggcgttactgaagaaactacaacaggcgttg

SEQ ID NO: 261435 - DNA, 865 bp, Unknown
  Bacterial polypeptide expressing nucleotide sequence isolated from the Sargasso Sea
tatggccctcagggatgagtataagggccagaaacctctagatggcgcaagaatagttggctgccttcacatgactatacaaaccgcagtattaattgaaactttggtagaattgggagcagacgtaagatggtcatcctgtaatattttttcaacacaagaccatgctgctgctgcaatagctaaagcaggcatcccagtatatgcctggaaaggtgaaacagaagaagagtattggtggtgtgttcgacaaactattgagggaaaagaaggatggaaacctaatttaatattagacgatggtggcgatcttacaggtcttatgcataaggaatataaggagctgcttcatgatgtaagaggcttatcggaagagactactactggggtactagcgctcaaaaaaatggaaattgatggaacccttatggtgccagcaataaatgtgaatgactctgtaactaaatctaaatttgataatctttatggttgtagagagagtttagtggacggcattaaaagagcaactgatgtgatgatgtcaggaaaggttgcaatcgtcgctgggttcggggatgttggaaaaggaagcgcagcttcattacgtcaaagtggagcaagagtaatggttacagaggcggatccaatatgtgcattgcaggcagcaatggaaggttatgaagttgttacaatggatgatatgataaaggaagcagatattgtcgtaactgctacaggtaacaaagatattgtaactgccgatcatatgagagaaatgaaggatagagcaatactatgtaacattggtcacttcgataacgaaattcaagttgaagcgctgaaaaactataaatgggatgaaatt

SEQ ID NO: 261436 - DNA, 784 bp, Unknown
  Bacterial polypeptide expressing nucleotide sequence isolated from the Sargasso Sea
ccagcgctcatgtcacttcgagagaaatttagggaacagcaacctttgcaaggagcaagaattcttggttgcattcatatgactgtgcaaaccgcagtactaatagagaccttgatagcgctgggcgccgaggtgcgatggtcttcttgtaatattttttcaacgcaggatcatgccgcagcatgtatcgcagctcaaggtatcgcggtgtatgcctggaaaggtcaaacggaagaagaaggtatgtggtgcgtcgaacagacaatcttaaagaatggtgctccctgggatgcaaatatgatcctagatgatggaggcgatcttactgcaatggttcatgaaaaatatcctaacatgctgaagtatattcacggcatcactgaagagacgacaactggtgtactgcgccttatcgagatgaagggcaaaggaacacttaaagtgccggcaattaatgtgaatgattcggtgaccaaatcgaaaaatgacaataagtacggatgccgtcatagccttaatgatggtatcaagcgtggaacagatatgttgctatccggcaagcatgctctggttattggttacggtgatgtcggcaaagggtcagctcaaagcctgcggcaggagggaatgatagtgaaagttgcagagatcgatccaatctgcgcaatgcaagcatgcatggatggtttcgaagttgactcaccttataaattaggcgaaaacacgggagatgagtctgccataaatgaagcgcttttatcgaaaatggacatgatagtgaccg

SEQ ID NO: 261437 - DNA, 910 bp, Unknown
  Bacterial polypeptide expressing nucleotide sequence isolated from the Sargasso Sea
aatattttttcaactcaagatcatgctgccgctgctattgctaaagcaggtattcctgtttatgcctggaagggtgaaactgaagaagaatacttatggtgtattaaacagactattatagctaaatctgattggaaaccaaatatgttattagatgatggtggcgacttaacagcaatcatgcataatgaatataaagaattgatgaaagatgttaaaggcgtttcagaggaaacaacaactggtattaaagcacttaataaaatggaaaaagataaatctctcttagttccagctataaatgtaaatgactcagtaactaaatcaaaatttgataatttatatggctgtagagaaagtttggttgatggcataagacgagcaacggatgtaatgatgtcaggtaaaattgcaattgttgctggctttggagacgttggaaagggaagtgctgcatctttgagacaaagtggagcaagagtattagttacagaagcagatccgatttgtgctcttcaagcagcaatggagggttacgaggttgttttaatggaagaagctataagtagagcagatatagttgtaactgcaacaggaaataaagatatagttaccgcagaccatatgcgagacatgaaagatagagcaatattatgtaacattggtcactttgataatgaaatacaagttgaagctttaaaaaactataagtggacagaggttaaacctcaagttcacgaaatagaacttcctggtggtaagagaattattttactagcggagggaagattggtaaatttaggttgtgcaactggacatcctagttttgttatgagtgcatcttttactaatcaggtaattgcgcaaatagaactttggcataatcacaaaaattatgaaaataaggttt

SEQ ID NO: 261438 - DNA, 628 bp, Unknown
  Bacterial polypeptide expressing nucleotide sequence isolated from the Sargasso Sea
gatgagcgattataaagttaaagatataaatgatgcagaatttggaagaaaagaaatctctttagcagagactgaaatgcctggcttaatggcattaagaacagaatataaaggaaaacatcctcttaagggtgcaagaattttaggttgtttacacatgacaattcaaacagcagttttaattgaaactctagttgatcttggtgctgaagtaagatggtcttcatgtaatatattttctactcaagatcatgctgctgcagcaatagcaaaagcgggaattcccgtatttgcatggaaaggtgagacagaggaagaatattggtggtgtgtaaaacaaacaatcgaaggtaaaaaagattggaaacctaacatgattttagatgatggcggtgatctaactgctcttatgcataaagattataaagacttattaaaagatataaaaggtttgagtgaagaaacaacaactggagttttagctcttaaaaaaatggaagaaaatggaacactgttagtacctgcgatcaatgtaaatgactcagttacaaaatcaaaatttgataatttatatggatgcagagaaagtttagttgatggaattaaaagagcaacagatgttatgatg

SEQ ID NO: 261439 - DNA, 346 bp, Unknown
  Bacterial polypeptide expressing nucleotide sequence isolated from the Sargasso Sea
gacagaagttaaacctcaagtcgatgaagttgaatttaatgatggtaaaaaaattattattttagctaaaggtaggttagttaatttaggctgtgctacaggtcatcctagttttgttatgagtgcatcatttactaatcaagttttggctcaaatggaaatatgggaaagttttgaaaaatatgataataaagtttatacattacctaaacatttagatgagaaagttgcaaaactacatctcgaaaaagttggagcagtattaacaaaactcactgacgaacaagcaaattatattggtgtatcatcaaaaggtccttttaaatcagataattatagatattaa

SEQ ID NO: 261440 - DNA, 750 bp, Unknown
  Bacterial polypeptide expressing nucleotide sequence isolated from the Sargasso Sea
attcagcgaccaagtcgaagttcgataacctgtacggctgccgggaatccctggtcgacagtatcaagcgcgccaccgacgtcatggtcgcgggcaagctcgccgtcgtgctgggttacggtgacgtgggcaagggttcagcacagtctcttcgcggcctcggcgcgacggtgtggatcacagaaatcgatcccatctgtgcactgcaggcagcgatggaaggttaccgggtcgtcacgatggaagaagcggcaagtcaggccgatatctttgttaccgcgaccggcaactttgaggtcatcacccatgatcacatgaagcagatgaaagatcaggccatcgtctgcaacatcggccactttgacaacgagatcgcctgtgcctcccttgagcagtatgagtgggaaaacatcaagcctcaggtcgaccacgtgatcttccccgacggcaagcggatcatcctgcttgcccagggtcgtctcgtgaaccttggatgcgcgaccggccacccgagtttcgtcatgtccgcctcattcaccaaccagacgttggcgcaaattgagttgttccaaaagcgtgatcagtatgagaacaaggtgtacatcctccccaaacatctcgacgagatggtggcaagactgcacctggagaaaatcggcgccaagttgacgcagctgaccgaccagcaggcggcttacatcgacgtgtcagcagatgggccctacaaggccgaccactatcgttactgat

SEQ ID NO: 261441 - DNA, 847 bp, Unknown
  Bacterial polypeptide expressing nucleotide sequence isolated from the Sargasso Sea
catgatacttgatgatggtggagatctaacagccttgatgcataaagattataaagatttattaaaagatataaaaggtttgtcagaagaaactacaaccggagttttagcattgaagaaaatggaaagcgaggggaccctactcgttcctgcaataaatgttaacgattcggtcacaaaatcaaaatttgataacttatatggttgtagagaaagtttagttgatggaattaaaagagctactgatgttatgatgtcaggaaaagttgctatcgtagcaggatttggcgatgttggaaaagggagtgccgcatcacttcgtcaaagtggcgcaagagttatggtcactgaaactgatcctatatgtgcacttcaagctgcaatggaaggttatgaagtagtgttaatggatgatatgatcaaagaagccgacattgttgtaacagctactggaaataaagatgtagtcacagctgaccatatgagagatatgaaagatagagctatactttgcaacattggacactttgataatgaaattcaagttgaagcactaaaaaattataagtgggatgaaattaaaccacaagttcatgaaattactctacctagtgataaaagaataattttacttgctgaaggtagattggttaatcttggttgtgcgactggacacccaagttttgtgatgagtgcatcttttacaaatcaagtaactgctcaaatagaactttggaataattcagataagtatgaaaagaaagtatatgttttacctaaacatttagatgaaaaagtagcaaggcttcaccttgaaaaagttggtgctaaattgactaagttatct

SEQ ID NO: 261442 - DNA, 896 bp, Unknown
  Bacterial polypeptide expressing nucleotide sequence isolated from the Sargasso Sea
tatggaaaatgattataaagttgctgatataaaacttgctgaatttggaaggagagaaatatctcttgcagaaaatgaaatgccagccttaatggcgttaagggataaatatagagatgagcagcctttggctggtgcaaaaataatgggatgcattcacatgactattcaaactgctgttttgatggaaacattgctcgatctcggagcagaattaagatggtcatcctgtaacatattttcaacgcaggatcatgcagcagcagcaatggccgcaaaaggggttcctgtatttgcttggaaaggtgaaactgaagaggagtacgagtggtgtattgaacaaactatttgtaaagatggaaaaccatgggatgcgaatatgattcttgatgatggaagtgatcttacagctatggtgcatgctaaatttcctgacatgttagagactattcatggtgtgtctgaagaaacaactactggggtgcataggttaaaagagatgctagaaaaaggcgagctaaaaattcctgctattaatgtaaatgactcagttacaaaagcaaaaaatgataataaatatggatgtagacatagtcttaatgatgctctgaaaagaggaaccgatatgttgctttctggtaagaaaggattggtaattggttatggagatgttggtaaaggttcggctgcaagtttggctcaagaaggcatgatagtaagtgttgttgagtcagatccaatttgtgcgatgcaggcttgcatggatggatttgcggttgtttcatgttacaaaaatggtgtagttacaagagatcctaaggatattaatatggatgtcatgggtgatacggatctaatagtaactaccactgggcatgtaaatgtttgtgattctg

SEQ ID NO: 261443 - DNA, 787 bp, Unknown
  Bacterial polypeptide expressing nucleotide sequence isolated from the Sargasso Sea
aggtgagaccgaagaggaatattggtggtgtgtaaaacagacaattgaaggaaaaaaggattggaaaccaaacatgattcttgatgacggtggtgacttaactgcacttatgcacaaagattataaaaatttattaaaagatataaaagggttatctgaagaaacaacaacaggagtactagcgcttaaaaaaatggaggcacaaggaacattattagttccagcgattaatgtgaatgattcggttactaagtctaaatttgacaatttgtatggttgtagagaaagtttagttgatggaataaaaagagctaccgatgtgatgatgtctggaaaggttgcaattgttgcaggatttggtgatgttggaaaaggaagtgctgcttcattgaggcaaagcggagctagagtaatggttactgagactgatccaatttgtgccctacaagcagcgatggaaggttacgaagttgtgctaatggatgaaatgattaaagaggcagatatagttgttacagcaacgggaaacaaagacatagtaacagctgaccacatgagagatatgaaagacagagctatactttgtaatattggacactttgataatgaaattcaagttgaagcattgaaaaattataaatgggacgaaattaaaccacaagttcacgaaataactttgccaagtaagaaaagaataatattacttgctgaaggaagactggttaacttagggtgtgctactggacatcccagttttgtaatgagtgcttcatttaccaaccaagta

SEQ ID NO: 261444 - DNA, 952 bp, Unknown
  Bacterial polypeptide expressing nucleotide sequence isolated from the Sargasso Sea
gatcgcagaaactgaaatgccaggattgatgagcatcagagaggaatttggtgcagagaagccattaaagggtgccaggattgccggatgtcttcacatgacaattcaaacagcggtattgattgaaaccctcattgaacttggtgccgatatcaggtggtcttcttgcaacattttttccacacaagatcatgccgcagctgcgcttgctgcaaaaggtatccctatattcgcatggaaagatgagagtgaagaagaatactggtggtgtgttgagcaaacaatcaatggaccaaatggttggacgccaaatcttatacttgatgatgggggtgatctaacaggcctcatgcacgacaagtatcctgaattaatgaaagatataatcggtgtttcggaagaaaccacaacaggtgttcttcgtctttacaatatggaaaaagatggaacgttgatgtgtccagcgattaatgtaaacgattcagtcacaaagtcgaaatttgataacctgtatggatgtcgtgaatcactcgtggatggaatcaaaagagcaacggacgtcatggttgctgggaaaatagcaattgttgctggttatggagatgttggaaaaggttctgcacaaagtctcagggggcttggtgccacagtatggattaccgaaattgatccaatatgcgccttgcaagccgcaatggaaggataccgagttgtaaccatggacgatgcttgttcacaagcagatatcttcgttacagctactggaaattacaatgtaatcgacaagcatcatttagagcagatgaaggaccaagctatcgtttgtaacattggtcactttgacaatgagataaatgtggagtcaatgaacgatcttgagtggatcaatatcaagcctcaagtcgaccatattgtctttccggatgggaaaagaatcatcctgcttgctgaa

SEQ ID NO: 261445 - DNA, 699 bp, Unknown
  Bacterial polypeptide expressing nucleotide sequence isolated from the Sargasso Sea
tatgaccgattataaagttaaagatatatccgaagcagaatttggaagaaaagaaatttcattagcagaaacagaaatgccaggattaatggctttaagaaaagaatacaaaggtaaaaaacctcttaagggtgcaaaaatattaggatgtttacatatgactatccagacagctgttttgatagaaactcttgttgatttaggagccgaagttcgatggtcatcatgtaatatcttttccacgcaggatcatgccgccgccgctatcgcaaaagctggaataccagttttcgcctggaaaggtgaaacggaggaagaatattggtggtgtgtaagacaaacaattgaaggtaaaaaggactggaagccaaatatgattttggatgatggtggtgatttaactgcattaatgcacaaagattataaaaatttaatgaaagatataaaaggcttaagtgaggaaactacaactggtgttttagctttgaaaaaaatggaagaacaaggaacacttttagtaccagcaatcaatgtaaacgactcagttactaagtctaaatttgataacttatatggatgtagagagagcttagttgacggaattaaaagagcaactgatgtaatgatgtcaggaaaagtcgctattgttgcaggttttggtgatgttggaaaaggaagtgcagcttctttaagaacaag

SEQ ID NO: 261446 - DNA, 544 bp, Unknown
  Bacterial polypeptide expressing nucleotide sequence isolated from the Sargasso Sea
atgtcaaattctacaacaacaactagtttagttgatttattaccatataaaataaaagatattgctttatcaaaagatggtaggaatgctatcgagatttcagaaaaagaaatgcccggtttgatggcaaccagagaaaaatatggttcaggtaagcccttaaaagggaaaaaaattacaggttctcttcatatgacaattgagactgctgtgcttattgatactctagtagatttaggtgcagatgtcagatgggcaagttgcaacatattttcaactcaggatcatgctgctgctgcggttgctgactctggagttcctgtttttgcttggaaaggtgaaacattagaggagtattggtggtgtacaatgcaagctttaacgtggcctgatggttcaggtcctgacttgatagtagatgatggtggcgatgctacacttctaattcataaaggttacgagcttgaagaattttatgaaaaaaataattatgttcctgaaattaaaaccactaagaagaagaaattgttattgaaaagttgat

SEQ ID NO: 261447 - DNA, 773 bp, Unknown
  Bacterial polypeptide expressing nucleotide sequence isolated from the Sargasso Sea
aatgtttaaagattttgtaataaaggatatctcactcgcagattttggcaataaagaaatagaactcgcaaagaatgaaatgccgggtttagtagctttaactgatgagtataaagaacaaaaaccattgtctggagctcgaattgttggatgtctacatatgacaatacaaacagctgtattgatagaaactcttgttgaattaggtgcaaaagttagatgggcttcttgcaatatattttcgacgcaagatcatgccgcggcagctatggcaaagaaagagattcctgtatttgcgtacaagaatgaaagccttgaggaatattgggaatttgtcgatagaatatttcaatgggaagatggtgatcctaacatgatattagatgatggtggggatgctacgatttatattattctcggtgcaaggtatgaaaaaaataagagcgtcattgataacccccaaaacgaggaggaggaagtactattcaaacagataaaaaaaagatctgatttaagcccgaactggttttccaaaataaaagatcaaattattggagtaaccgaggaaacgaccacaggtgtaaatcgactgaaaatgatggagaatgataacacactaccgtttgcagcaataaatgttaataattcagttacaaaatcaaagtttgataatctttatggttgccgtgaaagcttgatagacggaataagaagagcaacagatgtgatgattgctggcaaacttgcagtcgttgccggatatggagatgttg

SEQ ID NO: 261448 - DNA, 551 bp, Unknown
  Bacterial polypeptide expressing nucleotide sequence isolated from the Sargasso Sea
aatggtcatcgcaaattcagttaaaacctctacacctaattacgtaattgctgatatctctttatcagattttggtcgtaaagaaataaaaattgccgaaacagaaatgcctggattaatggcactgagagataaatatcaatctgaaaaaccactaaaaggtgcaaaaatagctggcagtcttcatatgactattcagacagcagtattaatagaaacgcttgttgatcttggtgcagaagtgaaatgggcttcatgcaatattttttcaacgcaagatcatgcggctgcagctatcgcagatcaaggagtttctgtatacgcaaaaaaaggagagactcttgatgaatattggcaatatacccactatattcttgattggggttcagactctccaaacatgattctggatgatgggggagatgcaactggcttattgattctcggtagtaaagcagaaaaagatttatctgttttagataatccagggaatgaagaagaaattgctttgtttagttctattaagtctaagttggaaaatgatagtgact

SEQ ID NO: 261449 - DNA, 616 bp, Unknown
  Bacterial polypeptide expressing nucleotide sequence isolated from the Sargasso Sea
tatggaagattttaaggtaaaagatatatctcaagcagaatttggtagaaaagaaatttcactagctgaaacggaaatgcctggattgatggcaatcagaaaagaatataaaggaaaatctcccttaaaaggagctagaattgttggttgccttcatatgacaattcaaacagctgttttaattgaaaccttagtagagttgggtgctgatgttagatggtcctcatgcaatatattttcaacacaagatcatgcagctgcagcaatagctaaagtaggaattcctgtatttgcatggaaaggtgaaacagaagaagaatattggtggtgtgtaaagcaaacgattgttggaaagaaggggtgggagccaaatatgatcttagatgatggtggcgatttaactgctttgatgcacaaagaatacaaagaacttttaaaaaatgttaaaggacttagtgaagagactaccactggagttttagctttaaaaaaaatgcaagaaaaaggaaccttaatggtcccggcaattaatgtgaatgactctgttacaaaatcaaaatttgataatttatacggttgtagagaaagtttagttgatggaattaaaagggcaaca

SEQ ID NO: 261450 - DNA, 862 bp, Unknown
  Bacterial polypeptide expressing nucleotide sequence isolated from the Sargasso Sea
tatgagttataaaaaatatattccttttaaagtaaaagatgtttctttagctgattggggaagaaaagaaattaaacttgctgaagctgagatgccaggattaatggctttaagagatgagtatggcaactcaaaacctctaaaaggtgcaagaatagcaggttgtcttcacatgactattcaaacagcagtacttatcgaaacattggttgagttaggggctcaagtaacttggagttcatgcaatatattttcaactcaagatcatgcagcagcagctattgcagcagcaggcatcccagtttatgcttggaaagggatgaatgaagaagaatttaaatggtgtattgaacaaacagttttttttggtaaggataaaaaaccactaaatatgattttggatgatggtggagatttaacaaatttagttttggatcattaccctgatttagttgacgaaattaaaggtttatctgaagaaacaacaacaggagttcatagattatacgaaagagttaagaatggaactctaccattgccagcaattaatgtaaatgattctgttactaaatctaaatttgataataaatatggttgccaggaaagtgcggttgatgctgttagacgagctaccgatattatgatggcaggtaaaagggttgtagtggcaggatatggtgatgtaggaaagggtacagtcgcttcattttctggagcgggagctatagttactgttgtagaaatagatccaatttgtgctcttccagcctccatggatggttatgaggttaaaaaaatgaaaacagtaattggaaatgctgatataattgtaactgccactggaaataaagatattccttaa

SEQ ID NO: 261451 - DNA, 469 bp, Unknown
  Bacterial polypeptide expressing nucleotide sequence isolated from the Sargasso Sea
cagggtaataaagatgtcattagaatagaacacatgcgtgaaatgaaagacatggcaatcgttgccaatattggtcactttgacaacgaaattcaagttgcccatcttaaaaatcacaagtggacgaatattaaagatcaagtagatatgatcgaaatgccatctggaaatcgattgatattactttcagagggccgtttactaaatcttggaaatgcaacgggtcatccatcttttgtgatgtcagcttcatttacaaaccaagttcttgcgcagattgagctttggaaaaagggcggcgagtataaaaacgatgtttatattctacccaagcatttagatgaaaaggttgcccgacttcatttggagcgtattggtgttaaattgacaaaattagctacagatcaggcagagtatattggcgtaacacccgaagggccttttaagccagaacactatcgttattgag

SEQ ID NO: 261452 - DNA, 592 bp, Unknown
  Bacterial polypeptide expressing nucleotide sequence isolated from the Sargasso Sea
atggcgaatgtgattgaaaaaataaaagatgacttcaaagttgctgacataagtttagctgaatggggtgataaagaaattaaaattgctgaaacagaaatgcctggacttatgtcagtaagggaaaaatatgcaggcaagcaacctctaaaaggagcaaatattgtgggttgtcttcatatgacaattcaaactgcagtattaatagaaacattaatcgaattgggagcttctgtcagatggtcatcatgtaatattttctctactcaagaccatgctgcagctgctctggccgcaaaaggcataccaatctttgcatggaaaggcgagacagaagaagagtatttgtggtgtattaaaaaatctatagaaggaaatccatcatggaagcccaacatgattttagacgacggaggagatcttacatccataatgcataaaaactatcctgaactattggcaaatgttaaaggtttatcagaggaaactaccaccggcgtattaagattaaatgaaatggttgctaataaagagttaaaagtcccagcatttaatgtgaacgattcggtaactaaatctaagtttgataatt

SEQ ID NO: 261453 - DNA, 555 bp, Unknown
  Bacterial polypeptide expressing nucleotide sequence isolated from the Sargasso Sea
tttgtgcactacaagccgctatggaaggctatgaagtagtcctgatggatgacatgattaagcatgcagatatagttgtgactgctactggaaataaagatatcataacagctgatcatatgagagatatgaaagatagagcaatactttgtaacattggtcacttcgataatgaaattcaggttgaagcacttagaaattataaatgggacgaaataaaaccacaggttcatgaaatagaactccctagcaaaaaaagaataattttacttgcggaaggaagattagtaaacttaggatgtgcgactggacatccaagttttgttatgagtgcatcttttacaaatcaagttacagctcaaatagaattatggaataattttgataaatacaaaaaaaaagtttatgttttaccaaaacatctagacgaaaaagttgcgatgcttcatttagaaaaagttggagctaagttgaccaagttatctaaagagcaagcagattatattagtgtaaaacaagaaggaccttacaaaccagatgcctatcgctactaag

SEQ ID NO: 261454 - DNA, 808 bp, Unknown
  Bacterial polypeptide expressing nucleotide sequence isolated from the Sargasso Sea
aaagaaattcctgtttttgcttggaaaggtgaatctgaagaagaattttggtggtgcattgaacaaactataaaaggaccagatggctggaaaccaaatttaattttagatgatggtggtgatcttactaagttaatgcacgaaaagtaccctgagatgatggatgatataaaaggtttatctgaggagacaactactggggttttaagacttattgaaatggagaagaatgaaaccctaaaggtgccagcaataaacgttaatgattcagtaactaaatcaaaatttgataacaaatatggttgtagagagagtttagtagatggtatcagaagggcaactgatgtaatgatggcaggaaaagttgctgttgttgctgggtatggtgatgtgggtaaaggttctgcagaaagcttaagaaatgctggttgtagggtgttggttacagaagttgatccaatttgtgctcttcaagctgctatggatggttttgaagttactacaatggaagaagcatcagaaagagctgatatttttgttacagcaacaggaaatattgatgttattactgttgatcatatgagatcaatgaaagatagaagtattgtttgtaacattggccattttgattctgaaattcagattgaatctttaaaaaactataaatggaataatataaaggctcaagtagacgaaattgaatttcctgatggaaagaaaattattgttcttgcggagggtagacttgttaatttaggttgtgcaactggacacccaagttttgtaatgtcagcgtctttttgtaatc

SEQ ID NO: 261455 - DNA, 418 bp, Unknown
  Bacterial polypeptide expressing nucleotide sequence isolated from the Sargasso Sea
atgagtgattttaaggtcaaagatatttcattagcagaatttggtagaaaagagatttctcttgctgaaactgaaatgccaggattaatggcattaagaaaagaatacaaaggaaaaaatccacttaaaggtgcaagaattttaggatgtcttcatatgacaatccaaacagcagttcttatagaaacacttgtagatttaggagctgaggttagatggtcttcatgtaatattttttcaactcaagatcatgcagcagctgcaatagctaaagcaggcatacccgtatttgcttggaaaggtgaaacggaggaagagtattggtggtgtgttaagcaaaccattgaagggaaaaaagactggaaaccaaatatgatacttggtgacggtggagatttaactgcattaatgcataaag

SEQ ID NO: 261456 - DNA, 739 bp, Unknown
  Bacterial polypeptide expressing nucleotide sequence isolated from the Sargasso Sea
aaatatgggtgccgtcatggtttagatgatgctataaagcgtggcacagatatgctcctttcgggaaaaaaagcattagttattggatatggagatgttggcaagggttcagcagactcattgatgcagcaaaaaatgattgtagacgtaacggaagtagatccaatttgtgctatgcaagcatgttttgacggcttctccgtagtttcagcctataaagaaggaaatgtttctcgggatggcactaatctcgataaaaatttattaaaaaaatatgaccttgttgttactactacaggaaatataaatgtgttagataaatatatgttagattctcttaaatctggctgtgtaatatgcaatatagggcactttgataatgagatagatgtgaactatttaaagtcatttaaatggtatgaagtgaagcaaggtgtgcacaaaattatcagatcaaaagatgattatttaattcttttaggagaaggaaggcttgtgaatcttgccctagctacaggacacccaagtagagtcatggatggatcattctgtaatcaagtgttggctcaaattgctttatataaagattcttttgcaacaaaaaaagaagatgaaaaagaaatttatgtcaaagttcttccaaaagagcttgatgaagaagttgcgcaaatgatggtcgttggttttggcggaacattaacaaaacttacagaagaacaatctaagtatataggcgtaa

SEQ ID NO: 261457 - DNA, 679 bp, Unknown
  Bacterial polypeptide expressing nucleotide sequence isolated from the Sargasso Sea
tatggaaaatgattataaagtagcggacatgagccttgctgattttggcagaagagaaatatcgcttgcagaaaatgaaatgcccgccttaatggctctgagaaccaaatacaaagatgcccaacctcttaagggtgcaaaagtaatgggctgtattcatatgaccatccaaacagctgttttaatcgaaactttggtagatcttggtgcagaagttcgctggtctggatgcaatattttttctacacaagatcatgcggccgctgcaatcgctgctgctggcatccctgtttttgcatggaaagggcaaacagatgaggagtttgattggtgcatagaacaaacaattctaaaagatgatcagccatgggatgcaaatatgatcctcgatgatggtggtgatcttacacacatggttcatacaaaatttccagatatgctagatactattcacggtgtatcagaggagactactacgggagtgcatagacttaaagcaatgcttgagagcaatacccttaaagttccagctattaatgttaacgactcagttactaagtctaaaaatgataataaatatggatgcaggcatagtctcaatgatggcataaagagagcaactgatatgtttctttcatcaaaaaaggcattggtgattggatatggcgatgtggaaaag

SEQ ID NO: 261458 - DNA, 865 bp, Unknown
  Bacterial polypeptide expressing nucleotide sequence isolated from the Sargasso Sea
gtacgttggtctggtgcaaatatcttctccacgcaagatcatgctgctgcagctattgcagctgcaggtattcctgtctttgcttggaaaggccaaacagatgaggaatttgactggtgcatggagcaaacaatagtcaaagatggtgcgccttgggatgcaaatatgatcttagatgatggcggtgacctaactcatatggtgcattctaaatttcctgacatgcttgaaagcatccacgggatttcagaggaaactaccactggtgttcataggcttaaagcaatgcttgagaaaaatgagctcaaagtaccagcgataaatgttaatgactcagtcaccaaatctaagaatgataataaatatggctgcagacatagcctaaatgatgcaattaaaagaggcacagatatgttcctttcatctaagaaagcattggttattggatatggagatgtgggaaaaggttctgcattaagcttagctcaagaaggaatgattgtgagggttgtcgagtctgatcctatatgtgctatgcaagcttgtatggatgggtttgaagtagtctctacctacaataatggagtcgtaactagagacgttaaagacataaatacagcagtccttgaggatactgaccttattgtaacaaccacaggaaatgtgaatgtttgtgatgaagcaatgctgcgttcagtcaaaaatactgctgttatttgtaatattggtcactttgataatgaaattgatacacaattcatgcgagataaatggtactgggaagaaattaaacctcaagtacatagagtatttagagatacatctccatcagaaactccaaacttacaaagtaaaaactacgtta

SEQ ID NO: 261459 - DNA, 571 bp, Unknown
  Bacterial polypeptide expressing nucleotide sequence isolated from the Sargasso Sea
atgagccaacaatatatagtaaaagatatctctctatctgattttggtcgcaaggaattaagtatagctgaaacagaaatgcctggtttgatggcattgcgctcggaatatggcgaaagcaagcctttgaaaggcgcgcgtatcgttggctcactgcacatgactattcaaactgcagttttaattgaaacacttgtggcattgggagccgatgtgcgatgggcgtcctgcaatattttttctacacaagaccacgcagccgcagcaattgccgcagcaaatattcctgtttttgcaattaaaggtcaatctttagaagagcattgggattacttagatcaatcttttatgtttcctgatggcccaaatatgattttagatgatggtggtgacgcaactttatatgtacttcttggtgctcgcgcggaagaaggtgaagatattattcctgttccccaatcagaggaagaagaggttataaaggcgcaaataaagaagcgtatggaacaatcacctgggtggtttacgaaaacacaagacgccatcaaaggtgtttcagaagaaacaacaa

SEQ ID NO: 261460 - DNA, 772 bp, Unknown
  Bacterial polypeptide expressing nucleotide sequence isolated from the Sargasso Sea
aatgcacaaagattacaaagaattaatgaaagatattaaaggtttatcagaagaaacaacaaccggagtattagcacttaaaaaaatggaacaagatggtaccctgttagttccagcgatcaacgtcaacgactcagtgacaaaatcaaaatttgacaacctgtatggttgcagagaaagtttagtagatggaattaaaagggcaacagatgttatgatgtcaggtaaggttgcaatagtagctggttttggcgatgtaggtaagggtagtgcagcttcactcagacaatctggtgcaagagtaatggttaccgaaactgatccaatttgtgcacttcaggctgcaatggagggttacgaggttgtcaccatggatgatatgattagccaagcagatatagtagttactgcaactggtaataaggatattgttacagcagaccacatgagagagatgaaagatagagcaattttatgtaacattggccacttcgataatgaaatacaagttgatgcattaaaaaattataaatgggacgaaattaaaccacaagttcatgagattacattgccaagtaataaaagaataatattattagctgaaggtagattagtaaatctaggttgtgctactggtcatccaagctttgtaatgagtgcttcatttacaaaccaagtaaccgctcaaatagaactatggaataattcagaaaaatatgagaagaaagtttacgttttaccaaaacatttagatgaaaaagttgctatgctg

SEQ ID NO: 261461 - DNA, 882 bp, Unknown
  Bacterial polypeptide expressing nucleotide sequence isolated from the Sargasso Sea
cttaaaggctctagaattgcaggatgtcttcatatgacaattcaaactgcagttttgattgaaacattagttgatctaggcgctgaggtaacatggagttcatgtaatattttttctacacaagatcatgctgcagctgctattgcagctaacggtattgctgtttatgcatggaaaggtatgacagaagaggaatttaattggtgtatagaacaaacactattttttggggaagaaaaaaatccattaaatatgatacttgacgatggaggtgatcttacaaacatggtacttgacgagtatccagagcttgtatctgagattaaaggtttatctgaagaaacaacgacaggagttcataggctttatgatagaatgaagaatggcaccttaccgcttcctgccattaatgttaacgattctgttacaaaatctaaatttgataataaatatggttgtaaagagagtgcagttgatgctgtaagaagagcaactgatattatgcttgcaggtaaaagagttgttgtttgtggatatggtgatgttggaaaaggtactgctgcatcttttaggggagctgggtcaatcgtaacagttacagaaatagatcctatttgtgcgcttcaagcctcaatggatggttatgaggttaaaaaattaaaaagtgtcatctctaatgctgatattgtaattacagcaacaggaaataaggatatagtcaattctgagtcatttaaaatgatgaaggataaagctatagtatgtaatattggtcattttgataatgagattgacatgagttggttagaaactaatttttctgaacagaagactactataaaaccacaggttgactcatatagaatatccaaggataaagaa

SEQ ID NO: 261462 - DNA, 791 bp, Unknown
  Bacterial polypeptide expressing nucleotide sequence isolated from the Sargasso Sea
atggtgtctagatcaaacaatcaacaaagatggtaagccttgggatgccaatatgattttagatgatggtggagatcttacccttaaagtacataaagattatcctgaaatgctctcaaaaattcatggagtttctgaagaaacgacaacaggagttaagcgattaaaagaaatgttagaaagcggtgaattaaaagttcctgccataaatgtaaatgattctattactaaatcaaagaatgataataaatatggatgtagacatgggctagatgatgccattaaaagaggaacagatatgcttttatctggcaagaaggctcttgtaattggttatggtgatgtaggtaaaggctcagctgattcattaaatcagcaaaaaatgatcgttgatatcactgaaattgatccaatctgtgcaatgcaagcatgttttgatgggtttaatgttgtctctgcttatgaaaatggaaatgttagcaaagatggcaagaatttagataagaaattattaggaaaatatgatttagttgttaccacaacaggtaatattaatgttttagataagcatatgctcgatgccctaaaatctggttgtgttgtttgcaatataggacatttcgatagtgaaatagatgttaaacatttaaagaattatgagtggaaggagattaagcctggtgttcataaagtaataaaaaatgaagatgattatataatccttttgggtgagggcagactagttaatctagctttagcaactgggcatccaagtagagtcatggatggat

SEQ ID NO: 261463 - DNA, 550 bp, Unknown
  Bacterial polypeptide expressing nucleotide sequence isolated from the Sargasso Sea
tactgatgtattagttaccacaacgggtaatgtaaacgtctgtgattcagcattgctttcaacacttaaggatggggctgttgtatgtaatattggccattttgataccgaaatagatacaaaatatatgcaggaaaaatggtattgggaagaagtaaaaccacaagttcatagaatattcagagattgttcgcctgatcaggaacctgacttatcaagcaagaattatctaatacttttagccgaaggaagactggtgaaccttggaaatgccacaggtcatccaagcagaattatggatggctcatttgccaaccaagttcttgcccaaatgcatctctactcagctggttttgcaaatgtaaatgatgaagataaaaagaaagaattaattcaagtagaggtccttcctaaaaaacttgatgaggaagttgcctcccttatggttcaaggttttggcggtgttgttacaaagcttactgaagagcaagctgattacataaatgtcccgcaagatggtcctttcaaagaagattcttataagtactag

SEQ ID NO: 261464 - DNA, 396 bp, Unknown
  Bacterial polypeptide expressing nucleotide sequence isolated from the Sargasso Sea
attttgataatgaaatacaggtcgataaattaaatgaatcatcaaatgttcaaagagatactattaaacctcaagtggatcgatatacttttgatgatggtcactcagtatatttgctcgcggagggacgtttgatgaatcttggttgtgcaacaggacatcctagttttgtcatgtcaaattcatttactaatcaagtattagctcaaatagcattagtaaaagataaaccagatcttggtgtctatatgttgccaaaggagcttgatgaagaggtcgcgcgtttgcacctaagtcatttaggagtaactctaacagaattatctgatgaacaagcagactacataggtgtatctaaatctgggccatttaagcctgagcattacagatattaat

SEQ ID NO: 261465 - DNA, 780 bp, Unknown
  Bacterial polypeptide expressing nucleotide sequence isolated from the Sargasso Sea
ttgtttacatatgacaatacagactgctgttttgattgagactctagtattcttaggtgctactgttagatggagctcatgtaatattttttctactcaagatcacactgctgcagcaatagctgccaaaggcattccagtatttgcttggaaaggaatgacagaggaagaattttggtggtgtattgagaaaacattacaaggcccagatggttggaagccaaatatgattttagatgatggtggagatgctacaaaaataattcatgaaaagtatccaaaaatgttggaagaaattttaggtttatcagaagaaacaaccacaggtgtccaccgtttgaaagaaatggaaaaaaatggaacattaaaggttccagcaataaatgttaatgactcagttactaagtctaaatttgacaacttatatggttgtaaggaaagtttagtagatggaatacgaagaagaactgatgtaatgatggctggtaaaatagccgttgtagctggatatggagatgttggtaaaggttcagcagctagcttaagaggtgcaggtgcacgtgtttgtgtgactgaaataaatccaattaatgcacttcaagcggcaatggaaggttacgaagttgttacaatggacgatgcttgtaaatacggcgatatatttgttaccgccactggtaatcttgatgttattacgcaagatcatatgagacaaatgagagatcgtgctatcgtttgtaatattggacattttgataacgaaatacaaacagaagctct

SEQ ID NO: 261466 - DNA, 856 bp, Unknown
  Bacterial polypeptide expressing nucleotide sequence isolated from the Sargasso Sea
ttgagaaaagaatataaaggaaaaaatcctcttaaaggagcaagaattttaggatgtcttcacatgacaattcaaactgcggttctcattgaaactcttgtagatttaggagcagaagtaagatggtcttcatgtaatattttttcaacgcaagatcatgcagcagcagctattgcaaaagcaggtattcctgtctttgcttggaaaggtgagactgaagaagaatattggtggtgtgttaaacaaacaattgagggaaagaaggattggaaaccaaatatgattcttgacgacggtggagacctaactgcacttatgcataaagactacaaagatttattgaaagatatcaaaggattatctgaagaaacaacaacaggcgtattagcgcttaaaaagatggagtcacaaggaacactattagttccagcgataaatgtaaatgactcggttacaaagtctaaatttgataatttatatggttgccgtgaaagcttagtagacggaattaaaagagcaacagatgtaatgatgtctggaaaggttgcaatagttgcaggttttggggacgttggaaaaggaagtgctgcctcattaagacagagtggtgcaagagtaatggtaacggaaacagatccaatttgtgctcttcaagctgccatggaaggttatgaagtagttttaatggacgaaatgattaaagaagcagatatagttgttactgcaactggtaataaagacatagtgactgctgatcatatgagagacatgaaggatagagctatactttgtaacattggacactttgataacgaaatccaagttgaagcattaaaaaattataaatggggatgaa

SEQ ID NO: 261467 - DNA, 802 bp, Unknown
  Bacterial polypeptide expressing nucleotide sequence isolated from the Sargasso Sea
aaaagagatctccctagcagagactgaaatgccaggattgatggcattaaggaaagagtacaaaggaaagaaccctcttaaaggagcaagaattttaggatgtcttcatatgacaattcaaaccgcagttttaattgaaactcttgtagatttaggagcggaagtaagatggtcttcatgtaatattttttcaacgcaagatcatgcagcagcagctattgctaaggtaggtatacctgtatttgcatggaaaggagagaccgaagaagaatattggtggtgtgtaaaacaaacaattgaaggaaaaaaagattggaaaccaaatatgatccttgatgatggtggtgatttaactgcacttatgcacaaagactacaaagatttattaaaagatatcaaagggttatctgaagaaacaacaactggagtgttagcacttaaaaaaatggaagcccaaggaactttgttagttccggctattaatgtaaacgactcggttacaaaatctaaatttgataatttatatggttgtagagaaagtttagtagatggaattaaaagagctacagatgtaatgatgtcaggaaaagttgcaattgttgcaggatttggtgatgtaggaaaaggaagtgccgcttctttaagacaaagtggagcaagagttatggttacagaaactgatccaatatgtgctctgcaagctgcaatggaaggctatgaagttgtgctaatggacgaaatgattaaagaggcagatatagttgttactgcaacaggaaacaaagacatagtaacggctgac

SEQ ID NO: 261468 - DNA, 322 bp, Unknown
  Bacterial polypeptide expressing nucleotide sequence isolated from the Sargasso Sea
agaggttgaatttcctgatggaaaaaaaataattcttttatcagagggtcgcctggttaatttaggaaatgccactggacacccaagttttgtaatgagtgcatccttttcaaatcaagtcattgcccaaattgagctatgggaaaactataaaaattatgaaaataaagtttatgttcttccaaaaaaacttgatgaaaaagtagcagctcttcatttgaaaaaagttggtgcaaaattaactgaactaagtgaaaaacaagctgattatattggtgttagtaaagttggaccatttaaagatgaaacatatcgttattag

SEQ ID NO: 261469 - DNA, 193 bp, Unknown
  Bacterial polypeptide expressing nucleotide sequence isolated from the Sargasso Sea
tatgactgattataaagtaaaagatatcaacgaagcagaatttggaagaaaagaaatttcattggcagaaactgaaatgccaggtttgatggcattaagaaaagaatataagggtaaaaatcctttaaaaggtgcaagaattttaggttgtttacacatgacaatccaaacggcagtcttaattgaactttag

SEQ ID NO: 261470 - DNA, 487 bp, Unknown
  Bacterial polypeptide expressing nucleotide sequence isolated from the Sargasso Sea
gtaaaaaatacagctgttatatgtaacattggtcactttgataatgaaattgatactcagtacatgagagacaagtggtattgggaagaaattaaaccgcaagttcatagagtatttagagatacttctccatcagatacaccagaccttcaaagcaaagactatgtcattcttttggctgaaggtaggttagtcaacctaggaaatgcaacaggtcatcctagcagaataatggatggatcatttgctaatcaagttttagctcagatgcacttgtataaacaaggttttgcaaacatcaatgatgctgataagcaaaatgaaatgataacagtcgaagttcttccaaaaaaattggatgaggaagttgccgagctcatggttcaaggttttggtggaacgataactaagctaactggtgaacaggccgattacattaatgttccagttgatggtccatttaaagaagaagaatataaatactaat

SEQ ID NO: 261471 - DNA, 797 bp, Unknown
  Bacterial polypeptide expressing nucleotide sequence isolated from the Sargasso Sea
aatgaacaataaaattaagtgtgacataaaagatattaacctagccaaagaaggtgccttacgtgctgaatgggcttcgaaagaaatgccagttttacattcaataaaagaaagatttataaaagaaaagccattaaaaggaacaaagatttcaggatgcctccacatcactgcagaaacagctaacttagttgaaacactttcagcagggggagctgatgtatttatgtgtgcttccaatccactttcaacccaagatgatattgctgcatacctggttagccaaggcatttctgtttatgcaatcaatggcgaagatgataatacatacgactctcacctcgaggctgttctttctgaaaaacctaacctaacaattgatgatggtgctgatttagttgcaaaactacacggagataatcatcctggtttagagaatattataggcagcatggaagaaacaactacaggtataataagattgaaggcactttcttcagaaggaaaattaaagtttcctgttatagcagttaatgattcagatactaaacatatgtttgataaccgatatggaactggccaaagcacgcttgatgggataattagagcgacaaacattcttcttgcaggaaagactattgtaataattggttatgggtggtgtggcagaggtcttgcatcgagagcacaaggaatgggtgcaaggacagttgtttgtgaggttgattcagtaaaagcccttgaagcaattatggacaatcatgaagttatgaccatggaggaagcaagtaaaattg

SEQ ID NO: 261472 - DNA, 982 bp, Unknown
  Bacterial polypeptide expressing nucleotide sequence isolated from the Sargasso Sea
tgctgtattaattgaaacattagttgagttaggtgctgaggtcagatggtcatcatgtaatattttttcaacgcaagatcatgcagctgccgctattgcaaaagcaggaataccagtttttgcatggaagggtgagacagaagaagaatattggtggtgtgttaaacaaacaattgaaggcaaaaaagattggaagcccaatatgatacttgatgatgggggagatttaacagcactaatgcacaaagactataaagaattaatgaaatcaattaaaggtttatctgaggaaactacaaccggagttttagctttgaaaaaaatgcaatccgaaggaaaactacttgttcctgcaattaatgttaatgattccgttacaaaatctaaatttgataatttatatggttgtagagagagtttagttgatggaattaaaagagctacagatgttatgatgtctggaaaggttgcaattgttgctggatttggagatgttggaaaaggtagtgctgcatctctaagacaaagtggcgcaagagttatggtaacagaaacggatccaatatgtgcactacaagctgccatggaaggttatgaggtagttttaatggatgaaatgattaaagaggcagatattgtagttaccgcaacaggaaataaagacatagttacggcagaccatatgagagatatgaaagatagggcaatactttgcaatattggacactttgacaatgagattcaagttgaagctatgaaaaattataaatgggacgaaataaaaccacaagttcatgaaataacatttccagatggcaaaagaattatattgctagcagaaggaagattggtcaatttgggttgtgcaactggtcatccaagttttgtaatgagtgcttcatttacaaatcaggtaaccgctcaaatagagctatggaataattctgataaatatgaaaagaaagtttatgtttttgcaaaa

SEQ ID NO: 261473 - DNA, 901 bp, Unknown
  Bacterial polypeptide expressing nucleotide sequence isolated from the Sargasso Sea
cttacttttcctgatggatctggccccgatctaattgtagatgatggtggtgatgcaactctgctaattcataagggttaccagcttgaagaatattatgctagctataacaatataccggaaataaaaacggaggtagaggaagaacaaatcattgaaaaattattaagggatgttctcgccaaggatccaaatcattggcacagggtacagaaaaatgtgataggcgtttctgaggagactaccaccggagtgcatcgcttagtacaaatggagaaagatggccatctcttattccctgcgtataatgtcaatgactccgtgacgaagtcaaaatttgataatgtctacggctgtaaggaatctcttgcagatggtttaaaaagatctttagatataatggtagccggaaagactgtagtaatttgtggctacggtgatgtcggaagaggttgcgcccagtctatgaaaggttacggagcgcgagtaatcgtaactgaaatagatccaatttgtgcattacaggcagcaatggagggctttgaagtaaccacgcttgaagacagtctcagtgatggacacatatttgtcacaacaacaggtaacaaggatgtcataactgtggagcacatgtatgggatgagagatcaagctatcgtttgtaatattggacactttgataacgagattcaagtgtatgccttaaacgaggatagttctgtgcatcgggaaattattaagccccaggtagacagatacacatttcccaatggtaaccaagtttttcttcttgctgagggtaggcttgttaatttggggtgtgctacaggacaccccagtttcgtcatgtcaaactctttcaccaatcaagtcatggcgcaaatagctcttgcaaaagaga

SEQ ID NO: 261474 - DNA, 791 bp, Unknown
  Bacterial polypeptide expressing nucleotide sequence isolated from the Sargasso Sea
aaccgatggaactcttatggtgccggcaattaatgtcaatgactctgttactaagtctaaatttgataatctctatgggtgcagagagagtctagtagacagtattagaagagctactgatgtgatgatgtcaggtaaggttgctattgttgctggttttggtgatgttggtaaaggtagtgccgcttcattacgtcaaagtggtgctagagttctagtaactgaaactgatcctatttgtgctttgcaagcagccatggaaggctatgaagttgttcttatggatgaaatgattaaagaggctgacattgtagtaactgcaacaggaaacaaagatatagttacagctgatcatgtaagagatatgaaagatagagctatactatgtaatattggtcattttgataatgagatccaagttgatgctctcaaaaactataaatgggatgaaattaaacctcaagttcatgaaatcacgcttcctgatggaaagagaattattttattggctgagggacgccttgttaatttgggttgtgctacaggacatccaagttttgtgatgagtgcttcatttacaaatcaagtaacagctcaaatggagttatggaatcactcagataaatatgagacaaaactatatgttcttcctaagcatcttgatgagaaggttgcaagactacatctagaaaaagttggtgctaagttgaccaagctttcaaaagatcaggccgattatattagtgtaacaccagagggtccatacaaacctgaagcttatagatactaat

SEQ ID NO: 261475 - DNA, 421 bp, Unknown
  Bacterial polypeptide expressing nucleotide sequence isolated from the Sargasso Sea
atgagccaagattacaaagtaaaagatatggaactagcagaatggggtttaaaagaaatcgctattgctgaaactgaaatgcctggattgatggcacttagagaagaatatggaaacagtaaaccacttaatggtgcaagaattgttggatgtcttcatatgacaatacaaactgctgttttaattgaaacccttgttcaccttggtgcctcagttcgttggagctcatgcaatatattttctacgcaagatcaagccgcagcagcaatagcttcaaaaaacatccctgtttttgcttggaaaggtatgtctgaagatgaattttggtggtgtattgagcaaactcttcaaggtccagatgggtggaaacccaaacatgattttagaaaatggaggagatgcaacgcaaataatccatgaa

SEQ ID NO: 261476 - DNA, 376 bp, Unknown
  Bacterial polypeptide expressing nucleotide sequence isolated from the Sargasso Sea
aatgacccaaccgagttcttacaaagtgaaagacatcggtcttgcctcatgggggagaaaagaaattactttagctgaaaaagaaatgccagggctgatggctttaagggaggaatatggcccttctcagccattaaaaggagctcgaattgcaggttgtttgcatatgacaattcaaactgccgtgctcatagaaactttggtggcccttggcgctgaagttacttggagctcttgtaatattttttctactcaagaccatgctgctgcagctattgcagaggcaggtatagctgtttatgcttggaaaggaatgaacgaagaagaatttgactggtgtatagaaccagacccttttcttggagaagaaagacaa

SEQ ID NO: 261477 - DNA, 337 bp, Unknown
  Bacterial polypeptide expressing nucleotide sequence isolated from the Sargasso Sea
aatggtcacaaaaactgaaaaaataagcaaaattggaactgattataaagtagctgatatatctttagctgaatttggaaaaaaagaaattaagattgctgaaacagaaatgcctggattgatggcaattagagaagagtataaaaaccagaaaccactcaaaggtgcaaatatacttggttgtcttcacatgactatccagacagctgttcttattgagacgcttgttgatttaggtgcttctgttagatggtcttctttgtatattttttcaactcaggatcatgcagcgggctgcatagcaagtcaaaatattcctgtatatgcatggaaagga

SEQ ID NO: 261478 - DNA, 463 bp, Unknown
  Bacterial polypeptide expressing nucleotide sequence isolated from the Sargasso Sea
atgcctcaagattttaaagtaaaagatattaatcaagcagattttggcagaaaagagatttctttagccgaaactgaaatgccaggtttaatggcattaagaaaagagtacaaaggcaaaaaacctttaaagggagcacatattcttggttgtctacatatgacaattcagacagctgttttaattgaaacattagtagatttaggagcagaagttagatggtcatcttgtaatatcttttcgacacaagatcatgcagcagcagcaattgctaaagctggtatacctgtatttgcttggaaaggtgaaactgaagaagagtactggtggtgtgtcaaacaaactatagaaggaaagaaagattggaagccgaacatgattttagatgatggtggagatcttacagctttaatgcataaagattacgaagacatgttaaaaaatattaaaggtgtttcagaag

SEQ ID NO: 261479 - DNA, 746 bp, Unknown
  Bacterial polypeptide expressing nucleotide sequence isolated from the Sargasso Sea
aatgtcacaatctaggacctcgggagacataaaggatatcaacctcgctcctgagggtattcgtcgaatcaaatgggcagaaagagaaatgcccgtactgcgccaaataaagcagagattcgctcaggaaaagcctctaaaaggcatgaaaattgcggcctgccttcatgttactactgagaccgcgaacctcatgattacccttaaagaagggggtgcggacgtaactatatgtgccagtaaccctcttagtacccaagatgatgtcgcagcagcattagttgcggaatatggcataaatacgtatgcgataaaaggggaagatcgggatacatactacaatcaccttgtttccacactggaaactcgaccacacatgactatggatgacggagcagacttagtcgctatgctccatggtgaaagaagtgacctaatggaaaatattgtaggcggcaccgaagaaactaccacaggggttattagattaaaaagccttgctgatgaaggtaatcttaagtatccagtaatagctgtaaacgatgcagatacaaagcatttttttgacaatagatatggcactggtcaaagcacactagacggaataactagggcaacaaacatattatgggctggcaaaacggtggtagttattgggtatggatggtgtggacgaggtgtggccgcgagggcgcgtggtatgggggcccagaccgtagtctgcgaagtcaaccatatcaggggtc

SEQ ID NO: 261480 - DNA, 865 bp, Unknown
  Bacterial polypeptide expressing nucleotide sequence isolated from the Sargasso Sea
aaagaattgttaaaagatataaaaggtttaagtgaagaaactacaactggagttcttgctttaaaaaaaatggaagaacagggtactcttttagtgccagcaataaacgtgaacgattctgtcacaaagtcaaaatttgataacttgtatggctgtagagaaagtttagttgatgggattaaaagagcaacagatgtgatgatgtcaggcaaagtcgcaatagttgctggtttcggagatgttggaaaaggaagtgctgcttcattaagacaaagtggagcgagagtaatggttacagagacagatcctatttgtgcgctacaagcagctatggaaggctatgaggtagttttaatggatgaggtgattgggcaagcagatatagttgtaacagcgactggaaataaggacattgttaccgcagatcatatgagggcaatgaaagatagatcaatattatgcaacattggtcactttgataatgaaattcaagttgaggctttaaaaaattataaatgggatgagataaaaccacaagttcatgaaatcacttttcctgacaataaaagacttatactattagctgagggaagacttgttaatttaggatgtgcaactgggcacccaagttttgttatgagtgcatcatttacaaatcaagttacagctcaaattgagttatggaacaactctgacaaatacgagaaaaaagtttatgttcttccaaaacacttagacgaaaaagttgcaagattacacctagaaaaggtaggcgcaaaacttacaccactttcaaaagaccaagctgattatataagtgtaaaaactgaaggaccttataagccagacacttatagatattaaa

SEQ ID NO: 261481 - DNA, 259 bp, Unknown
  Bacterial polypeptide expressing nucleotide sequence isolated from the Sargasso Sea
atgagtgaagattttaaagtaaaggacataagtttatcagattttggagataaagagatagccatagctgaaacagaaatgccaggtttaatggctttgagagaggaatataaagactcaaaaccacttgatggtgcaagaattgtaggttgtcttcatatgacaatccaaacagcggttttaattgaaactctcgtatatcttggggcaactgttaggtggagttcttgcaatattttttctactcaagatcatgccg

SEQ ID NO: 261482 - DNA, 673 bp, Unknown
  Bacterial polypeptide expressing nucleotide sequence isolated from the Sargasso Sea
atggaagattataaagtaaaagacatatctcaagctgaatttggtagaaaagaaatatcaatagctgaaagtgaaatgcctggtttaatggctttaagagaagaatattctaaagaaaaaccattaaagggtgcaagaattataggatgtcttcatatgacaattcaaacagctgtacttatcgaaaccttagttgcattaggtgccgatgttcgttggtcttcttgtaatattttttcaacccaagatcatgcagctgctgcaattgcaaaggctgggatccctgtttatgcttggaaaggtgaaacagaagaggaatatttatggtgtattaaacaaactatagtgggaaaaccagattggaagcccaacatgttattagatgacggtggtgatttaacagctatcatgcacaatgaatttcaagatttaatgaaagacattaaaggtgtttcagaagaaactaccactggaattaaagcactaaataaaatggaaaaagataaatcgcttttagttccagcaataaacgttaatgactctgttacaaaatcaaagtttgataatttatatggatgtagggaaagtttagtagacggtataagaagagctactgatgtgatgatgtctgggaaaatagcagttgttgctggtttggagatgtggaaaagga

SEQ ID NO: 261483 - DNA, 725 bp, Unknown
  Bacterial polypeptide expressing nucleotide sequence isolated from the Sargasso Sea
taatttatatggttgtagagaaagtttagtagatggaattaaaagagcaactgatgtcatgatgtcgggcaaagttgcaatagtagcaggttttggtgatgttggaaaaggaagtgctgcatcattaagacaaagtggagcaagagttatggttacagaaactgatcctatttgtgcactacaagcagctatggaaggatacgaggtcgttttaatggatgaagcaataagccaagcggacattgttgtgacagcaacaggaaataaagatgttgtaactgctgatcatatgagagcaatgaaagataggtcaattttatgtaacattggacattttgataatgaaatacaagttgaagctttgaaaaattataaatgggacgaggtaaagccacaagttcatgaaattacatttcctgataataaaagattaattttattagcagaaggtagacttgtaaatttaggatgtgctactggccacccaagttttgttatgagtgcatcatttactaatcaagttacagcgcaaatagaactatggaataattctgaaaaatatgagaataaagtttatgttttacctaaacatttagatgaaaaagttgcaagacttcatttagataaggttggagcaaaattaacaccgctctcaaaagagcaagctgattatataagtgttactccagagggaccctataaacctgatgcttaccgctattaat

SEQ ID NO: 261484 - DNA, 931 bp, Unknown
  Bacterial polypeptide expressing nucleotide sequence isolated from the Sargasso Sea
tgtataaaacaaactatcgaaggcaaaaaagattggaagccaaatatgcttttagatgacggtggtgatttaacagctttaatgcataaagattataaagagcttttaaaatctgtaaaaggtttatcagaagaaacaactacagggataaaagcattaaaaaagatggaagcagaaaagaaacttttagttccagctattaacgttaatgattcagttaccaaatctaaatttgataatttatatggatgtagagaaagtttagttgatggaataaaaagagcaacagatgtaatgatgtcaggtaagacagctatagttgcagggtttggagatgttgggaagggtagcgctgcctctctaaggcaaagtggtgctagagtaatggtaacagaagcagatcctatttgtgctctacaagctgctatggaaggatatgaagttgttttaatggatgaagcgataggtaatgctgatatagttgtaacagcaacaggaaataaggatattgttactgcagatcatatgagaaaaatgaaagatcgttcaatactttgtaatattggacactttgataacgagatacaagttgaagctctaaaaaattataagtggagtgaaattaaacctcaggtacatgaaatagaatttcctgataaaaaaagaattttacttttagcggaaggaagactagtcaatttgggttgcgcaacaggacatccaagttttgttatgagcgcatcatttaccaatcaggttattgcccaaattgagctctggaataattcaaataaatatgaaaaaaaagtttatgttttaccaaaacacttggatgaaaaagttgcgatgcttcatttaaataaagttggagccaaactaacaaagctttctaaagatcaagctgactacattagtgttgatgttaaaggcc

SEQ ID NO: 261485 - DNA, 492 bp, Unknown
  Bacterial polypeptide expressing nucleotide sequence isolated from the Sargasso Sea
tatgccagaagattacaaagtaaaagatattaatcaagcagattttggaagaaaggaaatttcaatagccgagagtgaaatgcctggcttgatggcattacgcaaagaatttaaaggaaagaaacctcttaaaggagctagaattttaggatgtttgcatatgacaatacaaaccgcagttttaatcgaaacattagttgaattaggagcggatgttagatggtcatcttgcaatattttttcaacacaagatcatgcggccgcagctatagccaaagctggtattccagtttatgcctggaaaggagaaacagaagaagaatattggtggtgtataaaacaaactattgaagctaaaaaagattggaaaccaaatatgttgttagatgatggtggtgatttaacagctttgatgcataaagattataaagatcttttaaaatcagtgaaggggctatcagaagaaaccacaacaggaattaaagctctaaa

SEQ ID NO: 261486 - DNA, 734 bp, Unknown
  Bacterial polypeptide expressing nucleotide sequence isolated from the Sargasso Sea
tatgtctcaagattttaaagtaaaagatattagtcaagctgcatttggtagaaaagaaatttctttagcagaaacagaaatgccaggattaatggcattaagaaaagagtacaaaactaaaaaacctttaaaaggagcccgtattcttggatgtctccacatgacaattcaaacagctgttttaattgaaacattagtagagctaggtgcagaagttagatggtcatcttgtaatattttttccacgcaagatcatgcagcagcagcaattgctaaagctggtatacctgtatttgcatggaaaggtgaaacggaagaagagtattggtggtgtgttaagcaaactatagaaggaaagaaagattggaagccaaacatgattttagatgatggtggagatctcacggctttaatgcataaagattataaagatatgttaaaaaatattaagggtgtttcagaagaaacaacaacaggtgttctagctttgaaaaaaatggaagcgaagaaagaacttttaataccagcaattaatgtcaacgactcagtcacaaaatctaaatttgataatttatatggttgcagagaaagtttagttgacggaataaaaagagcgactgatgttatgatgtctggaaaagtggccattgttgcaggatttggagatgttggaaaaggaagcgcagcatcattaagacaagctggcgctagagtcatggtaacagaaactgatc

SEQ ID NO: 261487 - DNA, 643 bp, Unknown
  Bacterial polypeptide expressing nucleotide sequence isolated from the Sargasso Sea
atgtcaacgaaaactgtgccttacacggcgtttaaagtaaaagatatttccctggcagactggggaagaaaagaaattgagcttgccgaagcggaaatgccggggcttatgagtttgcgtgaagaatatggagacgagcagcctttgaaaggtgcgcgaattgcgggatgtcttcacatgaccattcagactgcggtgcttattgaaactttagttgcattgggggccgaagttacttggagctcttgcaacattttctccacccaggaccatgctgccgccgcaattgctgccgctggaattccggtgtatgcttggaaagggatgaccgaggaagaatttgactggtgcattgagcaaacgcttttctttggcgaggaccgcaaaccgttaaatatgatccttgatgatggaggcgatttaaccaatatggtcttggacaaatatccagagcttgccgctggcgtaaaaggtatttctgaagaaactaccaccggtgttcaccgtctttacgagcgtatgaaaaaaggcacgttgccaatgccggccatcaacattaacgatagcgttacaaaaagtaaattcgacaataaatacgggtgtcgcgaaagtgccgtagatgccatccgccgtgccactgata

SEQ ID NO: 261488 - DNA, 286 bp, Unknown
  Bacterial polypeptide expressing nucleotide sequence isolated from the Sargasso Sea
ttagcagaagggaggttggtaaatcttggttgtgccactggtcatcctagctttgtaatgagtgcatcatttactaatcaagttattgctcaaatagaactttgggttaatcataaaaattatgaaaataaagtttatgtattacctaaacatttagatgaaaaagttgcaacccttcaccttaaaaaagttggtgcaaaacttacaaaactatcaaaagatcaagcagattatataagcgtgggagtagaaggacctttcaaaccaaatgcctatcgctattaaa

SEQ ID NO: 261489 - DNA, 289 bp, Unknown
  Bacterial polypeptide expressing nucleotide sequence isolated from the Sargasso Sea
ttattagcagaaggcaggcttgtaaacctaggatgtgctactggtcatccaagttttgtaatgagtgcttcattcacaaatcaaactattgcacaaattgagctatggaataattctgacaattatgaaaataaagtgtatgttttaccgaaaaaacttgatgaaaaagttgcaatgcttcaccttgaaaaagttggagctaaacttacaaaacttacaaaagatcaagcagagtatataggtgtatcagaacaaggaccatacaagccagaagcatatcgttattaaa

SEQ ID NO: 261490 - DNA, 233 bp, Unknown
  Bacterial polypeptide expressing nucleotide sequence isolated from the Sargasso Sea
aatggctgaaacagcaaaagaaaacaaaatagatttgatgaaagattataaagttgctgatatctctctggctgaatggggcgagaaggaaatcaagattgcagaaacagaaatgcctggcttgatgagcatcagagaagaattcggaaaggaaaagcctctgaaaggcgcaaggattgccggctgtcttcatatgaccatccagacagcggtactcattgaaacattgattg

SEQ ID NO: 261491 - DNA, 874 bp, Unknown
  Bacterial polypeptide expressing nucleotide sequence isolated from the Sargasso Sea
acactgcttattcataaaggatatgaattagaaaattattttaataaatataaaaaactcccaaaaatcacttctactattgaggaagaaattgtaattgaaaaacttttaaggaaagttcataaacttaatccgaatcactggcataatattgtacctgatattataggagtttcagaagaaacaacaaccggcgtagctcgattacaacaaatggttgaagatgcgagtttattgtttccagcatttaatgtgaatgatgcagcaactaagtctaaatttgataatctttatggatgtagagaatctttagctgatggtattaaacgttcaacggaaattatgctggctggtaaaactgtcgttgtttgtggatatggtgatgtaggtaaaggctcagcacaatcaatgaagtcatatggttgcaaggttattgttacagaaattgatccaatatgtgcacttcaagcagcgatggaaggatttgaagtcagaagattagaagatgttcttaatagaggaaatatttttgtaacaactacaggtaataaagatatcatcacgttaaaacatatgaaaaaaatgaaagatcaagctattgtttgtaacattggacattttgataatgaaattcaagtagatgcattaaataaatcaaatgcaaaaagagatcaaataaaacctcagcttgatagatatactttcaaaaacggtaaacaaatctttttattagctgaaggaagattagttaatttagggtgcgcaactggtcatgctagttttgtaatgtcaacttcgttttctaaccaagtattagctcaagtttttcttgcaaaaaataaacccaaagcaggcatttatgatttacctagaa

SEQ ID NO: 261492 - DNA, 586 bp, Unknown
  Bacterial polypeptide expressing nucleotide sequence isolated from the Sargasso Sea
tgccgtgtttgtgtgactgaaatagatccaattaatgcacttcaagcggcaatggaaggttacgaagttgtcacaatggatgatgcttgtaaatatggtgatatatttgttactgccactggtaatcttgatgttattacgcaagatcatatgagacaaatgagagatcgtgctattgtttgtaatattggacattttgataacgaaatacaaacagaagctcttcaaaattacaagtccgatgagattaaaccacaagtaagagaagtagagtttccagatgggaagaaaatattattactatcagaaggaaggcttgttaacttaggaaatgccactggacatccaagttttgttatgagtgcatcatttactaatcaagtattggcacaacttgaactttggaaaaattctaaaaattatgaaaataaagtttatgttttaccaaaacatttagatgaaaaagttgcatcattacacttaaagaaggttggagctaaacttacagaattaactgataaacaagcagaatatatcggtgttagtaaacaaggtccatttaaagataatacttacagatattagg

SEQ ID NO: 261493 - DNA, 500 bp, Unknown
  Bacterial polypeptide expressing nucleotide sequence isolated from the Sargasso Sea
aatgagagtacaaacaaccaaatctaacaaatcaattaaaacaaaaaataaaacgaagaatcgatccaaagagattgttaaatctttaccatttaaaattaaagatattgcattagcaaaattaggtagagataagattgatatttccgaaaaagaaatgccaggcttaatggaattaagaaaaaaatatgcaaaatcaaaacctctgaaaggttttaggttaacaggttcattacatatgactatcgaaacagcaatacttatagaaactttaaaagatttgggtgctgatgttcgttgggcaagttgtaatattttttcaacacaagatgaggcagccgctgcaattgctaaaacaaaaactccagtttttgcatggaaaggtgagactcttgaggaatattgggattgtacattacatgcattaactttcaaaaataatttaggaccaaatcttattgtagatgatggtggagatgcaacattgttaattcacaaag

SEQ ID NO: 261494 - DNA, 814 bp, Unknown
  Bacterial polypeptide expressing nucleotide sequence isolated from the Sargasso Sea
gttttagcattaaaaaagatggagagcgaagggacattattagtgccggcaataaatgttaatgactcagtgacaaaatcaaaatttgataatttatatgggtgtagggaaagtttagtcgatgggattaaaagagctacagatgtgatgatgtcaggtaaagtagcaattgttgcaggatttggtgatgtgggcaaaggaagtgcagcatcattgaggcaatctggagcaagagttatgatcactgaaactgatccaatatgcgccttacaggcagcgatggaaggttatgaagtagtcttaatggatgaaatgattaaagaggcagacatagtggtaaccgcaactggcaacaaagatattataacagcagatcatatgagagatatgaaagatagggcgatactatgtaatattggacactttgataatgaaattcaggttgaagcattaaaaaattataaatgggatgaaattaaaccacaagtgcacgaaatagaattaccaagcaaaaaaagaattattcttttagctgaaggcagacttgttaatcttggatgtgcaacaggtcacccgagttttgtaatgagtgcatcttttacaaatcaagtcactgctcaaatagaactttggaataattcttctaaatatgaaaaaaaggtttatgttttaccaaaacatcttgatgaaaaagtagctatgttacacttagagaaagttggcgcaaagttaacaaaactgtctaaagaacaggctgattacattagcgtaaaacaagaaggaccatataagccagatgcttaccgctactaat

SEQ ID NO: 261495 - DNA, 789 bp, Unknown
  Bacterial polypeptide expressing nucleotide sequence isolated from the Sargasso Sea
gtgatggaactttaatggtgccagcaattaatgtgaatgattcagttactaaatctaaattcgataatctctatggctgtagagagagtttggttgacggaattaaaagagcaactgatgttatgatgtcaggtaaagttgctattgttgctggttttggtgatgttgggaaaggaagtgcagcatcattacgccaaagtggtgcaagagtaatggttactgaaacagatccaatttgcgcattacaagcggcaatggagggttatgaagttgtattgatggatgaaatgatcaaggaagcagatatagtcgtcactgccaccggaaataaagacattgtaactgcagaccatatgagagatatgaaagatagagcaattttatgtaacattggtcacttcgataatgaaattcaggttgatgcactaagaaattataaatgggatgagatcaagcctcaagttcacgaaatcacattccctgatgaaaaaagaattattttattagctgagggaagactagttaatttaggttgtgctactggccatccaagttttgtaatgagcgcttcatttaccaatcaggtaacagcgcaaatcgaattatggaataattcagaaaattatgaaaaaaaagtttatgtacttccaaagcatttagacgaaaaggttgcacgactgcatttggaaaaggtaggagctaaacttacacaattatcaaaagatcaagcagactatattagtgtaactccagagggaccctataaacctgaagcttatagatactaaa

SEQ ID NO: 261496 - DNA, 764 bp, Unknown
  Bacterial polypeptide expressing nucleotide sequence isolated from the Sargasso Sea
ctcaagggcgcccgcattgcgtggctccctgcacatgacgattcagaccgcggttctgatcgagacccttgtagaactcggggctgaagtgcgctgggcttcttgcaacatcttttccacccaagaccacgccgctgcggccatcgctgcccaggccatccctgtgtttgccgtcaaaggtgaaaccctggaggagtactgggattacacccaccgcatcctcgagtggggtgacggcggctcccccaacatgatcctggatgacggtggcgatgccaccggtctggtcatgttgggcagcaaggccgagcaggacatcacggttctagacaaccccggcaacgaagaggagaccttcctgttcgcttcgatcaagaaaaagctggcccaggaccccagcttttattcccgcaccaaggcccagatccagggcgttactgaggagaccaccacgggtgtggcgcgtctctacaagatgcagaagagcggtgaactgcccttccccgccatcaacgtcaacgactcggtcaccaagagcaagttcgacaacctctacggctgccgagagtcactggtggacagcatcaagcgggccaccgacgtgatggtggccggcaagcaggccctggtgatcggctatggcgatgtgggcaagggttcggcccagtccttgcgtggcctcggtgccaccgtttgcattgcggaagtggatccgatctgcgccctgcaggccgccatggagggctatcgcgtcgtccgtctcg

SEQ ID NO: 261497 - DNA, 409 bp, Unknown
  Bacterial polypeptide expressing nucleotide sequence isolated from the Sargasso Sea
attgttattagtaatcgctgatatggagaaaaatatggactataaagtcgcggatatcggacttgcggaattcggcagaaaagaaatttttttggccgagaaagaaatgcccgccctaatagcaataagaaaaaagtacgagaaagaacagccactcgctggtgctaagatcatcggctgtatccatatgactatacaaacagcagtcctgatagaaacactcgttcaccttggtgccgaagttagatggtcgtcctgcaacattttctccacccaagatcacgcggcggcggccatggccgacgctggtatccctgtttttgcttggaagggcgaaacagaagaagagtatctacagtgcatcgagaatacgatattggtagacggtaagccttgggatgctaatctt

SEQ ID NO: 261498 - DNA, 710 bp, Unknown
  Bacterial polypeptide expressing nucleotide sequence isolated from the Sargasso Sea
gtcactggttgatgcaatcagaagatctactgatattatgatggcaggaaaggtagccgttgttgctggatacggggacgttggtaaaggttcagctgcttctttaaaaggcgcaggggcaagagttattgtaactgaaattgatcctatatgtgcgctgcaagcatcaatggatggctttgaggtaaaaagattagaaactgctattcctgaagcagatattgtagtaactgcaactggcaataaagatattgtaaggggcgagcactttgaggcaatgaatgataagacaatcgtttgcaatataggtcattttgataatgaaatagatatggcatggttaaatcaacattatggagaaactaaagataccattaaacctcaagtagataaatatcatgtcaaaggtaaggatatcatcgtgctagctgaaggaaggcttgtaaatttgggttgcgcaacaggtcatccatcatttgttatgagtaattcatttaccaatcaaacacttgcacagattgaattatggaagaatagcgaaaattatgaaaatgatgtttatctccttccaaagacgctagatgagaaagtagctagacttcatcttgacaagctaagcgttgaattgactgaactcagggaagaccaagctgattatataggcgttaaaaaacaaggaccctttaagtcagatgattatcgatattaat

SEQ ID NO: 261499 - DNA, 847 bp, Unknown
  Bacterial polypeptide expressing nucleotide sequence isolated from the Sargasso Sea
atgggcatcttgcaatatttttccacacaagaccacgcagccgcagcaattgccgcagcaaatattcctgtttttgcaattaagggtcaatctttagaagagcattgggattacttagatcaatcttttatgtttcctgatggcccaaatatgattttagatgatggtggtgacgcaactttgtatgtactacttggtgctcgcgcggaagaaggtgaagatattattcctgttccccaatcagaggaagaggaggttataaaggcgcagataaagaagcgtatggaacaatcacctgggtggtttacgaaaacacgtgacgccatcaaaggtgtttcagaagaaacaacaaccggtgttcatcgtctttacgaattggttaaaaacggccagcttcccttccctgccattaacgtgaatgactccgtgactaagtcaaagtttgacaacaagtatggttgtaaagaatctttagtggacggtatccgtcgtgcaactgacacaatgatggccggcaaaactgccgttgtatgcggatatggagacgttggtaaagggtctgcagcatcccttcgtggtgctggagcacgcgtcaaggtgacagaggttgatccaatttgcgccctacaggctgctatggatggttttgaagtggtaaccttagaggataccttagaaagcgccgatattttcattacaacaacaggcaataaagacgtcattcggatagagcacatgcgtgaaatgaaagatatggcaattgttggtaatattggccacttcgacaatgaaatccaagttgcccatcttaaaaatcacaaatggacgaatataaagagcaagtaga

SEQ ID NO: 261500 - DNA, 198 bp, Unknown
  Bacterial polypeptide expressing nucleotide sequence isolated from the Sargasso Sea
agcaagccttgaaaggcgcgcgtatcgttgtttcactgcacatgactattcaaacagcagttttaattgaaacacttgtggcattaggtgccgatgtgcgatgggcatcttgcaatatttttccacacaagaccacgcagccgcagcaattgccgcagcaaatattcctgtttttgcaattaagggtcaatctttaga

SEQ ID NO: 261501 - DNA, 610 bp, Unknown
  Bacterial polypeptide expressing nucleotide sequence isolated from the Sargasso Sea
atggccgattataaagtaaaggatatatcagaagcagaatttggaagaaaagaaatttctttagcagaaacagaaatgccaggattgatggcgttgaggaaagagtataagggaaaaagtcctctaaaaggtgcaagaattttaggttgtctgcatatgacaattcaaactgcagtactcattgaaactctcgtagatttaggagctgaagtaagatggtcttcatgcaatattttttcaactcaggatcatgcagctgctgcaatagcaaaagtgggtatacctgtatttgcatggaaaggcgaaactgaagaggaatattggtggtgcgtaaagcagacgattgaaggaaaaaaagattggaaacctaacatgatacttgatgatggtggagacttaaccgcactaatgcataaagaatacaaggatttattaaaagatatcaaaggactttcagaagaaacaacaactggagtattagctttgaaaaaaatggaagcccagggaacattgttagttcccgctataaacgtaaatgattctgttacaaaatctaagtttgataatttatatggatgtagagaaagcttagttgatggaattaaaagag

SEQ ID NO: 261502 - DNA, 382 bp, Unknown
  Bacterial polypeptide expressing nucleotide sequence isolated from the Sargasso Sea
atgactacaaatgattacaaggtttccgacattgctcttgccgaatggggtagaaaagaaattgtaattgcacaatctgaaatgcctgccttgatgaaattaagagaaaggtatgcagcagagcaacctttaaaaggcgcaaaaatccttggttgcattcatatgactattcagacagcagttcttatagaaactttaaccgctttaggtgcagaggtaagatggtctggttgcaatattttttcgacacaagatcatgcagcggctgctatagcggaatctggcataccagtttttgcttccaacccctccccatccccctctcccaccttcccccaagtggccccctcccctcaagtgggaccccttcctcccaagtgac

SEQ ID NO: 261503 - DNA, 524 bp, Unknown
  Bacterial polypeptide expressing nucleotide sequence isolated from the Sargasso Sea
cgaggtagttttaatggaagaggcgataaaagaggcagatatagttgtaacagcaactgggaataaagatatcgtaacagcagaccatatgagagaaatgaaagatagagctatattgtgtaatattggtcattttgataatgaaattcaagttgaagctctcaagaactataagtgggatgagataaaacctcaagttcatgaaattgaattacctagtaaaaaaagaattattttgctagctgaaggaaggttagtaaaccttggatgtgcaacaggtcatccaagttttgttatgagtgcgtcgtttacaaatcaagttatagcacaaatagaactttggaaaaattcagataaatatgagaataaagtgtatgttttgccaaaacaccttgacgaaaaagttgcaatgttacatttggaaaaagttggtgcaaaattaaccaaaatgtccaaagagcaagcagattatattagcgttaaaccatcaggaccatttaaaccagatacttatcgctactaaa

SEQ ID NO: 261504 - DNA, 349 bp, Unknown
  Bacterial polypeptide expressing nucleotide sequence isolated from the Sargasso Sea
tatgtcagaagattttaaagtaaaagatattaatcaagcagattttggtagaaaagaaatttctatagcagaaactgaaatgccaggattaatggccttacgacaagagtataaaggtaaaaaacctctcaaaggagccaaaattcttggatgtcttcatatgactatacaaactgctgttttaattgaaactcttgttgatttaggagctgatgttagatggtcttcatgtaatattttttctacacaagatcatgcagctgcagcaatagcaaaagcagggattccagtttatgcgtggaagggcgagactgaagaggaatattggtggtgtattaaacaaactata

SEQ ID NO: 261505 - DNA, 834 bp, Unknown
  Bacterial polypeptide expressing nucleotide sequence isolated from the Sargasso Sea
aaaaatttgttaaaaaatattaaaggactttcagaagaaactacaactggtgtattggcacttaagaaaatggaagctcagggaacactattagttccagccataaacgttaatgactcagttacaaaatctaagtttgataatttatatggatgtagagaaagtttagttgatggaattaaaagagcgactgatgtaatgatgtcagggaaggttgcaattgttgctggttttggagatgtgggaaaaggaagtgctgcttctctaagacaaagtggtgcaagagtaatggtcactgaaacagatccaatttgtgcgcttcaagcagcaatggaaggatatgaagtcgttttaatggacgagatgattaaagaagcagacatagttgtaaccgctacaggcaacaaagacattgttacagctgaccacatgagagaaatgaaagatagagcaatactttgcaatattgggcattttgataatgaaatacaagttgaagctttaaaaaactataaatgggatgaaattaagccacaagttcacgaaataactttgccaagtaaaaaaagaataatactgcttgccgagggaagactggttaacttaggttgtgcaactgggcacccaagttttgtaatgagtgcttcatttactaatcaagtgactgcacagatagaactttggaacaattcagataagtatgaaaaaaaagtttacgttttaccaaaacatttagatgaaaaagttgccagattgcacttagagaaagtaggtgctaaattaactaaaatgtcaaaagatcaagcggattacattagtgtttcaccgcaagga

SEQ ID NO: 261506 - DNA, 370 bp, Unknown
  Bacterial polypeptide expressing nucleotide sequence isolated from the Sargasso Sea
tgatgcattaaaaaattataaatgggatgaaataaaaccacaagttcatgaaattacttttccagataataagagacttattttattagccgagggaagacttgttaatttaggttgtgcaacaggacacccaagttttgttatgagtgcctcatttacaaatcaagttacagctcaaatagagctgtggaataactctgataaatatgagaataaagtatatgtacttcctaaacatttagatgaaaaagtagctagattacatttagaaaaagttggagctaaattaacacctttatctaaggatcaagctgattatattagtgttaaaactgaaggaccttataagccagatgcttaccgctactaa

SEQ ID NO: 261507 - DNA, 570 bp, Unknown
  Bacterial polypeptide expressing nucleotide sequence isolated from the Sargasso Sea
cagaagcagatccaatttgtgcattacaggcctctatggaaggctacgaagtggttttgatggatgaagcaattgataaagcagatatagtagtaacagctacaggaaacaaagacatagttactgcagatcatatgaggagaatgaaggatagagctattttatgtaatattggacattttgacaatgaaattcaagttgaggcattaaaaaataacaaatggactgaagtgaagccacaggttcatgaaatagaattaccaagtggaaaaagaataatattattggcagaaggaagactagtaaatttagggtgtgctaccggacatcctagttttgtaatgagcgcatctttcacaaatcaggtaatagctcaaatagaactttggaataattctaaaaattatgaaaataaagtttatgtacttccaaagcacttagacgaaaaagttgctatgctacatcttaaaaaagttggagctaaattaacaaagttatcaaaagagcaagcggactacattagtgttaaagtagagggcccatttaaaccaaatgcttatcgctactaaa

SEQ ID NO: 261508 - DNA, 531 bp, Unknown
  Bacterial polypeptide expressing nucleotide sequence isolated from the Sargasso Sea
aaggttacgaagtagttttaatggatgaaatgattggtcaagcagatattgttgtaaccgcaactggaaacaaagatgtagtaacggcagatcatatgagagctatgaaagatagatctattctgtgtaatattggacactttgataacgaaatccaagttgaggctttgaaaaattataaatgggatgaagtgaaaccacaagttcacgaaataacattcccagatgataaaagattaattttgttagctgaaggaagactggtaaatttaggatgtggaactggtcacccaagttttgttatgagcgcatcatttactaaccaagttattgctcaaattgagctttggaataattcagataactatgaaaataaagtttatgtgcttcctaaacacttagatgaaaaggtggcaaggcttcacttagataaggtcggcgcaaaattgacaccactatcgaaagagcaagctgactatataagtgtaacaccagagggaccatacaagcctcatgcttatcgctactaga

SEQ ID NO: 261509 - DNA, 690 bp, Unknown
  Bacterial polypeptide expressing nucleotide sequence isolated from the Sargasso Sea
atcgtgtaatatattttcaacacaagatcatgctgcagctgcaatagcaaaagcaggcataccagtttatgcatggaaaggtgaaacagaagaagaatattggtggtgtgtaagacaaacgattgaaggtaaagagggttggcaaccaaatatgattctcgacgatggtggtgaccttacaagtttaatgcataaagaatataatgacttattaaaagaagtaaaaggtctctcagaggaaacaacaacaggtgtactcgcattaaaaaaaatggagagcgaaggtacgttaatggtgccagctattaatgtaaatgactcagtcaccaaatctaaattcgataatctttatggctgtagagaaagtttagttgatggaattaaaagagcaactgatgtcatgatgtcaggtaaagttgctatagttgccggctttggtgatgttggcaaaggcagcgctgcttcattacgtcaaagtggagcaagagtaatggttactgaaacagatccaatttgcgcattacaagcggcaatggaaggctatgaagttgtattgatggatgaaatgatcaaggaagcagatatagttgttactgctactggaaataaagatattgttaccgcagaccacatgagagatatgaaagatagagcaattttatgcaacattggtcacttcgataacgaatt

SEQ ID NO: 261510 - DNA, 750 bp, Unknown
  Bacterial polypeptide expressing nucleotide sequence isolated from the Sargasso Sea
cagtgttacaaaatcaaaaatttgataataaatatggctgtaaggaatctttggtgatgagaataagaagagccactgacacaatgctagcagggaagacagctgtagtatgcggatatggagatgttggaaaggggtctgcggcaagcttacgagggtctggcgccagggtaaaagttacagaagttgaccctatttgtgcacttcaagccgctatggatggatttgaggttatcaaacttgaggatgcgctggaaaccgccgacgttttcattactgcaactggaaataaagatgtcataaaagttgaccatatgcggaaaatgaaaaacatggctattgttggcaatattggacattttgataatgaaattcagatagatgggctgaaaaatcataaatggacaaatattaaggatcaggttgacatgatagaaatgccttcagggaataatattatattactttcagaaggacgccttctaaatttaggtaatgcaacagggcacccaagttttgtaatgtcggcaagctttactaatcaggttttggctcaattagaactttggatgaatccagaaggatataagaatgaagtttatgttttgccaaaaaagctagatgaaaaagttgcaatgttacatcttaacaaaataggtgtaagacttacggccttagaaaaggatcaagctgactatattggggtggataaatcaggaccctttaagccagatcactataggtattaat

SEQ ID NO: 261511 - DNA, 370 bp, Unknown
  Bacterial polypeptide expressing nucleotide sequence isolated from the Sargasso Sea
tatgtcagaagattataaagtaaaagatataaaactagcagaatttggtagaaaagaaatttctcttgcagaaacagagatgccaggattaatggcaattaggaaagaatacggtaacaaaaaacctcttaaaggcgcacgtatattaggttgcttgcacatgacaattcaaaccgctgtattaattgagacattaatagaattgggcgcagaatgcagatggtcatcctgtaatattttctctacgcaagatcatgctgcagcagcgattgctaaagcaggaactccagtattcgcttggaaaggcgagactgagaaagaatattggtggtgtgttaagcaaactatcgaaggaaaaaaagattggatt

SEQ ID NO: 261512 - DNA, 868 bp, Unknown
  Bacterial polypeptide expressing nucleotide sequence isolated from the Sargasso Sea
atgtctgaagaagagttttggtggtgtatgagccaaactcttcaaggtcctgatggatggaaaccaaatatgattctagatgatggtggagatgcgacacaaataattcatgaaaagtaccctgagctcttaaaagagattagaggtttatcagaagaaactactaccggtgttcaccgtttaaaagatatggaaaaaaagggcttacttaaagtgcctgcgattaatgtaaatgactctgttacaaaatctaaatttgataacttatatggatgtaaggagagtttggtggatggaataagaagaggtacagatgtaatgatggctggaaaggtggcagttgttgcaggttatggtgatgttggaaaaggatctgcagcaagcttaaggggagcaggtgccagagtatgtgtaacagaaattgatcccattaatgctttgcaggctgctatggaaggatatgaagttgtaactatggatgacgcatgttcttatgctgatatttttgttactgctaccggaaatttggatgttattacattagatcacatgcgaaagatgcgggatagagcaattgtatgcaatattggtcattttgataatgagattcaaactgaagcgttgagaaactacaaatcagatgaaattaaaccgcaagtaaaagaggttgaatttcctgatggaaaaaaaataattttgttatcagagggtcgccttgttaatttaggaaatgctactggacacccaagttttgtaatgagtgcatccttttcaaatcaagtcattgcccaaatagaattatgggaaaactataaaaattatgaaaataaagtttatgttcttccaaaaaaacttgatgaaaaagtcg

SEQ ID NO: 261513 - DNA, 693 bp, Unknown
  Bacterial polypeptide expressing nucleotide sequence isolated from the Sargasso Sea
acggtattaaaagagctactgatgtaatgatgtcaggaaaagttgcaattgttgcgggctttggtgatgttggaaaaggtagtgcagcatctttaagacaaagtggagcaagagttttagtaactgaaactgatcctatttgcgcattgcaagccgctatggaaggttacgaggtagttttaatggatgaaatgataggccaagcagatattgttgtaactgctactggaaataaagatgtagtaacagcagatcatatgagagctatgaaagatagatctattctatgtaatattggacactttgataacgaaattcaagttgaggctttgaaaaattataaatgggacgaagtaaaacctcaagttcacgaaataacattcccagataacaaaagactaattttgttagccgaaggaagacttgtgaatttgggttgtggaactggtcacccaagttttgttatgagtgcatcatttactaaccaggttattgctcaaattgagctttggaataattcaaagaactatgaaaataaagtttatgtgcttcctaaacacttagatgaaaaggtagcaagacttcacttagataaagttggcgcaaaattaacaccactatcgaaagagcaagctgactatataagtgtgacaccagagggaccatacaagcctcatgcttatcgctactaaa

SEQ ID NO: 261514 - DNA, 427 bp, Unknown
  Bacterial polypeptide expressing nucleotide sequence isolated from the Sargasso Sea
tatgaaagatagagccattctttgcaatattggtcattttgataatgaaattcaagttgaagcattaaaaaattataaatggactgaagtaaaaccgcaagtacatgaaatagagcttccaagcaaaaaaagaattattcttttagctgaaggaagacttgtaaatcttggttgtgccacaggtcatccaagttttgttatgagcgcatcatttacaaatcaagttattgctcaaattgaactttggaataattataaaaattatgaaaataaagtttatgtcttaccaaaacatttagatgaaaaagttgcaacacttcaccttaaaaaagttggcgcaaaattaactaaattatctaaagaacaagcggactatattagtgttggagtagagggtccttttaaacctaatgcctatcgctactaa

SEQ ID NO: 261515 - DNA, 1276 bp, Unknown
  Bacterial polypeptide expressing nucleotide sequence isolated from the Sargasso Sea
tatgttcgcagcaaccaagtcaaatctcaacagtattgagaataatactgattacgtcgttaacgatataaccgaagcagaattcgggcgaaaagaacttttgatcgctgaaacagaaatgcctggtttaatggcactgagaaaaaaatatggatcccagaaacccttaaaaggggctttcatagcaggtagtctccacatgacgattcaaacaggagttcttattgagactctcgttgaacttggtgcaaaagtgagatgggcttcatgtaatattttttccactcaggatcatgctgctgcagctattgcaaatgcaggagtcccagtatttgccaagaagggtgagactttagatgaatactgggaatatacgcataaaatttttgagtggagagatggtgaatctgcaaatatgattcttgacgatggtggtgatgcgactggattgattattctggggagcaaagcggaagaagatatttcagttcttaataacccttcaaatgaagaggaaattgcattatttgcttccattaagaaaaaactttcacaagatccaactttttattcaaaagctaaatcttttataaaaggaattactgaggaaaccacaacaggtgtagctcgtctttaccaaatggaaaaaaatggagaacttgttttcccagcaatcaacgtaaatgattctgtgactaaaagtaagtttgataatctttatggttgccgagagtccttggtggatggtatcaaaagagctacagatgtcatggtggctggcaaggtagcccttgttatgggatatggagatgttggtaaaggttctgcgcagtctttaaggggtttaggcgctacagtaatgattgctgagatagatccaatatgtgctcttcaagccgcaatggagggttatagagttgtgagattaaatgaagttgtggaagatgtagatatttttgttactgccactggaaatttccaagtgattcgtcatgagcatttgattaggatgaagaatgaatcgattgtttgtaatattggccattttgataatgaaatagaggtttcctctttaaagtcttatgaatgggaaaatattaaaccccaagtagatcacataactttaccaagcggtaacaaaattattcttctagcagaagggagattagttaatcttggatgtgccactggtcatcctagttttgttatgagtaattcttttactaatcaagtattagctcaaattgaactatttaaatatggcgttaaatattga

SEQ ID NO: 261516 - DNA, 733 bp, Unknown
  Bacterial polypeptide expressing nucleotide sequence isolated from the Sargasso Sea
tatgacagattataaagtaaaagatattaacgaagcagaatttggaagaaaagaaatttctttagcagagactgaaatgccaggattaatggcagttagagccgagtacaaaggcaaaaatccacttaaaggtgcaagaattttaggttgtcttcatatgacaattcaaacggcagttttgattgaaactctggttgatttaggtgcagaatgtagatggtcctcatgcaatatattctcaacacaagatcatgcagcagcagcaattgcaaaagctgggatcccagtatttgcatggaagggtgagacagaggaagaatattggtggtgtgtaaaacagactattgagggtaaaaaagattggatccctaacatgattttagatgatggtggagatcttactgctcttatgcataaggattataaagatctattaaaaggcataaaaggtttgagtgaagaaacaacaacaggtgttttagcacttaagaaaatggaagaacaaggtcaattgttagtgccggcaattaatgtaaatgactcagtcacaaaatcaaaatttgataatctatacggatgcagagaaagtttagttgatggaattaaaagagccacagatgtaatgatgtcagggaaagttgcaattgttgcaggctttggtgatgttggaaaaggtagtgcagcatctttaagacaaagtggagcaagagttcttataaccgaaactgatcct

SEQ ID NO: 261517 - DNA, 925 bp, Unknown
  Bacterial polypeptide expressing nucleotide sequence isolated from the Sargasso Sea
tatgacagattataaagtaaaagatattaacgaagcagaatttggaagaaaagaaatatctctagcagagactgaaatgccaggattaatggcagtaagagccgaatataaaggcaaaaatccacttaagggtgcaagaattttaggttgtcttcatatgacaattcaaacagcagttttgattgaaactctggttgatttaggtgcagaatgtagatggtcttcatgtaatatattttcaacacaagatcatgcagcggcagcaattgcaaaagctggtattccagtatttgcttggaagggtgagacagaggaagaatactggtggtgtgtaaaacaaacaattgagggtaaaaaaggttggatacctaatatgattttagatgatggtggagatcttactgctcttatgcataaagattacaaagatttattaaaaggtgtaaaaggtttaagcgaagaaacaacaacaggggttctagcacttaaaaaaatggaagagcaaggtcaattgttagtgccagcaataaatgtaaacgactcagttacaaaatcaaaatttgataacctatatggatgtagagagagcttagtagatggaattaaaagagctactgatgtaatgatgtctggaaaagttgcaatcgttgcaggctttggtgatgttggaaaaggtagtgctgcatccttaagacaaagtggagcaagagttttagtaactgaaactgatccaatttgtgcattgcaagccgctatggaaggttacgaggtggttttaatggatgaaatgataggtcaagcagatattgttgtaaccgcaactggaaataaagatgtagtaacagcagatcatatgagagctatgaaagatagatctattctatgtaatatcggtcactttgataatgaaatacaagttgaggct

SEQ ID NO: 261518 - DNA, 1177 bp, Unknown
  Bacterial polypeptide expressing nucleotide sequence isolated from the Sargasso Sea
gatgaaagttcttgatgaaataaaatcagactttatgaaaaacaaaccgttagatggcttaaaaataggtgcttgtatgcatgtaacaaaggaaactgctaatttaatgcttactttaaaagcagcaggagcaaatgtttcattatgtgcttcaaacccattatctacaaaagattcagttgcagcatatctctctgaaaatgatgtagaagttcatgctgtacatggtgtatctaatgatgattttttcaaacaccttaattctgttttagatacgaaaccagatatcacaatggacgacggagcagatttagtttcattattgcatactgagagatctgacataccagttatgggctcaatggaagaaacaacaacaggagttataagacttaaatcaatggaaaaaaataacaaacttagatttccagtcgttgcagttaatgattctgacactaagcatttatttgataacagatttgggactggtcaaagtgcaatggatggtgtagtcagagctacggatttattgattgcaggcttggatgtggttgtcataggttttggtgattgtggaaaaggagttgcagaaagagcctacggaatgggtgcaaaagttacgattgttgaaccaaattcagttcgtgccttagaagctcttatgcatggatacgaagttaaaaccagtataaatgctgcaaagattgcggatgtaattgtatctgtaacaggaaatatgcatgctcttgataaacaacactttgatgtaatgaaagatggagttgccttagctaatgcaggacactttgatgtcgaaattaacttgaatgctcttaaagaaaatagttcacaagttgataaggttagagaacatgttgaaagttataaatataatgggaaagagatattggtattagcagaaggaaggcttgtcaacttagcagctgcaacaggtcatccagcatctgtaatggatatgtcatttgcaaatcaagcactggctgctgagtggattaaagataattataagcaactagagccaaaagtttatactcttccgactgaagtagatttaaaaattgctgcaacaaaactggaactcatgggtggagagcttgaaatactcaccaaagagcaaattgactatctcgactcctgggagcatggcactagctaa

SEQ ID NO: 261519 - DNA, 1216 bp, Unknown
  Bacterial polypeptide expressing nucleotide sequence isolated from the Sargasso Sea
tttgatcgaaaccttgtgtgcattgggtgcggaagttcgctgggtatcatgtaatattttctcaactcaagatcatgctgcagccgcaattgctgagcaaggcatacctgtattcgcatataaaggcgagacacttgaggagtattgggattatacacatcatattatgacctggtccgatggcggttcaccaaatatgattttagatgatggaggcgatgccactttactactagtgctgggttctaaagcagaaaaagacccttcggtcattgaaaatcctgaatctgaagaagaaatatacctgtttgcatcaataaagaagagattagcgaaggataaggacttttattctcgtacgttgtcttcaattaaaggcgtcacggaagaaacaacaaccggagtccaacgtttatatcaaatgaagaaaaaaggggagttatcattttctgcaattaacgttaacgattccgtaactaaatcgaaatttgataatttatatggctgcagggaatcattagtagatggtataaaacgtgcaactgacgttatggttgccggaaaagtagcattagttctgggctatggtgatgttgggaagggaagtgcacaatcattacgtggtctaggtgcaactgtttgggtaactgaaattgacccgatttgtgccttgcaggcttcaatggaaggattccgaattgttacattagaagatgttatagataaagtagatatatttgtaactgcaactggtaattttaatatcattcgccatgagcacatgctcggtatgaaagatcaagcaattgtttgtaatattggtcattttgataatgagattgatgttgcaagtttagaaaaatatgattgggaggaaattaaacctcaagttgatcacgttatttttcccgatggaaagcgtattatacttttggcaaaagggcgtttagttaatttaggttgtgcaactggtcacccaagctttgtcatgtcaaattcatttactaatcaagttctcgcacaaattgagttgtttactgagggtgaaaaatacgaaaatgatgtttatgtcttacctaaacatcttgatgaaaaagtagcgcgattacatcttgataggattggagcgaaactaacagctttaactaaggagcaagccgaatacattaatgtcgagattgagggaccgtataagtcagatcattacaggtattag

SEQ ID NO: 261520 - DNA, 946 bp, Unknown
  Bacterial polypeptide expressing nucleotide sequence isolated from the Sargasso Sea
atggtggcagcgcccacaacagcgcctgagctgaagctaggtaccgactgcgtcgttgcagatatcacccaggccgcgttcggccgcaaggagctggacatcgccgagaccgagatgcccggtctgatggcgctgcgtcagaaatacggcactgagaagcccctgaagggggcgcgcatcgccggttctctgcacatgacgatccagaccgcttgtctgatcgaaaccctcgtcgaactgggtgccgaggtgcgctgggcctcctgcaacatcttctccacccaggaccatgcggctgccgccatcgcggcacagaacatcccggtgttcgcggtcaagggtgaaaccctggaggagtactgggactacacccatcgcatcctcgagtggggcgatggtggttcccccaacatgatcctggatgacggcggcgatgccaccggtctggtgatgctgggcagcaaggcggagcaggacatcaccgttctggagaaccctgccaatgaggaggagacctacctcttcgcttccatcaagaagaagctggcacaggatcccagcttctacagccgcaccaaggcgcagatccagggcgtgaccgaggaaaccaccaccggtgtggcccgtctttacaagatgcagaagagcggggagctgcccttccctgccatcaacgtcaacgactcggtcaccaagagcaagttcgacaatctctacggctgccgcgagtcgctcgtcgacagcatcaagcgcgccaccgatgtgatggtggccggcaaacaggcgctggtgatgggttacggcgatgtgggcaagggctcagcccagtccctgcgcggtctaggtgccaccgtctgcatcgccgaagtggatcccatctgcgcgctgcaggcggccatggagggttaccgcgtggtgcgtctcgaggacgtggtcgaggagatgg

SEQ ID NO: 261521 - DNA, 898 bp, Unknown
  Bacterial polypeptide expressing nucleotide sequence isolated from the Sargasso Sea
aacaacgactggcgttcatcgactactggatatgatgagagagggttctctgaaggttccagcgattaatgtcaacgattctgttacgaagtcaaaaaatgacaacaaatatggctgtcgacattcacttaacgatgccgtgaaacgagccactgatatgcttatgtccggaaagcgagcccttgtaattggctacggtgatgtaggcaaaggatctgcgcaaagcctcagacaggagggtatgatcgtccgtgttacggaggttgacccaatatgcggtatgcaggcatgcatggacggctatgaggtggtctcctgctatgaaaacggagtgaacagccagaaagaggaagatctcaaccaacgcctattgcaggatactgacctgctcgtcacttgcacggggaacagcgacgtatgcgattcgggaatattaaaggccctcaaagacggtgccgtggtttgcaacatcggtcacttcgacaatgaaatagatacagccttcatgcgcgagaactggagttgggtcgaggtcaaagaacaggtacatatgatcaaacgatcagacagaacaggcgatcacttaattttgctgtcagagggcagactggtgaaccttggaaatgcgatgggacatccgtcaagaattatggacggttctttcgctaatcaggtgctggcgcagatgcaccttttcgaacaagcatgggcagatcaaaaccaaaaccaaagagccccaatatcggtcgaggtgcttcccaagaagttggatgaggaagttgcagagctgatggttcaggggtttgggggggtcttaacgcggctgaccaaatcgcaagcggattatataggcgtcaatcaagagggtccttacaaaaccgacgattataagtattag

SEQ ID NO: 261522 - DNA, 1291 bp, Unknown
  Bacterial polypeptide expressing nucleotide sequence isolated from the Sargasso Sea
tatgacgcaagattataaagtaaaagacattagccaggcagattttggaagaaaagaaatttctttagcagaaacagaaatgccaggacttatggctttgaggaaagagtataaaggcaaaaaacctttaaagggtgcaagaattctaggttgtcttcacatgacaatacaaaccgcagttttaattgaaactttagtggaattaggagcagaagttagatggtcctcatgtaatattttttcaacacaagatcacgcagcagcagcaatagcaaaagcgggtattcctgtatttgcttggaaaggtgagacagaagaagagtactggtggtgtgttaaacaaactattgaaggaaaaaaagattggaagccaaatatgattttagacgatggtggtgatcttacagctttaatgcataaagaatataaaaatttattaaaagatgttaagggagtttcagaagaaactacaacaggagttttagcactcaaaaaaatggagtctaataaagaattattaatccctgctataaatgtaaatgactcagtcacaaaatctaaattcgacaatctctatggttgtagagaaagtttagtagacggtataaaaagagctactgatgttatgatgtcaggtaaagtagccattgtagctggatttggggatgttggtaaaggaagtgcagcttcattacgtcaagcaggcgcaagagttatggttaccgagacagaccctatatgtgcgttacaagctgctatggaaggctacgaagttgttgttatggatgaagctattaaagacgctgatatagttgtaaccgctacaggaaataaagatatagtcacagcagatcatatgagaaatatgaaagacagagcaatactttgtaacattggtcactttgacaacgaaattcaagttgaagcattgaaaaattataagtgggatgaaataaaacctcaagttcatgaaattgaattgcctagtaaaaaaaggattattcttttagcagagggaagattagttaatcttggatgcgctacagggcatcctagttttgtgatgagcgcttcattcacaaatcaagttattgctcaaattgaattatggaataattcaaataaatatgagaagaaagtttatgtacttcccaagcatcttgatgaaaaagttgcaatgcttcatttagaaaaagtgggagctaaattaacaaaaatgtcaaaagagcaagccgattatattagcgttaaaccatcaggaccatttaaaccagatacttatcgctactaa

SEQ ID NO: 261523 - DNA, 1159 bp, Unknown
  Bacterial polypeptide expressing nucleotide sequence isolated from the Sargasso Sea
ggagctaaaatagtagggtgtcttcatatgacaattcaaacagcagtcttgattgaaactctaattgaactaggggctgacgttagatggtcatcatgtaatattttttctacacaagatcatgctgctgcagctatagctaaagcaggaataccagtatttgcctggaagggtgagactgaagaggaatattggtggtgtgtaaagcaaacgatcgaaggaaaaaaaggttgggaaccaaatatgatattggatgatggaggcgatctaacagctctgatgcataaagattataaagaattgttaaaaaatgttaagggtttaagtgaagaaacaacaacaggagttttggcattaaaaaaaatgcaagaaaagggaactttattagtgccagcaataaacgtaaatgactctgttacaaaatcaaaatttgataacttgtatggttgcagagagagtttagttgatggaattaaaagggccacagatgtaatgatgtcaggaaaagttgcaattgttgcaggttttggtgatgtgggaaaaggtagtgcagcttctttaagacaaagtggagcaagggttatggttacagaaacagatccaatctgtgctcttcaagctgcaatggaaggttacgaggttgtactaatggacgagatgataggagaagcagatataattgtaacagctacaggtaataaagatatagttacagctgatcatatgagaatgatgaaagacagagctatactatgtaacataggacactttgataatgaaatacaagtggaagcattaaaaaattataaatgggatgaaattaaaccgcaagttcatgaaataactttaccaagtaataaaagaattattttattagctgaaggaagattagttaatttaggttgtgcgacaggacacccaagttttgtaatgagcgcttcatttaccaatcaagtgaccgctcaaatagaattgtggaataattctagtaaatatgaaaaaaaggtctatgttttaccaaaacatcttgatgaaaaagtagcaagattgcatttggaaaaagttggtgcgaagttaacaaaaatgtccaaagatcaagctgactatataagtgtaacaccagaaggaccttacaaaccagatgcctatcgctactaag

SEQ ID NO: 261524 - DNA, 1288 bp, Unknown
  Bacterial polypeptide expressing nucleotide sequence isolated from the Sargasso Sea
atgaatgattacaaagtaaaagatatcaaacaagcagaatttggaagaaaagagatttcattagcagaaactgaaatgccaggcttaatggcaataagaaaagagtataaaggaaaatttcctcttaaaggtgcaaaaattttgggttgtttacatatgactatacaaacggcagttttaattgaaacattagttgaattaggtgcggaagttagatggtcttcatgtaatatattttccactcaagatcatgcagccgcagcaattgcaaaagtaggtataccagtatttgcatggaaaggtgaaactgaagaagagtattggtggtgtgtaagacaaaccattgaagggaaaaaagattggaagcctaatatgatattagatgatggtggagatcttacagcattaatgcataaagattataaagatttaatgaaatcaataaaaggtttatctgaagaaacaacaactggtgttttagctttaaaaaaaatggaaaatgagggtacattattagttcctgctattaatgttaacgattcagttacaaaatcaaaatttgacaatttatatggatgtagagaaagtctagtagatggaattaaaagagcaaccgatgtaatgatgtcaggtaaggttgcaattgtagctggatttggcgatgtaggaaaaggtagtgcagcttcactaagacaaagtggtgcaagagtaatggttactgaaactgatcctatatgtgcattacaggctgctatggaaggatatgaagtagttttaatggatgaaatgattaaagaagcagacatagttgttactgcaactggaaacaaagatattgttactgcagaccacatgagaatgatgaaagacagagcgattctttgcaatattggacactttgataatgaaatacaggttgatgctttaaaaaactacaaatgggatgaaattaaacctcaagtgcatgaaataacattaccaagcaataaaagaattattttattagctgaaggtagactcgttaatttaggttgtgcgactggacatccaagttttgtaatgagtgcatcatttacaaaccaagttacagcccaaatagaattgtggaataattctgaaaaatatgaaaaaaaagtttatgtacttccaaaacatctggatgaaaaagttgctagattacatttagacaaagttggtgcaaaactaacagagctttctaaagatcaggcagattatataagtgttaaaaaagaaggaccatttaaatccgatgcctatcggtactaaa

SEQ ID NO: 261525 - DNA, 1288 bp, Unknown
  Bacterial polypeptide expressing nucleotide sequence isolated from the Sargasso Sea
catggaagatttcaaagttaaagatttatcccaagcaaattttggtcgaaaagaaatttcaattgctgaaagtgaaatgccaggattaatggcgctaagagaagagtattcaggaaagtcaccattaaaaggtgctaagattataggttgtttgcatatgacaattcaaacagcagttttaatagaaactcttgttgatttaggtgcagatgtaagatggtcttcttgtaacattttttctacgcaagatcatgcggcagctgcaatagctaaagcaggtattcccgtatatgcgtggaaaggtgaaactgaagaggaatatatatggtgtattaagcaaactatagttggtaaaaaagattggaagccaaacatgcttttggatgatgggggcgatctaactgcaattatgcataatgaatataaagaacttttaaaagatgtaaaaggtgtgtctgaggaaaccacaactggaataaaagcacttaataaaatggagaaagataattcacttttaatacctgcaataaatgtaaacgactcagttacaaaatctaaatttgataatttatatggatgtagagaaagtttagttgatggaattagaagggctactgatgtcatgatgtcaggaaaaatagctatagttgctggttttggtgatgtaggtaaaggtagtgcggcatctttaagacaaagtggagctagagttttagtaacagaagctgaccccatttgtgctttacaagctgctatggagggctatgaagttgtattaatggaagaggcaataagtaaagctgacattgttgtaactgctactggcaataaggatattgtaacagcagatcatatgagagaaatgaaagatagagccattttgtgtaatattggacattttgacaatgagatacaggttgaagctttaaaaaattataaatggaccgaagttaaacctcaagttcatgaaattgaattacctagtaagaaaagaattattttattggcagagggtaggctagtaaatttaggttgtgctacggggcatccaagttttgtgatgagtgcatctttcacaaatcaagtaattgctcaaatagagctatggaataattataaaaattatgaaaataaagtttatgttttgccgaaacatttagacgaaaaagttgcaacacttcatcttaagaaagttggcgcaaaacttacaaaattatctaaagaacaagcggactatataagtgttggagtggaaggtccttttaaacctaatgcctaccgctactag

SEQ ID NO: 261526 - DNA, 1390 bp, Unknown
  Bacterial polypeptide expressing nucleotide sequence isolated from the Sargasso Sea
tatggctaacgattacatagtaaaagaaatttcacttgcagagtttggacgccgggaactcgatatagcagagacagaaatgcctggtctaatggcactccgcgaggaatacggtagttcaaaacctttgaaaggctctaggattgttggttctttacatatgacaatacagacagccgttttaattgaaacattagtagctcttggagctgatgtaagatgggcatcttgcaatatattctcgacacaagatcacgcagcggcagctatagcgaaagctggtgttcctgtatttgcaatcaaaggccagtctttggaagaacattgggattacttggaccgatcatttcaatttgaaaatggtccaaatatgatcttagacgatggaggtgatgcaacactttatgttcttttaggtgctagagctgaggcgggtgaagaaattctttccgtcccccaatcggaagaagaagaagtggtaaaagctcagatttataaaagaattaagcagtcccccggttggttcactaaaactagagatgctatacgcggtgtctcagaggaaaccacaacgggagttcatagactttatgaccttgtgaaaaacgggcagcttccctttcccgctattaacgtaaatgactcggtaacaaagtccaagtttgataacaaatacggatgtaaagaatctctcgtcgatggcattcgcagagccacagacacaatgatggcaggcaaaaccgcagtagtgtgtggctacggcgatgtaggaaaaggttcttctgcctcacttagaggtgcaggagcgcgtgttaaagtcacagaggttgatccaatttgcgcattgcaagcggccatggatggttttgaagtggttgtccttgaggatgtagtatcggatgctgatattttcatcacaactacaggaaacaaagatgtcatccgtatagaacacatgagagaaatgaaagatatggccattgtcggaaacatcggacatttcgataatgaaatccaagtttcacatctgcgaaatcacaagtggacaaatatcaaagaacaagtcgacatgatagagatgccaaatggtaaccggctaattctgttgtctgagggtcgccttttaaatctaggaaatgcaaccggccatccttcatttgtgatgtctgcatcattcactaatcaagtgctggcacagattgagttatggacaaacggacaaaactacaaaaatgaagtgtttattttaccaaaacatcttgatgaaaaagtagcccgccttcatttaaatcgcattggcgtaaaattaactaagttagcagcagatcaagccgattatattggagttacaccagagggaccatataaaccagagcattacagatattag

SEQ ID NO: 261527 - DNA, 616 bp, Unknown
  Bacterial polypeptide expressing nucleotide sequence isolated from the Sargasso Sea
tatgcaagattataaagtaaaagacattaaccaggctgaatttggtagaaaagaaatttctttagccgaaacagagatgccaggtttaatggcaatcagagaagagtataaaaacaaacatcctcttaaaggtgctagaattttaggatgcttgcacatgactattcaaacagcagttttaattgaaacactagtcgaattaggagccgaagtaagatggtcttcttgtaatattttttcaacgcaggatcatgctgcagcagctatcgcaaaagttgggataccagtttttgcatggaaaggtgaaactgaagaagaatattggtggtgtgtaagacaaacaattgaaggcaaaaaagattggaagcctaatatgattcttgatgatggaggtgatttaacagccttaatgcataaagattataaagaattaatgaaatctataaaaggactgtcagaagaaacaacaacaggagtgcttgctttaaaaaaaatggaaaaagaaggaacacttttggtacccgcaattaatgttaatgactcagtcacaaaatctaaatttgacaacctttatggttgtagagaaagtttggtagatggaattaaaagagcaaca

SEQ ID NO: 261528 - DNA, 793 bp, Unknown
  Bacterial polypeptide expressing nucleotide sequence isolated from the Sargasso Sea
atgacagattataaagtaaaagatattaacgaagcagaatttggaagaaaagaaatctctttagcagagactgaaatgccaggattaatggcagtaagagacgagtataaaggtaaaaacccacttaaaggtgcaagaattttaggttgtcttcatatgacaattcaaacggcagttttgattgaaactttagtagatttaggtgcggaatgtagatggtcctcatgcaatatattttcaacacaagatcatgcagcagcagcaatagcaaaagctggtatcccagtatttgcatggaagggtgagacagaggaagaatattggtggtgtgtaaaacagactatagagggtaaaaaagactggatccctaacatgatattagatgatggtggagatcttactgctcttatgcataaagattacaaagatttattaaaaggtgtaaaaggtttgagtgaagaaacaacaacaggtgttttagcacttaaaaaaatggaagaacaaggtcaattgttagtaccagcaattaatgtaaacgactcagttacaaaatcaaaatttgataacttatacggttgtagggaaagtttagttgatggaattaaaagagctactgatgtaatgatgtcaggaaaagttgcaattgttgcaggctttggtgatgttgggaaaggtagtgcagcatctttaagacaaagtggagcaagagttttagtaactgaaactgatcctatttgtgcattgcaagctgctatggaaggttacgaagtagttttaatggatgaaatgattg

SEQ ID NO: 261529 - DNA, 1399 bp, Unknown
  Bacterial polypeptide expressing nucleotide sequence isolated from the Sargasso Sea
atgagtacaaatgattataaagtttccgatatttctcttgctgaatggggcagaaaagagattgtaattgctcaatctgaaatgcctgcattgatgaaattaagagaaagatatgcagcagaacaacctttaaaaggggcaaagattcttggatgtattcatatgacaatacaaacagctgttctaatagaaacactcacagcgcttggagcagaggtaagatggtcaggttgtaatatattttcgacacaagatcatgctgcagcagcaatagctgcctctggtgtacctgtttttgcatggaagggtcaaactgaagaagaatttaattggtgcatagaacaaaccattttatctaatggtacgccatgggatgcaaatatgattcttgatgatggaggtgaccttacttctatggcacatgaaaaatatccagaaattctagaaaatatacatggtataacggaagagacaaccactggtgttctaagacttaatgagatgattgagaaggggcaattaaaagttccggctataaacgtaaatgattctgtaactaagtcaaaaaatgataataaatacggtaccaggcacagtttgaacgatggtataaaaagaggaactgatatgttcctagctggcaggaaagcattagttataggttatggtgatgtgggtaaaggttctgctcaaagccttaaacaagaaggaatggtggttagggttacagagatcgatcccatatgtgctatgcaggcctgcatggatggatatgaagtagtctcgccctatatagatggtgtaaacgacggctcagagaactctataaataaaactcttttagaggatactgatcttatagtaacaacaacgggcaactataaggtatgtgataagcacatgcttaaagctgtaaaaagcggttctgtgatatgcaatataggacactttgatacagaaattgatacgcaatatatgagagaagaatgggcctgggaagaagttaaaccacaagtacacaaaatatttagagacacaaaatcaggcgactctcctaacctagatagtgatgactatattatcctattatccgaaggaaggctggtgaatctaggaaatgctacaggacatccctcaaggatcatggatggctcatttgcaaatcaagtccttgctcagatgtatctttacgagaagaagtttgctcaaataaatgacgaagataagaaacaagaactcattaaagttgaaattttacctaagaaacttgatgaagaagttgcttcttatatggtcgaaggttttggaggagttatgacaaaactttcttcagagcaagccgattatataagcgtccctgaagaaggaccttttaaatctgatctttataaatattaag

SEQ ID NO: 261530 - DNA, 856 bp, Unknown
  Bacterial polypeptide expressing nucleotide sequence isolated from the Sargasso Sea
atggaagacttcaaagtaaaagatatatctcaagcagaatttgggcgtaaagaaatttcaatagcagaaagcgaaatgccaggattaatggcattgagagaggaatattcaggaaaattacccctgaaaggggcaaaaattattggctgtcttcatatgacaatacagactgcagtattaatagaaacattagtggatttaggtgctgaagtaagatggtcatcttgtaatattttttcaacacaagaccatgcagctgcagctatagcaaaagcaggtattcctgtttatgcgtggaaaggtgaaactgaagaggaatatctttggtgcattaaacaaacaattgtcggaaaaaaagactggaagccaaatatgttgttagacgatggtggagatcttacagctataatgcataatgaatatgcagatttattgaaagatgtaaaaggtgtttcagaggaaacaactactggaattaaagctcttaacaaaatggaaaaagataagtctctattgcttcctgcaattaatgtaaatgattctgtaacaaagtcaaaatttgataatctttatggatgcagagaaagtttagtagacggaataagaagagctacagatgtaatgatgtcaggaaaaatagcaattgtagctggttttggtgatgttggaaaaggaagtgctgcatctttgagacaaagtggagctagagttttagttactgaagcagacccaatttgtgcattacaagcagctatggaaggttatgaagttgttcttatggaagaagccataagtaaggctgatatagtagtaacagctactggcaacaagatattgttacagctgatcatatgag

SEQ ID NO: 261531 - DNA, 409 bp, Unknown
  Bacterial polypeptide expressing nucleotide sequence isolated from the Sargasso Sea
atggaagattttaaagtaaaagacatatctcaagctgattttggtaggaaagaaatttcaatagctgaaagtgaaatgcctggtttaatggctttaagagaagagtattctagtaataaaccattaagaggggcaagaattattggatgtcttcatatgacgatccaaactgctgtattaattgaaactttagttgcattaggtgctgaagtgcgatggtcttcttgtaatattttttcaactcaagatcatgctgccgccgcaattgcaaaagctggtatcccagtttacgcttggaaaggtgaaactgaggaggaatatttatggtgcattaagcaaactataattggaaaaacagattggaaacctaatatgttattagacgacggtggagatttaacagctataa

SEQ ID NO: 261532 - DNA, 763 bp, Unknown
  Bacterial polypeptide expressing nucleotide sequence isolated from the Sargasso Sea
tatgacagaagattttaaaatcaaggatataaaccaagcggaatttggaagaaaagaaatttcaatagccgaaacagaaatgcccggtttgatggcattacgaaaagagtttaagggaaaaaaaccattaaaaggtgctaggattttaggatgtctacacatgacaattcaaacagcagtcctgatcgagactttagttgaattaggagcagatgtaagatggtcatcatgtaatattttttcaacacaagatcatgcagctgctgctatagcaaagactggaatccccgtttatgcttggaaaggtgaaacagaaaaagagtattggtggtgtatcaagcagactattgaaggaaaaaaagattggaaaccaaatatgctattagatgatggtggagacctaacagctttaatgcataaagaatacaaagatcttctaaaatctgtaaaaggtttatccgaagaaactactaccggaataaaagcacttaaaaaaatggaagctgaaaaaaaacttttagttcctgcgattaatgtaaatgactctgtaacaaaatctaaatttgataacctatatggatgtagagaaagtttagttgatggaattaaaagagctacagatgttatgatgtcaggaaaaactgctattgtagctggctttggagatgtaggtaaaggaagtgcagcatctttaagacagagtggtgcaagggtaatggtgacagacagcggatccaattctgtgcattacaagcagctatga

SEQ ID NO: 261533 - DNA, 1219 bp, Unknown
  Bacterial polypeptide expressing nucleotide sequence isolated from the Sargasso Sea
atggctgtagattataaagtaaaagatatttcattgagtgattggggtaggaaagaaatagcaattgctgaaaccgaaatgcctgggttgatggcattaagagaagaatatggcaatactaaacctcttgatggagcaagaatagttggatgtttacatatgacaattcaaaccgcagtattgattgaaactttagtacatttaggtgcttcagtaagatggagctcttgcaacattttttcaactcaagatcaagcagctgcagctatagctgcaaaaaatattccagtttttgcatggaaaggtatgaatgatgaagaattttggtggtgtatagaacaaactttatcaggaccaaataattggaaacctaacatgatcttagatgatggaggagatgctaccggaatcattcatgaaaaatttcctgtaatgttagaagaaattagaggtttatcagaagaaacaactaccggagtgcaccgtttaaaggaaatggaaaaagaggggaaactgaaagtacctgcaattaatgtaaatgactctgttaccaaatctaagtttgataatttatatggttgtaaagaaagtttagtagatggaattcgaagaggaacagatgtgatgatggctggaaaaatagccatagttgctggttacggagatgttggcaagggttcggctgcaagcttaagaggtgcaggagcaagagtttgtgtaactgaagtagatccaattaatgcattgcaagcagcgatggaaggatatgaagtagttaccatggatgatgcatgttcttatggtgatatttttgttactgctactggaaatgtagatattataactttggatcatatgagaaaaatgcgggatcgggcaattgtttgcaatattggacattttgataatgagatacaaactgaagcattacaaaattataaaacggatgaaatcaaaccacaagttgatgaagtagaatttccagatggtaaaaaaatactacttctttctcaaggaagactagttaatttaggtaatgctacaggtcatcctagctttgtaatgagtgcttcttttactaatcaggtgatggcgcaactagagttatggaataattataaaaactatgaaaataaagtttatgttttgcctaaacatttagatgaaaaagtagctatgcttcacttaaaaaagttggcgctaaacttactacattaac

SEQ ID NO: 261534 - DNA, 1359 bp, Unknown
  Bacterial polypeptide expressing nucleotide sequence isolated from the Sargasso Sea
aagtagccgatattaatttagctgaatttggaagaagagaaatttctctagcagaaaatgagatgcctgctttaatggctttaagagaaaaatatagagcagaacaacctcttgcaggtgcaaagatcatgggttgtatccatatgactattcaaactgcagttctaatggaaactttaatagacttaggcgcagaattaaggtggtcttcttgtaatattttttcaacgcaagatcatgccgctgcagcaatggcagcaagaggcgtgccaacatttgcctggaaaggagaaacagaagaagagtttgaatggtgtatagaacaaactatatgtaaagatggtaaaccttgggatgccaatatgattcttgatgatggtagtgaccttacagccatggtgcatgaaaaatttccagatatgcttgaaacaattcatggtgtatcagaagaaactacaactggggtgcatagactaaaagagatgcttgaaaagggagagcttaagataccagctattaatgttaatgactccgtcacaaaatcaaaaaatgataataaatatggttgcaggcatagtttaaacgatgctctgaagagaggaactgatatgttactttcagggaaaaagggtcttgttattggttatggtgatgttggtaaaggatctgcattaagtctagctcaagaaggaatgatagttagtgttgttgaatcagatccaatttgtgcaatgcaagcttgcatggatggtttttctgttgtctcttgttacaaagatggtgttgttacaagagatcctaaagatataaatacgcaagtcatggaagacactgatttggtcgtcaccacaactggaaatgttaatgtttgtgattcagcaatgttaagcactcttaagaatacagctgttgtttgtaatattggtcattttgataatgaaatagacaccgcctttatgagagaaaattactattgggatgaaattaagcctcaggtacatagaattttcagagatacagctccagatggaactccagatctatctagtaaaaattatattattcttctagcagaaggtagattggtaaacctaggaaatgctactggtcatccaagcagaattatggatggttcatttgcgaatcaggtcctagcccagatacatttatatcaacaaggttttgctaatataaatgatgaagacaaaaaagcggaaatgattactgttgaggttcttcctaaaaaactggatgaagaggttgcaagtctaatggttgagggctttgggggtatggttacaaagctgactcaagatcaagcggactatataaacgttccaaaagatggtccgttttaag

SEQ ID NO: 261535 - DNA, 1402 bp, Unknown
  Bacterial polypeptide expressing nucleotide sequence isolated from the Sargasso Sea
atgtcatctaaagtagattatgtagtagctgatatttcattagctgattggggtagaaaagaattagacatagcagagactgaaatgcctggtctaatgtcattaagagaagaatattctaaatcacaagatctaaagggagcgagaatagcaggatgccttcatatgactattcaaactgcagtattaatcgaaactctgaaagtattaggtgctgatatcagatgggctagttgtaatatattttcaacccaggatcatgctgcagcagtaattgctaaggctggtattcctgtgtttgctaaaaaaggtgaaactgtacaagaatattgggaatatgtagataagatctttgactggagtgatggtggatacccaaatatgatcttggatgatggtggtgatgcaacttcttacattatttttggtgctaaaatggaagctggagatgaggttcttaaaaatccagagaatgaagaagaagaagcaatgaaagcccaaattttaaagagaatggcttccaatccaggttggtttactgaggttaaaaatagccttaaaggagtttctgaagaaactacaacaggggttttaagattacatcaaatgtcagagaaaggtgaccttccatttccagcgataaatgttaatgatagtgtaacaaaatctaaatttgataatgtttatggatgtagagaaagccttgtagatagtataaaaagagctaccgacgttatgttagctggtaaagtcgctgtagtttgtggttttggagatgttggtaaaggttctgcagcttctcttagacaaggcggtgcaagagtaatggttactgaaatagatccgatttgtgcactacaagcttccatggaaggttatgaagtggttacaatggaacaggctgcatcaaaagcagacatttttgtaacagcaacaggtaataaagacgtaattactgttgatcatatgagagatatgaaagatagagcagttgtttgcaatattggtcactttgattctgaaattcaaataagtggtttaaataatatggtttgggacgaaatcaaaccacaagttgatgaagtaaagtttccagatggaaaaaaaattattatgcttgctaaaggaagattagttaaccttggatgtggcacaggccatccaagctttgttatgtcagcttcttttacaaatcaggttctggctcaaatggaaatttttaataataccgcagcttatgaaaacaaagtttatactttgccaagaaaattagatgagaaagttgctgaacttcatttggctaaagttggagcaacgcttacaaaacttagtgatgagcaagctagctatattggaatttcttcagatagtgcctttaaatctgatgaatatagatattaaa

SEQ ID NO: 261536 - DNA, 1288 bp, Unknown
  Bacterial polypeptide expressing nucleotide sequence isolated from the Sargasso Sea
atggaagattataaagtaaaaaatattaacgaagcagattttggagacaaggaaatctctttagccgaaactgaaatgcccggtcttatggcaatcagagaggaatataaagactctaaacctttaaaaggtgcaaatatagttggatgccttcacatgacaattcaaaccgcagtattaatagaaacacttaaacatcttggcgcaagtataagatggtcctcttgtaatattttctcaacacaggaccatgctgctgctgcaattgccagaaaaggaatacctgtttttgcctggaaaggtgaaaccgaagaagaatattggtggtgtataaagcaaactattgagggtaataaaaattggaaaccaaatatgattttagatgatggcggtgatcttacatccattatgcataaagactataaagaattaattaaagatattagaggtgtctccgaggagactacaacaggagttaaagagttaaaaaaaatggaaaaagagggtactttaatggtgccagcatttaatgtgaacgattcagtcacaaaatccaaatttgataatctgtatgggtgtcgagaaagtcttgtagactctattagaagagctacggatgttatgatgtctggaaaagttgcaatagtagcaggattcggtgatgttggaaaaggtagtgccgcatcacttagacaagcaggtgcacgtgttatggtgacagaaactgatccaatatgtgcattacaggcgtccatggagggctacgaagtagtacttatggacgacacgatcggaaaggcagatatagtagtaacagcaactggtaataaagatattgtaactgctgatcatatgagaaaaatgaaggatagatcaattttatgtaatattggccattttgataatgaaattcaagttgatgcgttaagaaattataaatggaatgaggttaaaccacaagtgcatgaaattgaatttcccgataaaaaaagaataattttgttagcagagggaaggttagttaaccttggctgcgcaactggtcaccctagttttgtaatgagtgcatcatttacaaatcaggttatggctcaaattgagttatggaataattcaaaaaaatatgaaaaaaaagtttatgtgctgccaaaacatttagatgagaaagttgcagaattacatttagctaaagtaggtgccaagttaacaaagctttcaaacgatcaagcagattatattggtgtttcaccgcaaggtccatttaaaggtgacgcttatagatattaga

SEQ ID NO: 261537 - DNA, 829 bp, Unknown
  Bacterial polypeptide expressing nucleotide sequence isolated from the Sargasso Sea
gaaactaccacaggggtactaaggttatatgaaatggaaaaaaagaatgaacttttatttcctgcaataaatgttaatgactctgtcaccaaatcaaaatttgataatctatatggatgtagggaaagtttagttgatggtataaggagagggacggatgtaatgatggcaggaaaaattgccaccattgcaggatatggggatgttggaaaaggatcagcccaatccctaaggaacgcaggatgtagagttatggtgactgaaattgacccaatttgtgctcttcaagctgcaatggagggttttgaagttgttacaatggaagaagctgcaaagaaatcagatatttttgtaactgcaacaggtaataaagatgtcattaccatagagcatatgagagaaatgaaggatagagctattgtatgcaatattggccattttgactcagagatacaagttgctggcctaagaaatatgaattggcatgaggtcaaacctcaggttgatgaagtagaattcccagacggaaaaaaaattatacttctttcaaaaggaagactagtgaatttaggtaatgcaatgggacatcctagttttgtaatgagtgcttctttttctaatcaagttcttgcacaaatggaactttggaataatacaagtcagtatgaaaaaaaggtctacgttttaccaaaaaatttagatgaaaaagttgccgctattcacttagacaaacttggggctaaattaacaaaattaacaaaagaacagtctgattatattggtatagaaaactctggaccctttaagcctgaatattataggtattaga

SEQ ID NO: 261538 - DNA, 826 bp, Unknown
  Bacterial polypeptide expressing nucleotide sequence isolated from the Sargasso Sea
atgagtaataatgactataaagtttccgatatttctcttgctgaatggggcagaaaggaaattgtaattgctcagtcagaaatgcctgcactgatgaaattaagagaaaggtatgcatcagaacagccgttaaagggggctaagattcttggctgtattcatatgactattcaaacagctgttcttatagaaacactaactgcgttaggcgctgaagtgaggtggtcagggtgtaatattttttcaactcaagaccatgctgcagcagcgatagctgattctggagtacctgtctttgcttggaagggccaaactgaagaagaatttaactggtgtatcgagcaaacaatattgtttgaaggaaagccctgggatgcaaatatgatcctcgatgacggaggagacctaactgcaatggctcatgaaaagtatcctgagatactagaacacattcatggcataacagaagaaactactacaggcgtggttcgccttaatgaaatgattgaaaagggtgagttaaaagtacctgcgataaatgttaatgactcagttacaaaatctaaaaacgacaataagtacggaactaggcatagccttaatgatggaattaaaagaggaacagacatgttcttagcaggaagaaaggctttagtcattgggtacggggatgtcggaaaaggatcagcacaaagcttaaagcaagaaggtatggttgtgcgtgttactgaaattgaccccatatgtgcaatgcaggcttgcatggatgggtatgaagttgtttcaccttatatagatggcgtaaacaacaatgacgagaaatcta

SEQ ID NO: 261539 - DNA, 466 bp, Unknown
  Bacterial polypeptide expressing nucleotide sequence isolated from the Sargasso Sea
ctggtattataatgttatcgataaacatcacttagagcagatgaaggatcaagcaattgtctgcaatattgggcattttgataatgagatcaatgttgattctatgaaggatcatgagtggatcaatatcaaaccgcaagttgatcacattgtttttcctgatggcaaaagaatcattcttctcgctgaaggacgtttggtaaatttaggttgtgggactggtcaccctagctttgtgatgtctaattcattctgcaaccaaactcttgcacaaatagagttatttaaaaacagctcaaattatgagaaccaagtttatgttctaccgaaatcattggatgaaaaggttgcaaaacttcatcttgataagataggagctaagctgaccaaattgactactgaacaagctgaatatattggtgttaaggaatcaggaccatataagcctgatcattatagatactga

SEQ ID NO: 261540 - DNA, 982 bp, Unknown
  Bacterial polypeptide expressing nucleotide sequence isolated from the Sargasso Sea
gaccgagatcctgcacaagaaatacccgcagatgctcgagcgcatccacggcgtcaccgaagagaccaccaccggtgtgcaccgtctgctcgacatgctcaaggccggcaccctgaaagtcccggcgatcaacgtcaacgacgcggtcaccaagagcaagaacgacaacaagtacggctgccgccacagcctcaacgacgcgatcaagcgcggcaccgaccacctgctgtcgggcaagcaggcgctggtcatcggctacggtgacgtgggcaagggttcggcgcagtcgctgcgtcaggaaggcatgatcgtcaaggtttccgagatcgatccgatctgcgcgatgcaggcctgcatggacggcttcgaactggtttcgccgtacaagaacggcatcaacgacggcaccgaggccagcgtcgacgctgctctgctgggcaagatcgacctgatcgtcaccaccaccggcaacgtcaatgtgtgcgacgccggcatgctcaaggccctgaagaagcgcgccgtagtgtgcaacatcggccacttcgacaacgagatcgacaccgccttcatgcgcaagaactgggcgtgggaagaggtcaagccgcaggtgcacaagatccaccgcaccggtgccggcaccttcgatccgaccaacgacgactacctgatcctgctggccgaaggccgtctggtgaacctgggcaacgccactggccacccgagccggatcatggacggttcgttcgccaaccaggtgctggcacagatcttcctgttcgagcagaagttcgccgatctctccgccgagaagaaggccgagcgcctgaccgtggaagtgctgccgaagaagctcgacgaagaagtggcgctggaaatggtcaagggcttcggcggcgtggtcacccagctgaccaagcagcaggccgagtacatcggcgtgaccgtggaaggcccgttcaagccggacgcttaccgctactaa

SEQ ID NO: 261541 - DNA, 628 bp, Unknown
  Bacterial polypeptide expressing nucleotide sequence isolated from the Sargasso Sea
ttttgctgttgtttcatgctataaagacggaattgttacaagagatcctattgacatcaatatggatgttatgggtgatacagacttgattgtaactaccactggcaatgttaatgtctgtgactcagcaatgattagaacccttaaaaataccgcagttgtatgtaatataggtcatttcgacaatgaaatagatactgcttatatgagagaaaactactattgggatgaaattaagccacaagttcatagagtatttagagatactgcgcctgatgggactcctaacttatctagcaaagattatataattttgcttgctgagggaaggttggttaatcttggaaatgcaacaggacatccaagcagaattatggatgggtcttttgctaaccaggttcttgctcaaattcatttgtataaacaaggcttcgctaacgtaaatgatgatgataaaaaagcagaaatgttgactgttgaagtacttcctaaaaaacttgatgaagaggttgcaagccttatggttgaaggttttggtggaacagtgactcagctcacaaaggaacaagctgactacatcaatgtccctcaagacgggccatataaagaagaaacttataaatactaa

SEQ ID NO: 261542 - DNA, 1188 bp, Unknown
  Bacterial polypeptide expressing nucleotide sequence isolated from the Sargasso Sea
tatgagcaaagattttaaggtaaaagacataaacttagctgaattcggtaggaaagaaatatccatagcagaatcagaaatgccaggtctcatggctttaagaaaagaatttaaaggaaaaaaaccactcaaaggtgcaaatattttaggttgtcttcatatgacaattcaaacagcagttctaattgaaactcttgttgaactaggggcaagtgtaagatggtcatcttgtaatattttttctacacaagatcatgctgcagctgcaatagcaaaagcaggtataccagtatttgcatggaaaggtgaaacagaaaaagaatattggtggtgcgtagagcaaactatagaaggtgataaaaattggaagccaaatatgatcttggacgatggtggagatttaactggcctaatgcataaaaaatataaggatcttttaaaaaatgtcaaaggtgtttcagaggaaactacaactggggtgttagctttaaaaaaaatggaggctaataaagaattacttatcccagctattaatgtaaacgactctgtaacgaaatctaaatttgataatttatacggttgtagagaaagtttggttgatggaatcaagcgagctacagatgtgatgatgtcaggcaaggtagcaattgttgcaggatttggagacgttggaaaaggtagtgcagcatctttacgccaagcaggtgctagagttatgataacggaaacagacccgatttgtgccttacaagcagctatggaagggtacgaggttgtacttatggatgaagcaattaaacacgcagatatagtagtcacggccactggaaataaagatatcgttacagctgatcatatgagggatatgaaagacagagctatattatgtaacataggtcatttcgataacgagattcaggtagaagctttaaaaaattataagtggaatgaggtcaagcctcaagttcacgaaatagaattacctagcaaaaaaagaataatattattagctgaaggaagattagtaaacctgggctgtgcaacagggcatccaagttttgttatgagcgcttcttttacaaatcaagtaattgcccaaattgaattatggaataactctgacaaatatgaaaaaaaagtttatgttttaccaaaacatcttgatgaaaaagtcgcaatgcttcattt

SEQ ID NO: 261543 - DNA, 871 bp, Unknown
  Bacterial polypeptide expressing nucleotide sequence isolated from the Sargasso Sea
aaatttcctgaaatgttagatgaaattaaaggtttatctgaagaaacaaccactggtgttcatcgcttaaaagaaatggaaagagataataaactcaaagttccagcaattaatgtaaatgattcagttacaaaatctaaatttgataatttgtatggctgtaaagaaagtttggtagacggtattcgaagaggaacagatgttatgatggctggcaaaatagcagtagttgcaggttttggtgatgttggtaaaggttcagcagcaagtttaagaggagctggagcaagagtttgtgttacagaagtagatccaatcaatgctctacaagcagctatggagggctatgaagttgtaactatggatgatgcatgctcctatggcgatatttttgttactgctacaggaaatgtagatattattactttggagcatatgagaaaaatgcgtgatagagcaatagtatgtaatatcggtcattttgataatgaaatacaaactgaagctttaagaaattataaaacagatgaaattaagcctcaagttgatgaaattgaatttccagatggaaaaaaattaattcttctctctcaaggaagattggttaacttaggtaatgcaacaggacatccaagttttgtaatgagtgcttcatttactaatcaagttatggcacaattagagttatggaataatcataaaaattatgagaataaagtttatgtattaccaaaacatcttgatgaaaaagtggctatgttacatttgaaaaaagtaggagctaaactcactgaattatcagataaacaagctgactatataggtgtaaaaaaagaaggccctttcaaggatgatacttatagatattaaa

SEQ ID NO: 261544 - DNA, 1202 bp, Unknown
  Bacterial polypeptide expressing nucleotide sequence isolated from the Sargasso Sea
catggaagattataaagttaaagacatttcacaagcagattttggaagaaaagagatttctctagccgaaacagaaatgccaggattaatggcattgagaaaagaatataaaggaaaacatcctcttaaaggtgctaaaattttaggatgtcttcatatgacgattcaaacagcagtgttaatagaaactttagttgatctaggagcggaagtaagatggtcttcttgcaatatattttcaacacaagatcacgcagccgctgctattgcaaaagctggaatccctgtatttgcttggaaaggagaaaccgaagaagaatattggtggtgtgtgaagcaaaccattgaaggaaaaaaagattggaaaccaaatatgattcttgatgacggtggtgatttaactgcacttatgcataaaaattataaagatttattgaaagatattaagggtttatccgaagaaacaacaaccggggtattagcgcttaaaaagatggaagcccagggaacgttgatggttccagcaattaatgtaaacgattctgttacaaagtctaaatttgataatttatatggttgtagagaaagcttagtagatggaattaaaagagcaactgatgttatgatgtcaggaaaagttgcaatcgttgcaggatttggtgatgtcggaaaaggaagtgctgcttcattaagacaaagtggagcaagagtaatggttactgaaaccgacccaatatgtgcgctacaagccgcaatggaaggatatgaagttgtactcatggacgaaatgattaaagaggcagatatagttgttacagcaacaggaaacaaagacatagtgacagctgatcatatgagagaaatgaaagatagagcaatattatgtaacattggacactttgataatgaaatccaagttgaagcattaaaaaattacaaatgggatgaaatcaagccacaagttcacgaaataactttgccaagtaaaaaaagaattatactgctagcggagggaagactggttaacttaggttgtgcaactggacacccaagttttgtaatgagtgcttcatttaccaatcaagtgactgctcaaatagagctatggaacaattcagataagtatgagaaaaaagtttacgttttaccaaaacatcttgatgagaaagttgctagattacacttagaaaaagtaggtgcta

SEQ ID NO: 261545 - DNA, 1108 bp, Unknown
  Bacterial polypeptide expressing nucleotide sequence isolated from the Sargasso Sea
atgaaaacgttggttgatctaggcgcggaagtaagatggtcttcatgcaatatattttcaacacaagatcatgcggcggcagcaatagctaaagtgggtataccggtatttgcttggaagggcgaaacagaggaagaatattggtggtgtgtaaggcaaacaattgaaggtaaaaaagactggaaaccaaatatgatattagatgatggtggagatcttactgcacttatgcataaagaatataaagatttattgaaagatattaaaggtttaagtgaggaaaccactacaggggtattggcattaaaaaaaatggaagaacaaggaacattattagttcctgcaattaacgtaaatgactccgtcacaaaatcaaaatttgataatttatacggatgtagagaaagtttagttgatggaattaaaagagcaacggatgttatgatgtcgggtaaagttgccatagtagctggatttggagatgtaggtaaaggaagtgcagcatcattaagacaaagtggagcaagagttatggtaacagagactgatccaatatgtgctttacaagcagcaatggagggctacgaagttgttcttatggatgaaatgattagtcaagcagatatagttgtaactgctacaggtaacaaggatattgtaactgcagatcacatgagagaaatgaaagatagagcaattttatgtaacattggacattttgacaacgaaatacaagttgaagctttaaaaaattataaatgggatgaaataaaacctcaagtccatgaaataactttgccaagtaacaaaaggataattcttttagcagaaggaagacttgttaatttaggctgtgcaactggacaccctagttttgtaatgagtgcaagtttcacaaatcaagtaaccgctcaaatcgaattgtggaacaattcatcaaaatatgaaaagaaagtttatgttttacctaaacatttagatgaaaaagttgcaagactccacttagaaaaagtaggtgcaaaattaacaccattatccaaagatcaagctgattatataagtgttaaaactgaaggaccttacaaaccggatgcatatcggtactaat

SEQ ID NO: 261546 - DNA, 1288 bp, Unknown
  Bacterial polypeptide expressing nucleotide sequence isolated from the Sargasso Sea
tatggaagattataaagttaaagatatatcagaagcagaatttggaagaaaagaaatttcgttagccgaaacagaaatgcctggattaatggcactgagagaagaatataaaggcaaaaaacctttaaaaggagcaagaattgttggttgtttgcatatgactatccaaacagcagtactgattgaaacactagttgaacttggagctgaagttcgatggtcttcatgtaatattttttctactcaagatcatgcagctgctgcaattgcaaaagctggaatacctgtgtttgcatggaaaggtgaaacagaagaagaatattggtggtgcgttaaacaaactattgaaggtaaagatggttggaaaccaaacatgatacttgatgatggtggagatctaacagccttgatgcataaagattataaagatttactgaaagatataaaaggtttgtcggaggaaactacaactggagttttagcattgaagaaaatggaaattgaggggacgttacttgtccctgcaataaatgttaacgactctgttacaaaatcaaaatttgacaacttatatggttgtagagaaagtctagttgatggaattaaaagagcaactgatgttatgatgtcaggaaaagttgctatcgtagcagggtttggcgatgttggaaaagggagtgctgcatcacttcgtcaaagcggcgcaagagttatggttaccgaaactgaccctatatgtgcacttcaagctgctatggaaggttatgaagtagttttaatggatgatatgatcaaagaagctgacattgttgtaacagctactggaaacaaagacgtagttacagctgatcacatgagagatatgaaagatagagcaatactttgcaacattggacactttgataatgaaattcaagttgaagcactaaaaaattataagtgggatgaaattaaaccacaagttcatgaaattacgttacccagcaataaaagaataattttacttgctgaagggagactggttaaccttggttgtgcaacaggacacccaagttttgtgatgagtgcatcatttacaaatcaagtaactgctcaaattgaactttggaataattcagataagtatgaaaagaaagtatatgttttaccaaaacatttagatgaaaaagttgcgagacttcacctagaaaaagttggagctaaattaaccaagttatctgaagatcaagctcaatatattagtgtaactacagaaggaccctacaagcctgatgcgtatcgctactaa

SEQ ID NO: 261547 - DNA, 1324 bp, Unknown
  Bacterial polypeptide expressing nucleotide sequence isolated from the Sargasso Sea
atgaaaaataaaacagataataaatacgttgcatataaagttaaagatatctctttagctgaatgggggagaaaagagataaaacttgcagaagcagagatgccaggtttaatggctttaagagatagatttaaaaaagagaagcctcttaaaggctctagaattgctggttgtcttcacatgacaattcaaactgcagttttgattgaaacgttagttgatctgggcgctgaggtaacatggagttcatgtaatatattctccacacaagatcatgctgctgctgctattgcagctaatgggattgctgtttatgcatggaaaggtatgtcagaagaggaatttaattggtgtattgagcaaacactattttttggtgaagaaaaaaatcctctaaatatgattcttgatgatggcggggatcttactaatatggtccttgatgagtttccagagcttgtatctgaaattaaaggtttgtctgaggagacaacaactggggttcataggctatatgatagaatgaaaaatggaacacttccacttcctgctattaatgttaatgattctgttacaaaatctaagtttgataataaatatggatgtaaagagagtgcagttgatgctgtaagaagagctactgatattatgcttgcaggcaaaagagttgttgtctgtggatatggagatgttggtaaaggaactgcagcatcattcagaggtgctggctcaattgtcactgttacagaaatagatcctatctgtgcacttcaagcctcaatggatggttatgaagttaaaaagttaaagtcagttgtttcaaatgctgatattgttgttacagctacaggtaataaagatatagtaaataaagaagcatttagaatgatgaaggataagactatagtatgtaatattggtcattttgataatgagattgacatgaactggttagaaactaatttttctgaacagaaaactaatataaaaccccaggttgactcctatagaatatcaaaagataaagaaattattattcttgctgaggggagactcgttaatcttggttgtgcaactggtcatccaagttttgttatgagtaattcattcactaatcaagtattagcccaaatagagctttggaataatgctgataaatacgagaataaagtatatatgctacctaagaacttagacgaaatggttgctaagcttcatttagataaattaggcgtagagcttgaagagttatcaagtgaacaagctaaatacattggagtccaaaagaatggaccatttaaaccagaatattatagatattaag

SEQ ID NO: 261548 - DNA, 403 bp, Unknown
  Bacterial polypeptide expressing nucleotide sequence isolated from the Sargasso Sea
ttggtcacttgtgataatgaaattcaggtaaatgcggttaatgatgataaatctgttatgaaagacaatattaagccgcagctggatcgctatacctttcctgatggtcatcagatttttatgcttgctgagggtcgattgatgaatcttggctgtgcaactgggcatcctagttttgtcatgtcaaactcattcaccaatcaggtaatggcgcaaattgcacttgctaaggatacccctaaggttggagtgtatatgcttccgaaagagttggatgaagaagttgcaaggcttcatttggaccatttaggtgcaaaactcactgagctttctgatgaacaagcagagtatataggtgttccaaaagaaggtcctttcaagcctgaacattataaatattaac

SEQ ID NO: 261549 - DNA, 1057 bp, Unknown
  Bacterial polypeptide expressing nucleotide sequence isolated from the Sargasso Sea
atgtctgaagtagcattaaaaagcattatagaaacactaccatacaaaataaaggacatcagtctagctaaagatggcagaaatgcaatttcaatttctgaaaaagaaatgcctggcctcatggcaacaagggcaaaatatggtccagataaacccctaagaggtaaaaaaatcacaggatcattgcatatgaccattgagacagcggtattaattgaaaccttagtagatctaggcgctgatgttaggtgggctagttgtaatattttttcaactcaggatcatgcagcagcagcaatcgcagatgccggtgtgccagtttttgcatggaaaggcgaaacacttgaggaatactggtggtgcacaatgcaggctttgacctttccggatggttctggtccagacttgattgttgatgatggtggcgatgctactcttttgattcacaaaggctttgagcttgaagaattttatgaaaaaaataactacgctcctgaggtgacaaccaatattgaagaagaacaggtaattgaaaagctgttgagagatgttcttgaaaaaaatccaaatcactggcgtccggtggccaaaaatattattggagtttctgaagaaacaacaacaggtgttcacaggctagtacaaatggagaaagatggccatctacttttcccagcatacaatgtcaatgactcagtgaccaaatcaaagtttgacaatgtttatggatgtagagaatccttagctgatggtttaaaacgttcgctcgatattatggttgctggtaagacggttcttgtttgtggttatggtgatgtcggtaaaggttgtgttcaatccttgcgcggctatggtgctagggtgctggtaacggaaattgatccaatatgtgccctccaggctgctatggaaggatatgaggttaccacaattgaagatgttattgatgatgtacatatttttgtcacaacaactggtaataaagatatcattacgaaagatcatatgtacaaaatgagggatcaggctgttgtctgtaacattggtcacttgtgat

SEQ ID NO: 261550 - DNA, 1093 bp, Unknown
  Bacterial polypeptide expressing nucleotide sequence isolated from the Sargasso Sea
catgcaagattacaaagtaaaagatatttcagaagcagagtttggtagaaaagaaatttcattagctgaaactgaaatgccagggttaatggcattaagaaaagaatataaaggtaaaaaccccctgaaaggtgcaagaatcgtcggatgtcttcatatgacaattcagacagctgtactaattgaaacgttagtagatctaggtgctgatgtaagatggtcatcttgtaacattttttctacacaagatcatgcagcagccgcaattgcaaaagctggtatacccgtatttgcatggaaaggagaaaccgaggaagaatattggtggtgcgtaagacaaactattgaagggaaagaaggatggaaaccaaatatgatattagatgatggtggagatcttacagctttgatgcacaaagattataaagatttaatgaaagatataaaaggtctttctgaagaaactacaactggagttttagctcttaagaaaatggaaaaagaaggtaccttacttgttccagcaataaatgtgaatgattcagtaacaaaatcaaaatttgataatttgtatggatgtagggaaagtttagttgatggaattaaaagagcaactgacgtaatgatgtcaggtaaagttgctatagtagcaggtttcggtgacgtaggcaaaggaagtgctgcatctttaagaatgagtggagcaagagtaatggtaactgaaacagatcctatatgcgcgctacaagcagccatggaaggttacgaagttgttagaatggatgatatgataggggaagcagatataatttgtactgctactggaaataaagacatcgtgacagcagatcatatgagagcaatgaaggacagagcaattctttgtaacattggacactttgataacgagatacaagttgaagcattaaaaaattataaatgggacgagattaaacctcaggtacatgagattacttttccagacgataaaagaataatacttttagctgaaggaagactagtgaatttaggatgtgcaacaggacatcctagctttgttatgagtgcatcttttacgaaccaagttaccgcc

SEQ ID NO: 261551 - DNA, 1291 bp, Unknown
  Bacterial polypeptide expressing nucleotide sequence isolated from the Sargasso Sea
tatggttatcgcaaattcagttaagacctctacacctaattacgtaattgctgatatctctttatcagattttggtcgtaaagaaattaaaattgccgaaacagaaatgccaggattaatggcgcttagagataaatatcaatctgaaaagccactaaaaggtgcaaaaatagctggaagtcttcatatgactattcagacagcagtattaatagaaactcttgttgatcttggagcagaagttaaatgggcttcatgcaatatcttttcaactcaagatcatgcggctgcagctatcgcagatcaaggaatttctgtatacgcaaaaaaaggtgagactcttgatgaatattggcaatatactcactatattcttgattggggctcccactttccgaatatgattcttgatgatgggggagatgcaactggcttattgatacttggcagtaaagcagaaaaagatttatctgttttagataatcccggtaatgaagaagaaattgcgttatttaaatctatacaatctaagctagaaaatgatagtaacttttattctagaattaagagtaatattattggcgtcactgaagaaactacaacgggagttgcaagactttatcagctgcaaaagcaaaatgctctacctttccctgctatcaatgttaatgattcagtaactaagagcaaatttgataatttatatggctgtagagaatctttagttgatagcatcaagcgtgccaccgatgtaatgattgctggaaaggttgctttggtaatgggttttggagatgtaggtaaaggctcagcacagtcgttaagaggacttggtgcaattgtgaaagttgcagaagttgatccaatttgtgctcttcaagcggcaatggaaggttttagtgttgttaggttagaagatgttgtggaggatatagatatatttgttacggcaactgggaactatcaggtaataacaaacgaaaatcttgtcaagatgaaagatgaggccatagtttgtaatattggccattttgataatgaaattgatgtagcttcattgaaagattatccatgggaaaatattaagccgcaggttgatcacataactttaccgagtggcaataaaataatccttttagctgaaggtagattagttaatttaggttgtgctactggacatccaagttttgttatgagtaattcttttactaatcaagtcctagctcaaattgaacttttcaataagtcagaaaaatatgataaggaggtttatgttttacctaaacattta

SEQ ID NO: 261552 - DNA, 1354 bp, Unknown
  Bacterial polypeptide expressing nucleotide sequence isolated from the Sargasso Sea
aatgaataaagattacaaagtaaaagatattgcacttgctgagtttggaaggcaggaaattttattagcgcaagacgagatgccggcattgatgcagttgagagaaaattataggagtgagcaacctctaaaaggagctaaaattatgggttgcattcatatgactgttcagaccgcagttcttattgaaacattaattgagttaggtgctgaagttagatggtcgtcatgcaatatattttcaacacaagatcatgctgcagctgcaatcgcagcaaaagacatacctgtttttgcttggaaaggagagacagaagaggagtatgagtggtgcctggatcaaactataaataaagatggcaaaccatgggatgcaaatatgatcctagatgatgggggagatcttactgtaaaagttcataatgaatatccagaaatgcttaatcaaattcatggtatttcagaagaaacaaccacaggtgttaaaagactaaaagaaatgttggctaaaggagagcttaaagtaccagcaataaacgtaaatgactcaattactaaatcaaaaaatgataataaatatggttgtcgtcatggtttagacgatgcaattaaacgtggtactgacatgttgctatcaggaaagaaagccttagtaattgggtatggtgatgtaggtaagggttcggctgactgtttaaatcaacaaaaaatgatagtagatgttacagaagttgatcctatttgtgccatgcaagcatgttttgacggatatagcgttgtttctgcttataaaaatggagatgttggagaagctggcataaatttagataaaaaattattagaaaaatatgatttagttgttactacaacaggcaatattaatgttttagacaaatttatgcttaatgcgcttaaatctggttgcgtagtttgtaacataggtcattttgataatgaaattgatgttcagcatctaagaacatttgagtggtatgaaatcaaaccaggagtgcacaaaatactaaggtcacataatgactatttaattctacttggtgaaggcagacttgttaatttagctttggcgaccggtcatcccagcagagttatggatggctctttttgtaatcaagtgcttgcacaaattatgttatttaaagatggttttgcttacaagcctgatgaccaaaaagaattatatgtaaaagtattaccaaagaaactagatgaagaggttgcacatttgatggtaaaaggtttcggaggaactctgacaaaactcacaaaaaaacagcaagaatatatatcagtttcagaaaatggcccgtttaaagataattcttatacttactag

SEQ ID NO: 261553 - DNA, 930 bp, Unknown
  Bacterial polypeptide expressing nucleotide sequence isolated from the Sargasso Sea
aatgagtgattataaagtaaaagatataaacctagctgagttcggtagaaaagaaatctctcttgcagagactgaaatgcctggacttatggcattaagaaaagaatacaaaggaaagtctcctttaaaaggagctagaattttaggttgtctgcacatgacaattcaaaccgctgtgcttattgagacattggtagctcttggtgcagagtgtagatggtcatcatgcaatattttttcaacacaagatcatgcggctgcagcgatagcaaaagctggaatacctgtgtttgcttggaaaggtgaaacagaggaagagtattggtggtgtgtaaagcaaacaatcgaaggtaaaaaagattggaaaccaaacatgattttagatgatggtggtgacttaacagctttaatgcataaagattataaacatttaatgaaagacattaaaggtctttcagaggagacaacgacaggtgttctagcattaaaaaagatggagagcgaagggacattattagtgccggcaataaatgttaatgactcagtgacaaaatcaaaatttgataatttatatggatgtagggaaagtttagtcgacgggattaaaagagctacagatgtaatgatgtcaggtaaagtggcaattgttgcaggatttggtgacgtaggtaaaggcagtgcagcatcattgaggcaatctggagcaagagttatgattactgaaactgatccaatatgtgccttgcaggcagcgatggaaggttatgaagtagtcttgatggatgaaatgattaaagaggctgacatagtggtaaccgcgactggtaacaaagatattataacagcagatcatatgagagatatgaaggatagagcgatactatgtaatattggacactttgataatgaaatccaagttgaggcattaaa

SEQ ID NO: 261554 - DNA, 1288 bp, Unknown
  Bacterial polypeptide expressing nucleotide sequence isolated from the Sargasso Sea
atggaagattttaaagtaaaagatatatcccaagcggaatttggaagaaaagaaatttcactggctgaaactgaaatgccaggattaatggctcttagagaagaatataagggtaaaaaacctttaaatggagctcggattgttggttgtttacacatgacaatacaaacagctgtcttaatagaaactttagttgagttaggagccgaagtaagatggtcctcatgtaatattttttcgacacaagaccatgcagcagcagcaattgcaaaagctggcattcctgtatttgcttggaaaggcgaaacagaagaagaatattggtggtgtgtaaagcaaactattgaaggaaaagatggctggaaaccaaatatgatacttgatgatggtggcgatcttacagcattgatgcacaaagattataaagaattattaaatgatgttaaaggtttatcagaagagacaactacaggagttttagcattaaaaaaaatggaaagtgaaggcaatttacttgtcccagcaataaatgttaatgactcagtaacaaaatctaagttcgacaatttatatggttgcagagaaagtttagttgatggaattaaaagagctactgacgtcatgatgtcaggtaaggtagctattgtagctggatttggagatgttggaaagggaagcgctgcttctcttcgtcaaagcggtgcaagagttatggttacagaaacagacccaatttgtgctctccaagctgcaatggaaggttatgaagtagttttaatggatgagatgataaaagaagccgacattgttgttacagcaacaggaaataaagatattgtgacagctgaccatatgagagaaatgaaagatagagcaattctatgcaatattggtcactttgataatgagatccaagtagatgctcttaaaaattataaatgggatgaaataaaaccacaagttcacgaaattacattgccggatggaaaaagaattattttattagcagaaggtagattggttaatcttggatgtgcaacaggacacccaagttttgtaatgagtgcttcttttacaaatcaagtaacagctcagatagaattatggaataactcagataaatatgagaaaaaagtatatgttttacctaaacatttagatgagaaagtagccagacttcatttagaaaaagttggagctaaattaaccaaattatcagatgatcaagcaaaatatataagcgtaacaccagaaggaccttataaaccagatgcctatcgctactaaa

SEQ ID NO: 261555 - DNA, 392 bp, Unknown
  Bacterial polypeptide expressing nucleotide sequence isolated from the Sargasso Sea
cttcgataatgaaatacaagtagaagcgctaaaaaattataaatgggacgaaattaaaccacaggttcacgaaattacattcccagataataaaagacttattttattagcagaaggaagacttgtaaatttaggatgtgcaactgggcatccaagctttgttatgagtgcatcatttactaatcaggttacagcacaaatagaattatggaataattctgaaaagtatgagaacaaagtttacgttttgccaaaacatcttgatgagaaagtggcaagactacatttagaaaaagttggagctaaacttacacagctatcaaaagatcaggctgattatattagtgtaaaaacagaaggaccttataaaccagatgcttatcgctactaag

SEQ ID NO: 261556 - DNA, 1420 bp, Unknown
  Bacterial polypeptide expressing nucleotide sequence isolated from the Sargasso Sea
atggttatcgcaaattcagttaaaacctctacaccaaattatgtaattgctgatatctccttatcagattttggccgtaaagaaattaaaattgccgaaactgaaatgcctggattaatggcacttagagataaatatcaatcagaaaagccactaaaaggtgcaaaaatagccggaagtttgcatatgactattcagactgcagtcttaatagaaactcttgttgatcttggggcagaagtgaaatgggcttcatgcaatattttttcaactcaagatcatgcggcggcggctattgcagatcaaggaattcctgtatacgcaaaaaaaggtgagacacttgatgaatattggcaatatacccactacattcttgattggggttcagactctccaaatatgattcttgatgatggtggggatgcaactggtttattgatactcggcagtaaagcggaaaaagatttgtctgttttagataatcctggtaatgaagaagaaattgctttattcaattctattaagtctaaattagaaaatgatagtgacttctattctagaattaaaagtaatatcattggtgtcactgaagaaacgacaactggagttgcaagactttatcaactgcaaaagcaaaatgctttacctttccctgcgatcaacgttaatgattcagtaactaagagcaaatttgataatttatatggctgtcgcgaatctttagtagatagtataaagcgcgcaactgatgtgatgattgctgggaaggttgctttggtaatgggttttggagatgtaggtaaaggttcagcccagtcactaagaggacttggtgcaattgtaaaagttgctgaagttgatccaatttgtgctcttcaagcagcaatggagggttttagtgttgttacgttagacgatgttgtggaagatatagatatctttgttacagcaactgggaactatcaggtaattacaaacgaaaatctcgtcaagatgaaagatgaggccatagtttgtaatattggtcattttgataatgaaattgatgtggcttcattgaaagattatccatgggaaaatattaagccgcaggttgatcacataactttaccaagtggcaataaaataattcttttagccgaaggtagattagttaacttaggctgtgccactggacatccaagttttgttatgagtaattcttttactaatcaagtattagctcaaatcgaacttttcaataagtcagaaaaatatgctaaggaggtttatgttttaccaaagcatttagatgaaatggtagctagattacatcttgataaaattggtgcaaaattaacaaaattaactaaggaacaagctgattatattaatgtctctgtagaaggaccttacaaaccagagctttatagatattaag

SEQ ID NO: 261557 - DNA, 450 bp, Unknown
  Bacterial polypeptide expressing nucleotide sequence isolated from the Sargasso Sea
catgagtgaagattttaagattaaagatataagtttagctgattttggtgataaagaaattgcaatagctgaaacagaaatgcctggtttaatggcattaagagaagagtatggtgattctaaacctctagatggggcaaaaattgtaggttgtttacatatgacaatacaaactgccgttttgattgagactttggtatttttaggtgctactgttagatggagttcatgtaatattttttctactcaagatcacgctgctgcagcaatagctgccaaaggcattccagtatttgcttggaaaggaatgacagaagaagaattttggtggtgtattgagaaaacactagaaggcccagatggttggaagccaaatatgattttagatgatggtggagatgctacaaaaattattcatgaaaagtatccaaaaatgttggaagaaatttt

SEQ ID NO: 261558 - DNA, 1357 bp, Unknown
  Bacterial polypeptide expressing nucleotide sequence isolated from the Sargasso Sea
aatgagtgtacaagactataaggtaaaagatatttctcttgcagaatatggaaggcaagaaattcttctagctcaagatgagatgccagctttaatgcaattaagagataactatagagaagaacaacctcttaagggtgcaaaaataatgggctgcatacatatgaccgtacaaactgctgtcttaattgaaactctaattgagttaggtgctgaagttagatggtcttcttgcaatattttttcaacccaagatcatgcggcagctgcaattgctgatcagggtattcctgtttttgcttggaaaggcgaaacagaagaagaatatgagtggtgtctagatcaaactattaataaagacggcaaaccttgggaagcaaatttaattttagatgatggaggagaccttactcttaaaatacataaagattatcctgaaatgctttcaaaaattcatggagtctctgaagaaacaacgacaggagttaagcgattaaaagaaatgctagaaagcggtgaattgaaagttccagccataaatgtaaatgattctattactaaatcaaagaatgacaataaatatgggtgtaggcatggtttggatgacgctattaaacgaggtacagatatgctcttatctggtaagaaggctcttgtaattggttatggtgatgtcggcaaaggttcagctgactcattaaaccaacaaaaaatgattgttgatgttactgaaattgatccaatctgtgcaatgcaagcatgttttgatggatttagcgttgtttctgcctatgaaaatgggaatgttagcgaagatggtaagaatttagataaaaaactattagaaaaatacgatttagttgttactacaacaggcaatattaatgttttggataagcatatgttagatgccctaaagtcgggttgtgttgtatgtaatataggtcattttgatagcgaaatagatattaaacatttaaaaaattatgagtggaaagagattaaaaccggggttcataaagtaataaaaaataaagataaatatttaatccttcttggtgagggtaggctagttaatttagctttagcaaccggacatccaagtagagttatggatggctctttctgcaatcaggtgcttgcacaaatcgcattattcaaagatgattttgctaacaaatctattgatgaaaaagaattgtatgtaaaagttttaccaaaagaattagatgaagaagtggcaaatttaatggttaaaggttttggtggaacattaacaaaattaactaaagagcaagaagaatatatatccgtaagtaaagatggtccatttaaggatgattcttatacctattag

SEQ ID NO: 261559 - DNA, 1246 bp, Unknown
  Bacterial polypeptide expressing nucleotide sequence isolated from the Sargasso Sea
atgagccagcaatatatcgtaaaagacatttctttatctgattttggtcgcaaggaattaagtatagctgaaacagaaatgcctggattgatggcgctgcgcgcggaatatggagaaagcaaacctttaaagggtgcgcgtatcgtcggttcacttcacatgactattcaaacagcagttttaattgaaacacttgtggcattaggcgcagatgtgcgctgggcttcctgcaacattttttcaacccaagaccatgcagccgcagcaattgccgcagcaaatattcctgtgtttgctattaagggtcagtctttagaagagcattgggattacttagataaatcttttatgtttcctgatggcccaaatatgattttagatgatggtggtgatgcaactttgtatgtgcttcttggtgcgcgcgctgaagcaggtgaagacatcattccagttccccagtcagaggaagaagatgtcataaaggtgcaaattaaaaaacgcatggaacaatcacctgggtggtttacgaaaacgcgtgatgccatcaaaggtgtttctgaagaaacaacaactggtgttcaccgtctttacgaattggttaaaaatggtcaacttccttttccagctattaacgttaatgactctgtgactaagtcaaagtttgacaacaagtatggttgtaaagaatctttagtggacggtatccgtcgtgcaacagatacgatgatggcaggtaagacggcagtcgtatgtggatacggcgacgttggaaaagggtctgccgcatctcttcgtggcgccggtgcgcgcgttaaggtgacagaggttgatccaatttgcgctctacaggctgccatggatggttttgaagttgtaactttagaggatactttagaaagcgctgatatttttattacaactacgggtaataaagatgtcattagaatagaacacatgcgtgaaatgaaagatatggcaatcgttggcaatattggtcactttgacaacgaaattcaagttgcccatcttaaaaatcacaagtggacgaatattaaagatcaagtagatatgatcgaaatgccatctggaaatcgattgatattactttcagagggccgtttactaaatcttggaaatgcaacgggtcatccatcttttgtgatgtcagcttcatttacaaaccaagttcttgcgcagattgagctatggaaaaagggcggcgagtataaaaacgatgtttatattc

SEQ ID NO: 261560 - DNA, 995 bp, Unknown
  Bacterial polypeptide expressing nucleotide sequence isolated from the Sargasso Sea
tgagactgaggaagaatactggtggtgtatcgaacaaaccctcaaatgggagggaaatgaaggtccaaatttgcttcttgatgatgggggagatttgacctggtatgttcatgacaaatatccgcaattgcttgataacattatggggctttcagaagaaaccactaccggagttcaccgtcttcatcagatggctcggaagaatgagctcaaggttcctgcctacaatgtgaatgattcggtaaccaagagtaagttcgacaatctttacggatgccgtgaatcccttgtagacggaatcaaacgggcaacagatgtgatgattgcaggcaaattagcagtggttgcaggatatggtgatgtaggaaaggggtctgcagcctcactccgtaaccaaggagcaagagtcgtggtgacagaaatcgatccaatctgcgctcttcaggcggtgatggaaggatatcaggtggttcgaatggaagaagtcgctgcggaggccgatatttttgtcacggctaccggttgtgcgggtatcatccgcagagaacacatggatcagatgaaaaacgacgcaatcgtttgcaatattggacatttcgatatagaaattgatgtggcctcgttgaacgatgatccttcaatcaacaaaatcaatgtgaaaccccaggtggatcaatacatctgggataccggtaaaaggatcatccttcttgcagaagggcgtctggttaatttagggtgtgccacggggcacccttcatttgtgatgtccaacagtttttgtaatcaggttctggcgcagatggatctctatgaaaaagggaaacaatatgagaatcaggtctatgtccttcctaaggaattggatgaaaaagtcgcgcgtcttcacctagaccaacttggtgtccatttgaccgaacttcagcaagaccaagcagattatcttggaattcccacaaaggggccgttcaagcctgaacattaccggtactgaa

SEQ ID NO: 261561 - DNA, 844 bp, Unknown
  Bacterial polypeptide expressing nucleotide sequence isolated from the Sargasso Sea
attggtgtttcagaggaaacaacaaactggagttgcaagattgcaacagatggttgaaaatgcatctctcctctttcctgcctttaatgtaaatgacgcagctacaaaatctaaatttgataacttatatgggtgtagagaatcattagctgatggaatcaaaaggtcaacagaaatcatgttagctggaaaaactgttgttgtttgtggatatggtgatgttggaaaaggctcagctcaatcaatgaagtcttatggatgtaaagtcattgttacggaaattgacccaatatgcgcattacaagctgcaatggaaggatttgaagtaagaaaattagaagatgttttagataggggtaatatttttgttacaacaacaggtaataaagatatcattactttaaaacatatgagaaagatgaaagatcaggcaattgtatgcaatataggtcattttgataatgaaattcaggttgatgctctaaatacttcaaatgcaaaaagagatacaattaaacctcaattagatagatatacttttaaaaatgggaaacaaatctttttacttgcggaagggagattagtaaatcttggatgtgcaactggtcatgctagttttgttatgtccacttcattctcaaatcaagttcttgctcaaatattcttagcaaaaaataagcctgctaccggaatgtatgatttaccaagaaaattggatgaagaagtggctagaattcacttagaacatttagatgcagacttaactaaactatctaaaagtcaagcagactatattggagttgccgtaaacggtccattcaaaaaggatgaatataggtattag

SEQ ID NO: 261562 - DNA, 902 bp, Unknown
  Bacterial polypeptide expressing nucleotide sequence isolated from the Sargasso Sea
catggctgaaacagcaaaagaaaataaaatagatctgatgaacgattacaaagttgctgatatctctctggctgaatggggcgagaaggaaatcaagattgcagaaacagaaatgccaggcttgatgagtatcagagaagaatttggaaaagaaaagcctctagagggtgcgagaattgctggttgtcttcatatgactattcaaacagcggtactcattgaaacattgattgaactcggtgctgatatcaggtggtcttcttgtaatatcttctcaacacaagatcatgctgcagctgctctagcagccaaaggtattccagtatttgcatggaaggatgagagcgaagaagaatactggtggtgcgtagaaaaaacaatcaagggtccagatggttggacgccaaatctcatacttgatgatggcggtgacttaacgggtctcatgcatgaaaaatatcctgaactgatgaaagaaatcattggtgtctcagaagagacaacaactggggtattgcgtctctataacatggagaaagatggaacgctcatgtgtcccgcaatcaatgtcaatgactcggtgacaaaatcaaaatttgacaatctgtatggttgtcgagaatcactcgtagatgggattaagagagcaaccgatgtcatggtggctggaaaaattgctgtcgttgctggatacggggacgttggaaaaggctcagcgcagagtcttagaggccttggcgctacagtttggataaccgaaatcgacccaatatgtgcactttcagctgcgatggaaggatatcgagttgtgacaatggatgacgcttgctctcaagcagacatctttgttactgccaccggaaactacaatgttattgataaacatcacttaaaacagatga

SEQ ID NO: 261563 - DNA, 1288 bp, Unknown
  Bacterial polypeptide expressing nucleotide sequence isolated from the Sargasso Sea
atgcaagattataaagtaaaagatctatcccaagcagaatttggaagaaaagaaatttctttggctgaaacagaaatgcctggattaatggcacttagaaaagaatataaaggtaaatcccccttaaaaggagcaaaaatattaggatgtttacacatgactattcagacagcggttttaattgaaacattagttgatcttggagcagaggtaagatggtcttcatgtaatattttttctactcaagatcatgcagctgccgcgatagcaaaagcaggtattcctgtatttgcatggaagggcgagactgaggaagagtattggtggtgcgtaagacaaaccatagaaggtaaaaaagactggaaaccaaatatgatattagacgatggtggagatcttactgcacttatgcataaagattataaggaattattaaaaaacataaaaggtttaagcgaagagacaaccacaggtgttttggcattaaaaaaaatggaagagcagggaacacttatggtgcctgcaattaacgttaacgactcagtaacaaaatcgaaattcgataatttgtatggatgtagagaaagtttagttgatggtataaagagagcaactgacgtaatgatgtcaggaaaagtggcaattgttgctgggtttggtgatgtcggaaaaggtagtgcggcatctttaagacaaagcggcgcaagagtgatgataacagaaacagatcctatttgtgcacttcaagcagcaatggagggatatgaagttgttcttatggatgaaatgatttctcaagcagacattgttgtaactgctactggtaataaggatatagttacagctgatcacatgagagccatgaaagacaggtcaattctatgtaatattgggcactttgataatgagatacaagttgaggcattaaaaaattataagtgggatgaaataaaaccgcaagttcatgagattacttttccagataataaaaggttaatcttgcttgctgaaggaagattagtaaatttaggatgtgcaactggccaccctagttttgttatgagtgcttcatttacgaatcaagtaacagctcaaattgaattatggaataattctgaaaaatatgagaaaaaagtttatgtgttaccaaaacatcttgatgaaaaagttgcaagattacacttagaaaaagttggggctaaactaacaccactatcaaaagatcaagcagattatataagtgtaaaaccagagggtccatacaaaccagatgcgtatcgctactaac

SEQ ID NO: 261564 - DNA, 1288 bp, Unknown
  Bacterial polypeptide expressing nucleotide sequence isolated from the Sargasso Sea
atgacagattatagagtaaaagatataaacgaagcagaattcggaagaaaagaaatttcattagcagaaacagaaatgccaggtttaatggcattaagaaaagaatataaagggaaatatcctttaaaaggtgcgaaaatattaggatgtctacatatgacaatccaaacagcagttttaattgagactttagtggatcttggtgctgaagtaagatggtcttcatgtaacattttttctactcaagaccatgctgcagctgcaatcgcaaaagcaggcattccagtatttgcatggaaaggtgaaacagaagaggaatattggtggtgtgtaagacaaactatcgagggtaaaaaagattggaagcccaatatgattttggatgatggcggagatcttactgcacttatgcataaggattataaagacttgatgaaagatataaaaggcttaagtgaggaaacaactactggagtattagcacttaaaaaaatggaagaacaaggaacacttttagttcctgcaataaatgttaacgactcagttacaaaatcaaaatttgacaatctatatggttgcagagaaagtttagttgatgggataaaaagagcgacagatgtaatgatgtcaggcaaggtcgcaattgttgcaggatttggagatgtgggaaaaggtagtgcagcttctttaagacaaagtggtgcaagagtaatggtaacagaaacagatccaatttgtgcacttcaagctgcaatggaaggttatgaagttgtgttgatggatgagatgatcagtcaagcagatattgttgtaacagcaactggaaataaagatattgttacagcagatcacatgagagcaatgaaagataggtcaatactttgtaatattggacactttgataatgagattcaagttgatgctttaaaaaactataaatgggatgaaataaaaccccaagttcacgaaattacttttccagataataaaagacttattttattggctgagggaaggctagtaaatttaggatgtgcaacaggacacccaagttttgtaatgagtgcctcatttacaaaccaagttacagcccaaatagaattatggaataactcagataattatgaaaacaaagtatacgtgcttcctaaacatttagatgagaaagttgctagattacatttagaaaaagttggagcaaaattaacacctttatctaaagatcaagcagactatatcagtgttaagactgaaggaccatataaaccagatgcttaccgctactaag

SEQ ID NO: 261565 - DNA, 1285 bp, Unknown
  Bacterial polypeptide expressing nucleotide sequence isolated from the Sargasso Sea
atggactataaggtaaaagatatttcactgtcagaatggggtttgaaagaaatcgcaatagctgaaactgaaatgcctggtttaatggcattaagagaagaatataaagataataaaccccttaaaggagctaaaattgttggttgtttacatatgacaattcaaacagcagttttaatagaaacattaattgatctgggagcatcagtgagatggagttcttgtaatattttttctactcaagatcaggctgctgcagctatagcttcaaaaggtataccagtatttgcttggaagggaatgaatgaagaagagttttggtggtgcatcgaaaaaactcttgaaggaccaaatggttggaagccaaatatgattttagatgatggtggagatgctacaaaaattatacatgaaaaatatccggatctgttaaaagatataaaaggcttatcagaagaaacaacaacaggtgttcatagattaaaagacatggaaaaaaataatctattaaaagttccagctataaatgtaaatgattcagtaactaaatcaaagtttgataatttatatggatgtaaagaaagcttagtagatggaattagaagaggcactgatgttatgatggctggtaaaattgcagtagttgcaggctatggagatgtaggtaaaggttcggcagcaagtttaagaggagcaggtgcaagagtttgtgttactgaaattgatccaattaatgcattgcaagctgcgatggaaggatatgaagttgtaacgatggatgacgcatgttcttatggcgatatttttgtgactgctactggtaatgcagatgttataacacttgagcatatgagaaaaatgcatgatagggcaatagtttgtaatatcggtcattttgataatgaaatacaaacagaggcactaagaaattataaatctgaagaaatcaagcctcaggtagatgaaattgaatttcctgatggaaaaaaattactacttttatcacaagggcgattagtaaatttaggaaatgctactggtcacccaagttttgttatgagtgcatcctttacaaatcaagttatggcacaaattgaactttgggaaaattataataattatgaaaataaagtttatgttttaccaaaacatttagatgaaaaagttgctactctacatttaaaaaaagtaggagctaagctaacaaaattaacagataaacaagcagaatatattggcgttaaaaaagaaggtccttttaaggatgatacgtatcgctattaat

SEQ ID NO: 261566 - DNA, 949 bp, Unknown
  Bacterial polypeptide expressing nucleotide sequence isolated from the Sargasso Sea
aatggaccaagattttaaagtaaaagatataaatttagctgactttggtagaaaagaaatttccatagcagagtctgaaatgccaggtttaatggcattaagaaaagaatataaaggcaagaaacctttgaatggagcaaatattcttggctgtcttcacatgacaattcaaacagctgttttgatagagacacttgttgaacttggcgcgagtgtgagatggtcttcctgtaacattttctcaacgcaagatcatgctgctgcagcaattgcaaaagcaggaataccagtttatgcatggaaaggtgaaacggaaaaagagtattggtggtgcattaaacaaactatcgaaggtgataaaaattggaaaccaaatatgattttagatgatggtggtgatctcaccggactaatgcacaaggattataaagatctacttaaaaatattaaaggggtatcggaagaaactacaactggagttttagcattaaaaaaaatggagtctaataaaacattactaatccctgctataaatgtgaacgactcagtaacaaaatctaaatttgataatttgtatggttgccgggaaagtttagtagatggaattaaaagagcaacagatgtaatgatgtctggtaaagttgctatagttgctggttttggtgatgttggtaaaggaagtgcggcatctcttagacaatcaggcgcaagagttatggttactgaaacagatcctatttgtgcactccaagcggcaatggaaggttatgaagttgtattgatggacgaggctattaaagctgcagacatagttgtaactgccacaggtaataaagacattgtaactgctgatcacatgagggaaatgaaagacagagcaatattatgcaatattggtcatttcgataatgaaattcaagttgatgctttaaagaattacaaatggact

SEQ ID NO: 261567 - DNA, 787 bp, Unknown
  Bacterial polypeptide expressing nucleotide sequence isolated from the Sargasso Sea
caaggaacccttttagtccctgcaataaatgtaaatgactcagttacaaaatcaaaatttgataatctatatgggtgcagagaaagtttagttgacggaattaaaagagcaacagatgtaatgatgtctggaaaagttgcaattgttgcaggatttggtgatgtaggaaaaggaagtgcagcttcattaagacaaagcggtgcaagagtaatggtaacagaaacagatcctatttgtgcacttcaggctgcaatggagggttatgaggttgtattaatggatgagatgattggccaagctgacattgttgttacagcaacaggtaacaaagatattgttactgcagatcatatgagagcaatgaaagatagatcaatcctttgtaatattggacactttgataatgagatacaagttgatgcattaaaaaattataaatgggatgaaataaaaccacaagttcatgaaattacttttccagataataagagacttatattattagctgaagggagacttgttaatttaggttgtgcaacaggacaccctagttttgtaatgagtgcttcatttacaaaccaagttacagctcaaatagagttatggaataactcagataattaccagaataaagtttatgtacttcctaaacatttagatgagaaagtagctagattacatttagaaaaagttggagctaaattaacacctttatctaaggaccaagctgattatatcagtgttaaaactgaaggaccatataagccagatgcttatcgctactaag

SEQ ID NO: 261568 - DNA, 960 bp, Unknown
  Bacterial polypeptide expressing nucleotide sequence isolated from the Sargasso Sea
ttctcgaaaatatccatggcattacagaagagacaactactggcgtcttaagacttaatgagatgatcgaaaaaggcgagctgaaagttccagcaatcaatgtgaatgactcagtaactaaatcaaaggctgataataaatatggaacaaggcatagcttaaatgatggcataaaaagaggaacagatatgtttctcgctggtagaaaagccctggtcattggatatggagatgtaggtaagggatctgctcaaagtcttaaacaagaaggaatggtggttagagtcactgaaatagatccgatttgtgccatgcaagcttgtatggatggttatgaggttgtttcaccttatatagacggaattaataatgactctgaagattcaatgaataaagctctattagaggacactgatctaattgtcacaacaactggtaactacaaagtttgtgataaacatatgcttaaagctttgaaaaatggagcagtggtttgcaatataggtcattttgataccgagatagatacacaatacatgcgtgatgagtggcagtgggaagaggtaaaaccgcaagttcataagatctttagagacactaaagctggagaaacgcccgatatggatagtgaagactacattattcttctgtcggaaggacgacttgttaacctaggcaatgcaacaggtcacccgtcaaggatcatggatggttcttttgcaaatcaagtacttgctcaaatgtatttatacgacaagaaatttgctcaaattaatgatgaagataagaaacaagagcttatccgggttgaagtattacctaagaaattggatgaagaggtagcttcttatatggtagaaggatttggcggagtcatgactaagctatcttctgatcaagccgaatacatcaatgtacccgaagaggggcctttcaagtcagaaatatataaatactaat

SEQ ID NO: 261569 - DNA, 1327 bp, Unknown
  Bacterial polypeptide expressing nucleotide sequence isolated from the Sargasso Sea
tatgtctttagctgaaaagactcaaacggatttacttccatataaagttaaagatattaagcttgcagaatggggtagaaaagaaataacactagctgaagctgaaatgcctggcttaatgtcgctttgtgaagaatatggagaatcaaaacctctaaaaggcgcacgaattgctggatgcctacacatgactattcaaactgctgttttaattgaaacattgactaaactaggggcagaagtatcctggtcttcttgcaatattttttcaactcaagatcatgccgctgcagctattgccgctacaggaataccagtatatgcgtggaaaggtatgaacgaagaagaatttgattggtgtatagaacaaacattatttgcattcaaggatggaaagccattaaatatgatcttagatgatggcggtgatcttaccaatatggttttagataactttcctgaattagtatcaaatattaagggtttatctgaagaaaccaccacaggcgtccatcgcctatatgagagagtaaaaaatggaacgcttacaatgccagcaatcaatgtaaatgactcagtcactaaatctaaatttgacaataaatacggttgtcaagagtcactggttgatgcaatcaggagatcaactgatattatgatggcaggaaaggtagccgttgttgctggatacggagacgtgggtaaaggttcagctgcttctttaaaaggcgcaggggcaagagttattgtaactgaaattgatcctatatgcgcgctgcaagcatcgatggatggctttgaggtaaaaagattagaaactgctattcctgaagcagatattgtagtaactgcaactggcaataaagatattgtaaggggcgagcactttgaggcaatgaatgataagacaatcgtttgcaatataggtcattttgataatgaaatagatatggcatggttaaatcaacattatggagaaactaaagataccattaaacctcaagtagataaatatcatgtcaaaggtaaggatatcattgtgctggctgaaggaaggcttgtaaatttgggttgcgcaacaggtcatccatcatttgttatgagtaattcatttaccaatcaaacacttgcacagattgaattatggaagaatagcgaaaattatgaaaacgatgtttatctccttccaaagacgctagatgagaaagtagctagacttcatcttgacaagctaagcgttgaattgactgaactcagggaagaccaagctgattatataggcgttaaaaaacaaggaccctttaagtcagatgattatcgatattaa

SEQ ID NO: 261570 - DNA, 577 bp, Unknown
  Bacterial polypeptide expressing nucleotide sequence isolated from the Sargasso Sea
aatggtaacagaaacagatcctatttgtgcacttcaagcagctatggaaggttatgaggttgttttaatggatgaaatgattaaggaggcagatatcgttgtaactgctactggtaataaagatatagtcaccgctgatcatatgagagaaatgaaagatagggcaattttatgcaatattggacattttgataatgagatacaggttgatgcgcttaagaattataaatgggatgaaattaaacctcaagttcatgagataacacttaatgataataaaagaattattcttttagctgaaggtagacttgttaatctaggctgtgctacaggtcatccaagctttgttatgagcgcatctttcacgaaccaagttacagcacaaatagagttatggaataatccagatcaatatgagaaaaaagtttacgttctgcctaaacatttggatgaaaaagtagcgagactgcatttggagaaagttggtgcaaaactaaccaaattatctgaggatcaagcagaatacattagtgttacaactgaaggaccttataagccagaagcttacagatactaa

SEQ ID NO: 261571 - DNA, 1750 bp, Unknown
  Bacterial polypeptide expressing nucleotide sequence isolated from the Sargasso Sea
tatggatgattttaaagtaaaagatatttctcaagctgaatttggaagaaaagaaatttctatagcagaaagtgaaatgcctggtttaatggcattaagagaagagtattcaaaagaaaagcccttaaaaggcgctagaattatcggatgtctccatatgactatccaaacagcagtactaattgagacattagtagatcttggagcagaagtaagatggtcatcttgtaatatattttctacacaagaccatgcagcagcagcaatagcaaaagctggaattcctgtttatgcatggaaaggtgaaacagaggaagagtacttatggtgtattaaacaaacaattgttggaaaacctgactggaaacccaacatgttattagatgatgggggagatttaactgccatcatgcacaatgagtacaaagatttaatgaaagatataaaaggtgtttcagaggagactacaactggaattaaagcattaaacaaaatggagaaagataattctcttttagttcctgcaataaacgttaatgactctgtaacgaaatctaaatttgataacttatatggatgtagagaaagtttagttgacggtatcagaagagctactgatgttatgatgtcgggtaaaattgcaatagttgctggttttggtgacgttggaaaaggaagtgcagcatctttaagacaaagtggtgctagagttcttgttacagaggcggaccctatttgtgcacttcaggcagcaatggaaggctatgaagtagttttaatggaagaagctataagtagagctgacatagtggttacagcaactggaaataaagatattgttactgcagatcacatgagagatatgaaagatagagcaattttatgtaatattggacattttgataatgaaattcaagttgaggcattgaaaaattataaatggacagaagttaagccccaagttcatgaaattgcattaccaagtaagaaaaggataatccttttagcagaaggtagattagttaatttgggttgtgcaactggacacccaagttttgtaatgagtgcatcttttactaatcaggtaattgcccaaatagaactttggaataatcataaaaattatgaaaataaagtttatgttttgccaaaacatttagacgaaaaagtagcaacattacatttagaaaaagtaggagctaaattaacaaagttatcaaaagaacaagcagattatataagtgtgaaacagaagggccttacaaaccagatgcctatcgctactaaaagtagcaaatttgatatttctaaaaagaaaaatttagagaaaataattgtaaaagttttaaacaaaattaaaactggggatacattattgttgtatggagcaataggaataggtaaaactacatcagctagattattcattaataatttccaaaaaaaaagaaaagttaaaatttctgaagtaacgagcccaacatttaatatagtaaatgaatatttggtagatgacatcttaatatcacacttcgatttatttaggctcagaaataaaaatgagtgtaaaaatattggcatagaagaagatattgataaaaaaataacaattgttgagtgggctgaaaaaataaaccaaagaccaaaaaatagattagaattatactataaatatagcaaaaattttaaatctagatcgttaattattaaaagttttggtagactcaaaaaatatgagttttttaaataa

SEQ ID NO: 261572 - DNA, 1321 bp, Unknown
  Bacterial polypeptide expressing nucleotide sequence isolated from the Sargasso Sea
atggtcacaaaaactgaaaaaataagcaaaattggaactgattataaagtagctgatatatctttagctgaatttggaaaaaaagaaattaagattgctgaaacagaaatgcctggattgatggcaattagagaagagtataaagaccagaaaccactcaaaggtgcaaatatacttggttgtcttcacatgactatccagacagctgtccttattgagacgcttgttgatttaggtgcttctgttagatggtcttcttgtaatattttttcaactcaggatcatgcagcagctgcaatagcaagtcaaaatattcctgtatatgcatggaaaggagaaaccgaagaagaatacaattggtgtatcaaacaaactattgagggtgataaagattggaaaccaaatctgttattagatgatggcggtgacttaacagctataatgcataatgattatccgcaattaatgagcgatattagaggtgtatctgaagaaactacaactggtgttcacagactctatgaaatggaaaaaaataattcactcaaagttccggctctaaatgtaaatgattcagtaactaaatcaaaatttgataatttatatggttgtagagaatctcttgtcgatggaattaaaagagctacagatagtatgattgctggcaagttagctattgtttgtgggtatggcgatgtaggcaaaggctcagctgcatcattgagaggattaggagcgaatgttctcattagtgagatagaccctatatgtgcacttcaagcatctatggaaggttaccaagttgttactatagaagattatttagataaaattgatatttttgtaactgcaacagggaatttaaatgttattcagcatgatcatatggctaaaatgaaaaatggcgcgattgtatgtaatattggacattttgataatgaaatagatgttgagagtctaagaaaatacgaatgggagaatgtaaagccacaagtagatcagataatctttccggatgggaaaagaataattctactggcagaaggtagattgattaatctaggttgtgcgaccggacatccaagttttgttatgtcttgttcatttacaaatcaagtgatggcacaaattgagctatgggaaaattatagcaaatatgaaaataaagtttatgttctgcctaaaaatcttgatgaaaaagttgcgagacttcatctagaaaaacttggagttaaattaactaggctttctaaagaacaagctgagtacatcaacgttgaccaggacgggccattcaaaaaagatgagtacaggtattaga

SEQ ID NO: 261573 - DNA, 1212 bp, Unknown
  Bacterial polypeptide expressing nucleotide sequence isolated from the Sargasso Sea
gggcgctgaagttcgttgggcaagttgcaatatttttttcaacacaagatcatgcggctgcttgtatagctgaaacgggcgtacctgtttttgcatggaaaggggaaagtttagaggaatattggtggtgtacactacaagcgcttacttttaatggaaatgaaggccctgacctaattgttgatgatggtggagatgcaacattattaattcataagggatatgaattagaagaatattatgcaaaaaataatactacacctaaaatcacaactaaaataaaagaagaacaggttatagagaatctacttcgtgaagtattagataaagatccaatgcattggcataaagtagcaaaaaatattattggagtttcagaagaaacaacaacaggcgtacacagactagaacaaatgtctaaagatcaaacattattattccctgcttataatgtcaatgattcagttacgaagtcaaagttcgacaatgtatatggttgtagagagtctctagttgatggtttaaaacgttcaatggatgttatggttgcaggtaaaactgtgttggtttgtggttatggagatgttggaagaggatgcgtccaatctatgagaggatatggagcaagagtattagttactgaaattgaccctatatgtgctcttcaagctgcaatggaggggtatgaggtagttacaattgaacaagctatttctgtaacaaatatttttgtatcagcaactggaaatcgagatgtaatcactttagagcatatgcaaaaaatgaaggatcaggcaattatatgtaatattggtcattttgataatgaaatacaggtcgataaattaaatgaatcatcaaatgttcaaagagatactattaaacctcaagtggatcgatatacttttgatgatggtcactcagtatatttgctcgcggagggacgtttgatgaatcttggttgtgcaacaggacatcctagttttgtcatgtcaaattcatttactaatcaagtattagctcaaatagcattagtaaaagataaaccagatcttggtgtctatatgttgccaaaggagcttgatgaagaggtcgcgcgtttgcacctaagtcatttaggagtaactctaacagaattatctgatgaacaagcagactacataggtgtatctaaatctgggccatttaaacctgagcattacagatattaat

SEQ ID NO: 261574 - DNA, 574 bp, Unknown
  Bacterial polypeptide expressing nucleotide sequence isolated from the Sargasso Sea
atggaaaatgactacaaagttgctgatataaatttagctgagtttggaagaagagaaatttctcttgctgaaaatgaaatgccagctttaatggctttgagagaaaaatatagatccgagcagcctctagctggtgctaaaattatgggatgtatccacatgaccattcaaacagctgttttgatggagacgctcatagatttaggagctgagcttagatggtcatcatgtaatatcttctcgacgcaagatcatgcggctgctgcaatggcagctagaggagtgcctgtttttgcttggaaaggtgaaactgaagaagagtttgaatggtgtattgaacaaactatatgtaaagacggaaaaccatgggatgcaaatatgattcttgatgatggaagtgatctcacagcgatggttcacgaaaaatttccagaaatgcttgaaacgatccatggagtatctgaagaaactacaactggtgttcatagacttaaagaaatgcttgaaaaaggagagttaaaagttccagctataaatgtaaatgactcagtaacaaaggcaaagaatgataaca

SEQ ID NO: 261575 - DNA, 348 bp, Unknown
  Bacterial polypeptide expressing nucleotide sequence isolated from the Sargasso Sea
gggatgaaataaaacctcaggtgcatgaaatagagctccctagcaaaaaaagaataattttacttgcagagggaagattagtaaatttaggatgcgcgactggacacccaagttttgttatgagtgcatcatttacaaatcaagttacagctcagatagaattatggaataattctgataaatatgaaaaaaaagtttatgttttaccaaaacatctagacgaaaaagttgctatgcttcatttagaaaaagttggagccaagttgactaagttgtctaaagaacaagcagattatattagtgtaaaacaagaaggaccttataaaccagatgcctatcgctactaac

SEQ ID NO: 261576 - DNA, 1210 bp, Unknown
  Bacterial polypeptide expressing nucleotide sequence isolated from the Sargasso Sea
aatggaaaatgattataaagtagctgatattaatttagctgaatttggcagacgagaaatctctcttgctgaaaatgaaatgccagccctaatggctctcagagaaaaatataaggatgaacaacccttggctggagctaaaataatgggttgtattcatatgaccattcagacagcagttttgatggaaactcttttggagcttggtgctgaacttagatggtcttcatgtaatatattttcaactcaagaccatgctgctgctgctatggctgcaaggggtgttcctgtttttgcatggaaaggtgaaactgaagaagaatatgaatggtgtatcgaacaaactatttgtaaagatggcaacccatgggatgcaaatatgattctcgatgatggcagtgacttgactgctatggtacatgaaaaatttcctgacatgttagagacaattcatggtgtttccgaggaaactactacaggagttcataggttaaaagagatgttagagaaaggtgagcttaaaatacccgcaattaatgtaaatgactctgttacaaaagctaaaaacgataataaatacggttgtaggcatagtctaaatgatgctctaaagagagggaccgatatgttgttatctggcaagaaaggtcttgttattggttatggtgatgttggaaaaggatcggctgccagcttggcccaagagggaatgatagtaagagtagttgaatcagatccaatatgtgccatgcaagcatgcatggatggcttttcagtagtttcctgttataaagatggggttgttactagagatcctaaagacattaatatggaaattatgggggatacagacctaatagttacaacaactggtaatgttaatgtatgtgattcagcaatgttaagcactctaaaaaatactgcggtagtatgtaatattgggcattttgataatgaaattgatactgcttttatgagagaaaactactattgggatgaaattaaacctcaagtgcatagagtttttagagatactcctcctgatgggactccagatctctcaagtaaaaactacatcatactgcttgcagagggaagattagtaaatcttgggaatgctacaggtcacccaagcagaattatggatggatcatttgcaaatcaagttttagcacaaattcatttatataaacaaggctacgctaatgtg

SEQ ID NO: 261577 - DNA, 379 bp, Unknown
  Bacterial polypeptide expressing nucleotide sequence isolated from the Sargasso Sea
attggaattcaatgattacaaagttgctgatatagggcttgcggactggggacgaaaagaaatagaaatcgccgaaacagaaatgcctggtttaatcacgctgagaaatgagttaagtaaatccaagcccctaaaaggggcaaatattgttggctgtcttcatatgaccattcaaactgcagtattgattgaaactttaattgatttaggtgcaacagtcagatggtcatcctgtaatattttctctactcaagaccatgctgcggctgcaatcgctagcaaaaatatacctgtttttgcttggaagggtgaaactgaagaagaatacgattggtgtattagacaaacaattgaaggatcatcagattggaaaccaaat

SEQ ID NO: 261578 - DNA, 1294 bp, Unknown
  Bacterial polypeptide expressing nucleotide sequence isolated from the Sargasso Sea
attggaattcaatgattacaaagttgctgatatagggcttgccgactggggacgaaaagaaatagaaatcgccgaaacagaaatgcctggtttaatcacgctgagaaatgagttaagtaaatccaagcccctaaaaggggcaaatattgttggctgtcttcatatgaccattcaaactgcagtattgattgaaactttaattgatttaggtgcaacagtcagatggtcatcctgtaatattttctctactcaagaccatgctgcggctgcaatcgctagcaaaaatatacctgtttttgcttggaagggtgaaactgaagaagaatacgattggtgtattagacaaacaattgaaggatcatcagattggaaaccaaatatgattctagatgacggcggtgacttaacaaagattatacatgaagaataccaagatttattagatgatattcgtggattatctgaagaaactacaacaggtgttttaagactttatgaaatggaaaaagaaaattcccttgctgttccagctattaatgttaatgactcagtcacaaaatcaaaatttgataatttttatggttgcagggaaagtcttgtcgatggcttaaaaagagcaactgatgttatgcttgccggaaaagttgcagttgtttgtggatttggagatgttggaaaaggatcggcagaatcacttcgttcgcaaggggctagagtaattgtcacagaaattgatccaatttgtgcacttcaagcctctatggaaggttatgaagtatcaactgtaaatgatgtagctaagacggcagatatttttgttaccgcaacaggtaataaagatgttataactctcgaacatatgagagaaatgaaagatagagcaattgttgcaaatattggtcatttcgatagcgaaatacaagtctcagaattaaaaaacttcaaatgggacaatataaaaccacaagttgatgaaattgaatttcctgatggtaaaaaaattattttattagccgagggaagattagttaatctaggttgtgcaactggacaccctagttttgttatgagtgcatcattttcaaatcaagttttagcacagattgaaatttggaataattataaaagttatgaaaataaagtttatgtcttacctaagcacttggatgagaaagtagcatatattcatttagaaaaacttggagttaaattgactgaattgagtgatgatcaagcagattatttaagtctgaataaagaaggtccgtttaaaccagatcattatagatattaa

SEQ ID NO: 261579 - DNA, 1357 bp, Unknown
  Bacterial polypeptide expressing nucleotide sequence isolated from the Sargasso Sea
atgagtaagcaagattacaaagtaaaagatatttctcttgcagaatatggaaggcaagaaattttattagctcaagatgaaatgcctgctttaatgcaattaagagataattacagagataaacaacctcttaagggcgcaaaaataatgggctgtatacatatgactgttcaaactgctgtgttaattgagactttgattgaattaggtgctgaggttagatggtcttcatgtaacattttttcaactcaagaccatgcagctgctgcaattgctgatcaaggcattcctgtttttgcttggaaaggcgaaacagaagaagagtatgaatggtgcttagatcagaccatcaataaagatggcaaaccttggagcgctaatatgattttagatgatggaggtgacctcagtctcaaagttcataaagaataccctgaaatgctttcaaaaatacatggaatttctgaagaaactactacaggagttaaaagattaaaagaaatgttagaaagtggtgaattaaaagtcccagcaataaatgtaaatgactccattactaaatcaaagaatgataataaatatggatgtaggcatggtctggatgatgccatcaaacgaggaacagacatgctcttatctggcaagaaagctcttgttattggttatggtgatgtaggtaaaggttcagctgactcattaaatcaacaaaaaatgatcgttgatatcactgaaattgatccaatctgtgcaatgcaagcatgttttgatggattcagcgttgtttctgcctatgaaaatgggaatgttggcaaagatggtatgaatttagataaaaaactattagcaaaatacgatttagttgtcaccacaacaggcaatgttaatgttttggatcagcatatgttagatgccctaaagtccgggtgtgttgtatgtaatatagggcatttcgatagcgaaatagatgttaaacatttaaaaaattatgagtggaaagagattaaacctggcgttcataaagtaataaaaaataaagatgaatatatcatccttttaggcgaaggcagattagttaatctagcactagcaaccggacatccaagtagagtcatggatggatctttctgcaaccaagttcttgctcaaattgcattatttaaagatggttttgctgataaatctgatgatcagaaagaattatatgtaaaagttttacctaaagaactagatgaagaagtagcaagtctaatggttaaaggttttggtggaacattaacgaaattaacaaaagagcaagaagaatatatctccgtaagtaaagaaggtccatttaaggatgattcatacacatactgaa

SEQ ID NO: 261580 - DNA, 391 bp, Unknown
  Bacterial polypeptide expressing nucleotide sequence isolated from the Sargasso Sea
atgaaagctaaaagtaaaactataaatcaatccaaaaaaattgttgattctttaccgttcaaaattaaggacgtttccttagcaaaattaggaagggacaagattgatatttctgaaaaagaaatgcccggcttgatggaattaagaaaagaatattctaaatcaaaacctctaaaaggtttaagacttacaggctcattacacatgactattgaaacagcaatacttatagaaactttaaaagatctaggagctgatgttcgttgggcaagttgtaatattttttcaacacaagatgaggctgctgctgcaattgcaaaaactaaaactccagtttttgcatggaaaggagaaacgcttgaagaatattgggattgtacacttcaagctt

SEQ ID NO: 261581 - DNA, 1069 bp, Unknown
  Bacterial polypeptide expressing nucleotide sequence isolated from the Sargasso Sea
aatgtccacaataaaagataaaaatttagcaacaattggtcaacaagaggttgattgggctgcaagacaaatgaaagttcttgaggaaatcaagacagagttttcctcctctagaccattaaatggtttaaacataggtgcttgtatgcatgtcacaaaagaaacagctaatttgatgcttactttaaaggctgcaggagccaatgttgccttatgtgcttctaatccattatcaacgaaggattcagttgcggcttatttatctgaaaatgacattgaagtacacgcagtacacggtgtatcaaatgatgatttttttaaacatcttaattctgtacttgatactaaaccggatataacaatggatgatggggcagatttagtaacactgcttttaacagacagagccgatattccaattatgggttcaatggaagaaactacaacaggagtgataagactgaagtcaatggaaaaaaataataagcttcgtttcccagttgttgccgtgaacgattcagaaactaaacatttatttgataatagatttggaacaggtcaaagtgctatggatggtgtcgttagagcgacagatcttttaattgctggtttagatgttgttgttattggttttggtgactgtggaaaaggtgtagcagaaagggcatacggaatgggtgcaaaagttacagtcgttgagcctaactccgtacgtgctttagaagcattgatgcatggttacgaggtaaagagtagtgtaaatgcttcaaaaattgcagatgtgattgtatctgtgacaggaaatatgcatgcattagacaagcaacattttgatgtaatgaaagatggtgtggttttggctaacgcgggacattttgatgtagaaattaatttagaagcattaaaacaagaaagtgctgagatccatagagttagggaccatgtcgaaagttatttatatgatgggaaggaaatattagtacttgctgaaggcagacttgttaacttagctgccgcatcaggacatccagcttcggtaatggatatgtcatttgctaaccaagcactt

SEQ ID NO: 261582 - DNA, 411 bp, Unknown
  Bacterial polypeptide expressing nucleotide sequence isolated from the Sargasso Sea
tatgacagattataaagtaaaagatattaacgaagcagaatttggaagaaaagaaatctctctagcagagactgaaatgccaggattaatggcagtaagagccgaatataaaggcaaaaatcctcttaaaggtgcgagaattttaggttgtcttcatatgacaattcaaacagcagttttgattgaaactttagttgatttaggtgcagaatgtagatggtcttcatgcaatatattttcaacacaagatcatgcagcagcagcaattgcaaaagctggtatcccagtatttgcttggaaaggcgagacagaggaagaatactggtggtgtgttaaacagactattgagggtaaaaaagattggatccctaacatgattttagatgatggtggagatcttactgctctaat

SEQ ID NO: 261583 - DNA, 1399 bp, Unknown
  Bacterial polypeptide expressing nucleotide sequence isolated from the Sargasso Sea
tatgactacaaatgattacaaggtttccgacattgctcttgccgaatggggtagaaaagaaattgtaattgcacaatctgaaatgcctgccttgatgaaattaagagaaaggtatgcagcagagcaacctttaaaaggcgcaaaaatccttggttgcattcatatgactattcagacagcagttcttatagaaactttaaccgctttaggtgcagaggtaagatggtctggttgcaatattttttcgacacaagatcatgcagcggctgctatagcggaatctggcataccagtttttgcttggaaaggacaaacggaagaagagtttaattggtgcatagaacaaacaatattatctgagggcaagccatgggacgcgaacatgattctcgatgatggaggagacctaactgctatggcgcatgagaaatatcctgaaattttagaaaatattcatggcataacagaagaaacaacaactggcgtagtaagactcaatgaaatgatagaaaaaggtgagttaaaagttcctgcaataaacgttaatgactcagtaactaaatctaagaacgataataaatatggaactagacatagccttaatgatggcattaaaagaggaacagatatgttcttagctggaagaaaagctttagttattggatatggtgatgttggtaaaggttcagctcaaagcttaaagcaagaaggtatggttgttcgtgtcactgaaattgatcctatatgtgcaatgcaggcctgcatggatggctatgaagttgtttcaccttatgtagatggtctaaacaataatgatgataattctataaacaaggaccttttagaagatacagatctaattgttacaactactggaaattataaagtttgtgataaacatatgttaaaagctctaaaaaaaggagctgtggtatgcaacatagggcattttgatacagagatagatactcagttcatgagagaagaatgggcatgggaagaagtgaaacctcaagtgcataaagtcttcagagacactaaagctggtcaatctcctaatttagatagcgcagactatttgattctgctctcagaaggaagattagttaatctaggaaatgcaaccggtcacccttctagaataatggacgggtcttttgcaaatcaagtcttagctcaaatgtatttgtatgaaaagaaattcgcacatgtaaatgacgaagatacaaaaaaggagctcatcaaagttgaagtactaccgaaaaaattggatgaagaagttgcttcttacatggtggaaggatttggaggagttatgacaaaactatcttcagaacaagccgactatataagcgttccaaaggaaggcccttttaaatctgatatttataaatactaa

SEQ ID NO: 261584 - DNA, 591 bp, Unknown
  Bacterial polypeptide expressing nucleotide sequence isolated from the Sargasso Sea
tgggtgcaagagtaatggttacagaaactgatcctatatgtgcacttcaagctgcaatggaaggttatgaagttgtgcttatggatgagatgattaaagaagctgatatagttgtaacagcaacaggaaataaagatattgtaacagcagaccatatgagagatatgaaggatagagctatactttgtaacattgggcactttgacaacgagatacaggtagaagctttaaaaaactataagtgggacgaaatcaaaccccaagttcatgaaataactttaccaagcaataaaagaattattttattagcagagggaagacttgttaatttaggatgtgcaactggacacccaagttttgtaatgagtgcttcatttacaaatcaagttactgcacaaatagaattatggaataactctgacaaatatgaaaacaaagtatacgttttaccgaaacatctcgatgaaaaagttgcaagattacatttagaaaaggttggtgctaaattaaccaaaatgtctaaagatcaagcggattatattagtgtaactcccgaaggaccttacaaaccagatgcctatcgctactaga

SEQ ID NO: 261585 - DNA, 763 bp, Unknown
  Bacterial polypeptide expressing nucleotide sequence isolated from the Sargasso Sea
aatggattatgatgtaaaagacttaaaactaaataaaactgggcgtgaccgagtagaatgggcttataaagacatgccagtacttcaagaaattaacaagaatcttagtaagaaaaaaccattaaaaggaattaatatttcagcatgtcttcatgtgactactgaaacagctaatcttctgataacattaaaaaatgcaggagcaaaagttgcatgctgcgcttcaaacccgctaagtacacaggatgatgtagcagctcacttaactaaagattatggaattaacacctttgctattaaaggaataaataacaaaggatattataagcatttagttgattcattgaaaattaaaccaaacattacaatggatgatggatgtgatttggttagtatattgcataaatctcataaacaatttatgaaaaatattattggtggtacagaggagactacaacaggtgtaataagactagaaagtatgtctaaaaataatgtattgaattacccaataattgctgtaaataatgcctttactaagcatttatttgataatcgttatggaactggtcaaagtgttatagacagcattatgagagccacaaataggcttctatctggaaaaaccttcgttgtatgtggttatggatggtgtggaaagggtcttgcaatgagagctgctggattaggtgcaaacgtggttgtcacagaaatagatccaacaaaaggcctgaagcaaaaatggatggattccaagttatga

SEQ ID NO: 261586 - DNA, 1396 bp, Unknown
  Bacterial polypeptide expressing nucleotide sequence isolated from the Sargasso Sea
atgagtaatgactacaaagtagctgatatcgaacttgctgattttggaagaagagaaatttctcttgctgaaaatgaaatgcctgcactaatggcactaagggagaaatacaaagctgagcaacctctcgctggcgcaaagattatgggctgtattcatatgactatccaaaccgcagtattgatggaaacattagttgatcttggagctgagcttagatggtcaggatgtaatattttttcaactcaagatcatgctgctgcagctatggcaaaagctggtatcccagtttttgcatggaaaggacaaaccgacgaagaatttgattggtgtattgagcaaacaatcctaaaagatggaaaaccatgggatgcgaacatgatcttagatgatggaggagatcttactcatatggttcatacaagatttgcagaaatgcttgaaacaatccatggaatatcggaggaaaccactacaggagttcatagactcaaagcaatgcttgaaaaaggtgagcttaaggttccagctattaatgtaaatgactctgtcacaaaggcaaaaaatgataataagtatggttgtagacatagtcttaatgacggaataaaacgaggaactgatatgctcctttcaggtaaaaaagcacttgtcattggttatggtgacgttggaaaaggatcggcagcaagtcttgctcaagaaggaatggtagttagagttactgagtctgatccaatatgtgctatgcaagcttgtatggatggcttttcagtagtttcatgttattccaatggaaaagtaacaggaaatacagacgatattaataaggatttaatgcaagatactgatgtattagttaccacaacgggtaatgtaaatgtctgtgattcagcaatgctttcaacacttaaggatggggctgttgtatgtaatattggccattttgataccgaaatagatacaaaatatatgcaggaaaaatggtattgggaagaagtaaaaccacaagttcatagaatattcagagattgttcgcctgatcaggaacctgacttatcaagcaagaattatctaatacttttagccgaaggaagactggtgaaccttggaaatgccacaggtcatccaagcagaattatggatggctcatttgccaaccaagttcttgcccaaatgcatctctactcagctggttttgcaaatgtaaatgatgaagataaaaagaaagaattaattcaagtagaggtccttcctaaaaaacttgatgaggaagttgcctcccttatggttcaaggttttggtggtgttgttacaaagcttactgaagagcaagctgattacataaatgtcccgcaagatggtcctttcaaagaagattcttataagtactaga

SEQ ID NO: 261587 - DNA, 587 bp, Unknown
  Bacterial polypeptide expressing nucleotide sequence isolated from the Sargasso Sea
agctagggttttagttacagaagcggatccaatttgtgctcttcaagcggcaatggagggttatgaagtggtattaatggaggaggctataagtagagctgatatcgttgtaacagcaacaggtaacaaagatattgttactgcagatcatatgagagatatgaaggatagagctatattatgtaatattggtcactttgataatgaaatagaagttgaagctcttaaaaattataagtggactgaagtaaaacctcaagtgcatgaaatagagctccctagtggtaaaagaattattcttttagctgaaggaagattagttaatcttggttgtgcaactggacacccaagctttgtaatgagtgcgtcatttactaatcaagttattgctcaaatagaactttggcataatcataaaaattatgaaaataaagtttatgtacttccaaaacatttagatgaaaaagtagcaactttacatttaaaaaaagttggggcaaaactaacaaaattatcaaaagaacaagcagattatataagtgtcggaacagaaggtcctttcaaaccagatgcctatcgctattaaa

SEQ ID NO: 261588 - DNA, 1396 bp, Unknown
  Bacterial polypeptide expressing nucleotide sequence isolated from the Sargasso Sea
atggataatgattacaaagtagctgatataaaacttgctgaatttggaagaagagaaatatctcttgctgagaatgaaatgccagccttaatggccctgagagataaatatagagatgaacaacctctggctggggcaaaaatcatgggatgcattcatatgacaattcaaactgcagtcttaatggaaacacttgtagatctcggagcagagttaaggtggtcgtcatgtaacattttttcaactcaagatcatgctgccgctgcaatggcagcaatagggatacctgtttttgcatggaaaggtgaaactgatgaggaatacgaatggtgtattgagcaaaccatatgtaaagatgggaaaccatgggatgcaaatatgattcttgatgatggaagcgaccttacttcaatggtccactcaaaatttcccgatatgttagaaaccattcatggtgtatctgaagaaactactactggcgttcatagattaaaagaaatgcttgaaaagggtgagcttaagattccagcaattaatgttaatgattcagtaacaaaagcaaaaaatgataacaaatatggttgcagacatagtcttaatgatgcgttaaaaagaggaacagacatgcttctttcaggaaagaaaggtcttgtaattggttacggtgatgttggtaaaggctctgcagcaagtttggcgcaagaaggaatgattgttagtgttgttgaatcagatcctatttgtgcaatgcaagcatgcatggatggattctccgttgtttcttgttataaaaatggtgttgtaactagagacccaaaagacataaatatggctgttatgggagatacagatcttattgttacaacaactggaaacgtaaatgtttgtgattctgcaatgatagatactcttaaaaatacagctgtaatatgtaatattggacattttgataacgaaattgatacagcttttatgagagaaaactattattgggatgaaataaaacctcaggttcatagggtgtttagagacactgctcctgatggaacaccagatctttcaagtaaaaactatgtgatcttacttgccgaaggaagactggttaatcttggtaatgctacaggacatcctagtagaattatggacggatcatttgccaatcaagtcttggctcaaattcatttatataaacaaggttttgctaatgtaaacgatgctgacaaaaaagctgagatgattacagtagaggttcttccaaaaaaacttgatgaagaagtggccagcctaatggtggaaggttttggaggaactgtaacccagcttactgaagagcaagcagattatattaatgttccaaaagatgggcctttcaaagaagaaagttacaaatactaaa

SEQ ID NO: 261589 - DNA, 1390 bp, Unknown
  Bacterial polypeptide expressing nucleotide sequence isolated from the Sargasso Sea
atggcgaaccaggccatcgacatatcaaaaaaagaaaatgactataaggttgctgatatcagtcttgctgattggggtagaaaagagattacaattgctgaatcagagatgccggcactgattgctcttcgtgaaaaatatcgctcagagcaaccacttgctggagccaaaatattaggttgtattcacatgacgattcaaactgcagtcttaattgaaactcttgagtcattgggtgctgaagtgagatggacgtcttgtaatatattctcgacccaagatcatgctgctgcagcaattgctgctaacggcacgcctgtctttgcttggaaaggtgaaacagaagaagaatatgaatggtgcctggaacaacaggttaacaagaatggttctccgtgggatgcaaacatgatacttgatgacggtggagatttaaccgcattattgcataagaagtatccagatgtactgaaatctgtgcatggtgtgactgaagaaactacaactggggtgcacagactctatgaaatgctagaagctggcgaacttaaaatacctgccataaatgtaaatgattcggtaacaaaatcaaaatgtgataataagtatggttgccgtcacagcttaaatgatgccgtaaagcgagccaccgaccaccttctatctggtaaaagagctgtggtagtaggttatggtgacgtaggaaaagggtcagcacaatctcttcgtcaagagggcatgatagtaaaaataactgaaattgatccaatttgtgcgatgcaagcctgtcttgatggtttcgaggttgtctcaatatatgagaatggtaaagtttcaaatggcgcaaataaagaattattggccaatacagatatgctagtaaccagcactggcaactataatgtatgtaactcagaagtattagatgccctcaaaagcggttctgttgtatgcaacataggtcacttcgacaatgaaattgatacgaattacatgagagaaaattggcaatgggaagagattaaagaacaggttcataaaatctatcgcagtgaagacaaaaatgatcatcttcttttgctagctgaaggtcgtcttgtgaatctaggtaatgcgacaggacatcccagcagaataatggacggatcgttcgcgaaccaagttcttgctcaaatcgaactctacaaacgtgggtttgcatccaaagacgctgaaactcaaaaagaattgctcaaggtagaaatattgccgaagcatctagatgaggaagtagcaaaatatatggttgagggttttggtggtgttatgacaaaacttacaaaagagcaggctgactacattggagtagaagaagagggtccatttaaaccagaatattatcgctactgat

SEQ ID NO: 261590 - DNA, 1321 bp, Unknown
  Bacterial polypeptide expressing nucleotide sequence isolated from the Sargasso Sea
ctgacccgttctcttgacggagatttcaaagttgccgacctcagccttgccggagcgggtcgaaagcaaattgagttagcagaagaagaaatgccaggtctaatggccctgcgggcacaaggttatgactcccaaccattggcgggcgcccgaattatgggctctttgcatatgacggtgcagacggctgtactgatcgagaccttggtggatttaggtgcagaagtgagatgggtctcttgcaacattttttcaactcaagacgatgctgcagcagctgtggtggttgggcgaaatggctcagaagatgatcccgccggggtatctgtctacgcttggaaaggcgagactcttgaagagtactggtggtgtacggagcaagctcttaattggccaggagccagcggccccaatctgattcttgatgatggtggagacgcaactttgctcgtgcatttaggagctcgctacgaaggagcgggggcggttccaccgcccgagacggcgacatctcacgatgaagaggagattcttaagctgttggcgtcggtttatgagcacagcccaagtttttggtcggacatgatcagcgagataagaggcgtttcagaagagacgacgaccggcgtgcaccgactctacgagatggttgaacggggtgacttgcaattccccgcttacaacgtcaacgactcagtcaccaaatcgaagtttgacaacttatatggctgtaggcattctctgatcgacggactcaaccgcgccacagacgtgatgttgggaggaaaagtcgcttttgtggcgggatacggcgatgtaggaaaaggctgtgcgcagtctctgcgcggccaaggttgccgggtagtggtatccgaagttgatccgatcaacgcgctgcaggcagcgatggaaggtttcgaagtcgaccggctcgataatgttgttggcgacattgacatctttgtcaccacaacaggcaataaagacatcatctcggctgaacatatgggtgcgatgaaacacaacgcggtggtgtgcaatatcggtcactttgataacgagattgatatgtcgggtttagagaaactttcggatgtacaaaggaggaatatcaagccgcaagtcgacgaatacatttttcctaacggcaatagcgtcatcgttctcgcagaaggtcgattagttaatttaggctgtgcgacaggtcaccccagttttgtcatgtccatgagtttcacgaaccaagtgctcgctcaaatggaactgcaccaaaacgctgattcgcttgcgaacgacgttcaccttctgcccaaacgcctag

SEQ ID NO: 261591 - DNA, 406 bp, Unknown
  Bacterial polypeptide expressing nucleotide sequence isolated from the Sargasso Sea
atgagattacaaacaactgaaacaaacaaatcaactaaaacaacaaataaagtgataaatcaatccaaaaaaattgttgagtctttgcaatacaaaattaaagacattgcattagcaaagttaggtagagataagattgagatttctgaaaaggaaatgccaggcctgatggaattaaggaaaaaatattctaaatccaaacccctcaatggttttaggcttacaggttcattacacatgaccatagaaacagcagtgttaatagaaactttaaaagatcttggtgcagatattagatgggcaagttgtaatattttttcaacacaggatgaagctgcagctgcaattgcaaaaactaaaactccggtttttacatggaaaggtgaaacccttgaagaatattggg

SEQ ID NO: 261592 - DNA, 266 bp, Unknown
  Bacterial polypeptide expressing nucleotide sequence isolated from the Sargasso Sea
catgagtgattataaagtaaaagatatcaacctagctgaatttggtagaaaagaaatttccttagcagaaacagagatgccaggattaatggcattgagaaaagaatataaaggaaaaaatcctcttaaaggagcaagaattttaggatgtcttcacatgacaattcaaactgcggtcctcatcgaaactcttgtagatttaggagcagaagttagatggtcttcatgtaatatttttttccacgcaagatcatgcagcagcagct

SEQ ID NO: 261593 - DNA, 418 bp, Unknown
  Bacterial polypeptide expressing nucleotide sequence isolated from the Sargasso Sea
aaagcaatttgtctgtaatataggtcattttgatgctgagatacaagtatctaaattaaaaaatttaaaatgggtaaatgtaaaacctcaagtcgacgaaatagaatttcctgatgggaaaaaaataattttgcttgctgaaggtagactggtcaatcttggctgcgctactggacatccaagttttataatgagtgcatcctttacgaatcaagtactggctcaaatagaacttttcaataataaagacaaatatacgaacaaagtttatatgctgcctaaggagcttgacgaaaaagttgcctcactccatctcaaaaagttaaatgttaacttaactaagttaaacgaggaacagagtgaatacattggcgtgccaaataatggaccatttaaaccagatcattatagatattag

SEQ ID NO: 261594 - DNA, 284 bp, Unknown
  Bacterial polypeptide expressing nucleotide sequence isolated from the Sargasso Sea
tgctgagggaagactggttaatctaggttgtgcaaccggacatccaagttttgtaatgagcgcatcttttactaatcaagtgactgctcagatagagctatggaataattcagataagtatgaaaaaaaagtttacgttttaccaaaacatcttgatgaaaaagttgctagattacacctagaaaaagtaggcgccaaacttacaaaaatgtctaaggatcaggcagattatattagcgtaacacctgatggaccatacaaacccgatgcctatcggtactaaa

SEQ ID NO: 261595 - DNA, 1291 bp, Unknown
  Bacterial polypeptide expressing nucleotide sequence isolated from the Sargasso Sea
tatgtctcaagattttaaagtaaaagatatcagcctggccgaattcggtagaaaagagatttctctagcagagactgaaatgcctggattaatggcattaagaaaagagtataaaactaaaaaacctttaaaaggagcccatatacttggatgtctacatatgactattcaaacagctgttttaattgaaaccttagtagaattaggagctgaagttagatggtcatcttgtaatattttttctacccaagatcatgcagctgcagcaatcgctaaagctggtatacctgtatttgcttggaaaggagaaacagaaaaggagtattggtggtgcgttaaacaaacaatagagggaaaaaaagattggaagccaaatttgattttagatgatggtggagaccttacgggcttaatgcataaagattataaagatatgctaaaaaatattaagggtgtttcagaagaaacaacaacaggtgtcttagctctaaaaaaaatggaagcaaacaaagaacttttaataccagcaattaatgtcaatgactctgtcacaaaatctaaatttgataatttgtatggttgcagagaaagtttagttgatggaataaaaagagctacagatattatgatgtctggaaaagtagcaattgttgcaggctttggagatgttggaaaaggaagtgcagcatcattaagacaagctggcgctagagtaatggtaaccgaaacagatccaatttgtgctcttcaagcagcaatggaaggatatgaagttgttttaatgaatgatgcaataaaagatgcagacattgtagtaactgccacaggaaacaaagatattgtaacagcagatcatatgagagatatgaaagacagagcaatattatgtaatattggtcactttgataatgaaatccaagttgaggctttaaaaaattataagtgggatgaaattaaacctcaagttcatgaaatagaattaccaagcaaaaaaagaattattttactagctgaaggaaggttagtaaatttaggttgtgcaactggtcatcctagttttgtgatgagtgcttcgtttactaatcaagtaattgcacaaattgaattattccataactctgacaaatatgaaaaaaaagtttatgttttaccaaaacatttagatgaaaaagttgcaaaactacatctagataaagttggagctaaattaacaaaaatgacaaaagaacaagcagattatataagtgttaaaacatcaggaccatttaaaccagatagctatcgctactaa

SEQ ID NO: 261596 - DNA, 780 bp, Unknown
  Bacterial polypeptide expressing nucleotide sequence isolated from the Sargasso Sea
tatgaatgattataaagtaaaggatattaaccaagcagaatttggaagaaaagaaatttcactagcagagaccgagatgccaggtttgatggcattaagatcagaatataaaggcaaaaacccacttaagggagcaagaatacttggatgtttgcacatgaccatccaaactgcagtattaattgaaacactagttgatttaggtgcggaagttaggtggtcatcatgtaatattttttctactcaagatcatgcagcagcagctattgcaaaagctggtatacccgtgtttgcttggaaaggtgaaacagaagaggaatattggtggtgtgttagacaaacaattgaaggaaaaaaagattggaaaccaaatatgattttagatgatggtggagatctcacagctcttatgcacaaggattataaagaacttttagaggatataaaaggtcttagtgaagaaactacgactggagttttggcacttaaaaagatggaagaacaaggaacattattggttccagcaattaatgttaacgattcagttactaaatctaaatttgataatctttatggatgtagagaaagcttagttgatggtattaaaagagctacagatgttatgatgtcaggtaaagtggcaattgttgcaggtttcggagatgttggaaaaggtagtgcggcatctttaagacaaagcggagcaagagtaatggtcactgaaaccgatccaatttgtgcacttcaagctgcaatggaaggttatgaagtagtcttaat

SEQ ID NO: 261597 - DNA, 427 bp, Unknown
  Bacterial polypeptide expressing nucleotide sequence isolated from the Sargasso Sea
tatgaaaaataaaacactaacagaatatgttccatataagataaaagatttaagtcttgcggagtggggtaaaaaagaaattaaattagcagaggctgaaatgccaggacttatggcgttaagagccaagcttaaaaaagagaagcctctaaaaggtgcaagaattgcaggatgtctacatatgactattcaaactgctgttttgatagaaacattaatagatcttggggctgaggttacttggagctcatgcaatattttttcaacacaagaccatgctgctgctgctattgcatctatggggattcctatctatgcatggaaaggaatgaatgaaaaggagtttaattggtgcattgaacaaacattattttttggagagaagagagagccattaaatatgattcttgatgatggaggtgattta

SEQ ID NO: 261598 - DNA, 1396 bp, Unknown
  Bacterial polypeptide expressing nucleotide sequence isolated from the Sargasso Sea
atggaaaatgattataaagtagcagatattaatttagctgaattcggtaggagagaaatttctcttgctgaaaatgaaatgcccgcattaatggccttaagagaaaaatataggtctgagcagcctctagctggagcaaaaattatgggatgtatccatatgactattcaaacagctgttttgatggaaacacttattgatttaggagctgagcttagatggtcatcatgtaatattttctcgacgcaagatcatgcggctgctgcaatggcagaaagaggagttcctgttttcgcttggaagggtgaaactgaagaggagtttgaatggtgcattgaacaaactatatgtaaagatggaaaaccatgggatgcaaatatgattcttgatgatggaagtgatctcacagcgatggttcatgaaaaatttccagaaatgcttgaaacaatccatggagtatctgaagaaaccacaactggtgttcataggcttaaagaaatgcttgaaaaaggagaattaaaagttcctgctattaatgtaaatgactcagtaactaaagcaaaaaatgataacaaatatggttgcaggcatagtcttaatgatgccttgaaaagaggaacagatatgttgctttctggtaaaaaaggtttagttattggttatggagatgttggtaaaggttctgcagctagccttgctcaagaaggaatgattgtgagtgttgtagaatcagatccaatttgtgcaatgcaagcatgcatggatggtttttcagtggtttcgtgctacaaagatggtgtggttactagaaatgctgcagacattaatatgcaggttatgggagatactgatctagttgtaaccacaactggaaacgttaacgtttgtgattctgcaatgttaagtaccctaaaaaacactgcagtggtttgtaatattggtcactttgataatgagatcgatactgctttcatgagagaaaattattattgggatgaaataaagcctcaggttcacagaatctttagagatactgctcctgatggaactccagatctttccagtaaaaactatattattcttcttgcagagggaaggctggttaatttaggaaatgcaacaggacacccaagcagaataatggatggttctttcgctaatcaagttttagctcaaatacatttatacaagcaaggttttgcgaacataaacgatgaggacacaagagctgaaatgattactgtagaagtcttacctaaaaaattagatgaggaagttgcaagcttaatggtagagggatttggcggaactgttacaaaactcacaaaagaccaagctgattacattaatgtacctcaagacggtccattcaaagaagaaagttacaaatactaat

SEQ ID NO: 261599 - DNA, 357 bp, Unknown
  Bacterial polypeptide expressing nucleotide sequence isolated from the Sargasso Sea
aatgagtaagcaagattacaaagtaaaagatatttctcttgcagaatatggaaggcaagaaattttattagctcaagatgaaatgcctgctttaatgcaattaagagataattacagagataaacaacctcttaagggcgcaaaaataatgggctgtatacatatgactgttcaaactgctgtcttaattgagactttgattgaattaggtgctgaggttagatggtcttcatgtaacattttttcaactcaagaccatgcagctgctgcaattgctgatcaaggcattcctgtttttgcttggaaaggcgaaacagaagaagagtatgaatggtgcttagatcagaccatcaataa

SEQ ID NO: 261600 - DNA, 1168 bp, Unknown
  Bacterial polypeptide expressing nucleotide sequence isolated from the Sargasso Sea
ttcatgcaatattttttcaactcaagatcatgcggctgcagctatcgcagatcaaggaattcctgtatacgcaaaaaaaggtgagactcttgatgaatattggcaatatactcactatattttagattggggttcagaatctccaaatatgattttggatgatgggggagatgcaactggcttattgatactcggtagtaaagcagaaaaagatttatctgtcttagataatccagggaatgaagaagaagtagctttatttaattctattaaatctaagttagaaaatgatagtgacttctattctagaattaagagtaatatcattggtgttactgaagaaactacaacgggagttgcaagactttatcagctgcaaaagcagaatgctttacctttccctgctatcaatgttaatgattcagtaactaagagcaaatttgataacttatatggctgcagagaatctttagttgatagcataaagcgtgcaactgacgtgatgattgctgggaaggttgctttagtaatgggttttggagatgtaggtaaaggctcagcacaatcgttaagaggacttggtgcaattgtaaaagttgctgaagttgatccaatttgtgctcttcaagcggcaatggaaggttttagtgttgttacattagacgatgttgtggaggatatagatatatttgttacggcaactgggaactatcaggtaataacaaacgaaaatcttgtcaagatgaaagatgaggccatagtttgtaatattggccatttcgataatgaaattgatgtggcttcattgaaagattatccatgggaaaatattaagccgcaggttgatcacataactttaccgagtggcaataaaataattcttttagctgaaggtagattagttaacttgggttgtgccactggacatccaagttttgttatgagtaattcttttactaatcaagtcttagctcaaattgaacttttcaataattctgaaaaatatgctaaggaggtttatgttttaccaaaacatttagatgagatggtagctagattacatcttgataaaattggtgcaaaattaacaaaattaactaaggaacaagctgattatattaatgtttctgttgagggaccttataaaccagagctttatagatattag

SEQ ID NO: 261601 - DNA, 1201 bp, Unknown
  Bacterial polypeptide expressing nucleotide sequence isolated from the Sargasso Sea
gatggctttaagagaagaatattataataaaaaaccacttaaagatgctagaattattggttgtctgcacatgacaatccagacagctgtattaattgaaacacttgttgatttaggagcagaagtaagatggtcatcttgtaatattttttcaactcaagatcatgcggcggctgctattgctaaagcaggtattcctgtttatgcatggaaaggtgagacggaagaagaatacttgtggtgcatcaagcagactattgttggaaaatctgattggaaaccaaatatgttgttagatgatggaggtgacttaacagccattatgcataacgaacataaagaattaatgaaagatgttaaaggtgtttcagaggaaacaaccactggaattaaagcactcaacaaaatggaaaaagataaatctcttttagtgccagcaattaatgtcaacgattctgtaaccaaatcaaaatttgataacctatatggttgtagagaaagtttagtagatggcataagacgagcaacagatgttatgatgtcaggtaaaattgcaattgtagcaggttttggagatgttggaaaaggaagtgctgcatctttgagacaaagtggagcaagagtattagtcactgaagcagatccaatttgtgctcttcaagctgcaatggagggttacgaggtagttttaatggaagaagctataagtagagcagatatagttgtaaccgcaacaggaaataaagatattgtaaccgctgatcacatgagagagatgaaagatagagcaatattatgtaacattggtcactttgacaatgaaatacaggttgaagctttgaaaaattataagtggactgaagtaaaaccccaagttcacgaaattgaattaactagcggtaagagaattattttattagcagagggaagattagtaaatttaggttgtgcaactggtcatcctagttttgttatgagtgcatcttttactaatcaggtaattgctcaaatagaactttggcataatcacaaaaattatgacaacaaagtttatgtactgcctaaacatttggatgaaaaagttgctactttacatcttaaaaaagttggcgctaaattaactaaattatctaaagatcaggcggattatataagtgtagggacagaaggtccttttaaaccagatgcctaccgctattaa

SEQ ID NO: 261602 - DNA, 601 bp, Unknown
  Bacterial polypeptide expressing nucleotide sequence isolated from the Sargasso Sea
atgagtaagcaagattacaaagtaaaagatatttctcttgcagaatatggaaggcaagaaattttattagctcaagatgaaatgcctgctttaatgcaattaagagataattacagagataaacaacctcttaaaggcgcaaaaataatgggctgtatacatatgactgttcaaactgctgtcttaattgagactttaattgaattaggcgctgaggttagatggtcttcatgtaacattttttcaactcaagatcatgcagctgctgcaattgctgatcaaggtattcctgtttttgcttggaagggcgagactgaagaagaatatgagtggtgtctagatcaaactattaataaagacggcaaaccatgggaagcaaatttaattttagatgatggaggcgatcttactcttaaagtgcataaagattatcctgaaatgctctcaaaaatccatggaatttctgaagaaacaacaactggagttaaacgattaaaagaaatgctagaaagcggtgaattgaaagttccagccataaatgtaaatgactctattactaaatcgaagaatgataataaatatggatgtaggcatgggctag

SEQ ID NO: 261603 - DNA, 1297 bp, Unknown
  Bacterial polypeptide expressing nucleotide sequence isolated from the Sargasso Sea
aagaacaaaatataaagatgctcaacctcttgcaggtgcaaaagttatgggttgcattcatatgactattcaaacagctgtgcttatcgagacgttggtagatcttggtgcggaagtgcgttggtctggttgcaatattttctccacgcaagatcatgctgctgcagctattgcggctgcaggtattcctgtttttgcttggaaaggccaaactgatgaagaatttgactggtgtattgaacaaacaatagttaaagatggcagtccatgggatgcgaacatgattttagatgatggtggcgatctgacgcatatggttcattctaaatttcctgacatgcttgaaaacattcatggaatttctgaagaaactaccactggtgttcacagattaaaagcaatgcttgaaaaaaatgagctaaaagtgccagccataaatgtaaatgactctgtcactaaatcaaaaaatgacaataaatatggctgtagacatagtctaaatgacgcaattaaaagaggcacagatatgtttctttcatccaaaaaagcattagtaattggatatggagacgttggaaaaggttctgctttaagtctcgcacaagaaggaatgattgttagagtcgtcgaatctgatcccatatgtgctatgcaagcctgcatggatggttttgaagtggtgtctacatataataatggagtcgtaactagagacgtgaacgatataaatatggcggttcttgaagataccgaccttattgttacaaccactggaaatgtgaatgtttgtgatgaggcaatgttgcgctcagtaaaaaataccgctgtcatatgtaatattggtcactttgataatgaaattgatactcagttcatgcgagacaagtggtattgggaagagattaagcctcaagtgcatagagtatttagagatacttctccgtcagacacgccagacttacaaagtaagaactacatcattcttttagctgaaggcaggctagtcaatcttggaaatgcaacaggtcatccaagcagaattatggatggatcatttgctaatcaagttttagctcagatgcacttatataagcaaggttttgcaaacgtcaatgatgctgacaagcaaaaagaaatgataactgttgaagttcttccaaaaaaattagatgaggaagttgctgagcttatggttcaaggctttggtggaataataaccaaactaactggtgagcaagctgattatattaatgttcctgttgatggcccatttaaagaagaagagtataaatactga

SEQ ID NO: 261604 - DNA, 565 bp, Unknown
  Bacterial polypeptide expressing nucleotide sequence isolated from the Sargasso Sea
acagatcctatttgcgctcttcaagctgctatggaaggctatgaagttgttttaatggatgaaatgataaaagaagcagacattgttgttactgctactggaaataaagatattgtaactgctgatcacatgagagaaatgaaagatagggcaattttatgtaatataggacactttgataatgagattcaggttgacgcactaaagaattataagtgggatgagattaaacctcaggttcatgaaattacacttaatgataataaacgaattatattattggcagaaggaaggcttgttaatttaggctgtgcaactggtcatccaagctttgtcatgagtgcttctttcacaaaccaagttacagctcaaatagaattatggaacaaccctgatcaatatgagaaaaaagtttatgttcttcctaagcatttagatgaaaaagtagccagactacatttagagaaagttggtgcaaaactaactagattatctgaagatcaagctgagtatatcagcgttacaactgaaggtccttataagccggaagcttaccgatactaat

SEQ ID NO: 261605 - DNA, 969 bp, Unknown
  Bacterial polypeptide expressing nucleotide sequence isolated from the Sargasso Sea
tatggcaaatgaggattacaaagtagcagatataaatcttgcagatttcggtagaaaagagatttcacttgctgaaactgaaatgcctggattaatggcattaagaagagaatataaaggaaaaaaaccacttgaaggggctagaattctcggctgtcttcatatgaccatacaaactgctgtgttaattgaaacattagtagaattaggtgcggatgtaagatggtcatcatgtaatatattttcaacacaagatcatgctgcagctgcaatagcaaaagcaggtataccagtttatgcatggaaaggtgaaacagaagaagaatattggtggtgtgtaagacaaacaattgaaggtaaagagggttggaaaccaaatatgattctcgacgatggtggtgaccttacaagtctaatgcataaagaatataacgacttattaaaagaagtaaaagggctctcagaggaaacaacaacaggtgtactcgcattaaaaaaaatggagagtgaaggtacgttaatggtgccagctattaatgtaaatgactcagtcaccaaatctaaattcgataatctttatggctgtagagaaagtttagttgatggaattaaaagagcaactgatgtcatgatgtcaggtaaagttgctatagttgctggctttggtgatgttggcaaaggcagtgctgcttcattacgtcaaagcggtgcaagagtaatggttactgaaacagatccaatttgcgcgttacaagcggcaatggaaggctatgaagttgtattgatggatgaaatgattaaggaagcagatatagttgttactgctactggtaataaagatattgttaccgcagaccacatgagagatatgaaagatagagcaattttatgcaacattggtcacttcgataacgaaattcaagttgatgcacttagaaattataaatgggatgaaatcaagcctcaagt

SEQ ID NO: 261606 - DNA, 1288 bp, Unknown
  Bacterial polypeptide expressing nucleotide sequence isolated from the Sargasso Sea
atgagcgattataaagttaaagatatttcccaagcagattttggaagaaaagaaatctccctagcagagactgaaatgcctggactaatggcgttaaggaaagagtacaaaggaaaaagccctcttaaaggtgcaagaattcttggctgtcttcacatgaccattcaaactgcagttctaatagaaactcttgtagatttaggagcagaagtgagatggtcatcttgtaatattttctcaacgcaagatcatgcagcagctgctattgcaaaagtaggtatacctgtgtttgcatggaaaggtgaaactgaagaagaatattggtggtgtgtaaaacaaacaattgagggaaagaaggattggaagccaaatatgattcttgatgatgggggtgatttaactgcccttatgcacaaagattacaaggatttactaaaagatattaaaggattatctgaagaaacaactacaggagtattagcacttaaaaaaatggaagcccaaggaacattattagttccagcaattaatgtaaatgattctgtcacaaagtctaaatttgataatttgtatggttgtagagaaagtttagttgacggcattaaaagagctacagatgtaatgatgtcaggtaaagtcgcaattgttgcagggtttggggatgttggaaaaggaagtgcagcctcattaagacaaagtggagcaagagtaatggttactgaaactgatccaatatgtgctctgcaagcagccatggaaggttatgaagttgtattaatggatgaaatgattaaagaggcagatatagttgttacagccacaggaaacaaagacatagtgaccgccgatcatatgagagaaatgaaagatagagctatactttgtaatattggacacttcgataatgagatacaagttgaagcactaaaaaattataaatgggatgaaattaagccacaagtgcacgaaataactttgccaagtaaaaaaagaataatattacttgctgaaggaagactggttaatttaggatgtgctactggacatccaagttttgtaatgagtgcttcatttactaaccaggtaactgctcagatagaattatggaataattcagataagtatgaaaataaagtttatgttttgccaaaacacttggatgaaaaagttgcaagattacacttagaaaaagtaggcgccaaacttacaaaaatgtctaaagaccaggcagactatatcagtgtaacacctgatggaccttacaaaccagatgcctatcgctactaaa

SEQ ID NO: 261607 - DNA, 469 bp, Unknown
  Bacterial polypeptide expressing nucleotide sequence isolated from the Sargasso Sea
atggaagatttcaaagttaaagatttgacacaagcagaatttggaagaaaagaaatttcaatagcagaaagtgaaatgcctggcttaatggctttaagagaagaatactctggaaagtcaccactaaaaggagcgaaaattattggatgtctgcacatgactattcaaacagctgttttaattgaaacacttgttgccttaggtgcagaggtgagatggtcatcatgtaacattttttcaactcaagatcatgcagcggctgcaatcgccaaagctggagttcccgtatatgcttggaagggagaaactgaagaggaatatatttggtgtattaaacaaacaattgaaggtaaaaaagattgggcgcctaacatgcttttagatgatggaggagatctcactgcaataatgcatcaagagtataaagaattacttaaaaatgtgaaaggtgtttcagaggaaacaacaa

SEQ ID NO: 261608 - DNA, 427 bp, Unknown
  Bacterial polypeptide expressing nucleotide sequence isolated from the Sargasso Sea
atggctgaaacagcaaaagaaaataaaatagatttgatgaacgattacaaagtcgctgatatctctctggctgaatggggcgagaaggaaatcaaaattgcagaaacagaaatgccaggcttgatgagcatcagagaagaattcggaaaggaaaagcctctggaaggagcaagaattgcaggctgtcttcatatgacgattcaaacagcagtactcattgaaaccttgattgaacttggtgctgatatcaggtggtcttcttgtaatatcttctcaacacaagatcatgctgcagctgctctagcagccaaaggcattccaatatttgcatggaaggatgagagtgaggaagaatactggtggtgcgtagaaaaacaatcaacggtccagacggttggacgccaaatcttatacttgatgacggcgg

SEQ ID NO: 261609 - DNA, 1288 bp, Unknown
  Bacterial polypeptide expressing nucleotide sequence isolated from the Sargasso Sea
atggaagattataaagtaaaagatatttcacaagctgattttggcagaaaagaaatttctattgcagagagtgaaatgccagggttgattgctttaagagaagaatattcaaaagaaaaaccacttaaaggtgccagaattattggttgtctgcacatgacaatccagacagctgtactaattgaaacacttgttgaattaggagcagaagtaagatggtcatcttgtaatattttttcaactcaagatcatgcagcagctgcaattgctaaagcaggtattcctgtttatgcatggaagggtgaaacggaggaagaatacttgtggtgcatcaaacagactattgttggaaaatctgattggaaaccaaatatgttattagatgatggtggcgacttaacggccattatgcataatgaatacaaagaattaatgaaggatgttaaaggtgtttcagaggaaacaactactggaattaaagcacttaacaaaatggaaaaagatcaatctcttttagtgccagcaattaatgtcaacgactctgtaaccaaatcaaaatttgacaacctatatggttgtagagaaagtttagtagacggcataagacgagcaactgatgttatgatgtcaggtaaaattgcaattgtagcaggctttggagatgttggaaaaggaagtgctgcatctttgagacaaagtggagcaagagtattagtcactgaagcagatccaatttgtgctcttcaagctgcaatggagggttacgaggttgttttaatggaagaagctataagcagagcagatatagttgtaactgcaacaggaaataaagatattgtaactgcagaccacatgagggacatgaaagatagagcaatattatgtaacattggtcactttgacaatgaaatacaggttgaagctttgaaaaattataagtggtctgaagtaaaaccccaagttcacgaaattgaattacccagtggtaaaagaattattttattagcagagggaagattagtaaatttaggttgtgcaacaggacatcctagttttgttatgagtgcatcttttactaatcaggtaattgcacaaatagaactttggcataatcacaaaaattatgacaacaaagtttatgtactgcctaaacacttggatgaaaaagttgctactttacatcttaaaaaagttggtgctaaattaactaaattgtctaaagatcaagcggattatataagtgtagggacagaaggtccttttaaaccagatgcctaccgctattaaa

SEQ ID NO: 261610 - DNA, 1030 bp, Unknown
  Bacterial polypeptide expressing nucleotide sequence isolated from the Sargasso Sea
ctgggatgcaaatatgattttagatgatggcggcgaccttactcatatggtccacactaaatttccagatatgctagaaacaattcatggcatttcagaagaaactactactggcgttcatagactgaaagcgatgcttgaaagtaataccttaaaagtacctgccatcaacgtaaatgattcagtgacgaaatctaaaaatgataacaagtatggttgcagacacagtcttaatgatgcgatcaaaagaggcactgatatgttcctttcttcaaaaaaagcattggtcatcggatacggagatgtaggcaaaggttctgctcttagtcttgctcaagaaggaatgattgtaagggttgttgagtctgatcctatatgtgctatgcaagcttgtatggatggattcgaagtggtgtcaacttacaaaaacggcatcgttaccagagatgtaaaagatatcaaccttggactgctagaagatactgatctcattgtaacaacaacgggaaatgtaaatgtttgtgatgaagcaatgttaaaaactgttaaaaatactgctgtaatatgtaatattggccactttgacaatgagattgatactcaatatatgcgtgatgagtggtattgggaagaaattaaaccgcaagttcatagggtatttagagacacagccccatcagatacacctgacttacaaagcaaaaactacattattctgttggcagaaggtcgattggttaacttgggaaatgctacaggtcaccctagcagaatcatggatggatcatttgccaaccaagttctagctcagatgtatttatttaaacaaggcttcgcaaacatcaatgataatgataagaaaagtgaaatgcttactgtaaaggttctaccaaaaaaactggacgaagaagttgctgaacttatggtacaaggctttgggggcacaattactaaattaactagtaatcaagctgagtacataaacgtgccagtggatgggcccttcaaagaagaagaatacaaatactaa

SEQ ID NO: 261611 - DNA, 1061 bp, Unknown
  Bacterial polypeptide expressing nucleotide sequence isolated from the Sargasso Sea
taatatattttcaacacaagatcatgctgcagctgcaatagcaaaagcaggtataccagtttatgcatggaaaggtgaaacagaagaagaatattggtggtgtgtaagacaaacgattgaaggtaaagagggttggaaaccaaatatgattctcgatgatggtggtgaccttacaagcttaatgcataaagaatataatgacttattaaaagaagtaaaagggctctcagaggaaacaacaacaggtgtactcgcattaaaaaaaatggagagtgaaggtacgttaatggtgccagctattaatgtaaatgactcagttaccaaatctaaattcgataatctttatggctgtagagaaagtttagttgatggaattaaaagagcaactgatgtcatgatgtcaggtaaagttgctatagttgctggctttggtgatgttggcaaaggcagtgctgcttcattacgtcaaagtggtgcaagagtaatggttactgaaacagatccaatttgtgcattacaagcggcaatggaaggctatgaagttgtattgatggatgaaatgattaaggaagcagatatagttgttactgctactggaaataaagatattgttaccgcagaccacatgagagatatgaaagatagagcaattttatgcaacattggtcacttcgataacgaaattcaagttgatgcacttagaaattataaatgggatgagatcaagccacaagtacatgaaattacttttcctgatgaaaaaagaatcattttattagctgaaggaaggcttgtaaacttaggctgtgcaactgggcacccaagctttgtaatgagtgcttcttttacaaaccaggtaacagcacaaattgaattgtggaataattcggaaaattatgaaaaaaaagtttatgtacttccaaagcatttggatgaaaaggttgcgcgtcttcatttagaaaaggtaggagctaaacttacacaattatccaaagatcaagctgactatattagtgtaactccagagggtccttataaacctgaagcttatcgatactaaa

SEQ ID NO: 261612 - DNA, 736 bp, Unknown
  Bacterial polypeptide expressing nucleotide sequence isolated from the Sargasso Sea
atggaaaacaatcaaagcagtccaggaacgaattttggtgattataaaattgcagatttatcgctttcagatttaggtcgaagaaaaataggtatcgcagaaggagaaatgccgggtttgatggcgttgagaaaggaatacgggaacgaaaagcctcttgccggggcaaggattacgggttcattgcacatgacggttgaaactgcagttttgatcgagactttagtagaattgggggctgaagtacgctggtcttcctgtaatattttttctacccaggatgaagctgctgcggccattgctgcagcaggaattccggtttttgcatggaaaggagagaccgaggaagaatactggtggtgtattgaacaaaccctcaaatgggagggaaatgaaggtccaaatttgcttcttgatgatgggggagatttgacctggtatgttcatgacaaatatccgcaattgcttgaccccattatggggctttcagaagaaaccacttctggggtacaccgtcttcatcagatggctcggaagaatgagctcaaggttcctgcttacaatgtgaatgattcggtgaccaagagtaagttcgacaatctttacggatgccgtgaatccctcgtagacggaatcaaacgggcaacagacgttatgattgcaggcaaattagcagtggttgcaggatatggtgatgtaagaaaaggttctgcagcctcactccgtaatcaaggag

SEQ ID NO: 261613 - DNA, 823 bp, Unknown
  Bacterial polypeptide expressing nucleotide sequence isolated from the Sargasso Sea
acaacaggcgtcttggcacttaaaaaaatggaggaacaaggtcaattgttagtgcctgcaattaatgtaaatgactctgttacaaaatcaaaatttgataacctatacggatgtagagagagtttagttgatggaattaaaagagctactgatgtaatgatgtcaggaaaagttgcaatcgttgcaggctttggtgatgttggaaaaggtagtgcagcatctttaagacaaagtggagcaagagtattagttactgaaactgatcctatttgtgcattgcaagctgctatggaaggttacgaagtagttttaatggatgaaatgattggtcaagcagatattgtcgtaactgcaactggaaataaagatgtggtaacggcagatcatatgagagctatgaaagatagatctattctatgcaatatcggtcactttgataatgaaatacaagttgaggctctgaaaaactataaatgggatgaagtaaaaccccaagttcatgaaataacattcccagatgacaaaagattaattttgttagctgaaggaagacttgtaaatttaggatgtggaactggtcacccaagttttgttatgagtgcatcatttactaaccaggtaattgctcaaattgagctttggaataattcagataactatgaaaataaagtttatgtgcttcctaaacacttagatgaaaaggttgcaaggcttcacttagataaagttggtgcaaaattaacaccattatctaaagagcaagctgattatataagtgtaacaccagagggaccatacaagcctcatgcttatcgctactaga

SEQ ID NO: 261614 - DNA, 1119 bp, Unknown
  Bacterial polypeptide expressing nucleotide sequence isolated from the Sargasso Sea
tcatgcagcagcagcaatagcaaaagcaaatattcctgtttttgcaaaaaaaggagagtctcttgaggagtattgggaatatgttgataaaatttttctatgggatgacgatcattcccctaatatgattttggatgatggaggagatgctactctttatattattttgggttctagattagaatatggagaagatgtattgaaaaatcctaaaaatgaagaagagatcgctttaaaaaatcaaattttaaaaagaataaaatcttcacctaattggttttctaaaaaaaagaattttataaaaggagtgacagaagaaacaacaactggtgttcttagattatatcaaatgtctgagaaaggagaattaccatttccagctataaatgttaatgattccgttactaaatcaaaatttgataatttatatggttgtcgtgaatcattagtagatggcatcagaagggcaacggacgttatgttgtctggtaaggttgctgttgttgctggttttggagatgtaggcaaaggttcagctgcatcactcaggcaaggtggggctagagttttggtaactgaaattgaccctatatgcgccttacaagctgctatggaaggttatgaagtatgttcaatggacgaagcagccaaaaaaggtgatatttttgttacagccactggtaataaagacgtcataactatggatcatatgagagatatgaaagatagagcaattgtttgtaatataggacattttgattcagaaatacaaatagaagcattgcaaaatatgaagtggaatgaagtaaagcctcaagttgacgaagttgaatttaatgatggcaaaaaaattatagtattagctaaaggaagattagtgaatctgggttgtgctacaggtcatcctagttttgtgatgagcgcgtcttttaccaatcaggtattagctcaattagaaatatgggaaaaatctgatcagtatgaaaataaagtttatactttacctaaacatttggacgaaaaagtagctcaattgcatttagaaaaagttggtgcaattttgacaaagattgtcgagagatcaggcaaattatattggtgtttctgtagatggaccgt

SEQ ID NO: 261615 - DNA, 1062 bp, Unknown
  Bacterial polypeptide expressing nucleotide sequence isolated from the Sargasso Sea
ttccggatggatcaggtccagatctaatcgtggatgatggtggtgatgcaacattactgatccataaaggatacgaattagaagaatatttttctaaatacggagatgtaccagaaataacaacaaatgttgaagaagaaaggattattgaaaatcttttaagagaagtattggcaaaagacccgaaccattggcataaagtgcaaaaaagtattattggtgtatcagaagagaccaccacaggtgttcataggctagtacaaatggaaaaagatggacatcttctttttccagcatataatgtaaatgactccgtgacaaaatctaaatttgataatgtctatggttgtcgtgaatcactcgcagatggtcttaaacgcgcgcttgatgtaatggtcgcaggtaaaacagtggtagtttgtggttacggagatgttggtagagggtgtgcacaatcaatgaggggatatggtgctagggttatcgtaaccgagatcgatcctatctgtgcattacaggcagcaatggaagggtttgaagtaacaacagttgaagaagttctaaaggatggacatatttttgttaccaccaccggtaataaggatgttatcacaaaagatcatatgtatggcatgagagatcaggcaattgtttgcaatattggtcattttgataatgagattcaagtgaatgctttgaatgatgatagttcagttgatagagagataataaagccgcaggttgatcgctatacatttcctaatggcaaccaagtttttcttctggctgaaggtagactggtcaatttaggttgtgcaactggacatccaagctttgttatgtcaaattcatttacaaaccaggtcatggcgcaaatagcacttgcaaaagaagcacctgagattggagtttatatgcttccaaaagaattagatgaagaagtagcccgcttacatttagatcatttgggggttatattgacagagttaacggatgagcaagcagactatattggggtctctaaaaatggcccttataagccagatcattacagatattaat

SEQ ID NO: 261616 - DNA, 1291 bp, Unknown
  Bacterial polypeptide expressing nucleotide sequence isolated from the Sargasso Sea
atgagccaagattataaagtaaaagatatagagttggcagaatggggattaaaagaaatcgctattgctgaaacagaaatgccaggattaatggctttaagagaagaatatgggaacagtaaaccactcgatggagctagaattgtaggttgtttgcatatgacaattcaaactgctgtattaattgagacattagttcatcttggtgcttcagtgagatggagttcttgtaatatattttcaactcaagatcaggctgctgctgctatcgcatcaaaaaatatacctgtatttgcttggaaaggaatgtcagatgaagagttctggtggtgtatagagcaaactttaactggtccagatggttggaagccaaatatgattttagatgatggtggagatgcaacgcaaataatacatgaaaaatttcctgaacttttaaaagatattagaggtttatcggaagaaactacaacaggggttcatcgattaaaagacatggaaaaaaaggggttattaaaagttcctgctataaatgtaaatgattcagtaacgaaatctaaatttgataatttgtatggatgtaaagaaagcttagttgatggcattagaagaggaactgatgttatgatggctggtaaagtggctgtagtagctggatatggagatgttggaaagggatctgcagcaagtttgagaggagcaggtgcaagggtatgtgtaacagaaattgatccgattaatgctttgcaggcagctatggaaggatatgaagttgtaactatggatgatgctgcttcttatggtgatattttcgttactgctacaggaaatttagatgtaataactttagatcatatgagaaagatgcgtgacagagcgatagtttgtaatattggacattttgataatgaaattcaaactgaggcattacaaaattataaatcagatgagattaagcctcaagtcagagaagtagaatttcctgatggaaaaaaaatattattattatctgaaggtcgtttagttaatttaggtaatgctacaggacatccaagctttgtaatgagtgcttctttttctaatcaagtaattgcacaaattgaactatgggaaaattataaaaattatgaaaataaagtatatgtcttaccaaaaaaattagatgaaaaagttgctttattacatttgaaaaaagttggagcaaaattaaccgagttaaatgaaaagcaagctgactatattggtgttagtaaggcaggaccatttaaagatgatacttacaggtactagg

SEQ ID NO: 261617 - DNA, 1015 bp, Unknown
  Bacterial polypeptide expressing nucleotide sequence isolated from the Sargasso Sea
atgagtaaatacttaccatttaaggttaaagatataaatcttgctgactggggaagaaaagaaattaatcttgccgaagctgaaatgcctggtctgattgcattgagagatgaatatggaaaaattaagcccctcaaaggtgcaagaatagcaggttgtttacatatgactattcaaacagctgttttaattgaaacattagttgaattaggagctgaagtaacatggagctcatgtaatattttctcaactcaagatcatgctgctgctgcaattgcagcaacagggattcaagtttatgcttggaaagggatgaatgaagaagagtttaactggtgtatagaacaaacattatactttggagaaaaaagaaaaccactaaatatgattttagatgatggtggtgatttaacaaatctagtattagataattaccctgatttggtagatgaaattaaaggtttatctgaagaaactactactggagttcatagattatatgaaagagttaagaatgggactcttccattacctgcaatcaatgtaaatgattctgttactaaatctaaatttgataataaatatggatgtcaagaaagtgcagttgatgcagttcgaagagctactgatataatgatggctggaaaaagagttgtagttgcaggctatggtgatgtaggtaaaggaactgttgcttcttttagtggagctggtgctatagtcactgttgttgaaattgatcctatttgtgcattacaagcttcaatggatggatttgaagtaaaacgaatgaagactgttatcggaaatgcagatatagttgttacagctacggggaataaagatatattgaaagaggaacattttaggttaatgaaagataaaactatagtttgtaacattggacattttgataatgaaattgatatggaatggttaaataataattatggtcatacaaaaaatgaaattaaaccacaagttgatttatataatattgaaggaactgatatta

SEQ ID NO: 261618 - DNA, 1021 bp, Unknown
  Bacterial polypeptide expressing nucleotide sequence isolated from the Sargasso Sea
atggaaaatgactataaagtagccgatattaatcttgctgaatttggaagaagagaaatatctctagctgaaaatgaaatgccagcattaatggctttaagagacaaatatagagctgagcagcctcttgctggagctaaaatcatgggctgtattcatatgacaattcaaactgcagttttaatggaaactttagttgatttaggggctgaacttaggtggtcttcatgtaatatcttctcaacccaagatcacgcagcagcagcaatggctgcaaaaggagtccctgtcttcgcttggaaaggtgaaactgatgaggagtatgagtggtgtatagaacaaactatatgtaaagacggtaaaccatgggatgcaaatatgattcttgacgacggaagcgatctcacatcaatggtacatgaaaaatttccagatatgttagaaaccattcacggggtatcagaagaaacaactactggcgttcataggttaaaagaaatgcttgaaaaaggtgaacttaaaattcctgctatcaatgtaaatgactcagttaccaaagctaagaatgataataagtatggttgtagacatagtctaaatgatgctcttaagaggggaacagatatgctactttctgggaaaaagggccttgtgattggttatggtgatgttggtaaaggctctgcggcaagtttagcccaagaaggaatgattgtaagcgttgttgagtcagatccaatatgtgcgatgcaagcctgcatggacggattttctgttgtttcatgttataaggatggtgttgttactcgagatccaaaagatataaatatggccgttatgggtgatacagatctaatagtaacaacaacaggaaatgttaatgtttgtgattctgcaatgataagcacacttaaaaatacagctgtcatatgtaatattggtcattttgataatgaaatagacacagcctttatgagagaaaattattattgggatgaaatcaaaccgcaagttcatagag

SEQ ID NO: 261619 - DNA, 1183 bp, Unknown
  Bacterial polypeptide expressing nucleotide sequence isolated from the Sargasso Sea
tatgagttttaaagattacaaagtagccgacctaaatcttgctgattttggccgtaaagaaattgctttagccgaggcagaaatgccagctttgatgaaacttcgtgaaaaatacggagattcaaaacctttagctggtgccaagattatgggctgtatccatatgaccatacaaactgccgttttaatagaaactcttgtggctttgggtgcctcagtaagatggtcgtcatgcaatatattctcgacacaagaccatgcagcagcagcaatcgcagcttctgaaattccagtttttgcctggaagggcatgaatgaagaagagtttgattggtgcatcgagcaaactattttggaagacggtaaaccttgggacgcgaacatgatccttgacgatggaggagatttaactgcaatggttcatgaaaaatatccggacatgttgaacaacattcatggaatttctgaggaaacaactacaggagttcatcgactttgggagatgcttgaaaaaggagaattaaaagtccctgccattaatgtgaacgattcggtcactaaatcaaaaaacgataataaatacggctgccgccacagtttgaatgatgccattaaaagaggcacggacatgctcttggctggaaggaaagctttggtttttggttatggagatgttggaaaaggctctgccatgagtttaagacaggaaggcatggtggttagaatttcagaaattgatccaatctgcgcgatgcaagcttgcatggacggttacgaagttgtttcaccctacatcgatggagtaaacaataatagtgacgactgcatcaataaagcgttgttagcagataccgacgtcatagttacagcaactggaaacgtgaatgtatgcgatcgcttcatcctcgataatctcaaatccgggaccatggtttgcaacattggccattttgacaacgaaattgatacccaatacatgcgcgatcattggcattgggaagaaattaaacctcaagtgcacaagatctcaaaaaccaaagaagccaatgataaaaattacattgttcttttagccgaaggccgcttagttaatctcggtaacgcaactggacacccttctagaattatggacggctcctttgccaaccaagtcttggcgcaaatgtttctttacaagcaagcc

SEQ ID NO: 261620 - DNA, 1162 bp, Unknown
  Bacterial polypeptide expressing nucleotide sequence isolated from the Sargasso Sea
atggaaaatgattataaagtagcagatattaatttagctgaattcggtaggagagaaatttctcttgctgaaaatgaaatgcccgcattaatggccttaagagaaaaatataggtctgagcagcctctagctggagcaaaaattatgggatgtatccatatgactattcaaacagctgttttgatggaaacacttatcgatttaggagctgagcttagatggtcatcatgtaatattttctcgacgcaagatcatgcggctgctgcaatggcagcaagaggagttcctgttttcgcttggaagggtgaaactgaagaggagtttgaatggtgtattgaacaaactatatgtaaagacggaaaaccatgggatgcaaatatgattcttgatgatggaagtgatctcacagcgatggttcatgaaaaatttccagaaatgcttgaaacgatccatggagtatctgaagagactacaactggcgttcacagacttaaagaaatgcttgaaaaaggagaactaaaagttcctgctatcaatgtcaatgattcagtaactaaagcaaaaaatgataacaaatatggttgcaggcatagtcttaatgatgccttgaaaagaggaacagatatgttgctttctggtaaaaaaggtttagttattggttatggagatgttggtaaaggttctgcagctagccttgctcaagaaggaatgattgtgagtgttgtagaatcagatccaatttgtgcaatgcaagcatgcatggatggtttttcagtggtttcgtgctacaaagatggtgtggttactagaaatgctgcagacattaatatgcaggttatgggagatactgatctagttgtaaccacaactggaaacgttaacgtttgtgattctgcaatgttaagtaccctaaaaaacactgcagtggtttgtaatattggtcactttgataatgagatcgatactgctttcatgagagaaaattattattgggatgaaataaagcctcaggttcacagaatctttagagatactgctcctgatggaactccagatctttccagtaaaaactatattattcttcttgcagagggaaggctggttaatttaggaaatgcaacaggacacccaagcagaataatggatggttcttttcgctaat

SEQ ID NO: 261621 - DNA, 712 bp, Unknown
  Bacterial polypeptide expressing nucleotide sequence isolated from the Sargasso Sea
aatggaaaatgattataaagtagctgatattaatttagctgaatttggcagaagagaaatctctcttgctgaaaatgaaatgccagctctaatggctcttagagaaaaatataaggatgaacaacccttggctggagctaagataatgggctgtatacatatgaccattcagactgcagtattgatggaaactcttttagagcttggcgctgagcttagatggtcttcatgtaatatattttcaactcaagaccatgccgctgctgctatggctgcaagaggagttcctgtttttgcatggaagggtgaaaccgaagaagaatatgaatggtgtatagaacaaactatttgtaaagatggtaacccatgggatgcaaatatgattctcgatgatggcagcgacttgactgcaatggtacatgaaaaatttcctgacatgttagagacaattcatggtgtttcagaagaaaccactacaggagttcatagactaaaagagatgctagagaaaggtgaactcaaaatacctgcaattaatgtaaatgactctgtaacaaaagctaaaaacgataataaatacggttgtaggcatagtttaaatgatgctctaaaaagaggcaccgatatgttgttatctggcaaaaaaggtcttgttattggttatggtgatgtggaaaaggatcggctgccagtttggctcaagaaggaatga

SEQ ID NO: 261622 - DNA, 688 bp, Unknown
  Bacterial polypeptide expressing nucleotide sequence isolated from the Sargasso Sea
aatgatagtaagagtggtcgaatcagatccgatatgcgccatgcaagcatgcatggatggcttttcagtagtttcctgctacaaagatggagttgttactagagatcccaaagacattaatatggaaattatgggggatacagatctaatagttacaacgactggtaatgttaatgtatgcgattcagcgatgttaagcactttaaaaaatactgcggtagtatgtaatattgggcattttgataatgaaattgatactgcttttatgagagaaaactattattgggatgaaattaaacctcaagtacatagagtttttagagatacccctcctgatgggacgccagatctatcaagtaaaaactacatcatattgcttgcagaaggaagattagtaaatcttggaaatgctacaggtcacccaagcaggattatggatggatcatttgcaaaccaagttttagcacaaattcatttatataaacaaggcttcgccaatgtgaatgatgcagacaaaaaagctgaaatgttaactgttgaggttctgccgaaaaaattagatgaagaggtagctagtcttatggttcagggttttggtgggactgtgactcaacttactaaagaacaagcagactatattaatgttccacaagatggtccatttaaggaagaaacttataaatattaa

SEQ ID NO: 261623 - DNA, 603 bp, Unknown
  Bacterial polypeptide expressing nucleotide sequence isolated from the Sargasso Sea
cacttcgctcacaaggtgctagagtaattgttacagaaattgatccaatttgtgcccttcaagcctctatggaaggctatgaggtatcaactgtagatgatgtgactaagtcagcagatatttttgttacagcaacaggtaataaagatgttattacgctagaacatatgagagaaatgaaagatcgagcaattgttgcaaatattgggcactttgatagtgaaatccaagtctcaaaattaaaaaactttaaatgggataatataaaaccacaagttgatgagatagaatttcctgatggtaaaaaaattattttattggctgagggaagattagttaacctaggttgtgcaactggacaccctagttttgttatgagtgcctcattttcaaatcaagttttagcacagattgaaatttggaataattataagaattatgaaaataaagtttatgttttaccaaaacacttagatgagaaagtagcttatattcatttagaaaaacttggagttaaattgactgaattgagtgatgatcaagcagattatctaagtctaaataaaaaaggtccatttaaaccagatcattatagatattaaa

SEQ ID NO: 261624 - DNA, 669 bp, Unknown
  Bacterial polypeptide expressing nucleotide sequence isolated from the Sargasso Sea
gtgatgctggctggcaggttgctgttgtggctggttatggtgatgttgggaaaggttctgcggcgtcacttcgtcagggtggggcgcgtgttatggtaaccgaaatcgaccctatttgtgcactgcaggctgcaatggagggctatgaagtcgtcacgatggaacaagccgcacccaaggctgatatttttgtcaccgcgaccggcaaccaggatgtgattaccattgagcatatgcgggatatgaaagaccgcgcgattgtttgtaacattggccattttgataatgaaattcaggtggcggcgctgaacaactatacctggtccgaagtcaaaccgcaggttgatgaaattgaatttcctgatggcaagcgcatgatcctgctggccaaggggcggttggttaaccttggatgtgcgaccggtcacccatcatttgtgatgtcagcgtcctttaccaatcaggtgctagcgcaaatggaattatgggccgagggtgaaaaatacgaaaataaggtctatactttgccgcgtcatttggatgaaaaagtggcggcattgcatctgtccaaggtgggggccaccttgtcaacgcttcgcccagatcaggctgattatattggcgttgaacagcaaggcccgtttaaaagcgaacaatatcgctattaaa

SEQ ID NO: 261625 - DNA, 1076 bp, Unknown
  Bacterial polypeptide expressing nucleotide sequence isolated from the Sargasso Sea
acgctggtcatcatgtaatattttttcaacacaagatcacgcagcagcagcaatcgctacagatggtatacctgtttttgcctggaagggtgaaactgaggaggaatacgattggtgtattaaacaaactattgaagggccaaaaggctggcgaccaaacatgttgcttgatgatggtggcgatctaacaaaaatcatgcatgaagattacccagaacttttggaagccgttcgcggtgtctctgaagaaacgacaactggagttcttaggctacttgaaatgcaggaagccggctcattaaaaatccctgcattcaatgttaatgacagtgtcactaagtcaaaattcgataatttatatggttgtcgagaaagtctaaccgatggaattcggcgagcgactgacgttatgctctcaggaaaagttgcggtagttaatggttacggagacgttggtaaaggttctgcatcaagtttaagaaacggtggcgcgagggttatcgtaacagaagtcgatccaatttgcgcactccaagcagccatggaaggatttgaggttgctactatggacgagtatgcttcaaaagccgacatatttgtgactgccacaggcaatcaagatataataacagtcgatcacatgcgcgaaatgaaagatcgagctattgtttgcaatattggtcactttgacacagaaattcaggttgaaggcctccgaaattataaatggtatccagtgaaacctcaggttgacgaagtagagtttccggatggtaaaagaataattcttttggcagagggacggctcgtaaaccttggttgtgctacagggcatcccagttttgtaatgagtgcgtcttttaccaatcaaacgcttgcccaaattgaactttggggtaatcctggtaaatattccaatgaggtttacattcttccaaagtcgctggacgaaaaagttgctgaattgcatctagcgagggtaggagcaaaacttacaaaaatgagtaaggagcaggctgcttatgtaggtgtttctcaagaagggcccttcaagtcagacaattatcggtattaag

SEQ ID NO: 261626 - DNA, 514 bp, Unknown
  Bacterial polypeptide expressing nucleotide sequence isolated from the Sargasso Sea
gtttgtgattctgcaatgattagtactcttaaaaatactgcggtggtatgtaatattggtcattttgataatgaaatagatacagcctttatgagagagaattactattgggatgaaattaagccacaagttcatagagtatttagagatactgcaccagatggaactcctgatctttcgagcaaaaactacataatcttacttgctgaaggaaggctggttaatttaggaaatgcgacagggcatccaagtagaattatggatggttcttttgctaatcaggttcttgcacaaatacatttatataaacaaggctttgctaatgtaaatgatgctgataaaagagctgaaatgataactgttgaagtgcttccgaaaaaattagatgaagaggttgcgagtttaatggttgaaggttttggtgggactgtaacaaagcttactcaggatcaagcagactatattaatgttcctcaagatgggcccttcaaagaagaaagttataaatattaaa

SEQ ID NO: 261627 - DNA, 1291 bp, Unknown
  Bacterial polypeptide expressing nucleotide sequence isolated from the Sargasso Sea
aatgagccaagattttaaagtaaaagatataaatttagctgactttggtagaaaagaaatttctatagcagagtccgaaatgccaggcttaatggcattaagaaaagaatataaaggcaagaaacctttaaatggagcaaacattcttggctgtcttcatatgacaattcaaacagctgttttgatagaaacacttgttgaacttggtgcaagtgtgagatggtcttcctgtaatattttttcaacacaagatcatgctgctgcagcaattgcaaaagcaggaatacctgtatacgcatggaaaggtgaaactgaaaaagaatattggtggtgtattaaacaaactatcgaaggtgataaaaattggaaaccaaatatgattttagatgatggtggtgacctaactggactaatgcacaaggattataaagatctacttaaaaatattaaaggagtatcggaagaaactacaactggagttttagcattgaaaaaaatggaatctaataaaacattgttagtccccgctataaatgtcaacgactcagtaacaaaatctaaatttgataatttgtatggttgccgggaaagtttagtggatggaattaaaagagcaacagatgtaatgatgtctggtaaagttgctatagttgctggttttggtgatgttggtaaaggaagtgcagcatctcttagacaatcaggcgcaagagttatggttacagaaacagatcctatttgtgcacttcaagctgcaatggaaggatatgaagttgtattaatggacgaggctattaaggatgcagacatagttgtaactgctacaggaaacaaagatattgtaactgctgaccacatgagagaaatgaaagacagagcaatattatgtaatattggacatttcgataatgaaattcaagttgatgctttaaagaattacaaatggactgaaataaaaccacaagtacatgaaatagaactaccaagtaaaaaaagaattattttattagctgaaggaagattagtaaatcttggctgcgcaactgggcacccaagctttgtaatgagtgcatcatttacaaatcaagttatagctcaaattgaattgtggaataactcaaaaaattacgaaaagaaagtttatgtattaccgaagcatttagacgaaaaagttgcaacattacacttaggtaaagttggtgctaaattaaccaaaatgtctaaggagcaagcagactatattagcgttaaaccatcaggaccatttaaaccggatacttatcgctactaa

SEQ ID NO: 261628 - DNA, 185 bp, Unknown
  Bacterial polypeptide expressing nucleotide sequence isolated from the Sargasso Sea
ttggaataattcagataactatgaaaataaagtttatgtgcttcctaaacacttagatgaaaaggtagcaaggctacacttagataaagttggtgcaaaattaacaccactatcgaaagagcaagctgactatataagtgtaacaccagagggaccatacaagcctcatgcttatcgctactaga

SEQ ID NO: 261629 - DNA, 1048 bp, Unknown
  Bacterial polypeptide expressing nucleotide sequence isolated from the Sargasso Sea
ctatgcgatggcaaaccatgggatgcaaacatgatacttgatgatggtggagatcttacatccatggctcatgaaaagtatcccgaaatcctagaaaatattcatggcataacagaagaaaccactactggtgttgtaagactcaatgagatgatagaaaagggagagttaaaagtacctgccattaacgtgaatgattctgtaactaagtccaaaaacgataataaatacggaacaaggcatagtctcaatgatgggattaaaagagggacagatatgttcctagctggtagaaaagccctcgttataggatatggtgatgttggaaaaggatcagcacagagccttaagcaggaaggtatggtggtaagagtcactgaaattgacccaatttgtgccatgcaagcctgcatggatggttatgaagttgtttcaccttacatcgatggcattaataacgactctgaagactctataaataaagcgcttttagaagataccgatcttatagtgaccacaacaggtaactatcatgtttgcgataaacatatgcttaaagcagttaaagatggggctgtaatttgcaacattggacactttgatacagaaattgatacgcaatatatgcgagatgaatggtgctgggaagaagtgaagcctcaggtccataaggtcttcagagacacaaaagctggggatgctcccaacctagatagcgaaaattatataattcttctgtctgagggacgtttagtaaacctaggtaatgcaactggtcacccttcaagaatcatggatggatcctttgcaaatcaggttttagctcagatgtatctctatgagaagaaatttgctcacatcaatgatgatgacaagaaaaaagaactcataaaagtagaagtgttgccaaagaagcttgatgaagaagtagcctcatacatggtagaaggtttcggaggcgtcatgacaaaattatcatctgaccaggcagactatattaacgtgccagaagaaggacccttcaagtcagaaatatataaatattaat

SEQ ID NO: 261630 - DNA, 349 bp, Unknown
  Bacterial polypeptide expressing nucleotide sequence isolated from the Sargasso Sea
atgtcagaaacattaactcagcctctagttgaactattaccatataaggtaaaggatattggattagcagaggatggaagaaaagcactcgatattgcagagaaagaaatgcctggacttatgtccactaggaataaatatggacctgaaaaaccccttgcagggaaaaaactaacaggttcgctccatatgaccgttgagactgctgtactcattgaaaccctagttgatttgggtgcagatgtacgttgggcaagttgcaacatattttcaactcaagatcacgctgccgcggttattgctgaaactggtgtgccagtatttgcatggaaaggagagactctatagg

SEQ ID NO: 261631 - DNA, 625 bp, Unknown
  Bacterial polypeptide expressing nucleotide sequence isolated from the Sargasso Sea
atggaaaatgattataaagttgcagatatgagtcttgctgaattcggaagaagagagatttctttagctgaaaatgaaatgcctgcattaatggctctaagaacaaagtataaggatgtgcaacctctcgcgggtgcaaaagttatgggatgcattcatatgaccattcaaacagctgtgttaatcgaaacattagtagatcttggtgctgaggtccgatggtctggttgcaatattttttccactcaagatcatgctgcagcagctattgccgcagctggaattcctgtttttgcttggaaaggtcaaactgatgaggaatttgactggtgcattgagcaaacaatagttaaagatggcataccttgggatgcaaatatgattctagatgatggtggcgatctgactcatatggttcactctaaatttcctgaaatgcttgaaagcattcatggaatttcagaggaaactacaactggcgtacatagattaaaagcaatgcttgaaaaaaatgaacttaaagtacctgcgataaatgtaaatgattctgtcactaaatcaaaaaatgataataagtatggttgcaggcatagtctaaatgatgcgattaaaagaggcacagata

SEQ ID NO: 261632 - DNA, 1420 bp, Unknown
  Bacterial polypeptide expressing nucleotide sequence isolated from the Sargasso Sea
gatgaacgccattatcgattccaaagctacccacgattacgtcgtcgccgacatggcgctggccggctggggccgcaaggaactgaacatcgccgagaccgaaatgccgggcctcgtgcagatccgtgacgaatacaaggcacagcagccgctgaagggcgcgcgcattgccggttcgctgcacatgacgatccagacgggcgtgctgatcgagacgctgaaggcgctcggcgcggacgtccgctgggcctcgtgcaacatcttctcgacgcaggaccacgctgctgccgcgatcgtcgaagccggcacgccggtgttcgcgttcaagggcgaatcgctcgacgaatactgggaattctcgcaccgcatcttcgaatggccgaacggcgaattcgcgaacatgatcctggacgacggcggcgacgcaacgctgctgctgatcctcggcgcgaaggccgagaaggaccgttcggtgatcgcgaagccgaccaacgaggaagaagtcgcgctgtacaagtcgatcgcgaagcatctcgacgccgacccgacctggtactcgacgcgcctcgcgcacatcaagggcgtgaccgaagaaaccacgaccggcgtgcaccgcctgtaccagatggaaaaggacggccgcctgccgttcccggcgttcaacgtgaacgattcggtcacgaagtcgaagttcgacaacctgtacggctgccgtgaatcgctggtcgacggcatcaagcgcgcgaccgacgtgatgatcgcgggcaaggtcgcggtcgtcgcgggctacggcgacgtgggcaagggctgcgcgcaatcgctgcgcggcctgggcgcgaccgtgtgggtcaccgaaatcgacccgatctgcgcactgcaggcggcgatggaaggctaccgcgtcgtgacgatggaatacgcggccgacaaggccgacatcttcgtgacggccaccggcaactaccacgtgatcaaccacgatcacatgaaggcgatgcgccacaacgcgatcgtctgcaacatcggtcacttcgactcggaaatcgacgtcgcgtccacccgccagtaccagtgggaaaacatcaagccgcaggtcgaccacatcatcttcccggacggcaagcgtgtgatcctgctggcggaaggtcgcctcgtgaacctcggctgcgcgaccggccacccgtcgttcgtgatgtcgaactcgttcgcgaaccagacgctcgcgcagatcgagctgttcgtgcgcggcaacgagtacgagaacaaggtgtacgtgctgccgaagcacctcgatgaaaaggtcgcacgcctgcacctggcgcgcatcggcgcgaacctgtccgtgctgtcggacgagcaggcttcgtacatcggcgtgcagaaggacggcccgttcaagccgaaccactaccgctactga

SEQ ID NO: 261633 - DNA, 898 bp, Unknown
  Bacterial polypeptide expressing nucleotide sequence isolated from the Sargasso Sea
atggaattcaaagattataaagtggccgatattaatttagctgactggggaagaaaagaaataattctcgctcaagctgaaatgccagcccttatgaaattaagagaaaggtatggcgaagaaaagcctcttaagggagcaaaaataatgggttgcattcatatgacaattcaaacagcagttttaattgagactcttgttgagcttggagctgaagtcagatggtcatcttgtaatattttttctactcaagatcatgctgcagctgctattgcagcggctggcatacccgtatttgcctggaaaggaatgaacgacgaagaatttgattggtgcatagaacaaacgatattgaaaggtgagaagccatgggatgcaaatatgattcttgatgacggcggagatcttactgcaatggttcacgataaatttccagaaatgctagaaagtattcatgggatctctgaagaaaccactacaggcgttcatcgattaaacgaaatggtcgagaaaggagaacttaaagttccagcaatcaacgtaaatgattcagttactaaatcgaaaaatgataataaatatggatgtagacacagtcttaatgatgctattaaaagagcaactgacatgctcctttcaggaaggaaagccttggtgataggttatggtgatgtaggtaaaggatctgcaatgagtttgaggcaagaaggcatggttacacgagtaactgaaatagatccaatctgtgcaatgcaagcatgcatggatggttacgaggtagtgtcgccttatgtgaatggtcaaaataacaataatgacgaatcaatcaataaatctttactgcaggatacggacttaattgtgacaactacaggtaatgtaaacgtttgtgataaat

SEQ ID NO: 261634 - DNA, 1324 bp, Unknown
  Bacterial polypeptide expressing nucleotide sequence isolated from the Sargasso Sea
atgaaaaataaaacactaacagaatatgttccatataagataaaagatttaagtcttgcggagtggggtaaaaaagaaattaaattagcagaggctgaaatgccaggacttatggctttaagagccaagcttaaaaaagagaagcctctaaaaggtgcaagaattgcaggatgtctacatatgactattcaaactgctgttttgatagaaacattaatagatcttggggctgaggttacttggagctcatgcaatattttttcaacacaagaccatgctgctgctgctattgcatctatggggattcctatctatgcatggaaaggaatgaatgaaaaggagtttaattggtgtattgaacaaacattattttttggagagaagagagagccattaaatatgattcttgatgatggaggtgatttaaccaatatggtacttgatcaatatcctgagcttgttcctggaataaagggcctttctgaagagactactactggagtacatagattatatgatagaatgaaagcaggaaaattgcctcttcctgcaattaatgttaacgattctgtaactaaatcaaaatttgataacaaatatggctgtaaagagagtgcagtagatgcagttagaagagctactgatataatgcttgccggtaaaagagttgttgtatgtgggtatggtgatgttggaaaagggactgcagcttcttttagaggagctggttcaattgtaactgttactgaaattgatcctatttgtgccctacaggcttcaatggacggttatgaggtaaaaaagctaaatacagttgttgaaaattctgatattattataacagcaacagggaataaagatattgtaactgaagaacactttaaaaagatgaaagacaaagctattgtttgtaatataggccattttgataatgagatagatatggattggcttaactcaaactatggaaatacaaaatcgactataaaacctcaagttgatatatatacattagagaaaaactctcaagttattgttttagctgaaggaagattagtaaatcttggttgtgcaactggacacccaagctttgttatgagtaattcttttaccaatcagactctagcccaaattgagttatggaaaaaccacaataactatgaaaataaggtgtatatgcttccaaaaaatttagacgaaatggtagctttattgcatctccctaaattaggtgttgagctagaagatttaactgaagatcaagcagagtatataggtgttaataaagttggtccatataagccagattattatagatattagc

SEQ ID NO: 261635 - DNA, 943 bp, Unknown
  Bacterial polypeptide expressing nucleotide sequence isolated from the Sargasso Sea
tatgagcaataatgattacaaagtagctgatatggaattggcagattggggtagaaaagaaatagtaatagctcaatcagaaatgcctgctttaatgaagttaagagatagatatggtgctgagcaacctctgaagggagctaaaattctaggatgcatccatatgacaattcaaacagctgttttaatagaaactttgactgctctaggtgctgaggttagatggtcaggttgtaatatcttttcaacacaagatcatgcggcagctgcaattgcggaatctggggtacctgtatttgcttggaaaggtcaaactgaagaagaatttgattggtgcatagaacaaactattttatgcgacggcaagccatgggaagcaaacatgattcttgacgatggaggcgaccttacatccatggctcataataaatatcctgaaattttagaaaatattcatggcatcacagaggaaactactacaggagttttaagacttaatgaaatgattgaaaagggggagctcaaagttccagccattaatgtaaatgattcagttacaaaatcaaaaaatgataataagtatggaactagacatagcttaaatgatggcatcaagagaggtacagacatgttcctagctggaagaaaagctctagtgattggctatggcgatgtgggaaaaggttctgcacaaagtttaaagcaagaaggtatggtagtaagagtaactgaaatagatcctatttgtgctatgcaagcctgtatggatggatatgaagtggtttctccctacatagatggtgttaataacgactctgaagagtctatgaatcttgccttattagaagacactgatcttatagtaacaacaactggtaactacaaagtgtgtgataagcatatgctgaaagtggtaaaaaatggcgctgtaatatgcaacata

SEQ ID NO: 261636 - DNA, 1291 bp, Unknown
  Bacterial polypeptide expressing nucleotide sequence isolated from the Sargasso Sea
atgagcagtgattataaagtaaaagatataaagctagcagattttggaaggaaagaaatatctttagccgaaacagaaatgccaggcttaatggcacttagaaaagaatttaaaaacaagaagccacttaaaggtgcaagaattttaggatgtttacacatgactatccaaacagcagttttaatagaaactttggtcgatctaggcgcagaggtgagatggtcttcttgtaacatattttctacgcaggaccacgcagctgcagcaattgctaaagctaaaatacctgtttttgcatggaaaggtgaaactgagaaagaatattggtggtgcatcaagcaaactattgaaggaaaaaaagattggaaaccaaatatgatcctggatgacggtggagatcttactgctctaatgcacaaagattataaagagatgttaaaaggtattaaaggagtttctgaagaaactacaacaggagttttagctttaaaaaaaatggaagctaacaatcaattattgataccagcaataaatgttaatgattctgtgaccaagtcaaagtttgataacctatatggatgcagagaaagcttggttgacggaataaagagagcaactgatgtaatgatgtcaggaaaggttgcaatagtagctggatttggagatgttggaaaaggaagcgcagcatctcttagacaagctggagcaagagttatggtcaccgaaacggatccgatctgtgcattgcaggcagcaatggagggttacgaggtggtgctaatggacgatgctattaaagatgcagatattgtagtaaccgcaacaggaaacaaagatattgttaccgcagatcatatgagaaacatgaaagacagagcaattttgtgtaacattgggcattttgataatgagattcaggttgacgcactaaaaaattataagtgggatgaaattaaacctcaggtgcatgaaatagaattaccaagcaaaaaaaggattattttattggcagaaggtaggcttgttaacttaggctgtgcaactggacacccaagttttgttatgagtgcttcttttactaatcaggtgattgctcaaattgaactatggaataattctaaaaaatatgaaaaaaaagtttatgttttaccaaaacacttagacgaaaaggtcgcgatgttacaccttggaaaagttggagcaaaattaaccaaaatgtcgaaagaacaagcagactatattagcgttaaacaatcaggaccgtttaaaccagatacttatcgctactaaa

SEQ ID NO: 261637 - DNA, 412 bp, Unknown
  Bacterial polypeptide expressing nucleotide sequence isolated from the Sargasso Sea
atgacaaaacttaatgacaaagactacgtagttcaggatatatctttggctaggtggggaaaagatgaaatatctattgctgaaactgaaatgcctggacttatgaaacttcgtgaagagtttcaaaataaacaccctcttaaaggctccaaaatagccggttgcctgcatatgacaatacaaactgctgtactaattgaaactcttaaggatcttggcgcagaacttagatggtcatcctgcaatatattttcaacacaagaccatgcagcagctgcaatagcggaccagggaattcctgtctatgcaaaaaaaggagagacccttgaagaatactgggaatatgttcacaaaatatttgaatggcacgatggtggaactcctaatatgattcttgatgatggaggggatg

SEQ ID NO: 261638 - DNA, 278 bp, Unknown
  Bacterial polypeptide expressing nucleotide sequence isolated from the Sargasso Sea
agcagaaggtcggttgatgaacttaggttgtgcaactggtcacccaagctttgttatgtcaaattctttcgcaaatcaagtcttggctcagattgctctagcaaaagatgcgcctgaagttggagtttacatgcttccaaaagagttagatgaagaagtagcaaggctacatcttgaacatttaggtgccaaattaactgaactttccgatgatcaggctcattatataggtgtttcaaaagatggaccttataagcctagtcactacaagtattagt

SEQ ID NO: 261639 - DNA, 222 bp, Unknown
  Bacterial polypeptide expressing nucleotide sequence isolated from the Sargasso Sea
tatgtcatctaaggtagattatgtagtagctgatatttcattggctgattggggtagaaaagaattagacatagcagagactgaaatgcctgggctaatgtcattaagagaagaatatgctaaatcacaagatctaaagggggcgagaatagcaggttgtcttcatatgactattcaaactgcagtattaatcgaaactcttaaagtattaggtgctgatat

SEQ ID NO: 261640 - DNA, 740 bp, Unknown
  Bacterial polypeptide expressing nucleotide sequence isolated from the Sargasso Sea
tatggaaaacgattataaagttgctgatataaaacttgctgaatttggaaggagagaaatatctcttgcagaaaatgagatgccggccttaatggcgttaagggataaatatagagatgagcagcctttggctggtgcaaaaataatgggatgcattcacatgactattcaaactgctgttttgatggaaacattactcgatctcggagcagaattaagatggtcatcctgtaacatattttcaacacaggatcatgcagcagcagcaatggctgcaaaaggagttcctgtatttgcttggaaaggtgaaactgaagaggagtacgagtggtgtattgaacaaactatttgtaaagatggaaagccatgggatgcaaatatgattcttgatgatggaagtgatcttacagctatggtgcatgctaaatttcctgacatgttagagactattcatggtgtgtctgaagaaacaactactggggtgcataggttaaaagagatgctagaaaaaggcgaactaaaaattcctgctattaatgtaaatgactcagttacaaaagcaaaaaatgataataaatatggatgcagacatagtctcaatgacgctctaaaaagaggaaccgatatgttactttctggtaagaaaggattggtaattggttatggagatgttggtaaaggttcggctgcgagtttggcccaagaaagcatgatagttagtgttgttgaatcagatccaa

SEQ ID NO: 261641 - DNA, 1396 bp, Unknown
  Bacterial polypeptide expressing nucleotide sequence isolated from the Sargasso Sea
atggaaaatgattataaagttgcagatataaatcttgctgaatttggaagaagggaaatttctctagcagaaaatgagatgcctgctttaatggctttaagagaaaaatatagagcagaacagcctcttgctggtgcaaaaattatgggttgtatccatatgactattcaaacagcagtcctaatggaaactttaatagacttaggtgcagaattaaggtggtcttcatgtaatattttttctactcaagatcacgctgctgcagcaatggcagcaaagggtataccaacatttgcctggaaaggagaaacagaggaagagtttgaatggtgtatagaacagactatttgtaaggatggtaaaccatgggatgcaaatatgattcttgatgatggtagtgatcttactgccatggttcatgaaaaatttccagatatgcttgaaacaattcatggcgtatcagaagaaactacaaccggggtgcatagactaaaagaaatgcttgaaaaaggtgaactcaaaattcctgctattaatgttaatgactctgttacaaaatcaaaaaatgataataaatatggttgtaggcatagtctaaatgatgcgcttaaaagaggaactgatatgttgctctccggtaaaaaaggtcttgttattggatatggtgatgttggtaagggctcagcattaagcctagctcaagaaggaatgatagttagcgttgttgaatcagatccaatttgtgcaatgcaagcatgtatggatggattttctgtagtttcttgttataaagatggagttgttaccagagatactaaagatattaatatgcaagttatggaagatactgacctggtagttacaacaactggtaatgtaaacgtatgtgattctgctatgcttagcacgcttaaaaatactgctgttgtatgtaatattggtcattttgataatgaaatagatacagcatttatgagagaaaatttctattgggatgaaattaaacctcaagtgcatagaatttttagagatacagctccagatggaactcctgatttatcaagtaaaaattatattatccttctggcagaaggcaggcttgtcaacctaggcaatgctacaggccatccaagtaggattatggatggttcatttgcaaatcaggtattggctcaaattcatttatataaacaaggttttgcaaatattaatgatgctgataaaaaagctgagatgataactgttgaggttcttcctaaaaaattagatgaagaggttgcaagtttaatggttgagggttttggaggtgttgtaacaaaattaactcaaaatcaggctgattatattaatgttcccaaagacggcccatttaaagaagaagagtataaatattaat

SEQ ID NO: 261642 - DNA, 634 bp, Unknown
  Bacterial polypeptide expressing nucleotide sequence isolated from the Sargasso Sea
gatggatatgaggttgttttaccctatatagatggaattaataatgactctgaagattcaatgaataaagctctattggaggatactgatctaattgtcacaacaactggtaactacaaagtttgtgataaacatatgcttaaagctttgaaaaatggagcagtggtttgcaatataggtcattttgataccgagatagatacacaatacatgcgcgatgaatggcagtgggaagaggtaaaaccgcaagttcataagatctttcgagacactaaagctggagaaacacccgatatggatagcgaagactatattattcttctatcagaaggacgacttgttaatctaggaaatgcaacaggtcatccgtcaaggattatggatggctcttttgcaaatcaagtacttgctcaaatgtatctatacgaaaagaaatttgctcaaattaatgacgaagataagaagcaagagcttatccgggtcgaagtattacctaagaaattggatgaagaagtagcttcttatatggtagaaggatttggtggagtcatgacaaaactttcttctgatcaagccgaatacataaatgtacccgaggagggtcctttcaagtcggaaatatataaatactaat

SEQ ID NO: 261643 - DNA, 916 bp, Unknown
  Bacterial polypeptide expressing nucleotide sequence isolated from the Sargasso Sea
tctgttattagatgatggcggtgacttaacagctataatgcataatgattatccacaattaatgagcgatattagaggtgtatctgaagaaactacaactggtgttcacagactctatgaaatggaaaaaaataattcactcaaagttccggctctaaatgtaaatgattcagtaactaaatcaaaatttgataatttatatggttgtagagaatctcttgtcgatggaattaaaagagctacagacagtatgattgctggcaagttagctattgtatgtgggtatggtgatgtaggcaaaggctcagctgcatcattgagaggattaggagcgaatgttctcattagtgagatagaccctatatgtgcacttcaagcatctatggaaggttaccaagttgttactatagaagattatttagataaaattgatatttttgtaactgcaacagggaatttaaatgttattcagcatgatcatatggctaatatgaaaaatggcgcgattgtatgtaatattggacattttgataatgaaatagatgttgagagtctaagaaaatatgaatgggagaatgtaaagccacaagtagatcagataatctttccggatgggaaaagaataattctactggcagaaggtagattgattaatctaggttgtgcgaccggacatccaagctttgttatgtcttgttcatttacaaatcaagtgatggcacaaattgagctatggaaaaattatagcaaatatgaaaataaagtttatgttctgcctaaaaatcttgatgaaaaagttgcgaaacttcatctagaaaaacttggtgtcaaattaactagactctctaaagaacaagctgagtacatcaacgttgaccaggacgggccattcaaaaaagatgagtacaggtattag

SEQ ID NO: 261644 - DNA, 1117 bp, Unknown
  Bacterial polypeptide expressing nucleotide sequence isolated from the Sargasso Sea
ttggaattcaatgattacaaagttgctgatatagggcttgcggactggggacgaaaagaaatagaaatcgccgaaacagaaatgcctggtttaatcacgctgagaaatgagttaagtaaatccaaacccctaaaaggggcaaatattgttggctgtcttcatatgaccattcaaactgcagtattgattgaaactttaattgatttaggtgcaacagtcagatggtcatcctgtaatattttctctactcaagaccatgctgcggctgcaatcgctagcaaaaatatacctgtttttgcttggaagggtgaaactgaagaagaatacgattggtgtattagacaaacaattgaaggatcaccagactggaaaccaaatataattctagatgacggcggtgacttaacaaagattatacacgaagaataccaagatttattagatgatattcgtggattatctgaagaaactacaacaggtgttttaaggctttatgaaatggaaaaggataatactctatctgtaccagctattaatgttaatgactcagtcacaaaatcaaaatttgataacttttatggatgtagagaaagccttgtagatggtttaaaaagagcaactgatgttatgctagctggaaaagttgcagttgtttgtggatttggcgatgttggaaaagggtcagcagaatcacttcgttcacaaggggctagggtaattgttacagaaattgatccaatttgtgcacttcaagcctctatggaaggctatgaagtatcaactgtaaatgatgtagctaagacggcagatatttttgttaccgcaacaggtaataaagatgttataactctcgaacatatgcgagaaatgaaagatagagcaattgttgcaaatattggtcatttcgatagcgaaatacaagtctcagaattaaaaaacttcaaatgggacaatataaaaccacaagttgatgaaattgaatttcctgatggtaaaaaaattattttattagctgagggaagattagttaatctaggttgtgcaactggacaccctagttttgttatgagtgcatcattttcaaatcaagttttagcacagatcgaaatttggaata

SEQ ID NO: 261645 - DNA, 1396 bp, Unknown
  Bacterial polypeptide expressing nucleotide sequence isolated from the Sargasso Sea
atggaaaatgattataaagttgcagatgtgagtcttgcagaattcggaagaagagagatttctcttgctgaaaatgaaatgcctgcattaatggctctaaggacaaagtataaggatgcgcaaccccttgcgggtgcaaaagttatgggatgcattcatatgactatccaaacagctgtattaatcgaaacattaattgatcttggtgcagaagtccgttggtctggttgcaatattttttccactcaagatcatgccgcagcagctattgccgcagctgggattcctgtttttgcctggaaaggccaaactgatgaggaatttgactggtgcattgaacaaacaatagttaaagatggaataccttgggatgcaaatatgattctagatgatggaggagatctgactcatatggttcattcaaaatttcctgaaatgctcgaaaacattcatgggatttcagaagaaactacgactggcgttcacagattaaaggcgatgcttgaaaaaaatgagcttaaagttccagcgataaatgtaaatgattctgtcactaaatcaaaaaatgataataagtatggttgcaggcatagtcttaatgatgcgattaaaagaggcacagatatgttcctttcttctaagaaagcattggtaatcggatatggggatgttggcaaaggttctgctttaagtcttgcacaagagggaatgattgttagagttgtagagtctgatcccatatgcgctatgcaagcctgcatggatggttttgaggtagtgtctacttataacaatggaatcgtaactagagacgtaaaagacatcaatatcgcagtccttgaagatactgaccttatagttacaactacaggaaatgtgaatgtttgtgatgaagcaatgttacgttcagtaaaaaatacagctgttatatgtaacattggtcactttgataatgaaattgatactcagtacatgagagacaagtggtattgggaagaaattaaaccgcaagttcatagagtatttagagatacttctccatcagatacaccagaccttcaaagcaaagactatgtcattcttttggctgaaggtagattagttaacctaggaaatgcaacgggtcatcctagcagaataatggatggatcatttgctaatcaagttttggctcagatgcacttgtataaacaaggttttgcaaacatcaatgatgctgataagcaaaatgaaatgataacagtcgaagttcttccaaaaaaattggatgaggaagttgccgagctcatggttcaaggttttggtggaacgataactaagctaactgatgaacaggccgattacattagtgttccagttgatggtccatttaaagaagaagagtataaatactgat

SEQ ID NO: 261646 - DNA, 1420 bp, Unknown
  Bacterial polypeptide expressing nucleotide sequence isolated from the Sargasso Sea
tatggttatcgctaattcagtcaaagcctctataccaaattacgtaattgctgatatctccttaactgatttcggtcgtaaagaaattaaaattgctgaaacggaaatgcctggactcatggcgcttagagataaatatcaatctgaaaagccactcaaaggtgcaaaaatagctggaagtttgcatatgacaattcagactgcagtcttaatagaaactcttgttgaacttggcgcacaagtgaaatgggcttcatgcaatattttttcaactcaagatcatgcggctgctgctatcgcagatcaaggaatttctgtatacgcaaaaaaaggtgagacacttgatgaatattggcaatatacccactatattcttgattggggttcagactctccaaatatgattcttgatgatgggggagatgcaactggtttattgatactcggtagtaaagcggaaaaagatttatctgttttagataatcccggtaatgaagaagaaattgctttattcaattctattaagtctaagttggaaaatgatagtgacttctattcaagaattaaaaataatatcattggcgtaactgaagaaacgacaacaggagttgcaagactttatcaactgcaaaagcaaaatgctttacctttccctgccatcaacgttaatgattcagtaactaagagcaaatttgataatttatatggctgtcgagaatctctagttgacagcataaagcgtgccaccgatgtgatgattgctgggaaagttgctttagtaatgggttttggagatgtaggtaaaggttcagctcagtctctaagaggacttggtgcaattgtaaaagttgctgaagttgatccaatttgtgctcttcaagcggcaatggaaggttttagcgttgttacgctagacgatgttgtggaagatatagatatatttgttacagcaactggtaactatcaggtaattacaaatgaaaatctcgtcaagatgaaagatgaggccatagtatgtaatattggtcatttcgataatgaaattgatgtggcttcattgaaagattatccatgggaaaatattaagccgcaggttgatcacataactttacccagtggcaataaaataattcttttagccgaaggtagattagttaacttaggttgtgctactggacatccaagctttgttatgagtaattcttttactaaccaagtactagctcagattgaacttttcaataagtcagaaaaatatgctagagaggtttatgttttaccaaagcatttagatgaaatggtagctagattacatctagataaaattggtgcaaaattaacaaaattaaccaaggaacaggctgactatatcaatgtctctgttgaaggaccttataaaccagagctttatagatactaa

SEQ ID NO: 261647 - DNA, 1288 bp, Unknown
  Bacterial polypeptide expressing nucleotide sequence isolated from the Sargasso Sea
catggaagattataaagtaaaagacattgcccaagctgaatttggtagaaaagaaatatcaatagctgaaagtgaaatgcctggtttaatggctttacgagaagagtattctaaagaaaagccattaaaaggtgcaagaataattggatgtctacatatgacaattcaaacagctgtattaattgaaactttagttgcattgggtgctgaagtgagatggtcttcttgtaacattttttcaactcaagatcatgcggctgcagccatcgctaaagctgggatacctgtttacgcttggaaaggtgaaacagaagaggaatatttatggtgtattaaacaaactataattggaaaaccagattggaaaccaaacatgttattagatgacggtggagatttaacagctatcatgcacaatgaatatcaggatttaatgaaagatataaagggtgtttcagaagagactaccactggaattaaagcacttaataaaatggaaaaagataaatcgcttttagttccagcaataaacgtgaatgactctgttacaaaatcaaaatttgataatttatatggatgcagagaaagcttagttgacggaataagaagagctactgatgtaatgatgtctggaaaaattgcaattgttgctggttttggagacgttggaaaaggaagtgctgcatctttaagacaaagtggtgctagagttttagttactgaggcagatccaatttgtgctctccaagctgcaatggaaggttatgaagtggtattaatggaggaggctataagtagagcggatatagttgtaacagccacaggtaacaaagatattgttaccgcagaccatatgagagatatgaaggatagagcaatcttatgtaatattggtcactttgataatgaaatacaagttgaggctcttaagaattataagtggactgaagtaaaacctcaagtgcatgaaatagagttgcctagtggtaaaagaattattcttttagctgaaggaagattagttaatcttggttgtgcaactggacatccaagttttgtaatgagtgcatcatttactaatcaagttattgctcaaatagaactttggcataatcataaaaattatgaaaataaagtttatgtacttccaaaacatttagatgaaaaagtagcaactttgcatttaaaaaaagttggagcaaaactaacaaaattatcaaaagagcaagcagattatataagcgttggaacagaaggtcctttcaaaccagatgcctatcgctattaa

SEQ ID NO: 261648 - DNA, 544 bp, Unknown
  Bacterial polypeptide expressing nucleotide sequence isolated from the Sargasso Sea
atggcaaatgaggattacaaagtagcagatataaatcttgcagatttcggtagaaaagagatttcactcgctgaaactgaaatgcctggattaatggcattaagaagtgaatataaaggaaaaaaaccacttgagggggcaagaatcctcggctgtcttcatatgaccatacaaactgctgtgctaattgaaacattagtagaattaggtgctgatgttagatggtcatcttgtaatatattttcaacacaagatcatgctgcagctgcaatagcaaaagcaggtataccagtttatgcatggaaaggcgaaacagaagaagaatattggtggtgtgtaagacaaacgattgaaggtaaagagggttggaagccaaatatgattcttgacgatggcggtgatcttacaagtttaatgcataaagaatataatgacttattaaaagaagtaaaagggctctcagaggaaacaacaacaggtgtactcgcattaaaaaaaatggaaagtgatggtacgttaatggtgccagctattaatgtaaatg

SEQ ID NO: 261649 - DNA, 565 bp, Unknown
  Bacterial polypeptide expressing nucleotide sequence isolated from the Sargasso Sea
ctgccttacaaagttgctgacatgtctctggccgaatggggtcgtaaagagatcacactcgctgaaaatgagatgcctgggctcatggctctccgcgaaaagtacggtgattcaaagccactcgctggcgcccgaattgctggatgtcttcacatgacaattcaaactgctgtgcttattgagactcttgttgaattaggcgcagaggtcacgtggagcagttgcaacatctttagcacgcaggatcatgctgctgccgcgatagccgctgcaggaatacccgtctacgcatggaagggtgagtctgatgaagaatttgagtggtgtatcgagcagactctcatgtttccttcagggaaaccactgaacatgattctcgatgatggtggtgaccttactgccatggtccacgagcaatttcctgaattgcttacgaacatctacggtgtcagcgaggaaacaaccgctggaattcatcgcctcgaggtgctgaacaagactggtgctcttaaagtcccagcaattaacgtcaatgacagtgctacaaagagcaagttcgataacc

SEQ ID NO: 261650 - DNA, 1288 bp, Unknown
  Bacterial polypeptide expressing nucleotide sequence isolated from the Sargasso Sea
aatgagtgattataaagtaaaagatataaatgaagcagaatttggaagaaaagaaatctctttagcagagactgaaatgccaggattaatggctttaagaaaagaatataagggaaaacatcctcttaaaggagcaagaattttaggttgtttgcacatgacaattcaaacagcagttttaattgaaacactagtcgatcttggtgcagaagtaagatggtcttcatgtaatatattttccactcaagatcatgccgcagcagcaatagcaaaagcaggtatacctgtatttgcatggaagggagagactgaagaagaatattggtggtgtgtaagacaaacaatagaaggtaaaaaagattggaagccaaatatgattttagacgatggtggcgatttaactgctcttatgcataaagattataaagatttattaaaagatataaaaggcttaagcgaagaaacaacaaccggagttttggctttgaaaaaaatggaagagcagggaacattattagttcctgcaattaacgtaaacgactcagtaacaaaatctaaatttgataatttatatggttgcagagaaagtttagtagatggaattaaaagagcaactgatgttatgatgtcaggaaaagttgcaatagtagcaggttttggtgacgttggaaaaggaagcgccgcttcattacgtcaaagcggtgccagagtaatggttaccgaaacagatccaatatgtgcacttcaagcagcgatggaaggttacgaagttgttttgatggatgagatgattggacaggcagatattgttgttactgctactggaaataaagatatagttactgcagatcatatgagagctatgaaggatagatcgatcttatgtaatatcggacactttgataacgaaatacaagtagaagcgttaaaaaattataagtgggatgaaattaaacctcaagttcatgaaattacatttcctgataataaaagacttattttattagctgaaggaagactagttaatttagggtgtgcaactggtcacccaagtttcgttatgagtgcttcatttactaatcaggttacagcgcaaatagaattatggaataattctgataagtatgaaaataaggtatatgtattaccaaaacatcttgatgagaaagttgcaaggttacatttagaaaaagttggagcaaaattaactaaattatcaaaagaacaagctgattatattagtgttacaacggaaggaccttataaaccagatgcttaccgctactaa

SEQ ID NO: 261651 - DNA, 916 bp, Unknown
  Bacterial polypeptide expressing nucleotide sequence isolated from the Sargasso Sea
catgattttagatgatggaggagatttaacaggtctaatgcataaggaatataaagatatgttaaagagtgttaagggaatttcagaagaaacaacaacaggagtgttagcgcttaaaaaaatggagtcaaataaacaattaatggttcctgcattcaatgttaacgactcagttacaaaatcaaaatttgataacttatacggatgcagagaaagtttagttgatggaattaaaagagctacagatgtgatgatgtcaggaaaagtagcggtcgttgccggatttggagatgttggtaaaggtagcgcagcctccttacgccaagcaggtgcaagagtaatggtaacagaaacagatccaatttgtgcattacaagcagcgatggaaggttatgaagtagttttaatggaggatgcaatcaaagacgccgatattgttgtaactgctaccggtaataaagatatagtaacagcagatcatatgagaaatatgaaagatagagctatcttgtgtaacattggacattttgataacgaaattcaggttgaagctttgaaaaactataaatgggatgaaataaaacctcaggttcatgaaatagagttaccaagtaaaaaaagaattattttattagcggagggaagactcgtaaatcttggatgcgcaacaggtcacccaagttttgttatgagcgcatcatttacaaatcaagtcatagcacaaatagaactctggaataattcagataaatatgaaaataaagtttatgtattaccaaaacacttagatgaaaaagttgcaatgttgcatttagaaaaagttggtgcaaaattaactaaaatgtctaaagatcaagcagattatattagcgttaaaccatcaggaccatttaaaccagatacttaccgctactaa

SEQ ID NO: 261652 - DNA, 347 bp, Unknown
  Bacterial polypeptide expressing nucleotide sequence isolated from the Sargasso Sea
tccagatctctcaagtaaaaactatctaatcttgcttgctgaaggaaggcttgtaaatcttggaaatgctactgggcacccaagcagaattatggatggctccttcgcaaatcaggtgcttgctcaaattcatttgtacaagcaaggttttgcaaatataaatgacgctgataaaagggctgaaatgataactgtagaagttctgcctaaaaagcttgatgaagaagttgcaagcttgatggtacagggatttggtgggactgtaacaaagctaacccaagaccaggcagattacattaatgttcctaaagacgggccatttaaagaagaaacttataaatattaaa

SEQ ID NO: 261653 - DNA, 733 bp, Unknown
  Bacterial polypeptide expressing nucleotide sequence isolated from the Sargasso Sea
tatgccagattataaagtaaaagacatatcccaagctgaattcggaagaaaagaaatttctttagctgaaaccgagatgccaggtttaatggcgctgagaaaagagtataaaggcaaatctccattaaaaggtgcaaagattctgggttgtcttcacatgactattcaaactgctgttttaatcgaaacattagtagatcttggggccgaggtcagatggtcttcatgtaatatattttccacacaagatcacgcagcggcagctattgcaaaagctggtattccagtatttgcttggaaaggtgaaacagaagaggagtattggtggtgtgtaaaacaaactatcgaaggcaaaaaagattggaaacctaacatgatattagatgatggtggagatcttactgctctaatgcataaagattataaagaattattaaaggatataaaaggtttaagtgaggagacaacaacgggagttttagctctcaaaaaaatggaagagcaaggaactttgatggtgccagcaataaatgtaaatgactcagtcacaaaatcaaaattcgataacttgtatggatgtagagaaagtttagtggatggtattaagcgagctacagatgttatgatgtcaggaaaagttgcgatcgttgcaggttttggtgatgttggtaaaggaagcgctgcatctttaagacaaagtggtgcaagagtaatgataacagaaacagacccc

SEQ ID NO: 261654 - DNA, 427 bp, Unknown
  Bacterial polypeptide expressing nucleotide sequence isolated from the Sargasso Sea
tatgaaaagtggagccattgtctgtaatattggccatttcgataacgaaattgatgtagctagcttaaaagattatcaatgggaaaatataaaacctcaagttgatgaaataacatttcctgatgggaagaaaatcgttcttttagcagaaggaagattgattaatcttggttgtgctacgggacatcccagctttgttatgtcctgctctttcacgaatcaagtgatggcgcaaatcgaactctgggaaaatcattctaaatatgaaaaagaagtttatgtgttgcccaaacatctagacgaaaaggtagctttgctccacttagataaattagatgcaaagattactactctgactgatgaacaagccgagtatataggtgtaggtaaaaacggaccatttaagaaagatacttatagatactaa

SEQ ID NO: 261655 - DNA, 1252 bp, Unknown
  Bacterial polypeptide expressing nucleotide sequence isolated from the Sargasso Sea
aatagctggtagccttcatatgactattcagactgcagttttaatagaaactcttgttgatcttggtgcagaagttaaatgggcttcatgtaatattttttcaacccaagatcatgctgctgcagctatcgcaaatcagggaatttctgtatacgcaaaaaaaggtgaaactctcgatgagtattggcaatatacccactatatacttgattggggttcagactctccaaatatgattcttgatgatgggggagatgcaaccggcctattgatactaggtagtaaagcagagaaagatttatctgttctagataatcctggaaatgaagaagaaattgctttattcaaatctattaagactaagttagaaaatgatagtgacttctattctagaatcaagagtaatattattggtgtcactgaagaaactacaacgggagtagcaagactttatcaacttcaaaagcaaaatgctttaccatttccagctatcaacgttaatgattcagtaactaagagcaaatttgataatttatatggctgtcgggaatctctggttgacagcataaagcgtgcaactgatgtgatgattgctgggaaggttgctttagtaatgggttttggagatgtaggtaaaggttcagcccaatctctaagagggcttggtgcaattgtaaaagttgctgaggttgatccaatttgtgctcttcaagcggcaatggaaggttttagcgttgttacattagacgatgttgtggaagatatagatatatttgttacagcaactgggaactatcaggtaataacaaacaaaaatcttgtcaagatgaaaaatgaggccatagtctgtaatattggccatttcgataatgaaattgatgtagcctcattaaaagattatccatgggaaaatattaagccgcaggttgatcacataactttaccgagtggcaataaaataatccttttagctgaaggtagattagttaacttaggttgtgccactggacatccaagttttgttatgagtaactcttttactaatcaagtactagctcaaattgaactttttaataagtcagatgaatactctaaagaagtttatgtactgccaaaacatttagatgaaatggtagctagattacatctagataaaattggtgcaaaattaacaaaattgactaaagagcaggctgattacatcaatgtggctgttgaagggccatataagccagaactttatagatattaa

SEQ ID NO: 261656 - DNA, 406 bp, Unknown
  Bacterial polypeptide expressing nucleotide sequence isolated from the Sargasso Sea
tatggctgaaacagcaaaagaaaataaaattgatttgatggatgacttcaaagtggcggacatttctctagccgaatggggcgagaaggaaattaagatcgcagaaactgaaatgcctggattgatgagtatcagagaggaatttggtacagagaagccattgaagggtgctaggattgccggatgtttacacatgacaattcaaacagcagtattgattgaaaccctcattgaacttggtgccgatattcggtggtcttcttgcaacattttttcgacacaagaccatgccgcagctgcgcttgctgcaaaaggtattcctatcttcgcatggaaagatgagagtgaagaagaatactggtggtgtgttgagcaaacaatcaaaggaccaaatggttggacgcca

SEQ ID NO: 261657 - DNA, 1291 bp, Unknown
  Bacterial polypeptide expressing nucleotide sequence isolated from the Sargasso Sea
atgatccgggattataaagtaaaagatattaacgaagcagattttggaagaaaagaaatttctttagcagaaacagaaatgccaggacttatggctctccgaaaagagtataaaggtaaaaaacctttaaagggtgcaaaaatcttaggttgtcttcatatgactatacaaacagcagtattaattgaaactttagtggaattgggagcagaagttaggtggtcttcttgtaatattttttcaacacaagatcatgcagctgcggcaatagccaaagcggacattcctgtctttgcatggaaaggtgagacagaagaagaatactggtggtgcattaagcaaacaattgaaggaaaaaaagactggaaaccaaatatgattttagacgacggtggtgaccttacagctttaatgcataaagaatataaaaatttgttaaaagatgtaaagggtgtttcagaagaaactacaactggtgttttagcccttaaaaaaatggagactaataaagagctattaatacctgccataaatgtaaatgactcggtaacaaaatctaaattcgataacctttatggttgtagagaaagtttagtagacggaattaaaagagcaactgatataatgatgtcaggtaaagtagctattgtcgctggatttggtgatgttggcaaaggaagtgctgcttctttacgtcaagcaggtgcaagagttatggtaaccgagacagacccgatatgcgcgttacaagctgctatggaaggttacgaagttgttgttatggatgaagctataaaagatgctgatattgttgttactgctacaggaaataaagacatagttacagctgatcatatgagagatatgaaagatagagcaatactttgcaacataggtcactttgataatgaaattcaagttgaggcattaaaaaattacaaatggaatgaaataaaaccgcaagtgcacgaaatagaattacctaataaaaaaaggatcattcttttagctgagggaagactggtaaacttgggatgtgctacagggcaccctagttttgtaatgagcgcttcgtttacaaatcaagtaattgctcaaattgaactatggaacaattcagataagtatgaaaagaaagtttatgtacttccaaaacatctcgacgaaaaagttgccatgcttcatttagaaaaagtaggtgcaaagttaactaaaatgtcaaaagagcaagcagattatattagcgttaaaccatcaggaccatttaaaccagatacttaccgctactaaa

SEQ ID NO: 261658 - DNA, 1156 bp, Unknown
  Bacterial polypeptide expressing nucleotide sequence isolated from the Sargasso Sea
gatgagtgattttaaagtaaaagatatatctttagcagagtatggtaggcaagaaattttgttagctcaggatgaaatgcctgctttaatgcagcttagagataactacagagatgaacaacctcttaaaggtgcgaaaataatgggctgtatacatatgacaattcaaactgcagttctcatagaaacattaattgatttgggcgctgaagtaaggtggtcgtcgtgcaatattttctcaactcaagatcatgcagctgctgcaattgctgatcaaggtattcctgtttttgcttggaaaggcgaaacagaagaagaatatgaatggtgtctagatcaaaccattaataaagatggtaaaccttgggaagcaaatttaattttagatgatggaggcgatcttactcttaaagtgcataaagattaccctgaaatgctctcaaaaatccatggaatttctgaagaaacaacgaccggagttaaacgattaaaagaaatgctagaaagcggcgaattgaaagttccagtcataaatgtaaatgactctattactaaatcaaaaaatgataataaatatggctgtaggcatggtcttgatgatgcgataaaaagaggcacagatatgcttttatctggcaagaaggctcttgtaattggttatggtgatgtaggcaaagggtctgcagactctcttgcgcagcaaaaaatgatagtggatgttacagaagttgatccaatatgtgctatgcaggcatgttttgacggtttctctgtagtctctgcttataaaggaggagaagttactaatgatggaacaaaactcaaccaagaattacttaaaaaatatgatttgattgttacaacaactggcaatgtaaatgttcttgataaatttatgcttgatgccctaaaatctggctgtgtgatttgcaatattggccattttgacaatgaaatagatattaagcatcttaaaacctttgaatggtatgaagttaagtcaggtgttcataaagtaaaaagatctgacaatgattacttattgctattaggtgagggtaggcttgtaaacttagccttagcaacaggtcacccaagtcgtgtaatggatggctctttttgcaaatcagtattggctcaaattatgttattttaa

SEQ ID NO: 261659 - DNA, 1149 bp, Unknown
  Bacterial polypeptide expressing nucleotide sequence isolated from the Sargasso Sea
ttctaggctgtttacacatgacaattcaaactgcagttctcattgaaactttggttcaattgggtgggaatgtaagatggtcttcatgtaatattttttcaactcaagatcacgctgcagcagcaatagcaaaagtgggaatacccgtatttgcttggaagggtgaaactgaaaaagagtactggtggtgcattaagcaaactatcgaaggtaaaaaagattggaagccaaatatgttacttgatgatggaggagacctaactgcattaatgcacaaagaatataaggacctcttaaaatctgtaagaggattatcagaagaaactaccacaggaattaaagcgttaaaaaaaatggaagcacaaaaaaaactcttagttccagcaattaatgtgaacgactcagttaccaaatctaaatttgataatttatatggttgtagagaaagtttggttgatggaataaaaagagccactgatgttatgatgtcaggaaaaactgcaattgttgccggatttggagatgtgggaaaaggcagtgctgcatcactaagacaaagtggcgccagggtgatggtaacagaggctgatcctatctgtgctttgcaagcagcaatggaaggatatgaggtagtattaatggatgatgctattggaaatgccgatatagtagtcacagcaactggaaataaagatatcattactgcagatcatattagaaaaatgaaagatagagctattctttgtaatattgggcattttgataatgaaattcaagttgacgctttaagaaactacaaatgggatgaaattaaacctcaagttcacgagattgaacttcctaataaaaaaagaataattcttttagcggaaggaagattagtaaatctaggttgtgcaacgggacacccaagctttgttatgagcgcatcttttacaaatcaagtaattgctcaaatagaactttggaataatcataaaaaatatgaaaacaaagtatatgttcttccaaagcatttagatgaaaaagttgcgatgctgcatttaaataaagttggggctaaattaacaaaactttctaaagctcaagcagattatattggcgtagactctcaaggaccatttaaaactgacagctatcgctactaaa

SEQ ID NO: 261660 - DNA, 565 bp, Unknown
  Bacterial polypeptide expressing nucleotide sequence isolated from the Sargasso Sea
tatgagtaatgactacaaagtagctgatatcgaacttgctgattttggaagaagagaaatttctcttgctgaaaatgaaatgcctgcactaatggcattaagggagaaatacaaagctgagcaacctctcgctggcgcaaagattatgggctgtattcatatgactatccaaaccgcagtattgatggaaacattagttgatcttggagctgagcttagatggtcaggatgtaatattttttcaactcaagatcatgctgctgcagctatggcaaaagctggtatcccagtttttgcatggaaaggacaaaccgacgaagaatttgattggtgtattgagcaaacaatcctaaaagatggaaaaccatgggatgcgaacatgatcttagatgatggaggagatcttactcatatggttcatacaagatttgcagaaatgcttgaaacaatccatggaatatcggaggaaaccactacaggagttcatagactcaaagcaatgcttgaaaaaggtgaacttaaggttccagctattaatgtaaatgactctgtcacaaaggcaaaa

SEQ ID NO: 261661 - DNA, 1288 bp, Unknown
  Bacterial polypeptide expressing nucleotide sequence isolated from the Sargasso Sea
atggaagattttaaagttaaagatatatcgcaagctgatttcggtcgaaaagaaatctcattagcagaaacagaaatgccaggacttatggcattaagaaaagaatataagggaaaactcccacttaaaggagcaaaaattttaggctgtttacatatgactattcaaacagctgtattaattgaaacgttagttgaattaggagcggaagtaagatggtcatcttgcaatattttttcaacacaagatcatgccgccgccgcaatagctaaagtaggaataccagtatttgcttggaaaggcgagaccgaagaggaatattggtggtgtgtgaagcaaactattgagggaaaaaaggactggaaaccaaatatgattttggatgatggtggagatttaaccgcacttatgcacaaagaatataaagatttattaaaatcagttaaaggcttatcagaagaaactactacaggcgttttggcacttaaaaaaatggagtcagagggaaaactcttagttcctgcaatcaacgtaaatgattctgtaacaaaatcaaaatttgataacctgtatggatgtagagaaagtttagttgatggaattaaaagagcaacagatgttatgatgtcaggtaaggttgctatagttgctgggtttggtgatgttggtaaaggaagtgctgcatctttacgacaaagtggagcgagagttatggttacagaaacagatccaatttgtgctcttcaagcagcaatggaaggttatgaagttgtattgttagatgaaatgattaaagaagctgatatagttgttactgcaactggaaataaagatatagttacagcagatcacatgagagaaatgaaagacagagctatactttgtaatattggtcactttgataatgaaattcaagttgaagcattaaagaattataaatgggatgaaattaaacctcaagttcatgaaataacattgccaagtaaaaaaagaataattttattagcagaaggaagattagtaaatttaggatgtgcaactggacacccaagctttgttatgagtgcttcatttacaaaccaagtcactgcacaaatagaactgtggaataattctgataaatatgaaaagaaagtttatgttctaccaaaacatctagacgaaaaagttgccagacttcatctagataaagttggtgcaaagttaacaaaactatctaaagatcaggcagattatataagtgtaaaagaagaaggaccatacaaaccagatgcctatcgctactaga

SEQ ID NO: 261662 - DNA, 229 bp, Unknown
  Bacterial polypeptide expressing nucleotide sequence isolated from the Sargasso Sea
aatgagtgcttcttttacaaaccaagtaacagcacaaatcgaattatggaataattcagaaaattacgaaaaaaaagtttatgtgcttcctaagcacttggacgaaaaggttgcaagactacacttggaaaaggtaggagctaaacttacacaattatcaaaagatcaagcagactatattagtgtaactccagagggaccctataaacctgaagcttatagatactaa

SEQ ID NO: 261663 - DNA, 1267 bp, Unknown
  Bacterial polypeptide expressing nucleotide sequence isolated from the Sargasso Sea
aggttctttgcacatgacaattgaaaccgctgtgcttattgaaacactagtggatttaggagctgatgtaagatgggctagttgtaatattttttcaactcaggatcatgcagctgcagcaattgcagatgcgggtgtgccggtttttgcttggaaaggcgaaacacttgaggaatactggtggtgcacaatgcaggctttaactttcccagatggttctggcccagatttaatagtagacgatggcggggatgcaacgctattgattcacaaggggtatgagcttgaagaattttatgaaaaaaacaactacactcctgaagtaacaaccactatcgaagaagaacaggtaattgaaaagctattgagagatgtccttgaaaaaaacccaaatcactggcgcccggtggccaaaaatatcataggagtttccgaagaaacaacaacaggcgttcataggttagtacaaatggataaagatggccatctacttttcccagcatacaatgtcaatgactcggtgaccaaagcaaagtttgataatgtttatggatgtagagaatctcttgcagatggtttaaaacgatcattggatatcatggtggcaggtaagaccgttctggtttgtggctatggagatgttggaaaaggttcggctcagtctcttcgtgggtatggtgcaagagtcttgatatctgagattgatccaatttgtgcgcttcaagcagcgatggaaggctttgaagtgactaccattgaagatgtgattagcgatgtccacatatttgtcactgctacaggtaataaggatattattacaaaagatcatatgtacaaaatgagagatcaggctgttgtttgtaacataggtcattttgataacgaaattcaggtgaatgcagttaatgatgacgaatctgtaaaaaaagaaaatataaaaccacagttagatctctacacatttccggatgggcatcaaatttttatgcttgctgagggtaggttaatgaaccttggctgtgctacaggtcatcctagtttcgtgatgtctaattcatttacaaatcaggttttagcacaaattgctcttgctaaagatgcgcctgaagtaggagtctatatgcttccaaaagagttagatgaagaggttgcaaggttacatttagaccatctaggtgcaaaactcactgagctttctgatgaccaagcggagtatataggtgttccaaaagaaggtcctttcaagcccgaacactataaatattaa

SEQ ID NO: 261664 - DNA, 885 bp, Unknown
  Bacterial polypeptide expressing nucleotide sequence isolated from the Sargasso Sea
catggaagattataaagtaaaagatatatcgctagctgactggggtagaaaagaaattaatattgcagaaactgaaatgccaggattaatggctttaagaaatgaatataaaaaatcaaaaccattaaaaggagcaaaaattctagggtgcttacatatgacaatacaaaccgcggttttgatagaaactttgaaagaccttggagcagaagttagatggagttcttgtaatatattttcaacacaagatcatgcagctgcagcaattgctaaaaaaggaatacctgtttttgcatggaagggaatgacagaaaaagaattttggtggtgtattgaacaaacaattattgggaagaaagattggaaaccaaatcttattttagatgatggtggtgatttaactaaagttatgcatgaaaaatataaacatttgcttaaaacagttaaaggattatcagaagaaacaacaacaggagttcacagattatatgatatggaaaagaaaaataaattattagtaccagcaataaatgttaatgatagtgttactaaatcgaaatttgataatttatacggatgtcgtgaaagtttagtcgatggtataagaagagcaacagatgtaatgttatcaggtaaagtagctgtagtttgcgggtatggcgacgtaggcaagggatccgcagcaagtttgagaaatggcggagcaagagtgatggtaacagaaattgacccaatttgtgcattacaggcctcaatggaggggtatgaagttgtaaaaattgaagatgtggtaaacaaaggtgatatattctgtaccgcaactggaaatgtggatgttataacattagaacatatgagaaaaatgaaagatagagcgatagtttg

SEQ ID NO: 261665 - DNA, 721 bp, Unknown
  Bacterial polypeptide expressing nucleotide sequence isolated from the Sargasso Sea
atgaaaactgatgaaattaaaaaaattggaacagactacaaagttgctgatatatcattagctgaatttggaaaaaaagagattaaaattgctgaaactgaaatgccaggtttaatggctatcagagaagagtataaaaataaaaaaccacttaagggtgctagaattattggttgtctccacatgacaatacaaacagctgttttaattgaaacattagttgatcttggtgcagatgtaagatggtcctcatgtaatattttttcaacccaagaccatgctgctgctgctatcgcagaccaggatatacccgtgtatgcatggaaaggtgaaactgaagaggaatataaatggtgcattgatcaaacaataaatggaccagaaggatggaaaccaaatatgttattagatgatggtggtgatctaactggaattatacatgaagaacataaagaacttcttgatgatattcttggtgtctcagaggaaaccactactggtgttcatagattatatgagatggaaaaaaataatgaactaaagatgcctgcgatgaatgttaatgactccgttacgaaatctaaatttgataatctttatggttgcagagaatctcttgttgatggaattaagagagccacagacacaatgatagcaggtaaattagctgtggtatgtggatatggtgatgttggcaaaggattccagctggttctttaag

SEQ ID NO: 261666 - DNA, 778 bp, Unknown
  Bacterial polypeptide expressing nucleotide sequence isolated from the Sargasso Sea
gcttccctttcccgctattaacgtaaatgactcggtaacaaagtccaagtttgataacaaatacggatgtaaagaatctctcgtcgatggcattcggagagccacagacacaatgatggcaggcaaaaccgcagtagtgtgtggctacggcgatgtaggaaaaggttcttctgcctcacttagaggtgcaggagcgcgtgttaaagtcacagaggttgatccaatttgcgcattacaggccgcgatggatggttttgaagtggttgtccttgaggatgtagtatcggatgctgatattttcatcacaactacaggaaacaaagatgtcatccgtatagaacacatgagagaaatgaaagatatggccattgtcggaaacatcggacatttcgataatgaaatccaagtttcacatctgcgaaatcacaagtggacaaatatcaaagaacaagtcgacatgatagagatgccaaatggtaaccggctaattctgttgtctgagggtcgccttttaaatctaggaaatgcaaccggccatccttcatttgtgatgtctgcatcattcactaatcaagtacttgcgcagattgaattatggacaaacggacaaaactacaaaaatgaagtgtttattttaccaaaacatcttgatgaaaaagtagcgcgccttcatttagatcgcattggcgtaaaattaactaagttagcagcagatcaagccgattatattggagttactccagagggaccatataaaccagagcattacagatattag

SEQ ID NO: 261667 - DNA, 770 bp, Unknown
  Bacterial polypeptide expressing nucleotide sequence isolated from the Sargasso Sea
aatgagtgactacaaggtaaaagatataaatgaagcagaatttggaagaaaagaaatctctttagcagagactgaaatgccaggcttaatggctttaagaaaagaatataagggaaaacatcctcttaaaggtgcgagaattttaggttgtttacacatgacaattcaaacagcagttttaattgaaacgttagtcgaccttggtgcagaagtaagatggtcttcatgtaatatattttctactcaagatcacgcagcagcggcaatagcaaaagctggtatacctgtatttgcttggaagggagagaccgaagaagaatattggtggtgtgtaagacaaacaatagaaggtaaaaaagactggaagccaaatatgattttagacgatggtggcgatctaaccgctcttatgcataaagattataaagatttgttaaaagatataaaaggcttaagcgaagaaactacaactggagttttagctttgaaaaaaatggaagagcagggaacattattggttcctgcaattaatgtaaacgactcagtaacaaaatctaaatttgataatttatatggttgcagagaaagtttagtagatggaattaaaagagcaactgatgttatgatgtcaggaaaagttgcaatagtagcaggttttggtgacgttggaaaaggaagcgccgcttcattacgtcaaagcggtgccagagtaatggttaccgaaacagatccaatatgtgcacttcaagcagcgatggaaggttacgaag

SEQ ID NO: 261668 - DNA, 430 bp, Unknown
  Bacterial polypeptide expressing nucleotide sequence isolated from the Sargasso Sea
aatggaaaatgattataaagtagctgatattaatttagctgaatttggcagacgagaaatctctcttgctgaaaatgaaatgccagccctaatggctctcagagaaaaatataaggatgaacaacccttggctggagctaaaataatgggttgtattcatatgaccattcagacagcagttttgatggaaactcttttggagcttggtgctgaacttagatggtcttcatgtaatatattttcaactcaagaccatgctgctgctgctatggctgcaaggggtgttcctgtttttgcatggaaaggtgaaactgaagaagaatatgaatggtgtatcgaacaaactatttgtaaagatggcaacccatgggatgcaaatatgattctcgatgatggcagtgacttgactgctatggtacatgaaaaattt

SEQ ID NO: 261669 - DNA, 1330 bp, Unknown
  Bacterial polypeptide expressing nucleotide sequence isolated from the Sargasso Sea
catgcaaaatagagtcaaaagtactgaaaatgctaaaaatgatttcaaagtagctgacctcagtttagctaaactaggccgaaagagtattaccatggcagaacatgaaatgccgggtctaatgatgcttcgtgatgagtataaagataaaaagccacttgcaggggctcgtattacaggatcattacatatgacagttgaaactgctgttttgatagaaactctactaattcttggagctgaagttcgctggtcttcatgtaatattttttcaacgcaagatgaggcagcagctgcaatggctgaagcaggtgtacccgtatttgcctggaagggagaaagtgaggaagaatattggtggtgccttgagcagactctggagtggcctgatggcaaaggaccaaatttacttttagatgatggaggtgatcttactggctacattcataaaaatcgtgcggatatgcttgaagggatctatggggtttcagaagaaacgacaactggcgttcatcgccttgaacaaatggaaagtctgggtgagttaaaaataccagcattcaacgttaatgattctgtaactaagagcaaatttgataatttgtacggttgtagagagtcacttattgatggaattaaacgtgcaacagatgtaatggttgctggaaaaattgcggttgttgcaggttatggagatgttgggaaaggttccgcacaatcattacggggtctgggagcacgtgtacttgttacagaaattgacccgatatgtgcattgcaggcctcaatggagggttttgaagttgtcacaatggaggacgcagcaccaattgcagatatttttgttaccacaacaggatgctctgatattatttgcagagaccacatggatgccatgaaagaccaggcaattgtctgtaatattggacattttgacatagaaattgatgtagcctcattaaataatgaccgttcacttaagaagataaatattaagccacaggttgaccagtatatttggcctgatgggaaacgaatgttactgctcgcagaaggtcggctggtaaatttgggatgtgctacaggtcatcctgcatttgttatgtcaaacagtttcacgaatcaaataatggcccaaattgatctttgggaaaatgggagcacttaccagaacaaagtatatgtccttccaaaattacttgatgaaaaagttgcacgtttccacctagaaaaattgggagtccggttaactcgacttaataaaaaacaggctgagtatttaaatattccaattgatggaccttacaaaccagatcattatcgttattga

SEQ ID NO: 261670 - DNA, 229 bp, Unknown
  Bacterial polypeptide expressing nucleotide sequence isolated from the Sargasso Sea
tatgagtgcatcatttactaaccaagttattgctcaaattgagctttggaataattcagataactatgaaaataaagtttatgtacttcctaaacacttagatgaaaaggtagcaaggcttcacttggataaagttggcgcaaaattaacgccactatctaaagagcaagctgactatataagtgtaacaccagagggaccatacaagcctcatgcttatcgctactag

SEQ ID NO: 261671 - DNA, 333 bp, Unknown
  Bacterial polypeptide expressing nucleotide sequence isolated from the Sargasso Sea
gttgaaatcaactaataagatttcaaagaataacgtagttgaaatcttaccatttattgttaaagatattaagctagctaagcttggaagagataaaattgacatttctgaaagagaaatgccaggtttaatgtctttacgaaataaatatgctaaaactaagccgctaaaaggttttaaacttaccggatctcttcatatgactattgagacagcaattttaattgaaacattaaaagatttaggtgctgatgttcgttgggctagttgtaatattttttctacacaagacgaagctgcagctgctatagctcaaactaaaactcctgtttt

SEQ ID NO: 261672 - DNA, 271 bp, Unknown
  Bacterial polypeptide expressing nucleotide sequence isolated from the Sargasso Sea
tatgattaataaagattacaaagttgctgatatggaattagcagattggggaagaaaagagatagttatagcccaatctgaaatgcctgccttaatgaaacttagagaaagatatggaaatgagcaacctctcaagggcgctaagattcttgggtgtatccatatgactattcagacggcagttttgatagaaaccttaaccgcactgggtgcagaagtaagatggtctggatgtaacattttttctactcaagatcatgcggcagcagcg

SEQ ID NO: 261673 - DNA, 730 bp, Unknown
  Bacterial polypeptide expressing nucleotide sequence isolated from the Sargasso Sea
atgagtgaagattttaaggttaaagacataagtttagctgattttggtgataaagaaattgcaatagctgaaacagaaatgcctggtttaatggcattaagagaagagtatggtgattctaaacctctagaaggggcgagaattgtaggttgtttacatatgacaatacaaactgcagttttgattgaaactctggtttttttaggtgctactgtaagatggagttcatgtaatattttttctactcaagatcacgctgctgcagcaatagctgccaaaggcattccagtatttgcttggaaaggaatgacagaagaagaattttggtggtgtattgagaaaacattagaaggcccagatggttggaagccaaatatgattttagatgatggtggagatgctacaaaaataattcatgaaaagtacccaaaaatgttggaagaaattttaggtttatcagaagaaacaactacaggtgtacaccgtttgaaagaaatggaaaaaaatggaacattaaaggtaccagcaataaatgttaatgactcagttactaagtctaaatttgacaacttatatggttgtaaggaaagtttagtagatggaataagaagaggtactgatgtaatgatggctggtaaaatagccgttgttgctggatatggagatgttggcaaaggttcagcagctagcttaagaggtgcaggtgcacgtgtatgtgtgactgaaatag

SEQ ID NO: 261674 - DNA, 341 bp, Unknown
  Bacterial polypeptide expressing nucleotide sequence isolated from the Sargasso Sea
catggaagattacaaagttaaagatatatcactggcagaatttggtcgtaaagaaatttcaattgccgagagtgagatgccaggcttaatggcactaagagaagaatattcaggcaaacatcctttaaaaggtgcaaaaattataggttgtcttcatatgacaattcaaacagcagttttaattgaaactttggtagaattaggtgcagaagtaagatggtcttcttgtaatattttttcaacacaagatcacgcagctgctgccatagcaaaagccggtatacctgtttatgcttggaagggtgagacagaggaggaatatgtttggtgtatcaaacaaa

SEQ ID NO: 261675 - DNA, 1006 bp, Unknown
  Bacterial polypeptide expressing nucleotide sequence isolated from the Sargasso Sea
atggccatccgtgaaaaacatgctaacgaaaggccccttgaaggagtgaggattaccggctctcttcacatgactatacaaactgccgtactgatcgagactttgactgagttgggcgcctcagttcggtgggctagttgcaacatcttctccacacaagatcacgctgctgcagcaatagccgattctggcgttcccgttttcgcttggaagggaatgtctttagaggaatattgggattgtactctcttagcactaagtcatccagacggcctaggacctcagttaattgtagacgatggtggagacgctactcttctaattcacaaaggtttcgaactagagaatggaagcgactgggtagaaacggcctctgaaaaccatgaggagcagtgtatcaaggacctcttaaagagggtgcattcggaatctccgaaattctggcatcaagtcgtggaggattgccgaggggtatccgaggaaactaccacaggagtccacagactgcaacagatggtggcggggggctcccttctattcccagcaataaacgtcaacgattctgtcaccaagtcgaagttcgacaacctctacggatgtagggagtctctggtcgacggtataaagagggccactgatgtcatgatatctgggaagactgccgtggtctgcgggtatggcgatgtcggcaagggctcagcacaggcactcaaatcccacggggccaaggtaattgtgaccgaggttgatccaatctgtgctcttcaagcatgcatggaaggattccaggttcttacccttgaggaaactcttggttccgcggacatatacgtcaccgccacgggcaacagagacgtaatcaccttggagcacatgggggagatgaaggaccaagcaatagtctgcaatatcggccacttcgacaatgagattcaggtagacagcctcgaggctagctcagcctcacacactaacatcaagccacaagtcgacaaatttacgtttc

SEQ ID NO: 261676 - DNA, 277 bp, Unknown
  Bacterial polypeptide expressing nucleotide sequence isolated from the Sargasso Sea
atggcaaatgaggattacaaagtagcagatataaatcttgcagatttcggtagaaaagagatttcactcgctgaaactgaaatgcctggattaatggcattaagaagtgaatataaaggaaaaaaaccacttgagggggcgagaattctaggctgtcttcatatgaccatacaaactgctgtgctaattgaaacattagtagaattaggcgcggatgtaagatggtcatcatgtaatatattttcaacacaagatcatgccgcagctgcaatagcaa

SEQ ID NO: 261677 - DNA, 796 bp, Unknown
  Bacterial polypeptide expressing nucleotide sequence isolated from the Sargasso Sea
aatggagtctaataatcaattactcataccagcattcaatgtgaacgactcagtaacaaaatcaaaattcgataatctatatggctgtcgagagagtttagttgatggtattaaaagagcgacagatttaatgatgtcaggtaaagtggcgattgttgcaggctttggagatgtaggaaaaggaagtgctgcttctttgcgtcaggcaggcgctagggttatggttactgaaacagatccaatatgtgctttacaagcagccatggagggttacgaagttgtcttaatggaagatgcaattaaacaagcagatatcgttgtcacggctactggtaacaaagatattgttacggctgaccatatgagaaatatgaaggacagagctattttgtgtaacattggtcacttcgataatgaaattcaagtcgaggcattaaaaaattacaaatgggatgaaattaaacctcaagttcatgaaattgaattacctagtaagaaaagaattatacttttagccgaaggcagattagttaatttgggttgtgctacaggacatcctagttttgttatgagtgcttcatttacaaaccaagtaattgcacaaattgagttatggaataattcaaataaatatgagaataaagtgtacgttttaccgaaacatcttgatgaaaaagttgcaatgcttcatttagaaaaagttggtgcaaaactaacaaaaatgtcaaaagaacaagcagattatattagcgttaaaccatcaggaccttttaagccggatacttatcgctactaa

SEQ ID NO: 261678 - DNA, 925 bp, Unknown
  Bacterial polypeptide expressing nucleotide sequence isolated from the Sargasso Sea
gaaccaaatatgattcttgatgatggtggtgatttaactgcacttatgcataaagattacaaagatttattaaaagatattaaaggattatctgaagaaacaacaactggagtgctagcacttaaaaagatggaatcacaaggaacgttaatggttccagcaattaatgttaatgattctgtgacaaagtctaaatttgataatttatatggctgtagagaaagtttagttgatggaataaaaagagcaacagatgtaatgatgtcaggtaaagtggcaattgttgcaggatttggtgatgttggaaaaggaagtgctgcatctctaagacaaagtggagcaagggtaatggtaactgaaactgatccaatatgtgctctacaagctgcaatggaaggttatgaagttgtgttaatggatgaaatgattaaagaggcagatattgttgttacagctacaggaaacaaagacatagtgactgcagatcatatgagagaaatgaaagacagagcaatactttgtaatattggacattttgataatgaaattcaagttgaagcattaaaaaattataaatgggatgaaattaagccacaagttcacgaaataactttgccaagcaagaaaagaataatattacttgcagaaggaagacttgttaatttaggttgtgctactggacatccaagttttgtgatgagtgcttcatttactaaccaagtaactgcccaaatagaactatggaataattcagataaatacgacaaaaaagtttatgttttaccaaaacacttggatgagaaagttgcgagattacacttagaaaaagtaggtgccaaacttacaaaaatgtcaaaagaccaggcagactatatcagcgtaacacctgatggaccttacaaaccagatgcctatcgctactaaa

SEQ ID NO: 261679 - DNA, 217 bp, Unknown
  Bacterial polypeptide expressing nucleotide sequence isolated from the Sargasso Sea
atggaagattataaagtaaaagacatagctcaagctgaatttggaagaaaagaaatatcaatagctgaaagtgaaatgcctggtttaatggctttaagagaagagtattctaaagaaaaaccattaaagggtgcgaggattataggatgtcttcatatgacaattcaaacggctgtgctaatcgaaaccttagttgaattaggtgctgaaatacgtt

SEQ ID NO: 261680 - DNA, 295 bp, Unknown
  Bacterial polypeptide expressing nucleotide sequence isolated from the Sargasso Sea
atgagtgattataaagttaaagatatatcccaagcagaatttggaagaaaagaaatctccctagcagagactgaaatgccaggactaatggcactaagaaatgagtataaaggaaaaagtcctcttaaaggtgctaaaattctaggatgtcttcacatgacaattcaaaccgcagttctaatagaaactcttgtagatttaggagctgaagttagatggtcttcatgtaatatattttcaacgcaagatcatgctgcagcggctatagcgaaagcaggtataccagtttttgcat

SEQ ID NO: 261681 - DNA, 697 bp, Unknown
  Bacterial polypeptide expressing nucleotide sequence isolated from the Sargasso Sea
atgagcgaagactttaaagttaaagatataaatttatcagattttggaagaaaagagatttcaatagcagagtcagaaatgccgggtctaatggcgcttcgaaaagaatatgaaggtaaaaaacctttaaagggagcaaaaattttgggatgcttgcacatgacaattcagactgcagttttaatcgaaactttggtcgaactaggcgctgacataagatggtcttcttgtaatattttttctacccaggatcatgctgctgcagctatagcaaagtcaggaattccagtttatgcttggaagggagaaacggaagaggagtattggtggtgtattaaaaaaaccattgaaggcaaaaaaggttgggagcccaacatgttactagacgatggtggcgatctcactgctgtgatgcacaaagattataagaatcttttaaaatcagtgagaggcttgtcagaagaaactacaacaggaattaaagctttgaagaaaatggaagtagaaaaaaagcttttagttccagcaatcaatgttaatgactcagtaaccaaatctaagtttgataatttatatggttgtagagaaagtttagtagacggaataaaaagagctacagatgtcatgatgtctggaaagacagcaatagttgctggattcggagatgttggaaaaggtagtgctgcttcttttagac

SEQ ID NO: 261682 - DNA, 1117 bp, Unknown
  Bacterial polypeptide expressing nucleotide sequence isolated from the Sargasso Sea
aggtgtgccagtatttgcctggaaaggtcaaaccgaagaagagtttaactggtgcatagaacaaacaattctgtctgatggaaaaccgtgggatgcaaatatgatccttgatgatggaggtgacctaactgccatggcacataataaatatcctgaaattcttgaaaatatccatggcattacagaggagacaactactggcgtcttaagacttaatgagatgatcgaaaaaggtgagctgaaagttccagcaatcaatgtgaatgactcagtaacaaaatcaaaggctgacaataaatatggcacaaggcatagcttaaatgatggaataaaaagaggaacagatatgtttctttctggtagaaaagccctggtaattggatatggcgatgtaggtaaaggatctgcacaaagtcttaaacaagaagggatggtggttagagtcactgaaatagatccaatttgtgccatgcaagcttgtatggatggttatgaggttgtttcaccttacatagatggaattaataatgactctgaagattcaataaataaagctctattggaggatactgatctaattgtcacaacaactggcaactacaaagtttgtgataaacatatgcttaaagctttgaaaaatggagcagtggtttgcaacataggtcattttgatactgagatagatacacaatacatgcgtgatgaatggcagtgggaagaggtaaaaccgcaagttcataagatctttagagatactaaagctggagaaatgcctgatatggatagcgaagactacattattcttctgtcagaaggacgacttgttaacttaggcaatgcaacagggcacccgtcaaggatcatggatggctcttttgcaaatcaagtacttgctcaaatgtatttatacgaaaagaaatttgctcaaattaatgatgaagaaaagaaacaagagcttatccgagttgaagtattgcctaagaaattggatgaagaggtagcttcttatatggtagaaggatttggcggagtcatgacgaaactatcttctgatcaagccgaatatatcaatgtacccgaagaggggcctttcaagtcagaaatatataaatactaa

SEQ ID NO: 261683 - DNA, 187 bp, Unknown
  Bacterial polypeptide expressing nucleotide sequence isolated from the Sargasso Sea
aatgagccaagattttaaagttaaagacattaaactagctgacttcggtagaaaagaaatttccattgccgagtcagaaatgcctggcttaatggcattaagaaaagaatttaagggaaagaaacctttaaagggagcaaatattataggctgtcttcatatgactattcaaacggctgttttaaaa

SEQ ID NO: 261684 - DNA, 364 bp, Unknown
  Bacterial polypeptide expressing nucleotide sequence isolated from the Sargasso Sea
ctttgaaactataaatggggatgaaataaaacctcaggtccatgaaatagagctaccaagtaaaaaaagaattattttattagcggagggaagactcgttaatcttggatgcgcaacaggtcacccaagttttgttatgagtgcatcatttacaaatcaagtcatagctcaaatagaactctggaataattcagataaatatgaaaataaagtttatgtattaccaaaacacttagatgaaaaagttgcaatgttgcatttagaaaaagttggtgcaaaattaactaaaatgtctaaagaccaagcagattatattagcgttaaaccatcaggaccatttaaaccagatacttaccgctactaa

SEQ ID NO: 261685 - DNA, 1089 bp, Unknown
  Bacterial polypeptide expressing nucleotide sequence isolated from the Sargasso Sea
taggtgccgaagtaagatggtcatcttgtaatattttttcaactcaagatcatgcagctgctgcaattgctgaagcaggaataccagtttatgcatggaaaggtgagacagaggaagaatatatatggtgtattaagcaaacaatagtaggtaaaccagattggaaaccaaatatgttattggatgatggaggagatttaactgccatcatgcataatgagtataagaatttgatgaaagacattaaaggcgtttcagaagaaactactacaggaattaaagctttaaataaaatggaaaaagataagtcattattagttccagcgattaatgtaaatgactcagttactaaatcaaaatttgataatttgtatggatgtagagaaagtttagtcgacggaataagaagagcaactgacgtaatgatgtcaggaaaaatcgcgattgtagctggctttggtgacgtgggtaaaggaagtgcagcatctctaagacaaagtggagctagagttttagtgacagaagcagatcctatttgtgctcttcaagctgcgatggaaggttatgaggtagttttaatggaggaggctattagtcgagctgatattgtagtaacagcaactggaaacaaggatattgtcacagctgatcatatgagagaaatgaaagatagagcaatattgtgcaatattggtcactttgataatgagatacaagttgaagctttaaaaaactataagtggacggaagttaaaccacaagttcatgaaatagaacttccaagtggtaaaagaattattcttttggcagaaggaagattagtaaatcttggatgtgcaactggacacccaagttttgtaatgagtgcatcatttacaaatcaagttattgcacaaatagagctgtggcataattataaaaattatgaaaataaagtttatgttcttccaaaacatttagatgaaaaagtagcaacactacaccttaaaaaagttggagctaaacttacaaaattgtcaaaagaacaagcagattatattagcgttggaacggaaggtcctttcaaaccaaatgcctatcgctattaaa

SEQ ID NO: 261686 - DNA, 1256 bp, Unknown
  Bacterial polypeptide expressing nucleotide sequence isolated from the Sargasso Sea
tatgaccgattataaagttaaagatatatcccaagcagaatttggaagaaaagaaatttcactggcagaaacagaaatgccaggattaatggctttgagaaaagaatataatggtaaaaaacctcttaagggtgcaaaaattttaggatgcttacatatgactatccagacagctgttttgatagaaactcttgttgatctaggagccgaagttagatggtcatcatgtaatatcttttccacacaggatcatgccgccgcagctatcgcaaaagctggaataccagttttcgcttggaaaggtgaaacagaggaagaatattggtggtgtgtaagacaaacaattgaaggtaaaaaggactggaagccaaatatgattttggatgatggtggtgatttaactgcattaatgcacaaagattataaaaatttaatgaaagatataaaaggcttaagcgaggaaactacaactggtgttttagctttgaaaaaaatggaagagcaaggaacacttttagtaccagcaatcaatgtaaacgactcagttacaaagtctaaatttgataatttatatggatgtagagagagcttagttgacggaattaaaagagcaacagatgtaatgatgtcaggaaaagttgctattgttgcaggttttggtgatgtaggaaaaggaagtgcagcttctttacgacaaagtggcgcaagagttatggtaacagagaccgatcctatttgtgctcttcaagcagctatggaaggttatgaagttgttttaatggatgagatgattggacaagcagacatcgttgttactgctacaggtaataaagatattgttacagcagatcatatgagagcgatgaaggatagatcaatattatgtaatattggacattttgataatgaaatacaagtagaggctcttaaaaactacaagtgggatgaaattaaacctcaagttcacgaaattacttttccagataacaaaagaattattttattagctgaaggaagattggttaacttaggatgtgcaactggtcatccaagctttgtaatgagtgcttcttttacaaaccaagtaacagcgcaaattgaactttggaataattcagacaaatatgaaaataaagtatatgttttacctaaacatttagatgagaaagttgcaaggctacatcttgagaaagttggagctaaattaactcctttatcaaaagaccaagcagattatataagcgttaaaccagaag

SEQ ID NO: 261687 - DNA, 793 bp, Unknown
  Bacterial polypeptide expressing nucleotide sequence isolated from the Sargasso Sea
ggaggagcaaggaactttattagttccagcaattaacgtaaatgattcagtaacaaaatcaaaatttgataatttgtatggatgtagagaaagtttagtagatggaattaaaagagcaacagatgttatgatgtcaggtaaagttgcaatagtggcagggtttggtgacgttggaaaaggaagtgcagcatcattaagacaaagcggtgctagagttatggttacagaaaccgatccaatctgtgctcttcaagcagctatggaaggttatgaagtcgttttaatggatgaaatgataggccatgcagacattgttgttacagctacaggaaataaagatatagtgacagctgatcatatgagagcaatgaaagacagatcaattttatgcaatattggtcattttgataatgaaatccaagtagaggctttaaaaaattataaatgggacgaaataaaaccacaagttcatgaaattacttttccagacgaaaaaagaattattttattagctgaaggtagacttgtaaatcttggatgtgcaactggtcaccctagttttgtaatgagtgcatcatttacaaatcaagttactgctcaaatagaattatggaataattcagaaaaatatgaaaaaaaagtttatgtactccctaaacatctagatgaaaaagttgcaagacttcacttagaaaaggttggtgctaaattaacacctttatcaaaagatcaagctgattatattagtgttaaaactgaaggaccttataagccagatgcctatcgctattaa

SEQ ID NO: 261688 - DNA, 325 bp, Unknown
  Bacterial polypeptide expressing nucleotide sequence isolated from the Sargasso Sea
atggaagattataaagtaaaagacattactcaagctgaatttggtagaaaagaaatatcaatagccgaaagtgaaatgcctggtttaatggctttaagagaagagtattctaaagaaaaaccattaaagggtgcaaggattataggatgtcttcatatgacaattcaaacagctgtactaattgaaaccttagttgcattaggtgctgaagttcgttggtcttcttgtaatattttttcaactcaagatcatgcagctgcagcaattgcaaaggctggtatccctgtttacgcttggaaaggtgaaacagaagaagaatattcat

SEQ ID NO: 261689 - DNA, 1312 bp, Unknown
  Bacterial polypeptide expressing nucleotide sequence isolated from the Sargasso Sea
aatgattaaagaaaaatatacaaaatacaaagtgaaagatttatctcttgctgaatggggaagaagagaaattaacatagctgaagcagaaatgcctggattaatggccctgagaaaagagtacagcgaggtaaaaccacttaaaggtgccagaattgcaggatgtttacatatgacaattcaaactgctgttctaatagaaaccttagttgaaatgggtgcacaagttacatggagctcatgtaatattttttctacacaggatcatgcagcagctgctattgctagtgttggtattccagtttatgcttggaaaggaatgaatgaggatgagtttaactggtgtatagaacaaacaattttttttggagaagaaagaaaaccgctcaatatgattttagatgatggaggagacttgacaaatatggttttcgataaatatccagatttagttgatggaataaagggtctttctgaggaaacaacaactggagtacataggctgtatgaaagaatgaaaaataatactttgccaattcctgcaattaatgttaatgattctgtaactaaatcaaaatttgataataaatacggttgtaaagaaagtgcagttgatgcaattaggcgtgctactgatacgatgatggctggtaagagagtagttgtggctggttatggtgacgttggtaaaggtactgtagcttcattttcaggagctggagcaatagttacagtttgtgaaatcgatccgatttgcgccttacaagctgctatggacggatatgaggttaagaaaatgatgagtgtaatatcaaatgcagatataattgtaactgctacaggaaacaaggatattatttgtaaagatcattttagacttatgaaggacaaagctattttatgtaatattggtcattttgataatgaaattgatatgcaatggttgaacaaaaattatgggtcttcaaaaattgaggttaaaccacaagtagacctttacaaattaggagataaagaagtaattgttttagctgagggaaggttagttaatcttggttgtgcaactggacatccaagttttgttatgagtaattcatttaccaaccaagttcttgcacaattggaattgtgggttaataccaaaaattatcaaaataaggtttacatgcttccaaaacatcttgacgaaaaggttgcaaaattgcatttagaaaagttaggagttgagctagatgaattaaccaaagagcaagcaaagtatattggtgtagaaaataatggaccgtttaaaccaaattattacagatattaa

SEQ ID NO: 261690 - DNA, 236 bp, Unknown
  Bacterial polypeptide expressing nucleotide sequence isolated from the Sargasso Sea
ctttgttatgagcgcttcatttacaaatcaggttatagctcaaattgaattgtggaataactcaaaaaattatgaaaagaaagtttatgtattaccaaagcacttagacgaaaaagttgcaacattacacttgggtaaagttggtgctaaattaacaaaaatgtctaaggaacaagcagactatattagcgttaaaccatcaggaccatttaaaccggatacttatcgctactaaa

SEQ ID NO: 261691 - DNA, 1330 bp, Unknown
  Bacterial polypeptide expressing nucleotide sequence isolated from the Sargasso Sea
aatggaaaacattcaaagcagttcaggaacgaattttagtgattataaaattgcagatatatcgctctcagatttgggacggagaaaaattggtatcgcagaaggagaaatgccgggtttgatggcgttgagaaaggaatacggaaaagagaagcctctggctggggcaaggattacggggtcattgcacatgacggtcgaaaccgcagttttgatcgagactttagtggaattgggggctgaagtacgctggtcttcctgtaatattttttctactcaggatgaagctgctgcggccattgctgcagctggaattccggtattcgcatggaaaggagagaccgaggaagaatattggtggtgtatcgaacaaaccctcaaatgggatgggaatgagggtacaaacttgcttcttgatgatgggggagatttgacctggtatgttcacgacaaatatccgcaattgcttgacaatattatggggctttcagaagaaaccactaccggagttcaccgtcttcatcagatggcccgaaagaatgagcttaaggtccctgcctttaatgtgaatgattcggtgaccaagagtaagtttgacaatctttacggatgccgtgaatcccttgtagacggaatcaaacgggcaacggatgtaatgattgcgggcaaattagcagtggttgcaggatatggtgatgtaggaaagggttctgcagcatcactccgtaatcaaggtgcaagagtagtggtgacagaaatcgatccaatctgtgcacttcaggcggtgatggaaggatatcaggtggtccgaatagaagaggtcgccgctgaggccgatatttttgtcacggctaccggttgtgcgggtatcatccgcagagaacacatggatcagatgaaaaacgacgcaatcgtttgcaatatcggacatttcgatatagaaattgatgtagcctcgttgaatgatgatccttcaatcaacaaaatcaatgtgaaaccccaggtggatcaatacatctgggattccggtaaaaggatcatccttcttgcggaagggcgtctggttaatttagggtgtgctacggggcacccttcatttgtgatgtccaatagtttttgtaatcaggttctggcgcaaatggatctctatgaaaatgggaaacaatacgagaatcaggtttatgttcttcctaaggaattggatgaaaaagtcgcgcgtcttcacctagaccaacttggagtccacttgaccgaacttcagcaagaccaagcagattaccttggaattcccacaaaggggccgttcaagcctgaacattaccggtactga

SEQ ID NO: 261692 - DNA, 592 bp, Unknown
  Bacterial polypeptide expressing nucleotide sequence isolated from the Sargasso Sea
agtggtgctagagttttggttactgaagcagatccaatttgcgctctccaagctgcaatggaaggttatgaagttgtattaatggaggaagctattagtagagcagatattgttgttactgcaactggaaataaagatattgtaactgcagaccacatgagagaaatgaaagacagagcaatattgtgtaatattggacattttgataacgagatacaagttgaagctttgaaaaattacaaatggacagaagtaaaacctcaagtccatgaaattgaactaccgagtggtaaaagaataatcctcctagcagagggaagactagtaaatttaggatgtgcaactggtcatccaagttttgtgatgagtgcttcattcactaatcaggtgatagctcaaatcgaactttggcataaccacaaaaattatgaaaataaagtttatgtgcttccaaaacatttagatgaaaaagttgcaacacttcatttgaaaaaagtaggagctaagttaacaaaattatcacaggaacaagctgaatatataagcgtcaggacagaaggtccttttaaaccagatgcctatcgctattaaa

SEQ ID NO: 261693 - DNA, 187 bp, Unknown
  Bacterial polypeptide expressing nucleotide sequence isolated from the Sargasso Sea
atggagatcgaactcgcgcaagtcgaaatgccgggtctcatgtcctgcatcgccgaattcggcccggcgcaaccgctcgcgggtgccaacatctccgggtctttgcacatgaccatccaaaccgcggttctcatcgagacgctcgtcgcgctcggtgccaacgtgcgttggtgctcgtgcaacatct

SEQ ID NO: 261694 - DNA, 815 bp, Unknown
  Bacterial polypeptide expressing nucleotide sequence isolated from the Sargasso Sea
ggaagagacaacaacaggcgtaataagacttaagtcaatggagaaaaacaataaattaagattcccagttgttgctgtaaatgattcagatacaaaacacctctttgataacaggttcggaacaggacagagtgcaatggatggggtagttagggcaacagatttattgatagcaggtttgaatgttgttgtaattggttttggtgattgcggaaaaggagtagcagaaagagcatatggaatgggagcaaaagttacagtagttgaaccaaattccgtaagagctctagaagcacttatgcatgggtatgaagttaaaacctctataaatgccgcaaaaattgccgatattgttgtttccgtgacaggaaatttacatgcattagataagcagcactttgatgttatgaaagatggagttgcattagcaaatgctggacattttgatgtagaaataaatttagaagctcttaagaacgaaagcacagaagttgaaagagtcagagaacacgtagagagctacaaatataaaggaaaagaaattttagtcttagcagaaggaaggctagtaaatcttgctgcagcaactggtcacccagcttcagtaatggatatgtcatttgctaatcaagcactagcttctgaatggataaaagaaaatcatgaaaatttagaatcaaaagtatacacattacctaaggaagtagatataaaaatagctgctacaaaattaagcctaatgggtggcgagttagagatattatctgatgaacaaataaaatatctagattcttgggagcacggtacaagctgaa

SEQ ID NO: 261695 - DNA, 685 bp, Unknown
  Bacterial polypeptide expressing nucleotide sequence isolated from the Sargasso Sea
aataaaaagagcaactgatgttatgatgtcaggaaaagtcgcattgttgctgtttcggagatgtggaaaaggaagtgcagcatctttgcgtcaaagtggagctagggttatggttacagaaacagatccaatatgtgcacttcaggctgcgatggaaggttatgaagttgttttgatggatgaaatgattggagaagcagatattgttgttacagctacaggaaataaagacatagtaacagcagaccacatgagagccatgaaagacagatcgatcctatgtaatatcggtcacttcgataatgaaatacaggtagaagctttaaaaaattataaatgggatgaaattaaaccacaagttcatgaaattacttttccagataataaaagacttattttattagctgaaggaagacttgttaatttagggtgtgcaactggacatccaagcttcgttatgagtgcatcttttactaatcaagttacagcacaaatagaattatggaataattctgaaaagtatgaaaagaaagtatatgtgttaccaaaacatcttgatgagaaagtagcaaggttgcatttagaaaaagttggagccaaattaactaaattatcaaaagatcaagctgattacattagcgtaacaacagaagggccctataaaccagatgcttatcgctactaa

SEQ ID NO: 261696 - DNA, 481 bp, Unknown
  Bacterial polypeptide expressing nucleotide sequence isolated from the Sargasso Sea
ttttgcacagcaactggaaattataatgtaatcaatcatgatcatatgaagaatatgaaaagcggagcgatagttgcaaatattggacattttgataatgaaatagatgttgctagccttaaagattatgaatgggataatatcaaaccacaagttgacgaaataacatttcctgatggtaaaaagattgtcttattagctgaagggaggcttattaatcttggttgtgctacaggtcatccaagttttgttatgtcatgttcatttactaatcaagtaatggctcaaatcgagctatgggaaaataactcaaaatacgaaaaacaagtatatgttttacctaagcatcttgatgagaaagtagctttacttcatcttgagaaacttgacgctaaaattactaatcttactgaggaacaagctgactacataggcgtgaatacttcaggaccattcaaaaaagatacttacagatattaat

SEQ ID NO: 261697 - DNA, 1396 bp, Unknown
  Bacterial polypeptide expressing nucleotide sequence isolated from the Sargasso Sea
atggaaaatgactataaagttgcagatataaatcttgctgaatttggaagaagagaaatttctctagcagaaaatgagatgcctgctttaatggctttaagagaaaaatatagagcagaacaacctcttgcaggagcaaaaattatgggatgtatccatatgactattcaaactgcagttctaatggaaactttaatagacttaggcgcagaattaaggtggtcttcttgtaatattttttcaacgcaagatcatgctgctgcagcaatggcagcaaaaggcgtgccaacattcgcctggaaaggagaaacagaagaagagtttgaatggtgtattgaacaaactatttgtaaagatggtaagccatgggatgccaatatgattcttgatgatggtagtgaccttacagccatggtgcatgaaaaatttcctgatatgcttgaaacaattcatggtgtgtcagaagaaactacaactggagtacatagactaaaagaaatgcttgaaaatggtgagcttaaaatacctgctattaatgttaatgactctgtcacaaaatcaaaaaatgataataaatatggttgtaggcatagtctaaacgatgctctgaagagaggaactgatatgttactttcagggaaaaagggtcttgttattggttatggtgatgttggcaaaggatctgcattaagtctagctcaagaaggaatgatagttagtgttgttgaatcagatccaatttgtgcaatgcaagcttgcatggatggtttttctgttgtttcttgttataaagatggtgttgttaccagagatcctaaagatataaatatgcaagtgatggaagatactgatttggtcgtcaccacaactggaaatgttaatgtgtgtgattcagcaatgttaagcactcttaagaatacagctgttgtatgtaatattggtcactttgataacgaaatagatacagccttcatgagagaaaattattattgggacgaaataaagcctcaggtacatagaatttttagagatacagctccggatggaactccagatctatcaagtaaaaattatattattcttctagcagaaggtagattggtaaacctaggaaatgctactggtcatccaagcagaattatggatggttcatttgcaaaccaggtccttgcccaaatacatttatataaacagggttttgcgaatataaatgacgaagataagaaagctgagatgataactgtagaagttcttcctaagaaactagatgaagaggttgcaagtctaatggttgagggttttgggggtatggttacgaaactgactcaagaccaagcagactatataaatgttccaaaagatggtccgtttaaagaagaaacttacaaatattaat

SEQ ID NO: 261698 - DNA, 256 bp, Unknown
  Bacterial polypeptide expressing nucleotide sequence isolated from the Sargasso Sea
aatgagtaagcaagattacaaagtaaaagatatttctcttgcagaatatggaaggcaagaaattttattagctcaagatgaaatgcctgctttaatgcaattaagagataattacagagataaacaacctcttaagggcgcaaaaataatgggctgtatacatatgactgttcaaactgctgtgttaattgagactttgattgaattaggtgctgaggttagatggtcttcatgtaacattttttcaactcaagac

SEQ ID NO: 261699 - DNA, 1288 bp, Unknown
  Bacterial polypeptide expressing nucleotide sequence isolated from the Sargasso Sea
gatggaagattataaagtaagagatttatcacaagcagaatttggtcgaaaagaaatttcaattgctgaaagtgaaatgccaggacttatggctttaagggaggagtacgctggaaaatctcctttaaagggtgcaaaaattataggttgtttgcatatgacaatacaaacagcagtattaattgaaaccttagtagatttaggtgcagaagtaagatggtcatcttgtaacattttttctactcaagaccatgcagcagcagcgatagcaaaagctggtattccagtttatgcgtggaagggagaaacagaggaggaatatgtttggtgcataaaacaaaccattgaaggtaagaaaagttggaaacctaatatgcttttagatgatggtggggatttaacagcaatgatgcacaatgaatataaagatttattaaaagatgttaaaggagtttcggaagagacaactacagggataaaagctttgaataaaatggaaaaagaaaattctttgttggttccagcaataaatgtgaatgattctgttaccaaatcaaaatttgataacttatatgggtgtagagaaagtttagttgatggaattagaagagccactgatgtaatgatgtcaggaaaaattgcaatcgttgcaggctttggtgatgttggaaaaggaagtgctgcatcattaaggcagagtggggctcgtgtgttggttactgaagcggatccaatatgcgcattgcaagctgcaatggaaggttacgaagttgttttaatggatgaagcaattagtaaagcagatatagttgtaactgcgactggtaataaagatattgttacagctgaccatatgagagatatgaaggatagagcaatcttatgtaatatcggacatttcgataatgaaattcaggtcgaagctttgaaaaattacaaatggactgaagtaaaaccccaagtacatgaaattgaactacctagcaaaaaaagaataattttattagcagagggtagattagtaaatttgggctgtgctactgggcatccaagttttgtaatgagtgcttctttcacaaatcaagttattgctcaaatagaactatggaataatcataaaaattatgaaaacaaagtttatgttttaccaaaacatttagatgagaaagtagccacacttcaccttaaaaaagttggtgctaaattaactaaactttctaaagatcaagcagattatatcagtgtaggggtagagggacctttcaaacctaatgcctatcgctactaa

SEQ ID NO: 261700 - DNA, 544 bp, Unknown
  Bacterial polypeptide expressing nucleotide sequence isolated from the Sargasso Sea
atggaattagataaagttaagagaattaaggacgattacaaagttgctgacatgagtcaagcaagttttggacacaaagaaattagaattgcagagacagaaatgcctggattaatggcgcttagaaaagaatatggttcatccaaacctctcaatggtactagaataattggttgtcttcatatgacaattcaaactgcggtattaatagaaacattagttgaattaggggctgaagttagatggtcatcatgcaatatattttcaactcaggatcatgcggcagcggctattgctgatcaaaatattcctgtatttgcctggaaaggtgaaactgaagaggagtacatatggtgcttaaagcaatcgattgagggtaatcctgaatggaaaccaaatttgttgctagatgatggtggtgacttaacaagcatgattcacaaagaatatccacatcttatcgatgatattaaaggtgtctcagaagaaacaacaactggtgttcttcgattatatgatatggcgaaagaagggtcgcgctgat

SEQ ID NO: 261701 - DNA, 625 bp, Unknown
  Bacterial polypeptide expressing nucleotide sequence isolated from the Sargasso Sea
aatgaataaagactataaagttaaagacattaatttagcggagtttggtagacaagaaatattgcttgcacaagacgaaatgccggctttaatgcatcttagagaacagtacaaagaagaacagcccttgcagggagctaagatcctaggatgcatacatatgacaattcaaacagctgttttaattgaaacattaattgatttaggagcagaagttagatggtcatcttgtaatattttttcgactcaagatcatgctgctgcagctattgcagataagggtgttccagtgtttgcttggaagggggaaacagaagaagaatatgattggtgtatagagcaaacaatacttaaaaatggtcaagcgtgggatgcaaatatgattttagatgatggtggagatttaacagcaaagattcataaagattatccagaaatgcttgagaagattcatggaatttctgaggaaactactacaggcgttcatagacttaaagatttattaaaaaaaggaaaattagcagtgcctgcaataaatgtaaatgactcaataactaaatcaaaaaacgataacaagtatgggtgccgccatagtttagatgatgctattaaaaagaggtactga

SEQ ID NO: 261702 - DNA, 652 bp, Unknown
  Bacterial polypeptide expressing nucleotide sequence isolated from the Sargasso Sea
aatgattgtggatgtagctgaaactgatcctatttgtgcaatgcaggcatgctttgatggattctcaattgtgtcagcatataagaatggagaaattagtaataatgcttcagatatcaataaggatttgctaaaaaaatatgatttagtagtcaccgctacaggtaatactggagttttaaatggcttaatgcttgatgcattaaaatcctcatgtgttgtttgcaacattggccatttcgataatgaaatagatgttaaatacttaaaaaaatatgaatggtacgaaattaaaccaggtgtgcacaaagttatcagaggagaaggggattaccttatacttttagcggaaggtagattagctaatttagcacttgcaactggacatcccagtagagtaatggatgggtccttttgtaaccaagtgcttgcacagatttttctatataaagataagtttgcagatttatcaaaagaagaaaaattgaaaaaagtatcagttaaagttcttccaaagtatttagatgaagaagttgcttctttgatggtaaaaggttttggtggaactttaacaaaattaacgaaagaacaagctgactatattggggttgaacaacaagggccttttaaagaggactcttataattactaa

SEQ ID NO: 261703 - DNA, 1324 bp, Unknown
  Bacterial polypeptide expressing nucleotide sequence isolated from the Sargasso Sea
tatggctgaaacagcaaaagaaaataaaattgatttgatggatgacttcaaagtggcggacatttctctagccgaatggggcgagaaggaaattaagatcgcagaaactgaaatgcctggattgatgagtatcagagaggaatttggtacagagaagccattgaagggtgctaggattgccggatgtttacacatgacaattcaaacagcagtattgattgaaaccctcattgagcttggtgccgatattcggtggtcttcttgcaatattttttcgacgcaagaccatgccgcagctgcgcttgctgcaaaaggtattcctatcttcgcatggaaagatgagagtgaagaagaatactggtggtgtgttgagcaaacaatcaaaggaccaaatggttggacgccaaaccttatacttgacgatgggggtgatttaacaggcctcatgcacgacaagtatcctgagttaatgaaagatataatcggtgtttcggaagaaaccacaaccggcgttcttcgtctttataacatggaaaaagatggaacgctcatgtgtccagcgattaatgtaaacgattctgtcacaaaatcgaaattcgataacttatatggatgtcgtgaatcactcgtggatggaatcaaaagagcaaccgatgtcatggttgccggaaaaatagcaattgttgccggatatggagatgttggaaaaggttcagcacaaagtctcaggggtcttggtgccactgtatggattactgaaattgatccaatatgcgccctgcaagccgcaatggaaggataccgagttgtaaccatggacgatgcttgctcaaaagcggacatcttcgtaacagctactggaaattacaatgtaatcgacaagcatcatttagagcagatgaaggatcaagcaatcgtttgtaatattggtcacttcgacaatgagattaatgttgagtcaatgaaggaccttgagtggatcaatatcaagccccaagttgaccatattgtctttccggatgggaaaagaattatcctgcttgctgaaggtcgcttggttaatttagggtgtggcacgggtcatccaagttttgtcatgtctaattcattctgcaatcagactcttgctcaaattgaactattcaaaaacagctcgaattacgataaacaggtctatgtccttccaaaatcacttgatgaaaaagttgcaaaacttcatctggacaagatcggagctaaattaacaaaactgaccactgaacaggctgaatatattggtgttaaagagtcaggaccctacaaacctgaacattaccgatactga

SEQ ID NO: 261704 - DNA, 1147 bp, Unknown
  Bacterial polypeptide expressing nucleotide sequence isolated from the Sargasso Sea
aatgaaaaaacaaaccaaaaatattgttgagtccttacctttcaaaatcaaagatatcaaacttgcaaagttgggtagggataagattgacatatctgaaaaagaaatgcctggtttaatggaattaagaaaaaaatattctaaatcaaaacctctaaaaggttttaggcttacaggctcattgcacatgactatcgaaacagcaattcttatagaaacactaaaagatttaggagctgatgttcgttgggcaagttgtaatattttttcaacacaagatgaagctgcagctgcaattgctaagacgaagactccagtttttgcatggaaaggtgaaacacttgaagaatattgggactgtacgttacaagcattaacattcaaaaataacttaggtccaaatctaattgtagatgatggtggcgatgcaacgctgttcattcataaaggatatgaattagaaaattattttaataaacataaaaaacttccaaaaatcactacaagggttgaggaagaaattgtaattgaaaaacttttaagaaaagtacataaaaaaaatcccaatcattggcatagcattgtaccagacatcataggagtttcagaagaaacaacaacaggcgtagctaggttacagcaaatggtagaagatgctactttactattcccggcattcaatgtaaatgatgcagcaaccaaatctaaatttgataatctttatggttgcagagaatccttagctgatggtataaagcgctcaacagaaattatgcttgcaggtaaaactgtggttgtttgcggttatggagatgtaggtaaaggctcagcacaatcaatgaagtcatatggttgcaaggttattgttacagaaattgatccaatatgcgctcttcaagcagctatggaaggatttgaagtaagaagactagaagatgttttagatagaggaaatatttttgtaacaactacagggaataaagatatcattacattaaaacatatgaaaaaaatgaaagatcaagctattgtttgcaacattggacattttgataatgaaattcaagtagacgcattaaataagtcaaatgcaaaaaaagatcaaataaagcctcaacttgatagatatactttcaagaatgggtaa

SEQ ID NO: 261705 - DNA, 526 bp, Unknown
  Bacterial polypeptide expressing nucleotide sequence isolated from the Sargasso Sea
tatgaagtagttttaatggatgaaatgattggtcaagcagatattgttgtaaccgctactggaaataaagatgtagtaacggcagatcatatgagagctatgaaagatagatctattctatgtaatatcggtcactttgataatgaaatacaagttgaggctttaaaaaactacaaatgggatgaagtaaaacctcaagttcacgaaataactttcccagatgacaaaagattaattttgttagccgaaggaagacttgtgaatctaggctgtggaactggccacccaagttttgtcatgagtgcttcatttactaaccaggttattgctcaaattgagctatggaataattcagataactatgaaaataaagtttatgtgcttcctaaacacttagatgaaaaggtagcaaggcttcacttagataaggttggtgcaaaattaacaccactatctaaagagcaagctgactatataagtgtaacaccagagggaccatacaagccccatgcgtatcgctactaga

SEQ ID NO: 261706 - DNA, 1243 bp, Unknown
  Bacterial polypeptide expressing nucleotide sequence isolated from the Sargasso Sea
atgacagattacaaagtaaaagatataaacctagcagaatttggcagaaaagaaatttcactagctgaaactgaaatgccaggtttaatggcattaagaaaagaatataaaggtaaaaatccacttaaaggagcaaggattttaggatgtcttcacatgacaattcaaacagcggttcttattgaaacacttgtagatctaggagctgaggtaagatggtcttcatgtaatattttttcaactcaagatcatgcagcagcagctattgcaaaggtaggcattccagtttttgcatggaaaggtgagactgaggatgaatattggtggtgtgttaaacaaacaattgaaggaaagaaagattggaaaccaaatatgattcttgatgacggtggagacttaactgcgcttatgcataaagattataaagatttactaaaagatattaaaggattgtctgaagaaacaacaacaggggtacttgcacttaaaaagatggaatctcaaggaacactattagttccagctattaatgtaaatgactcggttacaaaatctaaatttgataatttgtatggttgcagagaaagtttggtggatggaataaaaagagcaactgatgtaatgatgtcagggaaagtcgcaatcgttgcaggatttggtgatgttgggaaaggaagcgctgcttcattgaggcagagtggagcaagagtaatggttactgaaactgatccaatatgtgcactacaagctgcaatggaaggttatgaagtagttcttatggatgaaatgattaaagaggcagatatagttgttacagccacaggaaacaaagacatagtaacagcagatcatatgagagaaatgaaagatagagctatactttgtaatattggacatttcgataatgaaattcaagttgaggctttgaaaaattataaatgggatgaaattaagccacaagttcatgaaataacattaccaagcaataaaagaataatattacttgccgaaggaagattggttaacttaggatgtgctactggacatccaagttttgtaatgagcgcttcgtttactaaccaggtgacagctcagatagagctatggaataattcagataagtatgaaaaaaaagtttacgttttgccaaaacatctagatgaaaaagttgctagattacacttagaaaaagtaggtgccaaacttacgaaaatgtctaaagaccaggcagattatatcagtg

SEQ ID NO: 261707 - DNA, 772 bp, Unknown
  Bacterial polypeptide expressing nucleotide sequence isolated from the Sargasso Sea
aatgactgacaagcaagattataaagtagctgatattgaactttcggagtttggaagaaaagaaatttctctagccgaaacagaaatgccaggtctaatggcattaagaaaagaatataaggggaaaaaaccattagagggcgcaagaatagttggctgtctccatatgactatccaaactgcagttttgattgaaacactggtagatctaggagctgatgtccgttggtcttcttgtaatattttttcaacccaagatcatgctgctgcagctattgcaaaagctggtatcccagtattcgcctggaaaggtgaaactgaggaagaatattggtggtgtgttaaacaaactattgaaggaaaagaaggttggacaccaaatatgattcttgatgatggtggtgacttaactgcattgatgcataaagattataaagaattactcaaagatgttaggggtttatcagaagagactacaactggagtactagctctaaaaaaaatggaaatagatggtagtttattggttccagcaattaatgttaacgactcagttactaaatcaaaatttgataatctttatggttgtagagaaagtttagttgatggaattaaaagagccactgatgtcatgatgtcaggcaaagttgcaattgttgctggttttggtgatgttggaaagggaagtgctgcttcattgcgtcaaagtggagcaagagtgatggtaacagaaacagatcctatttgtgctttacaagctgctatggaagga

SEQ ID NO: 261708 - DNA, 977 bp, Unknown
  Bacterial polypeptide expressing nucleotide sequence isolated from the Sargasso Sea
aatgtcagaaacacttactactaacaatattgtagaaaatttaccatataaggtgaaagatttatcacttgccgtggatggaaggaaggcacttgacatagccgaaaaagaaatgccaggtcttatgtcaacacgtaacaaatatggtccagaaaaaccattaaaaggaaaaaaattaacaggatcattacatatgaccgttgaaacagctgttctaattgaaactctggttgatctcggtgcagatgttcgctgggccagttgcaatatcttttcaacccaggatcatgcagcagcagttattgcagactctggtatacctgtttatgcctggaaaggagagacacttgaagaatattggtggtgtacacttcaagcacttacatttcctgatgggtctggtccagatctaattgttgatgatggaggagatgctactctgctgattcacaaaggatacgagcttgagaacttttatgctaaatatggcaatgtacctgacataactactaaggttgaggaagaaataattatagaaaaacttctaagagaagtattagaaaaggatcctaatcactggcacaaagtaaaagaaaatgtgattggtgtttccgaagagacaaccacaggagtacacagacttgttcagatggaaaaagatggacacctcttattcccagcttataacgttaatgattctgtcacaaaatctaaatttgataacgtttatggatgtaaggaatctttagcagatggtttgaaaagagcgcttgatatcatggtagctggtaaaacagttgtaatatgtggctatggtgatgttggaaggggatgtgctcaatcaatgcgcggttacggcgctagggttatagtaactgaaattgaccccatctgtgctcttcaagcggcaatggaaggatttgaagtcactacaattgagactgttttgaaagatggacatatttttgtaacaacca

SEQ ID NO: 261709 - DNA, 1296 bp, Unknown
  Bacterial polypeptide expressing nucleotide sequence isolated from the Sargasso Sea
tatgaaagaagattataaagttgcggatattaccttggcagagtttggaagaagagaggtatctcttgctgaaaacgaaatgcctgcattaatggcacttagagataaatataaagaggagcaaccattatcaggtgcaaagattatgggctgtattcatatgacaatccaaacagctgtactaatggagactttaattgaccttggtgcggaaattagatggtcaggttgcaatattttctccactcaagatcacgctgctgcagcaatggcagagaaaggtatacctgtttttgcttggaaaggtcaaactgacgaagaattcgattggtgtatagaacaaactattcttaaagatggtgagccatgggatgcaaatatgattttggacgatggtggtgatttaactcatatggttcacacaaagtatcctgagatgttagaaacaattcatggtatttctgaagagacaactacaggcgtctataggcttaaaaaaatgttagagaaaggagagttaaaggttcctgcaataaatgtaaacgactccgtaacaaaatcgaaaaacgacaataaatatggttgcaggcatagccttaatgatggaataaagagagctacagatatgctcttatccggaaagaaagcactgataattgggtatggtgatgtaggtaaaggctcagcagctagcttagctcaagaaggaatggttgtaagagtaactgaaactgatcccatatgcgctatgcaggcatgcatggatggattctcacttgtttcatgttacaaggatggaaatgttactggaaaagaagatgatattaataaagatcttcttcaagatactgatatcctagttacaacaactggaaatgttaatgtttgcgattcagcaattcttaattctcttaaaaacggagcagtggtttgtaatattggtcactttgatactgaaatagatactgtttatatgaaaaatgtttggtattgggaggagataaaacctcaggttcaccgagtctttagggattgttcgcctgatcaggagcctgatctcactagtaaaaattatatactcttgctagctgaaggaagacttgtaaacctaggaaatgctactggccatccgagcaggattatggatggctcctttgccaatcaagtgcttgctcaaatgcatttatatgagaaaagttttgcaaagattaatgatgaggaaaagaagaaagctttaataaaagttgaagttttgccgaaaaagcttgatgaagaagttgctgctcttatggttca

SEQ ID NO: 261710 - DNA, 697 bp, Unknown
  Bacterial polypeptide expressing nucleotide sequence isolated from the Sargasso Sea
tatgagtgaagactttaaagtaaaagatataagtttagcagattttggtaataaagaaatagctatagcagagactgaaatgcctggtttaatggcaattagagaggaatatggcgataaaaaacctctaaatggagcaagaattgtcggttgcttacatatgacaatacagactgctgttttaattgaaacactcgtttatttaggagctacagtaagatggagctcatgtaatattttttcaacccaggatcatgctgctgcagcaatagctgcaaaagggataccagtttttgcatggaaaggtatgaatgaagaagaattttggtggtgcattgaaaaaacacttgaaggaccagatggatggaagccaaatatgatactagatgatggtggagatgcaacaaaaattattcatgaaaaatatcctaaaatgcttgaagatatattaggattatcagaagaaactacaacaggtgttcatcgtttaaaagagatggagaaaaaaggattactaaaagtacctgcaataaatgttaatgattctgtaacaaagtcaaaatttgataacttatatggctgtaaggaaagcttagtagatggaatacgcagaggtactgatgtcatgatggctggaaaagtagcggttgttgcgggttatggtgatgttggcaaaaggatctgctgcgagtcttag

SEQ ID NO: 261711 - DNA, 1348 bp, Unknown
  Bacterial polypeptide expressing nucleotide sequence isolated from the Sargasso Sea
tatgaaagattattcaatcacagatataaaacttgctgaatggggaagaaaagaaatctcaatcgctgaaactgaaatgccaggattaatggcatgcagagaattgttttcaaaggataaaccattaaaaggtacaagaattgcaggctgtttgcatatgacgattcaaacagcagtcctcatagagaccttaactagtcttggggctagtgtaagatgggctagctgtaatattttttcaactcaagatcatgcagcagcagaaattgcaaaacaaggtatcccagtttttgcaaaaaaaggagagactttaaaagaatattggaattacgtagatcaaatatttacttggtcagatgatacagttgcgaatatgatcctagatgatggtggtgatgcaactttgtacatcatactaggcgctaaagcagaaaatggtgaacaagttttacctaaccctgctaatgaagaagaagaagctcttaagtcacaaattttatctagacttaaaagttctccaggatggttcacaaaagccaaaaatagcattaaaggggttactgaagaaacaactacaggggttcttagattatatcaaatggcagaaaaaggtgatcttccttttccagcaatcaatgtgaatgattcagtgacaaaatctaaatttgataatctttatggatgcagagaatctctagtagatggcataagaagagccactgacgtgatgttatctggtaaagttgctgttgttgcaggttatggtgatgtaggaaaaggatctgctgcttcacttcgtcaaggtggagctagagtgattgtaactgaaattgacccaatatgtgcattgcaagctgcgatggagggatatgaagtatgttctatggaagaagcatgctcaagaggtgacatatttgttacagcaactggaaataaagatgttataactgtggatcacatgagagaaatgaaagacagagcgattgtatgcaacatcggtcactttgattcagaaattcaagttgaatcacttcaaaatatgaaatggtcagaggttaaaccacaagttgatgaagttgagtttcaagatggtaaacgtttaattgttttggcaaaaggaaggttggtaaacctaggttgtgctactggccatccgagttttgtaatgagtgcttcttttacaaatcaagttcttgcccagatagagttatgggaaaagccagaaaattatgacaataaggtatacaccttgccaagacatttagatgagaaagttgctaaattacatcttgataaagttggtgccactctaagtaaactttcaaacgaacaagctgattatattggg

SEQ ID NO: 261712 - DNA, 1294 bp, Unknown
  Bacterial polypeptide expressing nucleotide sequence isolated from the Sargasso Sea
attggaatttaaagattacaaagttgctgatattggtctcgctgaatggggacgaaaagaaatagaaatcgcagagaccgaaatgcctggcttaataactttaagaaaagaattaagtaaatctaaacctctaaaaggagcaaatattgtaggctgtcttcatatgacaatacaaactgcagtattaattgaaactttaattgatttaggggcaacagttaggtggtcttcgtgtaatattttttctacccaagatcatgctgccgctgcaatagcaagtaaaaatatacctgtcttcgcgtggaaaggtgaaacagaagaagaatatgattggtgcattaaacaaactattgaaggttcttcagactggaaaccaaatatgattttagatgatggcggtgatttaactaagatcattcatgaagaatacccagatttgttaagtgaaatacgaggattatccgaggaaactacaactggtgttttaaggctttatgaaatggaaaaagcaaaaacccttgctgtacctgctattaatgttaacgactcagtcacaaagtcaaaatttgataatttttatggatgcagagaaagtcttgttgacggtttaaaaagagcgacagatgttatgcttgcggggaaagtcgcagttgtttgtggatttggtgatgttggaaaaggatctgcagagtctctccgatcacaaggagctagggtaattgttacagaaattgatcctatctgcgctttacaagcttctatggaagggtatgaggtttcaactgttgatgatgttgctaagacagcagatatttttataacagcaacaggaaataaagatgttataactcttgaacatatgagagaaatgaaagatagagctattgtggctaatattggacattttgatagcgaaatccaagttgcagaattaaaaaactttaaatgggataatataaagcctcaagttgatgagatagagtttcctgatggcaaaaaaattattttattggctgaaggtagattggttaacctaggatgtgcgactggacaccctagttttgtaatgagcgcatcattttcaaaccaagttttagcccaaattgaaatttggaataattatgaaaattatgaaaataaagtatatgttctacctaaacatttagatgaaaaagtagcatatatccaccttgaaaaattaggagtcaagttaaccgagttgagtaatagccaagctgattatctaaatttgaataaagaaggtcctttcaaaccagatcattatagatattaa

SEQ ID NO: 261713 - DNA, 454 bp, Unknown
  Bacterial polypeptide expressing nucleotide sequence isolated from the Sargasso Sea
aatgagtgattataaagtaaaagatataaagctagctgaattcggtagaaaagagatttctcttgccgaaacagaaatgcctggactaatggcattgagaaaagaatacaaaggaaagtttcctttaaaaggggctagaattttgggatgcctgcacatgacaattcaaactgctgtacttatcgaaacattagtagctcttggtgcagagtgtagatggtcatcatgcaatattttttcaacacaagatcatgctgctgcagcgatagcaaaagctggaatacctgtgtttgcttggaaaggtgaaacagaagaggagtattggtggtgtgtgaaacaaacaattgaaggtaaaaaagattggaagccaaatatgattttagatgatggtggtgacctaacggctctaatgcaaaaagattacaaacatttgatgaaagatattaaagggttg

SEQ ID NO: 261714 - DNA, 1104 bp, Unknown
  Bacterial polypeptide expressing nucleotide sequence isolated from the Sargasso Sea
tatgaaaaaagattataaagttgcagatattaccttagcagagtttggaagaagagaggtatctcttgctgaaaacgaaatgcctgcattaatggcgctcagagaaaaatataaagaggagcaaccattatcaggtgcaaagataatgggttgtattcatatgacaatccaaacagcagtattaatggagaccttaatagatctaggtgcagaaattagatggtcgggttgcaatattttctccactcaagatcatgctgctgcagcaatggcagagagaggtatacctgtttttgcttggaaaggtcaaactgacgaagaatttgattggtgtatagaacaaactattcttaaagatggtgagccatgggatgcaaatatgatcttagatgatggtggtgatttaactcatatggttcacacaaaatatcctgagatgctagaaacaattcatggcatctctgaagagacaactacaggcgtctacaggctgaaaaaaatgttagagaaaggtgagttaaaggttcctgcaataaatgtaaacgactccgtaacaaaatcgaaaaacgacaataaatatggttgcaggcatagccttaatgatggaataaagagagctacggatatgcttttatccggaaagaaagcactggtaattgggtatggtgatgtaggtaaaggctcagcagctagcttagctcaagaaggaatggttgtaagagtaactgaaactgatcccatatgcgctatgcaggcatgcatggatggattctcacttgtttcatgttacaaggatggaaatgtaactggaaaagaagatgatattaataaagatcttcttcaagatactgatattttggttacaacaactggaaatgttaatgtttgcgattcagcaattctaaattctcttaaaaatggagcagtagtttgtaatattggtcactttgacactgaaatagatactgtttatatgaaagatgtttggcattgggaggagataaaaccacaggttcaccgagtctttagggattgttcacctaatcaggagcctgatctcaccagtaaaaactatatactcctgctagccgaaggaagacttgt

SEQ ID NO: 261715 - DNA, 229 bp, Unknown
  Bacterial polypeptide expressing nucleotide sequence isolated from the Sargasso Sea
tttgtaatgtcaaattcatttaccaatcaggtcatggctcaaattgcacttgcaaaagaagctcctgctgtaggggtttacatgcttccaaaggaattagatgaggaagtagcccgtttacatttagatcacttaggggtgattctaacagagttaacagatgaacaggcagactatattggtgtttctaaggaagggccatacaagccagaccactatagatattaat

SEQ ID NO: 261716 - DNA, 1120 bp, Unknown
  Bacterial polypeptide expressing nucleotide sequence isolated from the Sargasso Sea
catggaagattacaaagtaaaagatatatctcaagcagaatttggtagaaaagaaatttcaatagcagaaagtgaaatgcctggactaatggcacttagagaggagtactccggtaaattacctttaaaaggtgcaaaaattattggttgtttgcacatgacaattcaaacagctgtcttgatagaaacactagtagatttaggtgcggaagtaaggtggtcatcttgtaacatcttttcaactcaagaccatgctgctgcagcaatagcaaaagaaggaataccagtctatgcttggaaaggtgaaacagaggaggaatatctttggtgtataaaacaaacaattatagctaaaaaagattggaaacctaatatgcttttagacgatggaggtgacttgacagctataatgcataatgaatacaaagatttgttgaaagatgtaaaaggagtttcagaggaaactaccacaggaattaaagcactcaataaaatggaaaaagataaatcacttttagttccagcaataaatgtaaatgattctgtcacaaaatctaaatttgataatttatatggttgcagagaaagtttagttgatggaattagaagagctacagatgtaatgatgtcaggaaaaattgctatcgtagctggatttggagatgtaggcaagggaagtgcagcgtctttaagacaaagtggagcaagagttttaattactgaagcagaccctatatgtgctcttcaagcagctatggaaggttatgaggtagttttaatggaggaagctattaaaaaagcagatatcgttgtaactgcaactggcaacaaagatattgttacagcagatcatatgagagacatgaaagatagagctattctttgtaatataggtcattttgataatgaaattcaagtagaggcattaaaaaattacaagtggactgagataaaacctcaggttcatgaaatagaacttccaagcaaaaaaagaataatacttttagctgagggaagattggttaatttaggatgtgctacaggacacccaagttttgtaatgagtgcatcatttacaaatcaagtgatcgcacaaatagaactttggaaaaaccataaa

SEQ ID NO: 261717 - DNA, 229 bp, Unknown
  Bacterial polypeptide expressing nucleotide sequence isolated from the Sargasso Sea
tatgagtgcatcatttactaaccaagtaactgctcagatagagctttggaataattcagataaatacgaaaagaaagtttacgtattaccaaaacacttagatgaaaaagttgctagattacacttggaaaaagttggcgccaaacttacaaaaatgtctaaagaccaggcagactatatcagtgtaacacctgatggaccttacaaaccagatgcctatcgctactaa

SEQ ID NO: 261718 - DNA, 514 bp, Unknown
  Bacterial polypeptide expressing nucleotide sequence isolated from the Sargasso Sea
tttatggaagaagctataagtagagcagatatagttgtaaccgcaacaggaaataaagatattgtaactgcagaccacatgagagacatgaaagatagagcaatattatgtaacattggtcactttgacaatgaaatacaggttgaagctttgaaaaattataagtggactgaagtaaaaccccaagttcacgaaattgaattacctagtggtaaaagaattattttattagcagagggaagattggtaaatttaggttgtgcaacaggtcatcctagttttgttatgagtgcatcttttactaatcaggtaattgcacaaatagaactttggcataatcacaaaaattatgacaataaagtttatgtgctacctaaacatttggatgaaaaagttgctactttacatcttaaaaaagttggcgctaaattaactaaattgtctaaagatcaagcggattatataagtgtagggacagaaggtcctttcaaaccagatgcctaccgctattaaa

SEQ ID NO: 261719 - DNA, 1199 bp, Unknown
  Bacterial polypeptide expressing nucleotide sequence isolated from the Sargasso Sea
tatggaagattttaaagtaaaagatatttcactagcagaatttggaagaaaagaaatctcattagccgaaacagaaatgcctggtcttatggcgctaagaaaagagtataaaggtaaaaatcctttaaaaggtgcaagaattttaggatgtctgcatatgacaattcaaactgcggttcttattgaaacacttgtggatttaggagcagaggtaagatggtcttcatgtaatattttttcaactcaggatcatgcagcagcagctattgcaaaagcagggataccggtatttgcatggaaaggcgagacagaagaagaatattggtggtgtgttaaacaaacaatcgagggaaaaaaagattggaaaccaaatatgatacttgatgatggtggtgatttaactgcgttaatgcacaaagattacaaagacttattaaaaaacattaaaggattatccgaagaaacaacaactggtgtattagcacttaagaagatggaagctcaaggaacattattagttccagcaattaatgtaaatgactcagttacaaaatccaagtttgataatttatatggctgtagagaaagtttagttgatggaataaaaagagcgacagatgtgatgatgtcaggaaaagttgcaatagtagcaggatttggtgatgttggaaaaggtagtgctgcttcattaaggcagagtggtgcaagagtaatggtaactgaaacagatccaatatgtgcacttcaagctgcaatggaaggttatgaagtggttttgatggacgatatgataaaagaagcagatattgtagtaacagctacaggcaataaagatatagttacagcagatcatatgagagaaatgaaagatagagcaatactttgtaacattggacattttgataacgaaattcaagtcgaagcattaaaaaattataaatgggacgaaattaaaccacaagttcacgaaataactttgccaagtaaaaaaagaattatattgttagcagaaggaaggctagttaacttaggttgtgctactgggcatccaagttttgtaatgagtgcttcatttactaatcaggttactgctcagatagaactatggaataattcagataagtatgaaaaaaaagtttatgttttaccaaaacatcttgatgaaaaagtagcaagattacacttggataaagtaggtg

SEQ ID NO: 261720 - DNA, 539 bp, Unknown
  Bacterial polypeptide expressing nucleotide sequence isolated from the Sargasso Sea
agttacaacaactggtaacgtaaatgtttgtgattcagcaatgctaagtacattaaaaaatacagcggtagtatgtaatatcggtcatttcgataatgaaattgatactgcgtttatgagggataattactactgggatgaaatcaaacctcaagttcatagaatcttcagagatactaaacctgatggaacgcctgacttgtcaagcaaaaactatcttattcttttggctgaaggtcgattagtaaatcttggaaatgctacagggcatccaagtagaattatggatggttcttttgcaaaccaagttttggctcaaattcatttgtacaaacaaggttttgcaaatattaatgatgctgaaacaaaagcagagatgataacagttgaagttcttccaaagaaacttgatgaagaagttgcttcattaatggttgctgggttcggtggagtaatgacaaagcttacaaaagatcaagctgattatattaacgttcctcaagacggtccatttaaagaagaaagctacaaatattaat

SEQ ID NO: 261721 - DNA, 1033 bp, Unknown
  Bacterial polypeptide expressing nucleotide sequence isolated from the Sargasso Sea
gctgcagcaattgctgctgtaggaataccagtttttgcttggaaaggaatgaacgacgaagaattttggtggtgtattgaacagacattagaaggccctaatgattggaaaccaaatatgattttagatgatggaggagatgcaacaaaaattattcatgaaaaatttcctgatttactaaatgatatcaaaggtttatccgaagagacaaccactggtgtgcatcgtttgaaagatatggaaaaaaaaggccttcttaaagtaccagcaataaatgttaatgactcagttacaaaatcaaagtttgataatttgtatggttgcaaagaaagtttagttgatggaattaggagaggcaccgatgtaatgatggctggaaaaattgcagtagttgctggatacggagatgttggaaaaggttctgctgcaagtttaagaggtgctggtgcaagagtttgtgtaactgaagtagatccaattaatgctcttcaagcagctatggagggttatgaggttgttacaatgaatgatgcatgcgaatatggtgatatatttgttacagctacaggtaatgtagatgtaattactttagaacatatgcgcaaaatgagagatagagctattgtatgtaatattggacactttgataatgaaatacaaactgaagctcttagaaattataagacagatgaaataaagcctcaagttgatgaaattgagtttcctgatggaaaaaaattattacttttatcacagggaagattggttaatttagggaatgctaccggacatcctagttttgtaatgagtgcttcttttactaatcaagtgatggctcaattagagttgtggaataattataaaaattatgaaaataaagtttatgtattaccgaagcatttagacgaaaaagtagcatccttacaccttaaaaaagttggtgcaaaattaactgaattatctgataaacaagcggaatacataggagtagaaaaagcggggccatttaaagatgactcttacagatattaat

SEQ ID NO: 261722 - DNA, 1291 bp, Unknown
  Bacterial polypeptide expressing nucleotide sequence isolated from the Sargasso Sea
catgagtggagattttaaggttaaagacataagtttagctgattttggtgataaagaaattgcaatagctgaaacagaaatgcctggtttaatggcattaagagaagagtatggtgattctaaacctctagatggtgcaagaattgtaggttgtttgcatatgacaatacaaactgctgtcttgattgaaactctaatatttttaggcgccactgttagatggagttcatgtaatattttttccactcaagatcacgcagctgctgcaatagctgcaaaaggcattcctgtatttgcatggaaaggaatgacagaagaagaattttggtggtgtattgagaaaacactagaaggcccagatggttggaagccaaacatgattttagatgatggtggagatgctacaaaaataattcatgaaaagtatccaaaaatgttggaagaaattttaggtttatctgaagaaacaactacaggtgtccaccgtttgaaagaaatggaaaaaaatggaacattaaaggtgccagcaataaatgttaatgactcagttactaagtcaaaatttgacaacttatatggttgtaaggaaagtttggtagatggaataagaagaggtactgatgtaatgatggctggcaaaatagcagttgtagctggatatggagatgttggcaaaggttcagcagctagcttaagaggtgcaggcgcacgtgtttgtgtgactgaaatagatccgattaatgcacttcaagcagcaatggaaggttacgaagttgtcacaatggatgatgcttgtaaatatggtgatatatttgttactgccactggtaatcttgatgttattacgcaagatcatatgcgacaaatgagagatcgtgctattgtttgtaatattggacattttgataacgaaatacaaacagaagctcttcaaaattacaagtccgatgagattaaaccacaagtaagagaagtagagtttccagatgggaagaaaatattattactatcagaaggaagacttgttaacttaggaaatgcgactggccatccaagttttgttatgagtgcatcatttactaatcaagtattggcgcaacttgaactttggaaaaattctaaaaattatgaaaataaagtttatgttttaccaaaacatttagatgaaaaagttgcatcattacacttaaagaaagttggagcaaaacttacagaattaactgataaacaagcagaatatattggtgttagtaagcagggtccatttaaagataatacttacagatattag

SEQ ID NO: 261723 - DNA, 340 bp, Unknown
  Bacterial polypeptide expressing nucleotide sequence isolated from the Sargasso Sea
ttgtccagcaaaaactatattattttgctagctgaaggaaggttagtaaatcttggaaatgcaacaggacatcctagtagaattatggatggatcttttgccaatcaagttcttgcacaaattcatttatataaacaaggttttgcaaatataaatgatgctgataaaaaagcagaaatgttaaccgttgaagtattgcctaagaaacttgatgaagaagttgctagtctaatggttgaaggttttgggggaacggtaactcaacttactaaagaacaagctgattatattaatgttcctcaagatggaccttttaaagaagaaagttacaaatactaaa

SEQ ID NO: 261724 - DNA, 880 bp, Unknown
  Bacterial polypeptide expressing nucleotide sequence isolated from the Sargasso Sea
aatgcacgagaagtaccctgagctattaaaaaatgttagaggactatctgaagaaactaccacaggcgttcttcgtttagagcaaatggcatctaaaggaactcttcaagttccagctataaatgtgaatgactcggtaacaaaaagtaaatttgataatttatatggttgtaaggagagtttagtagacggtattcgaagaggaactgatgtaatgatggctggtaaagttgctgttgttgctgggtttggagatgttggaaaaggtagcgcagcttcattaagaggggccggggctagagttcaagtaacagaagttgatcctatttgtgcacttcaagcagcaatggaaggctatgaggttgtcactatggatgatgcatgtaagtatgctgatatatttgtaactgcaacaggcaacaaagatatcattacccaagaccatatgagagaaatgaaagaccgagcaattgtctgtaatatcggacactttgataatgaaattcaaatagatgatttgcaaaactataaatgggaagagataaaacctcaagttgaccaagtaacatttccggatggtaagaagctaataattctttcaaagggaaggttggtgaacctaggtaatgccactggccatcctagttttgtgatgagtgcatcattctcaaatcaggttttagctcaaatcgaaatttgggagaattacaaaaactatgaaaataaagtctatgtccttcctaaaaaactagatgaaatggttgcaatgtttcatttacaaaaagttggtgctaaactgactgaaatgtccaaggaacaaagcgattatttaggagttgagcaacaaggtccatttaagaaagatacatataggtactaa

SEQ ID NO: 261725 - DNA, 1246 bp, Unknown
  Bacterial polypeptide expressing nucleotide sequence isolated from the Sargasso Sea
aatgtctactataaaagacaaaaatctatcagtagtaggtcagcaggaagttgattgggctgctagacaaatgaaagttcttgaagaaattaaaacggagttctcaagtaataagcctttaaatggtttgaatataggtgcatgtatgcacgtaacaaaagaaacagctaatttaatgcttactttaaaagctgctggggcaaatgttgcattgtgtgcatcgaacccactatcaactaaagattcagtcgctgcctacctagctgaaaatgatgttgaagtacatgcagtacatggagtatcaaatgatgaattctttaagcatcttaattctgttttagacacaaaacctgacataacgatggatgatggagctgatttagttactctacttttaactgatagatctgatattccagtcatgggttcaatggaagagacaactactggggtaataagacttaagtcaatggaaaaaaataacaaacttcgttttcctgtcgttgctgttaatgactctgacacgaagcatttatttgataatcgattcggaacaggtcaaagtgcaatggatggtgttgtaagagcaaccgatctcttgattgctggtttagatgtggttgtgatcggttttggtgattgtgggaaaggagtagcagaacgagcatatggaatgggtgctaaagtgacagtcgttgagcctaactcagtacgtgctctagaagctttaatgcatggatatgaagtaaaaagtagtgttaatgctgcaaaaattgctgatgtaattgtatctgtaacaggaaacatgcatgcattagacaagaaacattttgatgtaatgaaagatggagtagttttagctaatgcaggacattttgatgtagaaatcaatttagaggcattaaaacaagatagtgctgaagtacatagagttagagatcatgtagaaagctatttgtacgatggtaaggaaatcttagtactagctgaaggaagactagttaatctagctgctgcaactggccatcctgcttcagtgatggatatgtcatttgccaatcaggctttggctgcagaatggattaaagaaaatcatgaagacctagagccaaaagtttatactcttccgaatgaagttgatttaaaaattgcagctacaaaattaggactcatgggtggagaattagaaatccttactaaagagcaaattgaatatctcgactcctgggagcatggcacaagctaa

SEQ ID NO: 261726 - DNA, 259 bp, Unknown
  Bacterial polypeptide expressing nucleotide sequence isolated from the Sargasso Sea
tatggccaatgaagattttaaagtagcagatattgaacaagccgaatttggtaggaaagaaatatctttagctgagacagagatgccaggtcttatggcactcagggatgagtataagggcaagaaaccactagatggtgcaaggatagttggctgtctacacatgactatacaaactgcagtcttaattgaaactttagtggaattgggagcagacgtcagatggtcatcctgtaatatttttcaacacaagatcatg

SEQ ID NO: 261727 - DNA, 1056 bp, Unknown
  Bacterial polypeptide expressing nucleotide sequence isolated from the Sargasso Sea
tcttttcaacacaagatcatgctgcagctgctctagcagccaaaggtattccaatatttgcatggaaagatgagagcgaagaagaatactggtggtgcgtagaaaaaacaatcaagggtccagatggttggacgccaaatctgatacttgatgacggcggagatttaacgggtctcatgcatgaaaaatatcctgagctgatgaaagacatcatcggtgtctcagaagagacgacaactggggtattgcgtctatacaacatggagaaagatggaacactcatgtgtcctgcaatcaatgtcaatgattcggtgacaaaatcaaaatttgacaatctctatggatgtcgcgaatcacttgtagatgggattaagagagcaaccgatgttatggtggctggaaaaattgcagtagttgctggatatggtgatgttggaaaaggctcagcacagagtctcagaggtttgggtgctacagtttggataaccgaaatagatccaatttgtgcccttcaagctgcgatggaaggatatcgagttgtgacaatggatgatgcttgttctcaggcagacatctttgtaactgccactggaaactacaatgttattgataaacatcacttagaacagatgaaggatcaagcaatcgtttgtaacattgggcattttgataatgaaatcaacgtagaatccatgaaagatcatgagtggatcaatatcaaacctcaagttgatcacattgttttccctgatggcaaaagaatcattctccttgctgaagggcgtttggtaaatctagggtgtggcacaggccatccgagtttcgtgatgtctaactcattctgtaatcaaactcttgcacaaatagaattattcaaaaacagctcaaattatgagaatcaagtttatgttctgccaaagtcattggatgaaaaagttgcaaaacttcatctcgataagataggagctaagctgaccaaattgactactgaacaagctgaatatattggtgttaaggaatcagggccatataagcctgatcattacagatactgat

SEQ ID NO: 261728 - DNA, 1135 bp, Unknown
  Bacterial polypeptide expressing nucleotide sequence isolated from the Sargasso Sea
tatgagtgattataaagttaaagatatatcagaagcagattttggaagaaaagaaatttcattggcagaaacagaaatgccgggcctaatggcgttgagagaagaatataaaggaaagagtccattaaaaggtgcaaagattcttggttgtcttcatatgacaatacaaacagctgtcttaattgaaactttagttgcattaggagccgaggttaggtggtcatcatgtaatattttttcaacacaagatcacgccgctgctgcaatagctaaagcaggaattcctgtatttgcctggaaaggcgaaacagaggaggaatattggtggtgtgtaagacaaacgattgaaggtaaaaaagattggaaacctaatatgatacttgatgacggtggtgatttaactgcattgatgcataaagattataaagaactattaaaagatattaaaggtctctcagaggagactacaactggagtattagcactaaagaaaatggaagcccaaggaacattgatggttcccgctattaacgtgaacgattcagtaacaaaatcaaaatttgataatctatatggatgtagagaaagtttagttgatggaattaaaagagctaccgatgtaatgatgtcgggcaaagtagcaatagttgcaggctttggagacgtaggaaaaggtagtgctgcttcacttagacaaagcggtgccagagttatggttactgaaactgatccaatatgcgctttacaagcagcaatggaaggttatgaagtggttttaatgaatgatatgataaaacatgcagacatagttgttactgcaactggaaataaagatattgttacagcggatcatatgagagaaatgaaagatagagctatattatgcaatattggacactttgataatgaaattcaagttgaagctttaaaaaactataaatgggatgaaataaaaccacaggttcacgaaataacacttcctagcaacaaaagaataatattattagctgaaggacgactagtaaaccttggttgtgcaacgggacacccaagctttgtgatgagtgcttcatttacaaatcaagttactgctcaattagaattatggaataattcagacaagtacgaaaataaa

SEQ ID NO: 261729 - DNA, 1240 bp, Unknown
  Bacterial polypeptide expressing nucleotide sequence isolated from the Sargasso Sea
catgagcgattataaagttaaagatatatcacaagcagaatttggcagaaaagagatctctctagcagagactgaaatgccaggattgatggcattaaggaaagaatataaaggaaaaaatcctcttaaaggagcaagaattttaggatgtcttcacatgacaattcaaactgctgttctaattgaaactcttgtagacttaggagcggaagtaagatggtcttcatgtaatattttttcaacacaagatcatgcagcagcagctattgcaaaggtaggcataccagtgtttgcatggaaaggtgagactgaagaggaatattggtggtgtgtaaaacaaacaatcgagggaaagaaggattggaaaccaaatatgattcttgatgatggaggtgacttaactgcgcttatgcacaaagactacaaagatttattaaaagatatcaaaggattgtctgaagaaacaacaacaggagtattagcacttaaaaagatggaagcccaaggaacattattagttccagcgattaatgtaaatgactcagttacaaagtctaaatttgacaatctatatggttgtagagaaagtttagttgatggaataaaaagagctaccgatgtaatgatgtctggaaaagttgcaattgttgcaggatttggtgatgttggaaaaggaagtgctgcatcgttaagacaaagtggagcaagagtaatggtaactgaaaccgatccaatatgtgctctgcaagctgcaatggaaggctacgaagtcgtactaatggacgaaatgattaaagaagcagatatagttgttacagctacaggaaataaagacatagtaactgctgatcatatgagagaaatgaaagatagagctatactttgtaatattggacacttcgataatgaaattcaagttgaagcattgaaaaattataaatgggatgaaattaagccacaagttcacgaaataactttgccaagcaaaaaaagaatcattctgcttgcagaggggaggctggttaatttaggttgtgctacgggacatccaagttttgtaatgagtgcttcatttactaatcaggtaactgctcagatagaactatggaataattcagataagtatgaaaaaaaagtttacgttttgccgaaacacctagatgaaaaagttgctagattacacttaggaaaagtaggcgctaaacttacaaaaatgtctaaagaccaggcagattatatt

SEQ ID NO: 261730 - DNA, 1288 bp, Unknown
  Bacterial polypeptide expressing nucleotide sequence isolated from the Sargasso Sea
atgagtgattataaagttaaagatataaacgaagcagaatttggaagaaaagaaatctctttggcagagactgaaatgcctggcttaatggctttaagaaaagaatataaaggaaaaaatccccttaaaggagcaaaaatcctaggttgtttacacatgacaattcaaacggcagttttaattgaaactttagtcgatcttggtgctgaagtaaggtggtcttcatgtaatatattttctactcaagatcacgctgcagcagcaatagcaaaagcaggcattcctgtttttgcatggaaaggtgagacagaagaggaatattggtggtgtgtaaaacaaacaattgaaggtaaaaaagattggaaacctaacatgattttagacgatggcggtgatttaactgcccttatgcataaagattataaagatttgttaaaagatataaaaggtttaagtgaagagacaacaactggagttttggctctaaaaaaaatggaagagcaaggaacattgctagtacctgctattaacgtaaacgactcagttacaaaatcaaaatttgataatttatatggatgtagagaaagtttagttgatggaattaaaagagcaacagatgttatgatgtcaggaaaagttgcaattgttgctggttttggggatgttggaaaaggaagtgcagcatctttgcgtcaaagtggagctagagtaatggttacagaaacagacccaatatgtgcacttcaagctgcgatggaaggctatgaagttgtattgatggatgagatgattggagaagcagatattgttgttactgctactggaaataaagatatagtaacggcagatcacatgagagctatgaaagatagatcaatcctatgtaatattggccacttcgataatgaaatacaagtagaggcgctaaaaaattataaatgggacgaaattaaaccacaagttcatgaaattacatttccagataataaaagacttattttattagcagaaggaagacttgtaaatttgggatgtgcaactgggcatccaagctttgttatgagtgcatcatttaccaatcaggttacagcgcaaatagaattatggaataattctgataagtatgaaaataaggtatatgtattaccaaaacatcttgatgagaaagtggcaaggttacatttagaaaaagttggagccaaattaactaaactgtcaaaagaacaagctgattatattagtgttacaacggaaggaccttataaaccagatgcttaccgctactaaa

SEQ ID NO: 261731 - DNA, 1291 bp, Unknown
  Bacterial polypeptide expressing nucleotide sequence isolated from the Sargasso Sea
atgtctcaagattttaaagtaaaagatattaatcaagcagaatttggcagaaaggaaatttctttagctgaaactgaaatgcctggattaatggcattgagaaaagaatataaaagtaaaaaacctttaaaaggagctcatattctagggtgtcttcatatgacaattcagacagctgttttgattgaaactttagtagagttaggagccgaagtgaggtggtcttcttgtaatattttttctacacaagatcatgcagcagctgctattgccaaagctggtatacctgtgtttgcttggaaaggcgaaacagaaaaagaatactggtggtgcgttaggcaaactatagaaggaaagaaagattggaaaccaaatctgattttagatgacggtggagaccttacagcgttaatgcataaagattataaagacatgctaaaaaatattaaaggtgtctcagaagaaacaacaacaggtgttctagctttgaaaaaaatggaagcaaagaaagagcttttaataccagcaattaacgtcaacgattcagttacaaaatcaaaatttgataatttatatggttgtagagaaagtttagtagatggaataaagagagcaaccgatataatgatgtccggaaaagtagctattgttgcagggtttggcgatgtaggcaaaggaagtgcagcatcattaagacaagccggtgctagagttatgataacggaaacagatccaatttgtgcattacaagcagcgatggaaggttatgaagttgtcttaatgaacgatgcaattaaacatgcggacatagtagtaactgccacgggaaataaagatattgtaacagctgaccatatgagagacatgaaagacagagcaatattatgtaacattggtcacttcgataatgaaattcaagttgaagctttaaaaaattataagtgggatgagataaaacctcaagttcatgaaatagaactaccaagcaaaaaaagaattattttattagccgaaggaagactggtaaacttaggttgtgcaactggtcaccctagttttgtaatgagtgcttcttttactaatcaagtaattgcacaaatcgaattatggaataattcagataaatatgaaaagaaagtttatgtgctgccaaaacatttagatgaaaaagtagctatgttacatttagaaaaagttggcgcaaaattgactaaaatgtcaaaagaacaagcagattatattagcgttaaaccatcaggcccatttaaaccagatacttatcgctactaga

SEQ ID NO: 261732 - DNA, 1249 bp, Unknown
  Bacterial polypeptide expressing nucleotide sequence isolated from the Sargasso Sea
aatgaattacgatgtgaaggatttaaatttagctgatgaaggaaaaaggaaagctgaatgggctgctaaagaaatgcctgttttaggcgaaatcaaaaaaagatttgaaaaagaaaagccattgcaaggttctaagatttctggttgcttacatgtaacttcagaaactgctaatttagcccttacattaaaagctggaggagctgatttttcattatgtgcatctaatcctctttcaactcaagatgatattgctgcttatctagtttcagcaggaattccagtttatgcaattaacggtgaagataatgaaacttattataagcatattaactctgtggtagaaaacaaaccaaatataaccattgatgatggtgctgatcttgtagcatatttacaccaagataaacctgaattaatgtcagaaataattggtggaatggaagaaacaacgactggagtaataagacttaaagctttagcaaatgaaaaaaaattaaaatatcctataattgcagcaaatgattcccaaactaaacatatgttcgataatagatatggaactggtcagagtacactagacggaataattagagcaacaaatatacttctttcaggtaagacttttgtaataattggatatggctggtgtggcagaggtttagcttcaagagccaaaggtatgggagctagaactatagtttgtgagatagatccagttaaagctttagaagctgtaatggacgggcatcaagttatgaaaatggatgaagcagttaaggaaggtgacttttttgttactcttactggagggcttcatgcaatcggtaaaagtcatcttgaaaatatgaaagatggagcaattgttgctaattcaggtcactttaatgtggaaatagacttagagtctcttgaagaaatgtcagagactaaaagtcgggttagacctttcgtagaggaatatgttttagaaaatggtaaaaaaatatgtgttcttggggaaggtagattgattaatttagctgctgctgaaggacatcctccttcagtaatggatatgagttttgctaatcaagcattggggtgtgagtttttaaaaaagaatagtttagaaataggagttcacgttcttgcagaagatattgataaagaaattgcagcactaaaactaaaagctatgcaaatgaattttgataaattaactccagctcaagaaaaatacttcaactcttgggatattggaacataa

SEQ ID NO: 261733 - DNA, 1003 bp, Unknown
  Bacterial polypeptide expressing nucleotide sequence isolated from the Sargasso Sea
atgaaagatgattttaaaataaaagatattaatctgtcagattttggtagaaaagagatttctatagcagaaaccgaaatgcctggcctgatggctttaagaaaagaatttaaaggaaaaaaacctcttaaaggagcaaatattttaggctgtttacacatgactatccaaactgcagtcctaattgaaactttagtagagcttggagctgatgttcgatggtcgtcatgtaatattttttctacccaagatcatgcagcagctgcaatagcaaaagcgggtataccagtttttgcctggaaaggtgaaacggaaaaagaatattggtggtgcattaagcagactatcgaggggaaaaaagattggaagccaaatatgttattagatgatgggggcgatcttactgcaatgatgcacaaagattataaagagcttttaaagtcagttagaggattatcagaggaaactaccacaggaattaaagctctaaaaaaaatggagtcgcaaaacaaacttctagtacctgcaataaacgtaaacgactcagttactaagtcaaaatttgataatctatatggttgcagggagagtttggttgacggtattaagagagccacagacgttatgatgtctggtaaaacagcgatagtagctgggtttggtgatgtgggtaaaggaagtgccgcatcattaagacaaagtggagcaagagttatggttacagaagccgacccaatctgtgctcttcaagcagcaatggaaggttacgaggtagttttgatggacgatgctattggtaatgcagatattgttgttaccgctactggaaacaaagatattgtaaacgcagatcatgttagaaagatgaaagatagagctatactttgtaatataggacactttgataatgaaatacaagttgatgcattaaaaaattacaaatggacagaaattaaacctcaagtacatgaaattgaacttccaagtaaaaaaagaattatac

SEQ ID NO: 261734 - DNA, 1423 bp, Unknown
  Bacterial polypeptide expressing nucleotide sequence isolated from the Sargasso Sea
gatgaacgccgcagttctcgattcaaacaagaagcaggatttcctcgtcgccgatatgtcgcttgcagcctggggccgcaaggagctgaacatcgccgaaaccgaaatgcccggtctcatgcaaacgcgtgaggaatacaagaactcgcagccgctgaagggcgcgcgcatcgcgggttcgctgcacatgacgattcaaaccggcgtgctgatcgaaaccttgacggcactcggggcggatgtgcgctgggcctcgtgcaatatcttctcgacgcaagaccatgcagccgccgcgattgcggaggggggcgtgccggtgttcgccttcaagggcgaatcgctcgacgaatactgggaattctcgcaccgcattttcgaatggccgaatggcgaattcgccaacatgatcctcgacgacggcggcgacgccacgttgctgctgatcctcggctcgaaggccgagaaagaccgttcggtgatctcgaagccggaaaacgaagaagaagtcgcgctgtacaagtcgatcgcccgtcatctggacgcagacccggtgtggtactccacgcgtctcgcgcacatcaagggcgtgacggaagaaaccacgaccggcgtgcatcgtctgtatcagatggaaaaggaagggcgcctgccgttcccggccatcaacgtgaacgattcggtcaccaagtcgaaattcgacaacctgtacggctgccgtgaatcgctggtcgacggtatcaagcgcgcgaccgacgtgatgatcgcgggcaagatcgcggtcgtggccggttacggcgacgtgggcaagggttgcgcgcaatcgctgcgcggtctgggcgccacggtgtgggtcacggaaatcgatccgatctgcgcgttgcaggccgcgatggaaggttatcgcgtggtgacaatggaatatgccgctgacaaggctgacattttcgttacggcaacgggcaattaccacgtgatcggccacgatcacatggcggccatgcgcaacaacgcgattgtctgcaacatcggtcacttcgattcggaaatcgacgtggcgtcgacgcgcaagtaccagtgggaaaacatcaagccgcaagtcgaccacatcattttcccggacggcaagcgcgtgattctgctggctgaagggcgcctcgtgaatctgggttgcgcaacgggccacccgtcgttcgtgatgtcggcctcgttcacgaatcagacgatcgctcagatcgaactgttcgtgcacggcgacaagtacgaaaacaaggtctatgtgctgccgaagcaccttgatgaaaaggtcgcgcgtctgcatctgggccgtatcggcgcggaactgacggtgctgtcggactaccaggcgaactacatcagcgtcgacaagaacggtccgttcaagccgaaccactaccgttactaa

SEQ ID NO: 261735 - DNA, 1396 bp, Unknown
  Bacterial polypeptide expressing nucleotide sequence isolated from the Sargasso Sea
aatggaaaatgattataaagtagctgatattaatttagctgaatttggtagacgagaaatctctcttgctgaaaatgaaatgccagcactaatggcacttagagaaaaatataaggatgaacagcctttggctggggctaaaataatgggttgtattcatatgaccattcagactgcagtattgatggaaactcttttggagcttggcgcagaactaagatggtcttcatgtaatatattttcaactcaagaccatgccgctgctgctatggctgcaagaggagttcctgtttttgcatggaagggtgaaactgaagaagaatatgaatggtgtattgaacaaactatttgtaaagatggcaacccatgggatgcaaatatgattctcgatgatggcagtgacttgactgctatggtacatgaaaaatttcctgacatgttagagacaattcatggtgtttccgaagaaaccactacaggagttcataggctaaaagagatgctagagaaaggtgagcttaaaatacctgcaataaatgtaaatgactctgttacaaaagctaaaaacgataataaatacggttgtaggcatagtctgaatgatgctctaaagagagggactgacatgttgttatctggcaagaaaggtcttgttattggttatggtgatgttggaaaaggatcggctgccagcttagcccaagaagggatgatagtaagagtagtcgaatcagatcccatatgcgccatgcaagcatgcatggatggcttttcagtagtttcctgttataaagatggggttgttactagagatcctaaagacattaatatggaaattatgggggatacagacctaatagttacaacaactggtaatgtaaatgtatgtgattcagcaatgttaagcactttaaaaaatactgcggtagtatgcaatattgggcattttgataatgaaattgatactgcttttatgagagaaaacttctattgggatgaaattaaacctcaagtgcatagagtttttagagatactcctcctgatgggacacctgatctctcaagtaaaaactatatcatactgcttgcagagggaagattagtaaatcttgggaatgctacaggtcacccaagcagaattatggatggatcatttgcaaatcaagttttagcacaaattcatttatataaacaaggctacgctaatgtgaatgatgcagacaaaaaagctgaaatgctaactgttgaagttttaccaaaaaaattagatgaagaagtagctagtcttatggtccagggttttggtggtactgttactcaacttactaaagagcaagcagactatattaatgttccacaagaaggaccatttaaggaagaaacttataaatactaa

SEQ ID NO: 261736 - DNA, 700 bp, Unknown
  Bacterial polypeptide expressing nucleotide sequence isolated from the Sargasso Sea
ttagtagatggcataagacgagcaactgatgttatgatgtcaggtaaaattgcaattgtagcaggctttggagatgttggaaaaggaagtgctgcatctttgagacaaagtggagcaagagtattagtcactgaagcagatccaatttgtgctcttcaagctgcaatggagggttacgaggttgttttaatggaagaagctataagtagagcagatatagttgtaaccgcaacaggaaataaagatatcgtaactgcagaccacatgagagacatgaaagatagagcaatattatgtaacattggtcactttgacaatgaaatacaggttgaagctttgaaaaattataagtggactgaagtaaaaccccaagttcacgaaattgaattaactagcggtaagagaattattttattagcagagggaagattagtaaatttaggttgtgcaacaggacatcctagttttgttatgagtgcatcttttactaatcaggtaattgcacaaatagaactttggcataatcacaaaaattatgaaaacaaagtttatgtactgcctaaacatttggatgaaaaagttgctactttacatcttaaaaaagttggcgctaaattaactaaattatctaaagatcaggcggattatataagtgtagggacagaaggtccttttaaaccagatgcctaccgctattaaa

SEQ ID NO: 261737 - DNA, 367 bp, Unknown
  Bacterial polypeptide expressing nucleotide sequence isolated from the Sargasso Sea
gctcttaaaaattataagtggactgaagtaaaccctcaagtacatgaaatagagttaccaagtggaaaaagaattattcttttagcagaaggaagattggttaatcttggttgtgcaactggacacccaagttttgtaatgagtgcttcatttactaatcaagttattgctcaaatagaactttggcataattataaaaattatgaaaataaagtttacgtgcttccaaaacatttagatgaaaaagtagcaactttgcatttaaaaaaagttggggcaaagctaacaaaattatcaaaagaacaagcagattatataagcgttggaacagaaggtcctttcaaaccagatgcctatcgctattaaa

SEQ ID NO: 261738 - DNA, 1113 bp, Unknown
  Bacterial polypeptide expressing nucleotide sequence isolated from the Sargasso Sea
aatgagtaagcaagattacaaagtaaaagatatctctcttgcagaatatggaaggcaagaaattttattagctcaagatgaaatgcctgctttaatgcaattaagagataattataaagatcaacaacctcttaagggcgcaaaaataatgggctgtatacacatgactgtccaaactgctgtcttaattgagactttaattgaattaggcgctgaggttagatggtcttcatgtaatattttctcaactcaagatcatgcagctgctgcaattgctgatcaaggtattcctgtttttgcttggaaaggcgagactgaagaagaatatgagtggtgtctagatcaaactattaataaagacggtaaaccttgggaggcaaatttaattttagatgatggaggtgatcttactcttaaagtacataaagattaccctgaaatgctctcaaaaatccatggagtttctgaagaaacaacgacaggggttaaacgactaaaagaaatgctagaaagcggcgaattgaaagttccagctataaatgtaaatgactctattactaaatcgaagaatgataataaatatggatgtaggcatggtctggacgacgctatcaaacgaggaacagatatgcttttatctggcaaaaaggctcttgtaattggttatggtgatgtgggtaaaggttcagccgattcattgaatcagcaaaaaatgatcgttgatattactgaaattgacccaatctgtgcaatgcaagcatgttttgatggatttagtgttgtctctgcttacgaaaatgggaatgttggtcaagatggtaagaatttagataaaaaactattagaaaaatacgatttagttgtaaccacaacaggcaatatcaatgttttagatagacatatgctcgatgctctaaaatctggctgtgttgtttgtaacatagggcattttgatagtgaaatagatgttaagcatttaaagaactatgaatggaaagagattaaacctggcgttcataaaataataagaaacaaagatgaatatataattcttctgggtgaaggcaggctagttaatttagctttagcaacccggacatccaagcagagtca

SEQ ID NO: 261739 - DNA, 758 bp, Unknown
  Bacterial polypeptide expressing nucleotide sequence isolated from the Sargasso Sea
tgttaatgattcagtgacaaagtcaaaatttgataatttatatggatgcagagaaagtttagtcgacggaattaaaagagctacagatgtaatgatgtcaggtaaagttgcaattgttgcaggatttggtgatgttggtaaaggtagcgcagcatcattgaggcaatctggagcaagagttatgattactgaaactgatccaatatgcgccttacaggcagcgatggaaggttatgaggtagtcttaatggatgaaatgattaaagaggctgatatagtggtaaccgcgaccggcaacaaagatattattacagcagatcatatgagagatatgaaggatagagcgatactatgtaatattggacactttgataacgaaatccaagtagaggcattaaaaaattataagtgggatgaaattaaaccacaagtacacgaaatagaattaccaagcaaaaaaagaattattcttttagctgaaggtagacttgttaatcttggatgtgcaacaggtcacccaagttttgtaatgagtgcatcttttacaaatcaagttactgctcaaatagaactttggaacaattcctcgaaatacgaaaaaaaggtttatgttttaccaaaacatcttgatgagaaggtagcaatgttacacctagaaaaagtgggagcaaagttaacaaaactgtcaaaagaacaagctgattatattagcgtaaaacaagaagggccatataagccagatgcttaccgctactaat

SEQ ID NO: 261740 - DNA, 701 bp, Unknown
  Bacterial polypeptide expressing nucleotide sequence isolated from the Sargasso Sea
tttagtagatggcataagacgagcaactgatgttatgatgtcaggtaaaattgcaattgtagcaggctttggagatgttggaaaaggaagtgctgcatctttgagacaaagtggagcaagagtgttagtcacagaagcagatccaatttgtgctcttcaagctgcaatggagggttacgaggttgttttaatggaagaagctataagtagagcagatatagttgtaaccgcaacaggaaataaagatatcgtaactgcagaccacatgagagacatgaaagatagagcaatattatgcaacattggtcactttgacaatgagatacaggttgaagctttgaaaaattataagtggaccgaagtaaaaccccaagttcacgaaattgaattacctagtggtaagagaattattttattagcagagggaagattagtaaatttaggttgtgcaacaggacatcctagttttgttatgagtgcatcttttactaatcaggtaattgcacaaatagaactttggcataatcacaaaaattatgacaacaaagtttatgtactgcctaaacatttggatgaaaaagttgctactttacatcttaaaaaagttggtgctaaattaactaaattgtctaaagatcaagcggattatataagtgtagggacagaaggtccttttaaaccagatgcctaccgctattaaa

SEQ ID NO: 261741 - DNA, 1132 bp, Unknown
  Bacterial polypeptide expressing nucleotide sequence isolated from the Sargasso Sea
atgacaatccagacagctgtactaattgaaacacttattgaattaggagcagaagtaagatggtcatcttgcaatattttttcaactcaagatcatgctgccgctgctattgctaaagctggtatacccgtttttgcatggaagggcgaaactgaagaagaatacttgtggtgtatcaagcagactattgttggaaaatctgattggaaaccaaatatgttattagatgatggtggcgacctaactgccattatgcataacgaatataaagatttaatgaaagatgttaaaggggtttcagaagaaaccactactggaattaaggcacttaataaaatggaaaaagataaatctcttttagtgccagcaattaatgtcaacgattctgtaactaaatcaaaatttgataacctttatggttgtagagaaagtttagtagatggtataagacgagcaactgatgtaatgatgtcaggtaaaattgcaattgtagcaggctttggagatgttggaaaaggaagtgctgcatctttgagacaaagtggagcaagagtattaattacagaggcagatccaatttgtgctcttcaagctgcaatggagggttacgaggttgttttaatggaagaagctataagcagggcagatatagtcgtaaccgcaacaggaaataaagatattgttactgcagaccatatgagagacatgaaagatagagcaatattatgtaacattggtcactttgataatgaaatacaggttgaagctttgaaaaattataagtggagcgaagtaaaacctcaagttcatgaaattgaattacctagtgggaagagaattattttattagcagaaggaagattagtcaatttaggttgtgcaacaggtcatcccagttttgttatgagtgcatcttttactaatcaagtaattgcacaaatagaactttggcataatcaccaaaattatgacaataaagtttatgtgttgcctaaacatttggatgaaaaagttgctactttacatcttaaaaaagttggtgctaaattaactaaattgtctaaagatcaagcggattatataagtgtggggacagaaggtccttttaaaccagatgcctaccgctattaaa

SEQ ID NO: 261742 - DNA, 1057 bp, Unknown
  Bacterial polypeptide expressing nucleotide sequence isolated from the Sargasso Sea
atgagcgattataaagttaaagatatatcacaagcagaatttggaagaaaagaaatctccctagcagagactgaaatgcctggactaatggcattgagaaaagagtacaaagggaaaaatcctttaaaaggtgcaaggattttaggatgtcttcatatgacaattcaaacagcagttcttattgaaactcttgtggacttaggagcagaagtgagatggtcttcgtgtaacattttttcaacccaggatcatgcagcggcagctatcgccaaggtaggaataccagtttttgcatggaaaggtgagactgaagaagaatattggtggtgtgtaaaacaaacaattgagggaaagaaagattggaaaccaaatatgatccttgatgatggcggtgatttgaccgcacttatgcataaagattataaagatttattaaaagatattaaaggattatcagaagaaacaaccactggagtattagcacttaagaagatggaagcacaaggaacattattagttccagcaattaacgtaaacgactctgttacaaagtctaaattcgacaatttatatggttgtagagaaagtttagttgatggaataaaaagagcaacagatgttatgatgtctggcaaagttgctattgttgcaggatttggtgatgttggaaaaggaagtgctgcgtcattaagacaaagtggagcaagagtaatggtaaccgaaactgatccaatatgtgccctacaagctgcaatggaaggttatgaagttgtactaatggacgaaatgattaaagaggcggatatagttgtaacagcaacagggaacaaagacatagtaacagccgatcatatgagagaaatgaaagatagagcaatattatgtaatattggacactttgataatgagattcaagttgaagcattaaaaaattataaatgggatgaaattaagccacaagttcatgagataactttgccaagcaagaaaagaataattttacttgctgaaggaagactggttaatttaggatgtgctactggacatccaagttttg

SEQ ID NO: 261743 - DNA, 946 bp, Unknown
  Bacterial polypeptide expressing nucleotide sequence isolated from the Sargasso Sea
aattgaaggaaagaaggattggaagccaaatatgatccttgatgacggcggtgacttaactgcacttatgcataaagattataaagatttattagaagatataaaaggattatccgaagaaacaacgactggagtactagcacttaaaaagatggaagcgcagggaacattattagttccagcgattaacgtgaatgattcagttacgaagtccaaatttgacgatttatatggttgtagagaaagtttaattgatggaattaaaagagcgacagatgtaatgatgtcaggcaaagttgcaatcgttgcagggtttggtgatgttggaaaaggaagcgctgcttcattaagacaaagtggagcaagggtaatggttactgaaacagatccgatatgtgctctgcaagccgcaatggaaggttacgaagttgtactgatggacgaaatgatcaaagaggcagatatagttgtcacagcaacaggaaacaaagacatagtgacggctgatcatatgagagaaatgaaagatagagcaatactttgcaatattggacacttcgataatgaaattcaagttgaagcattgaaaaattataaatgggatgaaatcaagccacaagttcatgaaattacattaccaagcaaaaaaagaataatattacttgctgaagggagattagttaacctaggttgtgccactggacatccaagcttcgtaatgagcgcttcatttaccaatcaggtaactgctcagatagaattatggaataattcagacaagtatgaaaacaaagtttacgttttgccaaaacatcttgatgaaaaagtagccagattacacttggaaaaagtaggtgcaaaactcacaaaaatgtctaaagatcaggcagactatattagtgtaacacctgatggaccttacaaaccagatgcctatcgctactaa

SEQ ID NO: 261744 - DNA, 1396 bp, Unknown
  Bacterial polypeptide expressing nucleotide sequence isolated from the Sargasso Sea
atggaaaacgattataaagttgctgatataaaacttgctgaatttggaaggagagaaatatctcttgcagaaaatgagatgccagccttaatggctttaagggataaatatcgagacgagcagccattggctggtgcaaaaataatgggatgcattcacatgactattcagactgctgttttgatggaaacattactcgatctcggagcagaattaagatggtcatcctgtaacatattttcaacacaggatcacgcagcagcagcaatggctgcaaaaggagttcctgtatttgcttggaaaggtgaaactgaagaggagtacgagtggtgcattgaacaaactatttgtaaagatgggaagccatgggatgcaaatatgattcttgatgatggaagtgatcttacagctatggtgcatgctaagtttcctgacatgttagagactatccatggtgtgtctgaagaaacaactactggggtacataggttaaaagagatgctagaaaaaggcgaactaaaaattcctgctattaatgtaaatgactcagttacaaaagcaaaaaatgataataaatatggatgcagacatagtcttaatgatgctctaaaaagaggaaccgatatgttgctttctggtaagaaaggattagtaattggttatggagatgttggtaaaggttcggctgcaagtttggctcaagaaggcatgatagtaagtgttgttgaatcagatccaatctgtgcgatgcaggcatgcatggatggatttgcagttgtctcatgttacaaaaatggtgtggtaaccagagatcctaaggatattaatatggatgtcatgggtgatacagatctaatagtaactactactggcaatgtaaatgtttgtgattctgcaatgataagcactttaaaaaatactgcagttgtgtgtaacattggtcattttgataatgagattgatactgcttatatgagagaaaactattactgggatgagattaagcctcaggttcacagagtttttagagatacagccccagacggaactcctgatttgtccagcaaaaactatattattttgctagctgaaggaaggttagtaaatcttggaaatgcaacaggacatcctagtagaattatggatggatcttttgccaatcaagttcttgcacaaattcatttatataaacaaggttttgcaaatataaatgatgctgataaaaaagcagaaatgttaaccgttgaagtattacctaagaaacttgatgaagaagttgctagtctaatggttgaaggttttgggggaacggtaactcaacttactaaagaacaagctgattatattaatgttcctcaagatggaccttttaaagaagaaagttacaaatactaaa

SEQ ID NO: 261745 - DNA, 478 bp, Unknown
  Bacterial polypeptide expressing nucleotide sequence isolated from the Sargasso Sea
aaaaattgcagatgtcattatttctgtcacaggaaatttacatgcattagataaacaacattttgatgtcatgaaagatggagttgcgttggcaaatgctggccattttgatgtagaaataaatttagaagcacttaagaatgaaagtacaaaagtagagagagtaagagaacatgtagagagctataaatataaagacaaagaaattttagtactagctgaaggaagattagtcaatctcgcagcagctaccgggcacccagcttcagttatggatatgtcttttgcaaaccaagctttggcatcagaatggattaaagagaattatgaaaaattagaatctaaggtatacacattacctaaggaagtagatattaaaatagctgcaacaaaattagggctaatgggcggtgagttagagatattgtcagatgaacaaataaaatatctagattcttgggagcatggtacaagctga

SEQ ID NO: 261746 - DNA, 1074 bp, Unknown
  Bacterial polypeptide expressing nucleotide sequence isolated from the Sargasso Sea
gtaatatattttctacacaagatcatgctgcagctgctattgcagctaaagggattgctgtctatgcatggaaagatatgacagaagaggaatttaattggtgtattgaacaaacactattttttggcgaagaaaaaagtccattaaatatgatacttgacgatgggggtgatcttacaaatatggtacttgatgagtatccagaacttgtatcaggaattaaaggtttatctgaggaaactaccacaggggttcataggctgtatgatagaatgaagaatggcactttaccacttcctgctataaatgttaatgattctgttacaaagtctaagtttgacaataagtatggatgtaaagagagtgcagttgatgctgtaagacgagcaactgatatcatgcttgcgggtaaaagagttgttgtctgtggatatggagatgttggtaaaggaacagcagcatcatttagaggtgctggatcaattgttacggttactgaaatagatcctatatgtgcacttcaagcctcaatggatggttatgaagttaaaaagttaaagacagttatttcaaatgctgatattgttgttacagctacaggtaataaagatatagtaaataaagaagtatttagaatgatgaaggataagactatagtatgtaatattggtcattttgataatgagattgacatgaactggttagaaactaatttctctgaacagaaaactaatattaagcctcaagttgactcatttagaatttcaaaggataaagagatcataattcttgctgaaggaagactcgtaaaccttggttgtgctaccggtcatccaagttttgttatgagtaactcttttacaaaccaggtattagctcaaatagagctttggaataatgcagataattacgagaataaagtatatatgctaccaaaaaatttagatgaaatggtggctatgcttcatctagataaattaggcgttgagcttgaagagttatctagtgaacaagctaaatacattggagtccaaaagaatggaccatttaaaccagaatattataggtattaag

SEQ ID NO: 261747 - DNA, 1112 bp, Unknown
  Bacterial polypeptide expressing nucleotide sequence isolated from the Sargasso Sea
tcctgtttttgcctggaaaggtgaaactgatgaagaatatgaatggtgtattgaacaaacaatatgcaaagatggaaatccatgggatgcaaatatgattcttgatgatgggagtgatcttacatcaatggttcatgcaaaatttccagatatgttagaaactattcatggtgtatctgaagagactactacaggggttcataggttaaaagaaatgcttgagaaaggtgagctaaaggttcctgcaattaatgtaaatgattcagttacaaaagcaaaaaatgataataagtatggttgtaggcatagtcttaatgatgcgcttaaaagaggaactgacatgcttctttctggaaagaaagggcttgtaattggttacggtgatgttggcaaaggttctgccgcgagtttagctcaagaaggaatgatcgtgagtgttgttgaatctgatcccatctgtgcaatgcaagcttgtatggatggtttttcagttgtttcttgctataaagatggggttgttacaagagaccctaaagacataaatatgactgttatgggcgatactgatctagtagtaacaacaactggtaatgtgaatgtttgtgattctgcaatgattagtactcttaaaaatactgcggtggtatgtaatattggtcattttgataatgaaatagatacagcctttatgagagagaattactattgggatgaaattaagccacaagttcatagagtatttagagatactgcaccagatggaactcctgatctttcgagcaaaaactacataatcttacttgctgaaggaaggctggttaatttaggaaatgcgacagggcatccaagtagaattatggatggttcttttgctaatcaggttcttgcacaaatacatttatataaacaaggctttgctaatgtaaatgatgctgataaaagagctgaaatgataactgttgaagtgcttccgaaaaaattagatgaagaggttgcgagtttaatggttgaaggttttggtgggactgtaacaaagcttactcaggatcaagcagactatattaatgttcctcaagatgggcccttcaaagaagaaagttataaatattaaa

SEQ ID NO: 261748 - DNA, 1084 bp, Unknown
  Bacterial polypeptide expressing nucleotide sequence isolated from the Sargasso Sea
agctgaagtaagatggtcttcgtgtaatattttttctacccaagatcacgcagctgctgcaattgcaaaagctggaatacctgtttttgcatggaaaggtgaaacagaggaagaatattggtggtgtgtcaaacaaactattgaaggtaaagaaggttggaaaccaaatatgatacttgatgatggtggagatttaacagccttgatgcacaaagattataaagatttattaaaagatataaaaggtttgtcagaagaaactacaactggagttttagctttgaaaaaaatggaaagcgagggaactttacttgtacctgcgataaacgtaaacgactctgttacaaaatctaaatttgataacctttatggttgtagagaaagtttagttgatggaataaaaagagcaactgacgtaatgatgtcaggaaaagttgctatcgtagcaggttttggtgatgttggaaaaggaagtgctgcatcacttcgtcaaagtggtgcaagagttatggttactgaaactgatcctatttgcgcacttcaagctgcaatggaaggttatgaagtagtattaatggacgatatgatcaaagaagctgacattgttgtaacagctactggaaacaaagatgtagttacagctgatcatatgagagatatgaaagatagagctatactttgcaacattggacactttgataatgaaattcaagttgaagcactaaaaaattataagtgggatgaaatcaaaccacaagttcatgaaattactttacctagcaataaaagaataattttacttgccgaaggaagactggtaaatcttggttgtgcaacaggacaccctagttttgtgatgagtgcatcatttacaaatcaggtaactgctcaaattgaactttggaataattcagataagtatgaaaagaaagtatatgttttaccaaaacatttagatgaaaaagttgcaagacttcacttagaaaaagttggggctaaattaactaagttatctgaggatcaagctcaatatattagtgtaactacagaaggaccatacaagcctgatgcgtatcgctactaa

SEQ ID NO: 261749 - DNA, 1100 bp, Unknown
  Bacterial polypeptide expressing nucleotide sequence isolated from the Sargasso Sea
tttggttgcactaggtgctgaagttagatggtcatcttgtaatatcttttctacccaagatcacgcggccgctgcaattgcaaaagcgggcattccagtttatgcatggaaaggtgaaacagaagaagaatacttgtggtgcattaaacaaaccattgttggtaaaccagattggaaaccaaacatgttattagatgatggtggtgatttaacagctataatgcacaatgaatatcaggacttaatgaaagatattaagggtgtttctgaggagactacgacaggaattaaagctcttaataaaatggaaaaagacaaatctcttttagttcctgcgattaatgtaaatgactcagttactaaatcaaaatttgataatttatatggatgtagagaaagtttagttgatggcattagaagagcaacagatgtaatgatgtcaggaaaaattgctattgttgcaggttttggtgatgtgggtaaaggtagtgcggcatctttgagacaaagtggagcaagagttttagtaacggaagctgatccgatttgtgctctacaagctgcaatggaaggttatgaagttgtattaatggaagaagcaataagtagagccgatatagttgtaacagccacaggaaataaagatattgtgacagctgatcacatgagagatatgaaggatagagcaatattatgtaacattggacattttgataatgaaatacaagttgaagctctaaaaaattataaatggacagaggtaaaaccccaagttcatgaaatagaacttcccagtggtaagagaattatacttttagcagaaggaagattagtaaatttaggatgtgcaactgggcatccaagctttgttatgagtgcatcatttacaaatcaggttatagcccagattgagctttggcataatcataaaaattatgaaaataaagtatatgtgttaccaaaacatttagatgaaaaagtagccacactacacttaaaaaaagttggagcaaaactaactaagctatcaaaagaccaagcggactatataagcgttaaaacagagggtcctttcaagccagatgcctatcgctattaaa

SEQ ID NO: 261750 - DNA, 754 bp, Unknown
  Bacterial polypeptide expressing nucleotide sequence isolated from the Sargasso Sea
aatgactctgtaactaaatctaaatttgataatttatatggctgtagggagagcttagtagatggaataaaaagagccacagatgtcatgatgtctggaaagacagctattgtagctgggtttggagatgttggtaaaggtagcgctgcttctctaagacaaagtggagcaagagttatggtaacagaagcagatcctatttgtgcattacaagctgccatggaaggatatgaagtagtattaatggatgaagcgattagtgatgcagacatagttgtaacagcaaccggcaacagagatattgttacagcagatcacatgagaaaaatgaaagatcgttctatactatgtaatataggacattttgataacgagattcaggttgaagctttaaaaaattataaatggaatgaaataaaaccacaagttcacgaaatagagtttcctgataaaaaaagaatcatccttttagctgaaggaagattagtgaatcttggctgtgcaactggtcatcctagctttgttatgagtgcatcttttaccaatcaagttatggctcagatagaactatggaataatcacaaaaactatgaaaataaagtttatgttttacctaaacatttagatgaaaaagttgccatgcttcatctaggtaaagttggagctaaattaactaaactcacaaaaaatcaagcagattatataagcgtagatactaaaggaccatttaaatctgatagctatcgctactaaa

SEQ ID NO: 261751 - DNA, 1066 bp, Unknown
  Bacterial polypeptide expressing nucleotide sequence isolated from the Sargasso Sea
ttcttgtaatatcttttctacacaagatcatgcagcatcagcgattgctaaagctggtatacccgtatttgcttggaaaggcgaaacagagacagaatactggtggtgtgttaaacaaactatagaaggaaagaaagattggaagccaaatatgattctagatgatggtggagatcttacggctttaatgcataaagattacaaagatttgcttaaaagtatcaagggagtttcagaagaaacaactacaggtgttttggcgttaaagaaaatggaagcaaaaaaagaacttttaatacccgcaattaacgtaaatgactcagttacaaaatcgaaattcgataatttatatggttgcagagaaagtttagtagatggaataaagagagcgacagatgttatgatgtcagggaaagtagctattgttgcaggatatggtgacgttggaaaaggaagcgcagcatcactgagacaagcaggcgctagagttatggtaaccgaaacggatccaatttgtgctctacaagcagcgatggaaggatatgaagttgtattaatggatgaagctattaaagatgcagatatcgtagtaactgctacaggaaacaaagatattgtaacagcagatcatatgagagatatgaaagatagagcaatattgtgtaatattggtcactttgataatgaaattcaagttgaagcgttaaaaaattataagtgggatgaaataaaacctcaagttcatgaaatagagttgccgagtaaaaaaaggattatccttttagccgaaggcagattagttaacctaggatgtgctactggacatcctagttttgtgatgagcgcttcatttacaaatcaagtaattgctcaaattgaattatggaacaattcagataaatatgagaaaaaggtttatgtacttccaaagcatcttgatgaaaaagttgcgatgcttcacttagaaaaagtaggtgccaaactaacaaagatgtcaaaagagcaagccgattatatcagcgttaaaccatcaggaccatttaagccggatacttatcgctactag

SEQ ID NO: 261752 - DNA, 1024 bp, Unknown
  Bacterial polypeptide expressing nucleotide sequence isolated from the Sargasso Sea
atagctgctaaaggcattccagtttttgcttggaaaggaatgacagaagaggaattttggtggtgtattgagaaaacactagaaggcccagatggttggaagccaaatatgattttagatgatggtggagatgctacaaaaataattcatgaaaagtatccaaaaatgttggaagaaattttaggtttatctgaagaaacaactactggtgttcaccgattgaaagaaatggaaaaaaatggaacgttaaaggtgccagcaataaatgttaatgactcagttactaagtctaaattcgataacttatatggctgtaaggaaagtttagtagatggaataagaagaggtacagatgtaatgatggctggtaaaatagctgttgtagctggatatggagatgttggaaaaggttctgcagcaagcttaagaggtgcaggtgcacgtgtttgtgtgactgaaatagatccaattaatgctcttcaagcagcaatggaaggttacgaagttgttacaatggatgatgcttgtaagtatggtgatatatttgttactgctacaggtaatcttgatgttattactcaagatcatatgagacaaatgagagatcgtgcaatcgtttgtaatattggacattttgataacgaaatacaaacagaagctcttcaaaattacaagtctgatgagattaaaccacaagtaagagaagtggaatttccagatgggaagaaaatattattactatcagagggaagacttgttaacctaggaaatgcaaccgggcatccaagttttgttatgagcgcatcatttactaaccaggtcttggcccaacttgaactttggaaaaattctaaaaattatggaaacaaagtttatgttttaccaaaacatttagatgaaaaagttgcatcattacacttaaagaaggttggagctaaacttacagaattaactgataaacaagcagagtatattggtgttagtaaacaaggtccatttaaagataatacttacagatattagg

SEQ ID NO: 261753 - DNA, 656 bp, Unknown
  Bacterial polypeptide expressing nucleotide sequence isolated from the Sargasso Sea
aacggttttagtttgtggctatggagacgttggaagagggtgtgttcaatctatgagagggtatggtgctagagtattagtcactgaaattgatcccatatgcgctttacaagctgctatggaagggtatgaggttgttacaattgatcaagctatttcagaaacaaatatttttgtatcggctactggtaatcgagatgtaattacttttgatcatatgaaaaaaatgaatgatcaagctatagtatgtaatatcggtcactttgataatgaaatacaggttgataaattaaatgaatcatctaatgttcatcgagatactatcaagccacaagtagatcgatatacttttgatgatggtcattcagtataccttcttgctgaagggagattaatgaatcttggttgtgcaacaggacaccctagctttgttatgtcaaactcttttaccaatcaggtgcttgctcagatagctttggcggaagaaaaacctgaactcggtgtgtatatgcttccaaaggaattagatgaagaggttgcacgtttgcatcttgatcatcttggagtaactcttactgaattatctgatgagcaggcagattatattggtgtatcaaaatctggtccttataaacccgatcattatagatattaat

SEQ ID NO: 261754 - DNA, 769 bp, Unknown
  Bacterial polypeptide expressing nucleotide sequence isolated from the Sargasso Sea
gccagcaataaatgttaatgactcagttactaagtctaaattgacaaacttatatggtgtaagggaaagtttagtagatggaataagaagaggtactgatgtaatgatggctggtaaaatagccgtagtagctgggtatggagatgttggtaaaggttcagcagctagcttaagaggtgcaggcgcacgtgtttgtgtgactgaaatagatccaattaatgcacttcaagctgcaatggaaggttacgaagttgtcacaatggacgatgcttgtaaatatggcgatatatttgttaccgccactggtaatcttgatgttattacacaagatcatatgagacaaatgagagatcgtgctatcgtttgtaatattggacattttgataacgaaatacaaacagaagctcttcaaaattacaagtctgatgagattaaaccacaagtaagagaagtagaatttccagatgggaagaaaatattattactatcagagggaagacttgttaacctaggaaatgctactggtcatccaagttttgttatgagcgcatcatttactaatcaggtcttagcgcaacttgaactttggaaaaattctaaaaattatgaaaataaagtttatgttttaccaaaacatttagatgaaaaagttgcatcattacacttaaagaaggttggagcaaaacttacagaattaactgataaacaagcagaatatattggtgttagtaagcagggtccatttaaagataatacatatagatattag

SEQ ID NO: 261755 - DNA, 496 bp, Unknown
  Bacterial polypeptide expressing nucleotide sequence isolated from the Sargasso Sea
aacgtcattaaatgcagcaaaaattgcagatgtcattatttctgtcacaggaaatttacatgcattagataaacaacattttgacgtcatgaaagatggagttgcattggcaaatgctggccattttgatgtagaaataaatttagaagcacttaagaatgaaagtacaaaagtagaaagagtaagagaacatgtagagagttatacatataaaggtaaagaaattttagttctagctgaaggaagattagttaaccttgcagcagctacagggcacccagcctcagttatggatatgtctttcgcaaatcaagctttggcatcagaatggataaaagataatcataaaaaactagaatcaaaggtatacacattacctaaggaagtagatattaaaatagctgctacaaaattaagccttatgggcggcgagttagagatattatctgatgagcaaattaaatatctagattcctgggagcacggtacaagctga

SEQ ID NO: 261756 - DNA, 514 bp, Unknown
  Bacterial polypeptide expressing nucleotide sequence isolated from the Sargasso Sea
gatattgttaagtcttacagtgggaaaaacagttgaaattttaaacactgatgcagaaggtagactggtattagcagatgctttaacttatacagaagaaaaatttaaaccaaaatttatagtagatttagcaactttaactggagcaataattgtttcacttggttcagaatatgccggtttattttcaaataatgataaattatctaaacaattaattgatgctggagaaaatgtggaagaaaaagtttggagaatgcctttaaataaaaactttgataaattaattaattctaaaaatgcagatatgcaaaacataaattatgttggtggagctggctctacaactgctgctcaatttttacagagatttattttaaataaaacaccttgggcccacttagatatagcaggaatggctttttcaaaatatggtggagctttaaattctggtggtgcgacaggttatggagtgagattattaaataaactaatagaggatcattatgagtaa

SEQ ID NO: 261757 - DNA, 841 bp, Unknown
  Bacterial polypeptide expressing nucleotide sequence isolated from the Sargasso Sea
cttagattttgaaaaacttggttctaaattatttgtttttttaaaggaaaataagaaagagaattcatttataaatgtagaaaataattcttttactaatgtacaattagaaaagtttcttcatggagcacaacttaagtcatataattttaatctttataaaacagataagaaaaaagatgttaatattaatttaagtgttgttggcagtaacactaaacaaaaaaatttattaagaaataaattaaatgctcttttggaaggggtttttcttactagagatttagtttctgaacctggtaatattttgaacccagatgaatacgcaaagagaattgtaaaattaagaaagtttggattaaaagtaacagtatatgaccaaaagagattaaaaaaattaggatttaatgcattgctaggtgtcggtcaaggaagtatcagaggttcttatatggtaacaatagagtggaatggaaataaaaataaatcaaaacctttagccttcgttggaaaaggtgtttgttttgatactggtggaatttcactcaaacctgcaaaatttatggaagatatgacatatgatatggcgggttcagcaactgtagttggtcttatgaaaactctagcgttaaggaaatctaaaattaatgcagtaggagttgttggattagttgaaaatatgccaggagccaatgcacaaagacctggagatattgtaaaatcttacagcggacaaacaatcgaagttttaaatacagatgctgagggaagactggttttagcagacgcacttacgtataccgaagagaaatttaagcacaagtctaattattggacttag

SEQ ID NO: 261758 - DNA, 478 bp, Unknown
  Bacterial polypeptide expressing nucleotide sequence isolated from the Sargasso Sea
aattttaaatacagatgcagaaggtagacttgttttagcagatgctctaacatttactgaaagaaaatttaaaccaaaatttatgatcgatttagcaacattgactggcgctattatagtatctcttggttcagagtatgcaggtcttttttcaaataatgataaattatctaaacaattaatcaatgcgggtgaaaaggttgaagaaaaattatggagaatgccattacacaaaaattatgataaattaataaattcaaaaaatgctgatatgcaaaacatcaattacgttggaggtgcaggatcaacaacagcagcacaatttttacagagatttattttaaataaaactccttgggctcatttagatatagctggaatggcattttctaaatatggaggtgcattaaattctggtggtgccacaggttatggtgttaagttattaaatcaattaatagaagataattatgagtaa

SEQ ID NO: 261759 - DNA, 946 bp, Unknown
  Bacterial polypeptide expressing nucleotide sequence isolated from the Sargasso Sea
agagatttagtatctgagccaggaaatgttcttcatccagatgaatatgcaaaaagaataaattcattaaaaaaaattggcttaaaaataaatatatatgacgagaaaaaattacaaaaacttggaatgaatgctttacttggagtaggacaaggaagtataagagggtcataccttgtaacaatggaatggaaaggagcaaaaaataattctgcccctttagcttttgttggaaaaggagtttgttttgataccggtggttattcactaaaaccagcaaaatttatggaagatatgacctatgatatggcaggttctgctactgttgttgggttaatgatgaaccttgcattgagaaaatcaaaaattaatgcagttggtgttgtagggcttgtagaaaatatggtaggaggaaatgcacaaagacctggagatattgttaaatcctacagtggcaaaacaatagaaatactaaatacagatgcagaaggtagattagttttagcggacgctttaacatttactgaagaaaaatttaaacctaagtttatggttgatttagcaactttgactggagctataatagtttcattaggttctgaatatgcgggacttttttcaaacaatgatgaattatcaaaaaaacttttaaacgctggagaaaaagttaatgaaaaattatggagaatgcctttgcataaaaactttgataaacttataaattcaaaaaatgctgacatgcaaaatataaattatgtaggtggagcaggatcaacaacagctgctcaatttttacaaaggtttatactgaacaagacaccttgggcgcatcttgatattgctggtatggctttttcaaaatatggtggcgctttaaattcaggtggtgcaactgggtttgggataaggttattaaatcaacttatagaggataattatgagtaag

SEQ ID NO: 261760 - DNA, 969 bp, Unknown
  Bacterial polypeptide expressing nucleotide sequence isolated from the Sargasso Sea
actactttctcaaaaagttacaaaaagtaaagaaattaaacaatttataaaatcagttttctccaataaacttttcactgaacagaatttcttagcaaaagattacaacgaaaaaagttatatattcgtaaattgtacaaagtcaaaagttgcattagattttgaaaaacttggatcgaaattatatgtatttctaaaggaaaataagaaagagaattcatttattaatttagacaataatacttttacaaatgtacaattagagaaatttcttcatggagctcaactaaaatcttatagttttaatctttataaaacagttaataaaaaaaattttgatataaacttaagtattattggcaaaggcataaaacaaaaaaaaacattaagagataaattaaatgctcttttgcaaggagtttttcttaccagagatttagtttctgaacctggcaatattttacatccagatgaatatgcaaagagaattactaaattaagaaagttaggattaaaagtaacagtctatgatcaaaaaagattaaaaaaattaggttttaattcattgctaggtgttggacaaggaagtatcaggggttcttatatggtgactatagaatggaatggaaataaaaataaatcaaaacctttggctttcgttggaaaaggtgtctgttttgatactggaggtatttcacttaagcccgcaaaatttatggaagatatgacatatgatatggcaggttcagcaactgtagttggtcttatgaaaactctagctttaaggaaatctaaaattaatgcagttggagttgtaggattagtcgaaaatatgccaggagcaaacgcacaaagacccggagatatcgtaaaatcttatagtggacaaacaatcgaggttttaaatactgatgctgaaggaagacttgtcttagcagatgtgctcacttacactgaggagaaatttaa

SEQ ID NO: 261761 - DNA, 797 bp, Unknown
  Bacterial polypeptide expressing nucleotide sequence isolated from the Sargasso Sea
aatgaaatgtactgtattttcaaaaaatgaaataaaatctaaaagactgggtggcgtaacagcagttggacaaggaagtaaaaatgaacctagattcataattttagaatatagaaatgggaagaaagagcaaaaaccaattttacttgtaggtaaggctgtaacttttgatacaggtggaatttctttgaagccaggagagaagatggatgaaatgaagtttgacaaatgtggaggatgtacagtgttaggtgtgatgaaagcaatttcagaattaaaacttccaatcaatgtgatagcaattgttccttctgttgaaaatatgccaagtggagatgcatttagaccaggagacattgtcaaattatttaatggaaaaactgcagagattctaaatacagatgcagaaggaagattgattttagcagatggacttgcttatggaataaaacatttccaaccatcttcggtaatggattttgcaacattaactggagcttgtattgtagcattaggaactaatgtggcaggaattgtaagtaataatacaaaacttgcatcaaaggtgaaatcatcatctgcaaaaacatcagaagaagtttgggaacttccaataaatgatgattatatggacatggtaaaatcaaaggttgcagatattagaaatcttggaatgggaagagccgcaggaactattacagctgcagcatttttagcaaatgcagtaggaaacgtaccatgggttcatttcgatattgcaggaactgcatggatacagccatctacaaaaagtaaat

SEQ ID NO: 261762 - DNA, 795 bp, Unknown
  Bacterial polypeptide expressing nucleotide sequence isolated from the Sargasso Sea
atcgacgccactgaaaaactgtatggcgactatcgttggggccgttacgatttgctgatattaccgcccagtttcccctttggcggcatggagaacccggtgctaagttttattacgccgacagtggtggccggtgatggcagcctggtgaatttaattgcccatgaactggcacactcctggtcgggtaacctggtgaccaacgccagctggcgcgatctgtggctcaatgaaggttttacctcttatgttgaaaaccgcattatggagcaggtgttcggcactgaccgtgcggtaatggagcaggcgctgtcggtacaaggtttaaaagacgaactggcgcaaatgccagccaatgacagcatactgcatattgatttacagggccgcgatccggacgatgcctttagcggtgtgccttacaccaagggccagttgtttttgatgtttctggagcaaaagtttggccgcgacaggtttgacccctttgttaaacagtactttgacgatcacgcctttcaaagcctcgataccgcccgctttgttggataccttgagcagaaactgctgaacaaatatccgggtatcgtgtcgctggatgaggtaaaacgctggatttaccagcctggcttgccagagggtacaccagagccacaatctgatgcctttaatcaggtgctgcagcaagctaatgcctggttagccggcgataccgccttaagcagtctgcctaccgataactggacggtgcacgagtggctatatttcatcaacaatctgccgcttagcatcacg

SEQ ID NO: 261763 - DNA, 760 bp, Unknown
  Bacterial polypeptide expressing nucleotide sequence isolated from the Sargasso Sea
agattgtttcaaataattatacaaaacttaataaaggcttcaatagaatatgcttctatctctgacggtgttttttatgcaagagatctagttaatgaacctagtaatgttttatttccaaaagcatatgctcaaagaattcagaaactacgacaacacggtttaaaagttgaagtccttggtgaatcaaaaatgaaatctcttaaaatgcactcacttgtgggtgttggacaaggaagtcaaagagaaagtcaattagtgataatgcattggaatggaaataaaactaagaaaactaaacccatttgtttagttggaaaaggagtttgttttgactcaggtggtatctctattaagccaagtaataaaatggaagagatgattggcgatatgggtggatctgctgcagttgttggtacgatgctatcactagctaaaagaaaagctaaagtaaatgctgttggtattgttggtttggtagaaaatatgcctgatggtaaagctcagaaacctggtgacataattaaatctatgtctgggcagaccattgaaattcaaaatactgatgccgaaggaagattagttctcgctgatgcactatggtatgcacaaaaaagatttaaaccagaacttatgattgatctagctacactaacaggagcaatggttatttcgttaggtagtttaattgcaggattattttcaaatgatgataagttgtcgtcacagttaatcgatgccggaaaggagagggagacca

SEQ ID NO: 261764 - DNA, 822 bp, Unknown
  Bacterial polypeptide expressing nucleotide sequence isolated from the Sargasso Sea
acgaaaaaaaataaagaaattattaacatacatgtaactggaaaaaaaataccatcattaaaagagcaaataaacttcagatcaattgaggaaggtactttttatacaagagatctggtgtctgaacctggaaatattttacatccagatgagtatgctaaaagattgagctatttaaaaaaagacggtctgaaagtaaacgtttacgatgaaaaaaaattaaaaaaattaggaatgaattctttgcttggagttggacagggaagtgtaagaggttcctatctagttacattagaatggaacggcttaaaaacaaaatctaaacctttagcatttgttggtaaaggagtttgttttgatactggaggaatatcattaaagcctgctaaatttatggaagatatgacttatgacatggctggttcagctgtagtagtaggattaatgaaatgcttagctaaaagaaaagcaaaaataaatgccgttggtgtagtcggtttagtagaaaatatgcctggaggaaacgcacaacgaccaggggatattgttaaatcatatagtggaaaaactattgaaattttaaatactgatgcagagggaagattagttttagctgatgcattaacttacacagaagaaaaatataaaccaaaatttattgttgatctagcgaccctaactggagctattatagtttctttagggtcagagtatgcaggattattttcaaatgatgataaattatcgaagcaacttatagatacaggtgaaaaagttgaagaaaaagtatggcgaatgcctttaaataaaaattttgataaa

SEQ ID NO: 261765 - DNA, 655 bp, Unknown
  Bacterial polypeptide expressing nucleotide sequence isolated from the Sargasso Sea
atgggatttaatgctttgcttggagttggacaaggaagtatacgaggttcatatttagtagcaattgaatggaaaggaaataaatctaattcaaaacctctagcatttgtcggaaaaggagtttgttttgataccggtggaatttcattaaagccagcaaaatttatggaagacatgacatatgacatggctggatcagctgttgtggttggattaatgaaaaattttgcgttaagaaaatcaaaaataaatgctgtaggagttgtagggcttgtagaaaatatgccaggtagtaatgctcaaagacctggtgatatagtaaaatcctatagtggaaaaacaatcgaggtactaaatactgatgcagaaggaagattggtattagcagatgctttaacttatacagaaaaaaaatttaagccagaattaattgtagatctagcaacattgactggagccataattgtttgtctaggatctgaatacgcgggtcttttttcaaataatgataagttatcaaaacaaatttttgaagctggagagaaagtggatgaaaaagtttggagacttcctttacataaaaattatgacaaacttttaaactcaaaaaatgcagacatgcaaaatatcaattatgttggaggagctggttcaa

SEQ ID NO: 261766 - DNA, 862 bp, Unknown
  Bacterial polypeptide expressing nucleotide sequence isolated from the Sargasso Sea
tatttttgttagtaataagacaattaaacattcaaattattttaattcgtttatccatggagctgaacttaaatcttataaatttattatatataaaacaaaaaaaaatgaaaaaaatatcatcctaaacattgataaaaaaaactcttccaataacactaaaaaattaaatgcaatattacagggtgtaaattatacaagagatttagtttcagaacctgggaatatccttcacccagatgagtatgcaaaaagattattacaattaaagaagcttggtttaaaaattacgatttatgatcaaaaaaaattaaataaaatgggatgtaatgctttgctaggtgtgggacaaggaagtataagaggttcatacttagtaactatggaatggaatggtgataggtctagatctaaacctcttgcatttgttggaaaaggtgtatgttttgacactggaggcatatcattgaaacctgcaaaattcatggaagatatgacatacgatatggcgggatcagcagtggttgctggtctaatgaaaaattttgctttaagaaaagccaaaattaatgcagtaggtgtagtaggtcttgttgaaaatatgcctggaggaaatgcacaaagaccgggggatatagtcaaatcttatagcggaaaaactatagaagttttaaatactgatgcagaaggaagattagttcttgcagacgctttgactttcactgaaaaaaaattcaaacctaaatttataattgatcttgcaactctaactggagcaataatagttgcactaggatcagaacatgctggtttattttctaataatgataatttatctgatcaattatataaaacaggaaat

SEQ ID NO: 261767 - DNA, 772 bp, Unknown
  Bacterial polypeptide expressing nucleotide sequence isolated from the Sargasso Sea
tatggtaacaatagagtggaatggaaataaaaataaatcaaaacctctagccttcgtcggaaaaggtgtttgttttgatactggtggaatttcactcaaacctgcaaaatttatggaagatatgacatatgatatggctggttcagcaactgtagttggtcttatgaaaactctagctttaaggaaatctaaaattaatgcagttggagtcgttggattagttgaaaatatgccaggagctaatgcacaaagacctggagatattgtaaagtcttatagcggacaaacaatcgaagttttaaatacagatgctgagggaagactagttttagcagatgcacttacatataccgaagagaaattcaagccaagtctaattattgacttagcaacattaactggagcaataattgttgcgcttggatctgaatatgctgggctttggtcaaataataaaaaattgtctaaacaactttttgatgctggagagcatgtagaagaaaaagtatgggagatgccacttcatgagaattataacaaattaatgaattcaaataatgctgatatgcaaaatattaattatgttggaggcgctggatcaacaactgctgctcaatttttacaaagatttataattaataaaacaccttgggcgcatttagatattgctggaatggctttttctaaatatgctggagcactgaattctggtggcgcaactggatatggtgttagattattaaacaaatttatagaggagaattatgagtaa

SEQ ID NO: 261768 - DNA, 859 bp, Unknown
  Bacterial polypeptide expressing nucleotide sequence isolated from the Sargasso Sea
aattaaaaataatagatttacctctttacttgaaggaacaaattttactaaagatcttgtttcagaaccgggtaatattcttcatccagatgaatatgcaaaacgaatacttaaattaaaaaaaattggacttaaaattaaagtttacaatgaaaaagaacttaaaaaattaggtatgggtgccctacttggagtaggacaaggtagtataagaggatcttatttagttactatagaatggaatggtgataaatcaaaaagtaaacctttagcttttgtaggtaagggtgtttgttttgatactggcggttactcgcttaaaccagcaaaatttatggaagatatgacttatgatatggcgggttcagctgctgtagtaggtttaatgaaaactttagctttaagaaaagcaaaaattaatgcagttggtgtagtaggtcttgttgagaatatggtaagtggaaatgctcaaagacctggtgatattgtaaaatcttatagcggaaaaaccatagaggttttaaatactgatgctgaaggtagattagttttagcagatgctttaacttttactgaaaaaaaattcaaacctaaatttatagttgatttagcaactttaactggtgctatcattgtttctttgggctcagagtatgcagggcttttttctaacgatgataaactatcaaaacaattaattgaagctggtgaaaaagttgatgaaaaattatggagaatgcctcttcataaaaactttgacaaattgatgaactctaaaaatgctgatatgcaaaacattaattatgttggaggagctggctcaacaaccgctgcacaatttttacaaacgatttattat

SEQ ID NO: 261769 - DNA, 499 bp, Unknown
  Bacterial polypeptide expressing nucleotide sequence isolated from the Sargasso Sea
tctttctggtcagacaatcgaagttttaaatactgatgcagagggtaggttggtacttgcagatgtgttatggtatataaaagaaaaatttaaaccaagatttatgattgatttagcaactttaactggtgcaatcattgttgctttaggtgatagatacggcggattgttttctaatgatgatgatttagctgaaaagttgtatgcatcatctaaaaaaacaaaggaacttctttggagacttccaatagatgaagattttgataaactattaaattgtccagttgctgacatgaaaaatattactggtactagaggggcgggaagtatcaccgctgctcaatttttaaaaaggtttgttggagacactagttgggcacatctagacatagctggagtaacatggtccaaaaaaggcacaaattttgcccgccctggcggaacaggttttggtgtgaggctattagatgaatttataaaaaattattatgaaagataa

SEQ ID NO: 261770 - DNA, 813 bp, Unknown
  Bacterial polypeptide expressing nucleotide sequence isolated from the Sargasso Sea
cttggaagagggaaccttttatgcaagagatttagtctctgagccaggaaatgttttacacccagatgaatatgccaaaagattaagttctcttagaaaagatggtttaaaagttaatgtctatgatgaaaaaaaactaaaaaaacttggcatgcactctttgattggcgtaggtatgggaagtactagaggatcttaccttgtaacaatggaatggaatggagcaaaaaataattctaagcctttagcatttgttgggaaaggagttacttttgatactgggggatattctttaaagccagcaagatttatggaagatatgacctatgatatggccggatcagctgcagtagttggtttaatgaaaaattttgcattaagaaaagccaaaattaatgccgttggtgtagtgggtcttgtagaaaatatggttagcggaaatgcacaaagacctggagatattgttaaatcttatagtggtaaaactatagaagttttaaatacagacgcagagggacgattagttttagctgacgcgttaacatttactgaaaaaaaatttaaaccaaaattcatagttgatttagctaccttaacaggagcaataatagtttgcttgggatcagaatatgcggggcttttttcaaatgatgataagttatccaaacaaatttttaatgcaggtgaaaaagttgaggaaaaagtatggagaatgcctctacataaaaattacgataaacttatgaattccaaaaatgctgatgtacaaaatataaattatgttggtggtgcaggatcaacaacagccgctca

SEQ ID NO: 261771 - DNA, 952 bp, Unknown
  Bacterial polypeptide expressing nucleotide sequence isolated from the Sargasso Sea
cctcacaaaagattacaaggacaaaagttacgtatttgtaaattgtactaagtcaaaagtttcattagattttgaaaaacttggttcgaaattatatgcttttttaaaggaaaataaaaaagagaattcatttattaatttagctaataattcttttactaatgtgcaattagaaaagcttcttcatggagtacagcttaaatcttataattttaatctttataaaacagataaaaaaaaaaatgttagtataaatttaagtattgttggtagtagtgtaaaacaaaaaaatttattaagaaataagttaaatgctcttttggaaggagtttttcttacaagagatttagtttctgaaccaggtaacattctacatccagatgaatacgcaaagagaattgttaaattaagaaaacatggattaaaagttacagtctacaataaaaaaagattaaaaaaattaggttttaatgcattacttggtgtcggacaaggaagtatcagaggttcttatctggtgacgatagagtggaatggaaataaaaataaatcaaaacctttagcattcgttggaaaaggtgtttgttttgacactggaggaatctcacttaagcctgcaaaatttatggaagacatgacatatgatatggcaggctcagctacagtagttggtcttatgaaaactctggctttaagaaaatctaaaattaacgcagttggagttgtaggattggttgaaaatatgcctggatcaaatgcacaaagacccggagatattgtaaaatcttacagtggacaaacaattgaggttttaaatactgatgctgagggaagactagttttagcagacgcacttacttatactgaagagaaatttaaacctagtttaattattgacttagcgacattaactggagcaataattgtggcacttggctctgaatatgctgga

SEQ ID NO: 261772 - DNA, 490 bp, Unknown
  Bacterial polypeptide expressing nucleotide sequence isolated from the Sargasso Sea
aatggcaaaaccattagaggtattaaatacagatgcagagggacgtttaatattggcagatggtctctcatatgcttctaaacactacgatccagagtacattcttgatttcgctactttgacaggtgcagtactggtatcactaggacatgtagcaactggcataatgggtacagatgataatttaatgaaaaaagtaaaaaaatcttctaagtctgtagctgaaaaagtttgggaacttccactatggcctgaatattgtaagcaggttcaaagtaatatagctgatgtaaaaaacacaggagcacctatgcaggcaggttctattgccggtggtgcatttttaaaagaatttgttaaggataatattccatggattcactttgatattgctgggacagcatggggagtgaagccagatagtattaatccaaaaggaagtgcaacaggttggggtattagactagttttagatatgatggggatataa

SEQ ID NO: 261773 - DNA, 670 bp, Unknown
  Bacterial polypeptide expressing nucleotide sequence isolated from the Sargasso Sea
actgaaatcttatgagtttaacttatataaaacaaaaagaattcataaggatataattttaaatgtaataaaattaaaaaatcaaaatgacattaaattgagaaatagattaaaagctattctcgatggtgttaattttacaagagacttggtgtctgagcctggaaatgtcttgcaccctgatgaatatgccaagagaattgttaaacttagaaaatttggattaaaagttactgtatatgatcaaaataaattaaaaaagatgggatgcaatgcattgcttggagtagggcaaggtagcataagaggttcttatttagtcactatagaatggaaaggttcaaaaaataactctaaacctttggcttttgttggaaaaggagtttgctttgatactggtggttattctcttaaacctgcaaaatttatggaagatatgacttacgacatggcaggatctgcggctgtggttggtttaatgaaaactcttgcattaagaaagtcaaaaattaatgcagtaggtgtagtaggacttgtagaaaatatggtgagcggaaatgctcaaagacctggagacatagttaaatcttatagtggtaagacaatagaaattttaaacacagacgcagagggaagattagttttagctgatgctttaacttttactgaa

SEQ ID NO: 261774 - DNA, 836 bp, Unknown
  Bacterial polypeptide expressing nucleotide sequence isolated from the Sargasso Sea
ttcatcaattttagaaggtataaaatatacgaaagaccttgtatcagaaccaggtaatattcttcatccagacgaatatgcaaaaaggctgcttaaattaaaaaaaattggtttgaaggtgagagtatataatcagaaagaattaaaaagattaggcatgggagctcttttaggagttggtcaaggaagcgtaagaggatcatacctagttacattggaatggaatggtaataggtcaaaaagtaaacccttagcatttgttggaaagggtgtatgcttcgatactggcggttactcgctaaaaccagcaagattcatggaagacatgacatatgatatggcgggctctgctgctgtagtagggttaatgaaaactttagctctaagaaaagcaacagtaaatgctgtaggtgttgtaggtctagttgaaaatatggtaagtggaaatgctcaaagaccaggagatattgtaaaatcttatagtggaaaaacaatcgaagtattaaacacagatgctgaaggaagattagttttagcagatgctctaacttttactgaaaagaaatttagacctaaatttataattgatctagcaactttaactggtgcaataatagtttctttgggatcagaatatggaggattgttttctaataacgataaactatctaaggaattaattgatgctggtgaaaaaactgacgaaaaattatggagaatgcctctacatagaaactttgataaactaatggattcaaaaaacgcagatatgcaaaacataaattatgtaggtggagcaggctctacaacagcagcacaatttctacaaagattta

SEQ ID NO: 261775 - DNA, 643 bp, Unknown
  Bacterial polypeptide expressing nucleotide sequence isolated from the Sargasso Sea
tatgggcggctctggtgttgttatcggtttaatgaagactttggctttgagaaaagcgaaagtaaatgccattggagttgttggactcgtagaaaatcatataggaaatatggctacaagaccaagtgatgttgtaaaatcttattctggtcaaactattgaagttcttaatactgatgctgaaggaagattagttcttgctgatgcactttggtatacacaagaacagtacaaacctgaactcatggttgatcttgctacattaactggcgcaatagtaattgcgcttggtaatgaatatgcaggaatattctctaataatgacaagttgagtaagcaattagaagatgctggtaaaattgaagatgaaaagttatggagatttccattacatgaaaacttcgataaaatgataaactcaccaatagccgatatgcaaaatatttcatatggtagaggtgctggatcaataactgctgctcaatttttacaaagatttgtaaataaagttccttgggcacaccttgatatcgctggaaccacttggactaaaactgctttacctacttctccaaaaggtgctacagcatatggagttaagttattaaatcgatttgtaaataaatattatgaaggaaagtaa

SEQ ID NO: 261776 - DNA, 802 bp, Unknown
  Bacterial polypeptide expressing nucleotide sequence isolated from the Sargasso Sea
aaagttaatatatatgatgaaaaaaaattaaaaaaacttggaatgcatgctttgctcggagttggtatgggaagtatcagaggatcatatcttgtaacaatggaatggaatggagcaaaagataattctaaacctttagcttttgttggaaaaggagttacttttgatactggcggttattcattaaaaccagcaagatttatggaagacatgacatatgatatggcaggttcagctgctgtagttggtttaatgaaaaacttagcattaagaaaagcaaaaattaatgctgttggagttgttggacttgttgaaaatatggtaagtggagttgctcaaagacctggagatattgtgaaatcttacagtggtaaaactgtagaagtattaaacacagatgctgaaggacgattagttttagctgacgcattaacttttactgagaaaaaattcaaaccaaaatttatggttgatttagctaccttaacaggagcaatcatagtttctttaggatcagaatatgctggacttttttctaacgatgacaaactatctaaacaaattttgaatgctggcgaaaaagttgaagaaaaattatggagaatgcctcttcataaaaactatgacaaacttataaattcaaaaaatgcagacatgcaaaatataaactatgttggtggagcgggttcaacaacagctgcacaatttttacaaagatttattttaaataaaactccatgggctcatttagatatagctggtatggcattttcaaaatatggtggagctctaaattctggag

SEQ ID NO: 261777 - DNA, 661 bp, Unknown
  Bacterial polypeptide expressing nucleotide sequence isolated from the Sargasso Sea
tatggaagatatgacttatgatatggcaggatcagctgctgtagtaggtttaatgaaaactttagctttaagaaaagcaaaaattaatgcagttggtgtagtgggccttgttgagaatatggtaagtggaaatgctcaaagacctggtgatatagtaaaatcttatagcggaaaaactatagaggttttaaatactgatgctgaaggtagattagttttagcggatgctttaactttcacagaaaaaaaattcaaacctagattcatagttgacttagcaactttaactggtgctataattgtttctttgggctcagagtatgcggggcttttttctaatgatgataaactatcaaaacaattacttgatgccggtgaaaaagttgatgaaaaattatggagaatgcctcttcacaaaaactttgataaattaatgaactctaaaaatgctgatatgcaaaacattaattatgttggaggagctggctcaacaactgctgcacaatttttacaaagatttattattaataatacaccttgggcccacttagatattgctggtatggctttttcaaaatatggaggagctttaaattcgggaggggcaacagcttttggtgtaaggctcttaaataaactaatagaggataattatgagtaa

SEQ ID NO: 261778 - DNA, 593 bp, Unknown
  Bacterial polypeptide expressing nucleotide sequence isolated from the Sargasso Sea
ttggctttaaggaaatcaaaaattaatgctgttttagttgtaggattagttgaaaacatgcctggagcaaatgcacaaagacctggagatattgtaaaatcttatagtggacaaaccattgaagttttaaatactgatgccgagggaagactagttctagctgatgtgcttacctacactgagcagaaatttaaaccaagtttaattattgatttagccacattaactggagcaataattgttgcacttggatctgaatatgctggtctatggtcaaataataaaaaaatgtcaaaacaactttttgatgcaggagaacaagtagaagaaaaagtatgggaaatgcctttacacgaaaattataataaattaatgaattcaaataatgctgatatgcaaaatattaattatgttggaggagctggttcaactactgcagcacagtttttacaaagatttataattaataaaacaccttgggcacatttagatatagctggaatggcattttctaaatatgcaggagcactaaattctggtggtgcaacaggatatggagtcagattgttaaataagtttattgaggagaatta

SEQ ID NO: 261779 - DNA, 544 bp, Unknown
  Bacterial polypeptide expressing nucleotide sequence isolated from the Sargasso Sea
tatgccaggaggaaatgctcaaagacctggggatatagttaaatcttatagtggaaaaactattgaagtattaaatacagatgctgaaggtagattagttttagcagatgctttaacttacacagaaaaaaaatttaaaccaaaattaatagtagacttagcaactttgactggagcaattgtagttgctctcggctctgaatatgcaggacttttttcaaatgatgataaattatcaaaacaattatttgaagctggagaaaaagttgatgaaaaagtgtggagactacctttacataaaaattataataaattaatggattcaaaaaatgcagatatgcaaaatataaattatgttggtggagcaggatcaactacagcagctcagtttttagagagatttatattaaacaaaactccttgggcacacttagatatagctggaatggcattttctaaatatgcaggtgcacttaattctggtggagcaactggctatggtgtgagattgcttaataaatttgtagaagaaaattatgagtaa

SEQ ID NO: 261780 - DNA, 778 bp, Unknown
  Bacterial polypeptide expressing nucleotide sequence isolated from the Sargasso Sea
gttcttatcttgtaccattgaatggaaaggaaataaatcaaaatcaaaacctttatcatttgttggaaaaggagtttgtttcgatactggtggttactcattaaaaccagcaagattcatggaagatatgacttatgatatggcaggctcagctgccgtagtaggtttaatgaaaactttagctttaagaaaagcaaaaattaatgcagttggtgtagtaggtcttgttgagaatatggtaagtggaaacgctcaaagaccaggtgatattgtaaaatcttatagtggaaaaactatagaagtattaaataccgacgctgaaggtagattagttttggcagacgcattaacttttactgaaaaaaaatttaaacctaaattcatgattgatttagctactctaactggcgctatcattgtttctctaggttcagagtatgcggggcttttttctaacgatgacaaactatcaaaacaactaattgaagctggtgaaagagttgatgaaaaattatggagaatgcctcttcataaaaacttcgataaattgataaattctaaaaatgcagatatgcaaaatattaattatgtaggtggtgctggatctacaacagctgcacaatttttacaaagattcattttaaacaaaactccttgggcacaccttgacatagcaggaatggctttttctaagtatgcaggagctttaaattcaggtggtgcaactggatatggggtaagattgctaaataaatttgttgaagaaaattatgagtag

SEQ ID NO: 261781 - DNA, 904 bp, Unknown
  Bacterial polypeptide expressing nucleotide sequence isolated from the Sargasso Sea
aaaaattttaaaattaatgattttgaaattcttggggctaagttatatgagtatttaaaaaataactcatttaaaaaagtttcaatatcaaaaaattttattaatattaataattttaatcattttattcatggtttaaaaattaaatcttatgaatttaatttatataaaggctcacaaaagaaaaatttatttttagttgaagctttaatcaatagatcaaaaaaagataaaataaatatccaaaaatttaactctattgaagcgggagttaattttgctcgtgatcttgtatctgaaccaccgaatgttcttttccctaaagaatatgtaaatcgattactaaaattaaaaaaaattggaattaaggttacagtttacaatgaggccaaaatgaaaaaattaggtatgaattctcttttaggcgttggaaaagggagctcaaaggagtcatacttagttacattagaatattatggtaataaaaaaaatagaagtaaattattttcttttgttggaaaaggagtttgttttgatacaggtgggatttctttaaaacctgctagattcatggaggaaatgaaatatgatatggctggctcggcagtcgtgtctggtttaatgcaaagtcttgcgttaagaaaagcaaaaataaatgttgttggagtggtaggccttgttgaaaatatgccaggtggaaatgctcaaagaccaggagatatagtaaaatcatatagtggcaaaactattgaagttttaaatacagacgcagagggaaggttggttttagctgacgcattaacatttactgaaaaaaagtttaaaccaaaatttattatagacttagccaccttgactggagcaataattgtatccctggagaagaatatgcaggtttatttca

SEQ ID NO: 261782 - DNA, 940 bp, Unknown
  Bacterial polypeptide expressing nucleotide sequence isolated from the Sargasso Sea
ctgaccgggaatattttacatccagatgagtatgctaagagattgctcaaactaaagaaaactggattaaaagtaacagtttatgatgaaaaaaaattaaaaaaattaggttgcaatgctttgcttggagttggacaaggaagtataagaggatcctatcttgtaacgattgaatggaaaggaaataaatctaaatcaaaacctttagcttttgtaggaaaaggagtttgttttgatacaggaggaatttcattgaagccagcgagatttatggaagatatgacatatgatatggctggatcagcagttgtagtagggttaatgaaaaattttgctctaaggaaagcaaaaataaatgcagtaggagtggttgggctagtagaaaatatgcctggaagtaacgctcaaagacccggtgatattgtgaaatcttatagcggaaaaactattgaagtattaaacactgatgcagaaggaagattggtattagcagatgctataactttcactgaaaagaaatttaaacctaatttaattgttgatctagcaaccttaacaggagctataattgtttgtttaggttcagaatatgctgggcttttttcaaatgacgacaaattatcaaaacaaatttttgaagcaggagaaaaagttgatgagaaagtttggagattaccattgcataaaaactatgataaactgatggactctaaaaatgcagatatgcaaaatattaattatgtgggaggggctggatcaacaacagccgcacaatttttgcaaagatttattattaacaaaacaccttgggcgcatttagatattgctggaatggctttttcaaaatatgctggagcattaaattcaggtggtgcaacaggatatggagtaagattgttaaataaatttgtggaagatattatgagtaatttggagcaac

SEQ ID NO: 261783 - DNA, 840 bp, Unknown
  Bacterial polypeptide expressing nucleotide sequence isolated from the Sargasso Sea
ataagtttaacaataattgggaaaaataataaaagtaatctaaaaacaaaattagatgcattaacagctggagtatttttaaccagggatttagtttcagaaccaggcaatattttacatccagatgagtatgtaaaaagaatacaaaatttaaaaaaatatggaataaaagtcgtagtttatgacaataagaaattaaaaaaaatgggatgtggcgccttgctaggcgttggacaaggaagtgtgcggggatcatatcttgttactatggagtggagaggtacctcttctaaaattaaaccactggcatttgttggtaagggagtttgttttgatactggtggaatctcactcaaacctgcaaagtttatggaggatatgacttatgatatggctggttcagcagtcgttgttggtttattgaaaaattttgcacttaggagagcaaaaattaatgcagttggagtagttggactagttgaaaatatgcctggtggaaatgctcaaagaccaggagatatagttaaatcatatagtggaaaaacaattgaagttttaaacactgatgcagagggaagattagttttagcagatgcacttacatttacagaggaaaaatttaaacctgatttgattattgatcttgctacattaacaggagcaattattgtgtcgctaggttctgagtatgcgggattattttctaataatgataaactttcaaaacaattatatgaagctggagaaaaagtagaggaaaaagtttggagaatgcctctgcatacaaattatgataaattaataaattctaaaaacgcagatatgcaaaacattaattat

SEQ ID NO: 261784 - DNA, 642 bp, Unknown
  Bacterial polypeptide expressing nucleotide sequence isolated from the Sargasso Sea
atatggctggagcaggcactgtagtaggtctaatgaaaacatctgctttaaggcgtgcaaaagtaaatgctgttggtgttgtaggattagttgaaaatatggctgatggtaacgcacaaagaccaggggatgttgttaaatcttatagtggaaaaagtatcgaaatttttaatacagatgccgaaggtagattagttctagcagatataatcagttatactgagaaaaggtttaaaccagaatttatgattaatcttgcaactctcactggcgcaataataatcgctttaggtaatgagtacgcaggattattttctaataatgataagctgtcgaaccaattatttgagtctggtaaaattgataatgagaaggtttggagattaccgttatctaaagaatttgataaattgattaattctcaaattgccgatgttcagaacataaactattctggtggtgcacagtcaataacagcagcacaatttttgcaaagatttgttttaaaaaaaacaccatgggctcatttagatatagctggtatggcttggacgaaaaaaggtgacgatgttactccttcaggagctacaggatatggagttaagcttctcaatagactggttactgagtattatgagtaat

SEQ ID NO: 261785 - DNA, 771 bp, Unknown
  Bacterial polypeptide expressing nucleotide sequence isolated from the Sargasso Sea
ttgtgacaatggaatggaatggattaaaaaataaatcaaaacctttaggttttgttggtaagggtgtttgttttgatactggtgggatctctttaaagccagctaaatttatggaggatatgacttatgatatggctggttctgcagttgtagttggattaatgaaaagtttagctttaagaaaagcaaaagttaatgcagtcggagtagttggactagttgaaaatatgcctggtggtaatgcacaaagaccaggagatattgttaaatcctatagtggtaaaacagttgaaattttaaatactgatgcagaaggtagattagttctcgctgatgcacttacttttactgaggaaaagtttaaaccaaagtttattgtagatttagcgacattaacaggagcaatcattgtttcattaggttctgaatacgctggtttattttctaatgatgacaaattatctaaacaactgatcgagtcaggtgagcatgttgaagaaaaggtttggagaatgcctttaaacaaaaactatgacaaattaatggattcaaaaaatgcagatatgcaaaatataaattatgtcggtggagctggttctacaactgcagctcaatttttacaaagatttatcttaaataaaacaccttgggctcatttagatatagctgggatggcattttcaaaatatggaggtgctttaaattcaggaggcgcaacaggttatggcgtcagattattaaataaacttatagaggaccattatgagtgat

SEQ ID NO: 261786 - DNA, 877 bp, Unknown
  Bacterial polypeptide expressing nucleotide sequence isolated from the Sargasso Sea
agactttgaaaagttgggatcaaaactttatatgtttttaaaagataacaaaattgaaaattcatttataaacattaacaataatacactcacaaaaattcaatttgagaaaattttgcatggtttacaattaaaatcttataactttaatatttataaaacagacaaaaagaagaaagagataaatattaacataactgtacatgggacaaatacaaataaaactaatttacttagaaataaattaaatgcgcttttagaaggagtgtttcttactagagacctagtttctgagcctggaaacgttttacatccagatgaatatgctagaagaattaccaaacttagaaagcttggattaaaaattactgtctatgatcaaagaaggttaaaaaaattaggtttcaacgcattacttggtgttggtcaaggaagcataagaggatcttacctggtgactatggaatggaatggttctaaagataaatcaaaacctttagcatttgttggcaaaggtgtttgcttcgatacaggcggtatttcattaaagccggcaaaatttatggaagacatgacttacgatatggctggttcagctacagtggttggtctcatgaaaactctcgctttgagaaaatcaaaaatcaatgcagtgggagttgttgggctggtagagaatatgcctggaggaaatgcacagagacctggtgacattgtaaaatcatatagtggtcagacaattgaagttcttaatacagacgctgaaggtagactagttttagctgatgctttaacctacacagagaaaaaattcaaacctagtttaattatcgatcttgcaacactaactggagcaattatagttgcgttaggatca

SEQ ID NO: 261787 - DNA, 608 bp, Unknown
  Bacterial polypeptide expressing nucleotide sequence isolated from the Sargasso Sea
gatgctatcacttgctaaaagaaaagctaaagtaaatgctattggtattgttggtttggtagaaaatatgcctgatggtaaagctcagaaacctggtgatataattaaatcaatgtccgggcaaaccattgagattcagaatactgatgctgaaggaagattagttcttgctgatgcattatggtatgcacaaaaaagattcaaaccagaacttatgattgatttagctacactaacaggagcgatggttatttcgttaggcagtttaattgcaggattattttcaaatgatgataagttgtcatcaaagttaattgatgccggagaggaaagtggagaccaagtatggcgttttccactaagtaaatcttacgacaagttaataaactcaaaatttgctgatatgaaaaatattggaatgggtggagctggctcaattacagctgcacaatttcttcaaagatttgttaataaagtgccttgggcacatttagatattgctggaacagctacaggtatgccaaaaacatctacaaatacaagctgggcaacaggttttggagtacatttattagatacttttgtcaaaaagttctatgagaaataag

SEQ ID NO: 261788 - DNA, 688 bp, Unknown
  Bacterial polypeptide expressing nucleotide sequence isolated from the Sargasso Sea
tatgaatgttgggagaggtgcaaatactgcaagaaaccttgggaatagaccagccaatcatgcaacgccgacttacatatcagatcaagtcaaagaacttgcgaaggaaattggaggattttcagtagaagtccttgaggaaaaagatatggaaaaattggggatgggttcattgttatcagtctccagggggagtgttgagcctgcaaaattagttactatggaatataaaggtggaaagaaaggagcaaaaccaattgtactagttgggaaaggcgtaacttttgataccggtgggattagtctaaaacctagtcctaagatggatgaaatgaagtgggatatgtctggagcgggatcagttataggaaccatgtgtgcagttgctgcctcaaaactacctgtaaacttagtttgcacaatagcgctttccgagaatatgccagctggtaatgctacaaaaccaggagatgttgtgacatctatgtctggacaaacaattgaggttctaaatactgatgctgaaggaaggttagttttatgcgatgccttaacatacattggaaaatacgatccaaagtttgtagtagatactgcaactttaactggtgctgtagttgtcgctctgggcgatattgctgctggagttatggggaatgatcaaaaattagtcgataaaattcttgat

SEQ ID NO: 261789 - DNA, 607 bp, Unknown
  Bacterial polypeptide expressing nucleotide sequence isolated from the Sargasso Sea
aaaactttagctttaaggaaagcaaaaattaatgcagttggtgttgtaggtcttgttgaaaatatggtaagcggaaatgctcagagacctggtgatattgtaaaatcttatagtggaaaaactatagaagttttaaatactgacgcagaaggcagattagttttagcagacgctttgactttcactgagaaaaaatttaaacctgaattaatgatagatttagcaaccttaactggtgctattattgtttctttgggttctgaatacgcaggacttttttctaatgatgataaactatcaaatcagttaattgaagctggagaaagagttgaggagaagttatggaggatgccgcttcacaaaaactttgataaacttatggactcgaaaaatgctgatatgcaaaatataaattatgttgggggagctggctccacaactgcagcacaatttttacaaagatttattttaaataaaacatcttgggctcacttagatattgctggaatggcattttcaaaatatggaggagcaataaacccaactggtgcaacaggttacggtgtgagattattaaataaatttgtggaggataattatgagtaat

SEQ ID NO: 261790 - DNA, 521 bp, Unknown
  Bacterial polypeptide expressing nucleotide sequence isolated from the Sargasso Sea
acctggagatatagtaaaatcttatagcggacaaacaattgaagttttaaatactgatgcagagggtaggttagtattggctgatgcactgacttatactgaagaaaaatttaaacctagtttaataattgacttagcaacattaactggagcaattatagtcgcattaggatcagaatatgcaggtttgtggtcaaataatcaaaaattatctgatcaactattcaatgctggagaaaaggttgaagaaaaagtatggaaaatgccactgcatgaaaactataataaattaatgaattcaaaaaatgcagatatgcaaaacataaattatgttggaggtgccggatcaaccacagcagctcaatttttacaaagatttataattaataaaacaccttgggctcatctagatatagctggtatggcattttctaaatatgcaggagccctaaattcaggtggcgcgactggatatggtgtcaggttattaaataaatttatagaggaaaattatgagtaac

SEQ ID NO: 261791 - DNA, 754 bp, Unknown
  Bacterial polypeptide expressing nucleotide sequence isolated from the Sargasso Sea
gttggttaccatggaatataaaggtggaaagaaaggagcaaaaccaattgtactagttgggaaaggtgtcacttttgataccggtgggatcagtctaaaaccaagtcctaagatggatgagatgaagtgggatatgtcaggagcgggatcagttataggaaccatgtgtgcagttgctgcctcaaaactacctgtaaacttagtttgcacaatagcgctttctgagaatatgccagctggtaatgctacaaaaccaggcgatgttgtgacgtcaatgtctggacaaacaattgaggttctaaataccgatgctgaaggaaggttagttttatgcgatgccttaacatatattggaaaatacaatccaaagtttgtagtagatactgcaactttaactggtgctgtagttgtcgctctgggcgatgttgctgctggagttatggggaatgatcaaaaattagtcgataaaattcttgatgccggtcaagcaacaggggaaaaagcttggcaacttccaatgtgggatgaatatcaatcgtacttagattcaaattttgctgacattgccaatatcgctccaggaagagcagctggtactattgagggagcctgttttctttcaagatttactgaggactataagtgggcacacatagatattgctggggttgctgatattggagcaggaaagaataaaggctctacaggtaagcctgttggtctactctttgagcttgtaaataaaaataaataa

SEQ ID NO: 261792 - DNA, 934 bp, Unknown
  Bacterial polypeptide expressing nucleotide sequence isolated from the Sargasso Sea
aataaagactttttaagtcactttctacatgggttaaaactaaaatcttatgaattcaagaaatataaaacaaaaaaagactcaagaaatattgctattcacgttttgggaaacaaaaataaaccttcagttcaaaaccaattaaaatttaaagctttagaggaggggacattttacgcaagagatttagtctctgaaccgggaaatattctccacccagacgaatacgcaaaaagaataaattctttaaaaaaagatggtttaaaaattaatatttatgatgaaaggaaactaaaaaaacttggcatgaatgcactccttggcgttggacgaggtagcataagaggatcttatcttgtaacgatggaatggaatggagcaaaaaataaatctaaacctttagcatttgtcggcaaaggagtttgttttgatactggtggatactcattaaagcctgcgagatttatggaagacatgacttatgacatggcaggttcggcaactgttgttggtttaatgaaaagtttggcattaagaaaggcaaaagttaatgctgtaggtgttgtaggtttagtagaaaatatggttagtggaaacgctcaacgaccaggagatattgtgaaatcttttagtggtaaaactattgaagttttaaacacagatgctgaaggaagattagtgttagcagatgccttaacctttacagaaaaaaaatataaaccaagatttatagtagatctagcaacattaacaggtgctataattgtttgtttaggctctgaatatgctggacttttttcaaatgatgataaattatccaaacaaatttttgagtctggtgaaaaagttgaagaaaaggtctggagaatgcctcttcataaaaattatgataaacttatgaactctaaaaacgcagatgtacaaaatattaatt

SEQ ID NO: 261793 - DNA, 637 bp, Unknown
  Bacterial polypeptide expressing nucleotide sequence isolated from the Sargasso Sea
aggatctggagttgtaattggtttaatgaaagccctcgcgctaagaaaggcaaaagcaaatgttattggtgttgttggtttagtagagaaccatattggcagcaaagcccaaagaccgagtgatgtagttaaatcttattctggtcaaacaatagaggtattgaatacagatgcagagggaagattagttcttgctgacgctctatggtatacccaagagcaatataagccagagcttatggttgacctagcaacattaactggagctataatcgttgcattgggagacgaatatgcaggacttttctcaaatagcgataaagtaagcaaacaactttcagaagctggagatattgagggagagaaattatggagacttccccttaatgataagtacgacaaaatgttaaattctcctattgcggatatgcaaaatattacaaatggaagaggtccaggatctattacagctgcgcaattcttgcaaagatttgtaaataaggttccctgggcacacctcgatattgctggaactacttggactaagcagccattgccaacttcgccaaagggagcaacagcttttggtgtaaaactgttaaatagatttgtgtctaagtattatgagggaaaatag

SEQ ID NO: 261794 - DNA, 856 bp, Unknown
  Bacterial polypeptide expressing nucleotide sequence isolated from the Sargasso Sea
ttaccttattgcgttagccataggtgatttggagtttaaagctatgggtgagcgtactggtgtgtatgctgagcctgcgttacttgaaagtgcggcgaaagaattcgaagataccgaggcaatgttagaggtaacggaagaaacctatggaccttaccagtgggatcgttacgacctgctaattctaccgccttcattcccgttcggcggtatggaaaaccctcgcttgtcgtttataacacctacagttatcgccggtgataaaagcttggtgtctctgattgctcatgaacttgcacacagctggtctggcaacacagttactaacgctacatggcgcgatctgtggttaaacgaaggctttacgacctatttaacctaccgaattatggaaatgatctacggccatgatcgtttcaaaaaagaagcagtactaggttatcaagacctggagaacgatgttgcagccttagaagagaatgatgaaatcctggcgatcgaccttcgtggtcgtaatccagatgatgttttctcaaatattccgtacgaaaaaggtgcactgtttttacgtgaaattgaacacaagattggccgcgaaaactttgatgcgttcttaatgcaatactttaaggactttgctttcaagagcattaccaccgatacatttattgcttatttagatgacacgttattaaagcaataccctgacaagctggacgcgaatcgcattcacacatggatttttgagccaggcattcctgaaggcgcaccacaccctgagtcagatgcttttaccaaaatcgatgatacgcgaagcgcttggctttctggcgacgtgaaagcggcggatatgaaa

SEQ ID NO: 261795 - DNA, 574 bp, Unknown
  Bacterial polypeptide expressing nucleotide sequence isolated from the Sargasso Sea
gctataggagttgttggtctagtagagaatatggtaagtggtaacgcacaaagaccaggagatattgtaaaatcttttagcggtaaaactatagaagtattaaatacggatgcagagggacgattagttttagctgatgctatcacttttactgaaaaaaaatataaaccaaagtttattattgatttagctacccttacaggagcgattatagtttcccttggctcagagtatgctggacttttctcaaataacgatgatttatcgaaaaaaatttttaacgctggggaaaaagttgatgaaaaagtatggcgtatgccattacataaaaattacgataaactgatgaattcaaaaaatgcagatatgcaaaatataaattatgtagggggtgctgggtcaactacagctgcacaatttcttcagagatttatcctgaataaaaccccatgggctcatttagatattgctgggatggcattttcaaaatatggaggagctctaaattctggaggagcaactggttttggggtgaggttgcttaatgagcttattgaagaaaattatgagtaat

SEQ ID NO: 261796 - DNA, 685 bp, Unknown
  Bacterial polypeptide expressing nucleotide sequence isolated from the Sargasso Sea
atatcactaaaaccagcgaaatttatggaagatatgacttatgatatggcaggatcagcagtagtagtcggactaatgaaaagtttagctttaagaaaagctaaaattaatgctgtaggaatagtagggcttgttgaaaatatgccagggggtaatgcacaaagacctggtgatattgtaaaatcttatagtggaaaaacggttgaaatattaaatactgatgcagagggaagattagttttagctgacgcacttacatatactgaagaaaaatttaaacctaaatttatagttgatttagcaactttaactggtgctattattgtttcgcttgggtctgaatatgcaggtttgttttctaatgatgataaattatcaaatcagttgattaatgctggggaaaatgttgaagaaaaagtttggagaatgccattaaataaaaattttgacaaacttattgactcaaaaaatgcagatatgcaaaatattaattatgttggaggagcaggatctacaactgctgctcaatttttacaaagatttattttaaataaaacaccttgggcacatttagatatagctggaatggctttctcgaaatatggaggagcattaaattcaggtggtgcaacaggttatggagttagattattaaataaactaatagaggattattatgagtaaa

SEQ ID NO: 261797 - DNA, 706 bp, Unknown
  Bacterial polypeptide expressing nucleotide sequence isolated from the Sargasso Sea
gtttgttttgatactgggcggtatatcattaaagccagctaagtttatggaagatatgacttatgatatggcaggctctgctgtagtagttggattgatgaaaagcttagctttaagaaaagcaaaaattaatgcagtgggagtggttgggctagttgaaaatatgcctggaggcaatgcgcaaagacctggtgacattgttaaatcttatagtggcaaaacagttgagattttaaatactgatgcggaaggaagattggttcttgcagacgcacttacttttacagaggaaaaatttaaaccaaagtttattgtagatctagcaactttaacaggagcaattattgtttcactaggctctgaatacgcaggtttattttctaatgatgataaattatctcaacaattgattgagtcaggtgagcatgttgaagaaaaggtctggaggatgcctttaaataaaaattatgataaattaatagattctaagaatgcagatatgcaaaatattaattatgttggtggagctggttccactactgctgcacaatttctacaaagatttattttgaatgaaactccttgggcacacttggatatagctggtatggcgttttcaaaatatggtggagctttaaattcaggtggtgcgacaggttatggagttagattattaaacaaacttatagaggatcattatgagtaa

SEQ ID NO: 261798 - DNA, 822 bp, Unknown
  Bacterial polypeptide expressing nucleotide sequence isolated from the Sargasso Sea
aagtcgcaagcaaatatggacacaagggcagggcatagacaaccgtcattggatacccatgtttgatgaaagaaatgatttgatcacgaccgaattgttgattgaatttgatgaaaaatttcaggtattgtccaatggtgtaaagctgaaagaaaagacgttaagcaatcaaaagaaactttggcattataagatgtcaaagccacatgcgccctacctcattatgttgggaataggagagtatggcataaaagagatcacatcttcttccaatgttcccatgaaattgtattattacttggatcaagaagaccaatacgcccctacttatcggtataccaaaaagctgattgattacttggaagatgaaatcggggtgccttatccttggcaatcttatgcccaaattccggtacaagactttatgtacggtgcaatggaaaataccactgcaaccattttcggagatttttatttgatcgatgagcgtggttttctcgatcgcaattatgtgcgcgtcaatgcgcatgagttggcccatcagtggtttggagacatggttacagcacgatctgcagcccatcactggttgcaagagagctttgccacacattatgatatgaactttcagcgtgttgcttttggtcaagatcactttgattgggtcagacgaaactacactgagcaagctttaaacgccacgctgactgatttgaagcctattgctcatagtcaagctggtactgtcaggcattatccgaaaggggcctatgtattagaaatgttgaagtatgtgctcggccgtgaagaattcaatgctgg

SEQ ID NO: 261799 - DNA, 536 bp, Unknown
  Bacterial polypeptide expressing nucleotide sequence isolated from the Sargasso Sea
aagggtacgtattgggaatacggatgctgaggggcgcttagtactggcggacttattatcgcatttacgtgaggatgccaaaactgcggtcaatcctactttgtattctatcgctactttaactggtcatgcggcccgagccgtaggtccatacagtgctctggtggaaaatggtgctgctcgtcgagttggtttgtcggctgacttagctctggtgggcgatttatgggctgacccaagcgaaatctcccgcagtcgtcgcgaagatttcagctttatcaaaggccgcagttctgctgatgatttattaagctgtaataatgcgccttcgtcagtcacgccccgaggccatcaattccctatggccttcttagttgccgcggcaggattagatcaacacggattaaacactgaacagccattgccatattgtcatattgacatagctggcagcggtgttgatggtggcgattggcaacatggcaagccatcagcagcgccagtggcagccttagccgcttactattgtttataaa

SEQ ID NO: 261800 - DNA, 643 bp, Unknown
  Bacterial polypeptide expressing nucleotide sequence isolated from the Sargasso Sea
gatggatgaaatgaagtgggatatgtctggagcgggatcagttataggaaccatgtgtgcagttgctgcctcaaaactacctgtaaacttagtttgcacaatagcgctttccgagaatatgccagctggtaatgctacaaaaccaggagatgttgtgacatctatgtctggacaaacaattgaggttctaaatactgatgctgaaggaaggttagttttatgcgatgccttaacatacattggaaaatacgatccaaagtttgtagtagatactgcaactttaactggtgctgtagttgtcgctctgggcgatattgctgctggagttatggggaatgatcaaaaattagtcgataaaattcttgacgccggtcaagcaacaggtgaaaaagcttggcaacttccaatgtgggatgaatatcaatcgtacttagattcaaattttgctgacattgccaatattgctccaggaagggcagctggtactattgagggagcctgttttctttcaagatttacagaggactataagtgggcgcacattgatattgctggggttgctgatattggagcaggaaaaaataaaggctctaccggtaagcctgttggactactctttgagcttgtaaataaaaataaataa

SEQ ID NO: 261801 - DNA, 851 bp, Unknown
  Bacterial polypeptide expressing nucleotide sequence isolated from the Sargasso Sea
cctgggaaaaaaatcttcaatacacggtaatgacttcgctattataggtggaaaaattaatcagatttcctcaaagtcaaataaaaagattgtaagtattcttgttgctaaggaattttctactgatgataatttaattcagattggtttcggcgcaactctaaacacttataaattcgataagtataaaacaaagaaaaaaactaaaaagcaaataaatgaagttaagataatttctaataatgcctctaagttaaaaaataaattgaaaaataaaaattctgttgcagagggtatcttcttggctagagatttagtaaatgagcctagtaatgttctaaacccagaagcttatgcaaaaagaattaaagagctctctaagtttggtcttaaagtagagattttaaacgaagcaaaaatgaaaaggcttggaatgtggtctttactgggagtaggacgcggtagtcaatatgaaagtcaattagtaattattagatgggaaggaaataaaagtaaaaaaacaaaaccactatgctttgttggaaaaggtgtttgttttgattctggaggaatttctctaaaacctggtaataaaatggaagaaatgatcggtgatatgggtggttcagcagcagttgtaggtttaatgaagactcttgctcttagaaaagctaaggtaaatgttataggggtggtaggtttggttgaaaatatgcctgatggaactgcccaaaaacctggtgatattgtaaagtcaatgtctggacagactattgaaatacaaaataccgatgcagaaggaagattggttctagccgatgctctatggtatgctcaagataagtacaaac

SEQ ID NO: 261802 - DNA, 640 bp, Unknown
  Bacterial polypeptide expressing nucleotide sequence isolated from the Sargasso Sea
tatggcaggttctgcagttgttgttggattgatgaaaagtttagctttaagaaaagcaaaagttaatgcagtaggtgttgttgggttagtggaaaatatgccaggcggaaatgctcaaagaccaggagatattgtgaaatcttacagtggacaaactgttgaaattttgaacactgatgcagagggtagactagtacttgcagatgctcttacttatacagaaaaaaaatttaaaccaaaatttattgttgatttggcaactttaactggtgcaataattgtttctttaggatcagaatatgctggtttattttcaaacgatgataaattatctaaacaattaattgatgcaggtgaacatgttgaagaaaaagtttggagaatgcctctaaataaaaatttcgacaaattaatcgactcaaaaaacgcagatatgcaaaatattaattatgtaggtggagcaggttcaacaactgcggctcaatttttacaaagatttatattaaacaaaacaccatgggcccatttagatatcgctggtatggcattctctaaatatggaggttcgttaaattcaggtggagctaccggttatggagtaagattattaaacaaactaatagaggataattatgagtaa

SEQ ID NO: 261803 - DNA, 826 bp, Unknown
  Bacterial polypeptide expressing nucleotide sequence isolated from the Sargasso Sea
gaaaatttgatagcaaaaaattttccactcatccacactgttggacgcgcgtcttcccaagagccaaggttacttgaaattaaaagtgggaatttaggacccaaagtaaccttggttggcaaaggggtttgtttcgatacggggggactaaacattaagcctaaccgttcaatgagcctaatgaaaaaagatatgggaggagcggctaatgttttagccctcgcttccatgatcctatcaaccagtatgaatatccaattacgagtacttataccggcagtagaaaattctatttccggaaattcatttcgcccgggcgatatactcacggccagaaatggatcaactgttgaaatcaataatacagacgcagaaggccgccttgtgctagctgatgcattgtctttcgcaagcgagggtgagcctgatctaataatatcaatggcgacactaacgggcgctgcgcgtgttgccgttggagcagatatcgctccgtttttttcagaaaggaacgaagtcagcgatatattaaaagcttcaggtgctcagcaaaatgatcctgtttggcctttgccgttttgggatccttacgaaaaaatgattgagcctgacacggctgatttagacaatgctcccagcggtggctatggtggagcaatcacggctgcactatttttgcgccgctttgttacaaagccaaactcatacatacacttcgatatatactcttggtcagacacaaataaaccagggctaccaaaaggtggaataacacaaggacccagagccatattcgatgcacttccaaaaattctagatatttaaa

SEQ ID NO: 261804 - DNA, 511 bp, Unknown
  Bacterial polypeptide expressing nucleotide sequence isolated from the Sargasso Sea
ggaagtaaagctactaaaccaggagatgttgtaaaaactctttctggacaaactgttgaaatattaaatactgatgcagaaggtagattagttttggctgacgcattaacttacataaaaagatttaatcctaaaacagttactgatgttgcgaccctaacaggtgcatgcattattgctcttggtcatgccacttcaggtcttatgagtaataatgatagacatgccaatgatttgtatgaagcaggcttaaaatcacaagacaaagcgtggagactgcccatctgggatatctatcagaaagatttaaatagcaattttgctgatatagcaaacataggaggtagagctggaacaattacagctgcatgtttcttgtctagatttactaaggattatgaatgggctcatttagatgttgcaggaacggctcatgttggaggtctagcaaaaggtgcttctggaagaccagttcctttactaagtcaatttctaatagataaagcataat

SEQ ID NO: 261805 - DNA, 913 bp, Unknown
  Bacterial polypeptide expressing nucleotide sequence isolated from the Sargasso Sea
aaaaatattaatttaaatattattggtaaacaaacatctaaatcaaatattttaagaaaaaaactagatgcaatattagaaggagttttttttacaagagatcttgtatctgaaccaggcaacattctacatccagatgcatattcaaaaagattaattaaattaaaaaaaattggtcttaaggtaaaagtttataatgaaaaaaaattaaaaaaattaggatgtaatgctttgcttggagtaggacagggaagtattaggggttcttatcttgtaaccattgaatggaaaggaaataaatcaaattcaaaacctttagcatttgttggaaaaggagtttgttttgataccggtggttactcgctaaaaccggcaagatttatggaagacatgacttatgatatggcgggttcagctgctgttgtaggtttaatgaaaactttagctttaagaaaatcaaaaattaatgcagttggtgtagtaggtcttgttgaaaatatggtaagtggaaatgctcaaagacctggagatattgtcaaatcttatagcggaaaaactatagaagtattaaatactgacgctgaaggtagattagttttagcagacgccttaacttttactgaaaaaaaatttaaacctaagttcatggttgatttagcaacattaactggtgcaataattgtatcattaggctcagagtatgcagggcttttttctaacgatgacaaactatcaaagcaattacttgaagcaggcgaaagagttgatgaaaaattatggagaatgcctcttcacaaaaactttgacaaactaataaattctaaaaacgcagatatgcaaaatattaattatgtaggtggcgctggatccactactgcagcacaatttttacaaagatttattataacaaaac

SEQ ID NO: 261806 - DNA, 883 bp, Unknown
  Bacterial polypeptide expressing nucleotide sequence isolated from the Sargasso Sea
tctcttaagaaacatggtttaaatgtaaaaatatatgataaaaaaaaattaaaaaaattaggcatgaatgctttacttggagtaggacaaggaagtataagaggatcatatcttgtaacaattgaatggaacggagcaaaaaataattcaaagcctttagcttttgttggtaaaggagtatgtttcgatactggtgggtattcacttaaaccagcaaaatttatggaagacatgacttatgatatggcaggttctgctgtagtagtaggtttgatgaaaaacttagcattaagaaaagcaaaaattaatgctgttggagtagtaggacttgtagaaaatatggtaagtggaaatgctcaaagacctggagatattgttaaatcttatagtggcaaaacaattgaagtattaaatactgatgccgaaggtagattggttttagctgatgctttaacttttactgagaaaaaatttaaacctaaatttatagttgatttagcaactttaactggtgcaattatagtttctctaggctctgagtatgcgggacttttttcaaataatgacaaactatcaaaacaattgcttgaagcaggtgaaaaagttgaagagaaattatggagaatgcctttacataaaaactttgataaattaataaattctaaaaatgctgatatgcaaaatataaattatgttggaggagctggatctacaacagctgcacaatttttacaaagatttattttaaataaaacaccgtgggctcatcttgatattgctggaatggcattttcaaaatatggaggagcattaaattcaggtggcgctacaggttatggagtaagattattaaatcaattaatagaagataattatgaataat

SEQ ID NO: 261807 - DNA, 829 bp, Unknown
  Bacterial polypeptide expressing nucleotide sequence isolated from the Sargasso Sea
attttaagcggtataaatttcacaagagatttagtttctgaaccaggaaatattttacatccagatgaatatacaaaaaggctaattaagttaaaaaaatttggtctaaaaataacagtttacgatgaaaaaaaattaaagaaaatgggatgcaatgctctactaggagttgggcaaggaagtataagaggatcatatcttgtaactattgaatggaaaggaaataaatcaaaatcgaaacctttagcatttgttggaaaaggagtttgttttgatacgggtggttattcactaaagccagcaagatttatggaggatatgacttatgatatggcaggttcagctgctgtagtaggtttaatgaaaactttagctttaagaaaagcaaaaataaatgctgtgggcgtagtaggtctcgttgagaatatggtaagtggaaatgctcaaagaccaggagacatagtaaaatcttatagtggaaaaactatagaagtattaaatactgacgctgaaggtagattagttctagcagatgccttaacattcacagaaaaaaaatttaaacctaaattcatggttgatttagcaactttaacgggcgctatcattgtttctttaggttcagagtatgcaggacttttttctaacgatgataaactatcaaaacaattacttgaagctggtgaaagagtcgatgaaaaattatggagaatgcctcttcacaaaaacttcgataaacttatggactcaaaaaatgcagatatgcaaaatataaattatgtaggaggagctggctcaacaacagctgcacaattttacaaagatttat

SEQ ID NO: 261808 - DNA, 922 bp, Unknown
  Bacterial polypeptide expressing nucleotide sequence isolated from the Sargasso Sea
ttgtttgcaaatttagataaatatgctgtagagaatgccgtaatttatgctgatacaagtcatctttctaaagatgataatttcctttttgatttagctaaaactgctgaaaaagcaagctataggtacacagatacaaatccaaataccaaaaaagaattaattctgaaaaatgtttcgttagctgtaggaaatgccactacagcacaaaagagagttgttgaacttggatataatgttggctctggggctaatactgcaagaaacttaggagatagaccagcaaatcatgcaactcctgcttatattgcaaaagccgtgaagggtctagctaaagatatcggcggtttttctgttgaaatattagaagaaaaagacatgaaaaaacttggcatgggttgtctactatcagtttcaagaggaagtattgaaccagctaaattggtaactatgcagtacaaaggcggtaaaaagggagctaagccaattgttctagttggaaaaggtgtaacttttgatacaggaggcatcagcttaaaaccgccacaaaaaatggatgagatgaaatgggatatgtctggtgcaggatctgttataggaacaatgtgtgccgttgctaaatcaaaacttccagtaaatttagtttgtacagttgcactttctgagaatatgccaggaagtaaagctacaaaacctggtgatgttgtaacaagcatgtcgggacaaactgttgaaattctaaataccgatgccgaaggcagactagtactttctgatgctttaacctacgttggaaaatatgatcctaaagttgtcattaatactgcaacccttactggtgcggtagtcgtagcattgggttcagttgctgctggcgtaatgggtaatgatcaaaagcttgttgatggagatactgaagctg

SEQ ID NO: 261809 - DNA, 784 bp, Unknown
  Bacterial polypeptide expressing nucleotide sequence isolated from the Sargasso Sea
gaagaaggaacaaattttactaaagatttagtttcagaacctggaaacattttacacccagatgaatatgcaagaagactcttaaaactaaaaaaactaggattgaaggttactgtatatgataaaaaaaaattaaaaaaattaggaatgaatgctttattaggtgttggacaaggaagtataagaggatcgtatctagtaactatggaatggaatggagctaaatctaaaactaaaccattggcatttgtaggaaaaggagtttgctttgatactggaggtatttctttgaagcctgcaagatttatggaggatatgacatatgatatggcaggatcggcggttgttgcaggactgatgaaaaattttgctattagaaaagctaaaataaatgcggtaggagttgttggacttgtagaaaatatgccaggtggaaacgctcaaagacctggtgatattgtaaaatcttatagtggaaaaactattgaagtattaaataccgatgcagaaggaagattagtgttagctgatgctttaacttttactgaaaaaaaatttaaacctaattttattgttgatctagcaactttaacaggtgctattatagtttgtttgggttctgaatacgctggacttttttcaaatgatgacaaattatcaaatcaaattttcaaagcaggtgaaaaagtgggcgaaaaagtatggagacttccattacataaaaactatgacaaacttatggattctaaaaatgcagatatgcaaaatataaattatgtaggtg

SEQ ID NO: 261810 - DNA, 829 bp, Unknown
  Bacterial polypeptide expressing nucleotide sequence isolated from the Sargasso Sea
aagattaggatgtaatgctctaataggagtaggacagggaagtataagaggctcttatcttgttactattgaatggaatggaaaaaaatctaaatcaaaacctttagcgtttgtgggcaaaggtgtttgttttgataccggaggtatttctttaaagccagcaagatttatggaagatatgacttatgatatggcaggctcagctgttgtagtaggtttgatgaaaaattttgcattgagaaaagcaaaaataaatgctgtaggagttgttggattagttgaaaatatgccagggggaaatgctcaaagacctggtgatatagtaaaatcttatagtggaaaaactatagaagtgcttaatacagatgcagaaggtagattagtattggcagatgctataacttttacagaaaaaaaatttaaacctaatctgattattgatttagcaactttaacaggagcaataattgtttgcttgggctcagaatatgcaggacttttctcaaacgatgataagttgtcaaagcagatttttgaagctggaaaaaaagtagatgagaaagtttggagattaccactgcataaaaattttgataaacttatggactctaaaactgcagatattcaaaatataaattatgttggtggtgctggctcaataacagctgctcaatttttacaaagatttattattaataaaacaccttgggctcatcttgatatagctggaatggcattttcaaaatatgcgggagctttgaatccaggaggagctaccgggtttggagttagactactaaataaatttgtagaagataattatgagtag

SEQ ID NO: 261811 - DNA, 910 bp, Unknown
  Bacterial polypeptide expressing nucleotide sequence isolated from the Sargasso Sea
aaagcaatagaattaggagttaactatacaaaagatttagtatcagaacctggaaatatattgcacccagatgaatatgctaaaaggctaactcaattaaaaaaaattggtcttaaagtttctgtttataatgaaaagcaattaaaaaaaatgggttgcaacgcactggttggtgttggtcaaggtagtattaggggctcgtatttagtaactcttgaatggagaggaaaaaaatcaaattcaaagccactagcattcgttggtaaaggagtttgttttgatacagggggtatatctttaaagcctgcaaggttcatggaagatatgacttatgatatggctggttcagctgtcgttgtgggtctaatgaaaaatttagctttaagaaaatcaaaagttaacgcagttggtgttgttgggctagttgaaaatatgcctgggggtaacgctcaaagacctggagatattgtcaaatcttatagtggaaaaactattgaggtattaaatactgatgcagaaggaagattagttttagcggatgctataacttttacagagaaaaaatttaaacctagtttgattgtagatttagcaacactaacaggcgctatagttgttgcattgggatcagagtatgctggattattttctaacaacgataatttatctaagcaaattcatgaagctggtgaaaaagttgaggaaaaagcatggagactcccattgcactctaattacgataaacttatgaattccaaaaatgcagacatgcagaatattaattatgttggtggagcaggctcgactaccgcagctcagtttttgcaaagatttattttaaacaaaacaccctgggctcatttagatattgctgggatggctttttcaaaaatatgctggcgctcttaat

SEQ ID NO: 261812 - DNA, 883 bp, Unknown
  Bacterial polypeptide expressing nucleotide sequence isolated from the Sargasso Sea
ttgcatggcattacactaaaatcttattcatttgaaaaatataaaactaaaaaaaataaatcaactatcagaatatttgttgatgggaaaaatattccatcaattaaacatcagattaaatttaaatctatagaaaatggaactttttatgctagggatttagtctctgaacctggaaatattttgcatcctgacgagtatgctaaaagattatcattgttaagaaaagagggattatcaattaatatttatgatgaaaagaaattaaaaaaattgggaatgaatactctacttggggttggacaaggaagtattcggggatcatatttagtgacaatggaatggaaaggtttaaatgataagtcaaaacctttggcatttgtaggtaaaggagtttgctttgatactggaggaatttccttaaagcctgctaaatttatggaagatatgacttacgatatggctggatcagcagtagttgttggattgatgaaaagtttggctcaaagaaaagcaaaaataaatgcagttggagtagttggacttgtagaaaatatgccaggtggaaatgctcaaagacctggagatattgtaaaatcttacagtggaaaaactgttgaaattttaaatacagatgcggaaggaagattggttcttgcagatgcacttacatatacggaggaaaaatataaacctaagtttatagtcgatttagcaactttaacaggagcaataattatatcactaggttcagaatatgctggtttgttttcaaacgatgataaattatcaaatcaattaattgaagctggagagaaagtaggagaaaaagtttggagaatgcctttaaataaaaattttgataagttaatcgactccaaaa

SEQ ID NO: 261813 - DNA, 622 bp, Unknown
  Bacterial polypeptide expressing nucleotide sequence isolated from the Sargasso Sea
tgtagttggtttaatgaaaagcttagcattaagaaaagcaaaaattaatgctgtcggagttgtagggcttgtagagaacatggtaagtggagttgctcaaagacctggagatattgttaaatcttatagtggtaaaactatagaagtattaaatactgatgcagaaggtcgattagttttagcagacgcattatcttttactgaaaaaaaatttaagccaaaatttattattgatttagcaaccttaacaggtgcaattatagtctcgctaggatcagaatatgccggacttttttcaaacgatgacaagttgtcaaaacaaattttagatgctggcgaaaaggttgaagaaaaactatggagaatgccgcttcataaaaattatgacaagcttatgaattctaaaaatgctgatatgcaaaatataaattacgttggtggagcaggatcaacaaccgcagctcaatttttacaaagatttattttaaacaaaactccatgggctcatttggatattgccggtatggctttttcaaaatatggtggtgctttaaattcagggggagcaactggatttggggtcagattgttaaaccagttgatagaagaaaactatgagtaa

SEQ ID NO: 261814 - DNA, 892 bp, Unknown
  Bacterial polypeptide expressing nucleotide sequence isolated from the Sargasso Sea
attttacatccagatgagtatgcaaagagaattgctaaattaagaaagattggattaaaagtcacaatctatgatcaaaaaagattaaaaaaattaggatttaatgcattactgggtgtaggacagggcagtattagaggttcttacatggtaactatagagtggaatggaaataaaaataaatcgaaacctttagcttttgttggaaaaggtgtttgttttgacactggtggaatttcacttaagcctgccaaatttatggaagatatgacatatgatatggcaggttcagcaactgtggttggccttatgaaaactctggcattaaggaaatctaaaattaacgcagttggagtagtaggattagttgaaaatatgccaggagcaaatgcacaacgacctggagacattgtaaaatcttacagcggacaaacgattgaagtattaaacacagatgctgagggaagactagttttagcagatgcacttacttataccgaagagaaatttaaacctagtataattattgacttagcaacattaactggcgcaataattgttgcacttggatctgaatatgctggactatggtcaaataataaaaaactatcgaaacaactttttgatgctggagaacaggttgaggaaaaagtatgggaaatgccgcttcacgaaaattataataaattaatgaattcaaataatgctgatatgcaaaatattaactatgttggaggagctggatcaacaactgcagctcaatttttacaaagatttataattaacaaaacaccttgggcacatttagatattgctggaatggctttttctaaatatgcagatgcattgaattctggtggtgctactggatatggtgttagattattaaacc

SEQ ID NO: 261815 - DNA, 814 bp, Unknown
  Bacterial polypeptide expressing nucleotide sequence isolated from the Sargasso Sea
gccgtaaaaaatgctgtaatttatgctgatacaagtcacctttttaaagatgataatttccttttcgatttagcaaaaactgctgaaaaagttagctataggtacacagatacaaatccaaataccaaaaaagaattaattctgaaaaatgtttcgctagccgtagaaaatgccactgcagcacaaaagagagttgttgaacttggatataatgttggctctggggctaatactgcaagaaacttaggagatagaccagcaaatcatgcaactcctgcttacattgcaaaagctgtaaagggtctagctaaagatattggcggtttttctgttgaaatattagaagaaaaagacatgaaaaaacttggcatgggttgtctactgtcagtttcaagaggaagtattgaaccagctaaattggtaactatgcagtataaaggtggtaaaaaaggagctaagccaattgttcttgttggaaaaggtgtaacttttgatacaggggggattagcttaaaaccgccgcaaaaaatggatgaaatgaaatgggatatgtctggtgcggggtctgtaataggaacaatgtgtgccgttgctaaatcaaaacttccagtaaatttagtttgtacagttgcactttctgagaatatgccaggaagtaaagctacaaaacctggtgatgttgtaacaagcatgtcagggcaaactgttgagattcttaatactgatgctgaaggaagactagtactttctgacgctttaacctacgttggaaaatatgatcctaaagttgttattaatactgcaacccttactg

SEQ ID NO: 261816 - DNA, 751 bp, Unknown
  Bacterial polypeptide expressing nucleotide sequence isolated from the Sargasso Sea
cggtgtcaaaaataattcaaaacctttagcttttgttggcaaaggagtttgttttgataccggcggttattcattaaaaccagcaaaatttatggaagacatgacttatgatatggcaggatctgcaactgttgttggattaatgaaaaactttgcactgagaaaagctaaaattaatgcagttggtgttgttggactagtagaaaatatggtaagtggaaatgctcaaagaccaggagatattgttaaatcttatagtggaaaaacaattgaagtgcttaatactgatgctgagggtagattagttttggctgatgctctaacttttactgaaagaaaatttaaacctaagtttatggttgacctggcaactttaactggagctattattgtttcgttgggttcagaatatgcaggacttttttcaaacgatgatcaattatcaaaacagttaatagaagctggagaaaaagttaatgagaaattatggaggatgcctttacataaaaattttgataaattaatagactctaaaaatgccgatatgcaaaatattaattatgttggtggagcaggatctacaactgctgctcaattcttacaaagatttattttaaagaaaacaccatgggcacacctagatatcgctggaatggcattttcaaaatatggaggtgctttaaattcaggtggtgctacaggttatggtgtaagactattaaatcaactaactgaggataactatgaatag

SEQ ID NO: 261817 - DNA, 619 bp, Unknown
  Bacterial polypeptide expressing nucleotide sequence isolated from the Sargasso Sea
ttgttggtctgatgaaaatctagcaataagaaaagcaaaaattaacgcagttgtagtggttggacttgtagaaaatatgcctggtggaaatgcacaaagacctggcgatatagtaaaatcttatagtgggaaaactattgaaatactaaatactgatgcagagggcaggttagtattagcagatgcattaacgttcactgaaaaaaaatataaacctcagttcataattgatttagcaactttaacaggtgctataattgtatctttaggttctgaatacgcaggacttttttctaataatgataaattatcaaagcagatttttgattcaggtgaaaaagtaggtgaaaaagtttggcgaatgccattacataaaaattatgataaattaatagattcaaaaaatgcagacgttcaaaatataaattatgttggtggagcaggatcaacaactgcagcccaatttttacaaagatttattttaaataaaactccatgggctcatttggatatagctgggatggctttttcaaaatatggtggtgctctcaattctgggggtgctacaggatttggtgtaagattattaaataaattaatagaagataactatgagtaa

SEQ ID NO: 261818 - DNA, 867 bp, Unknown
  Bacterial polypeptide expressing nucleotide sequence isolated from the Sargasso Sea
agcaactcttaaatcttattcttttgaaatttataaaacaaaaaaaaatgttaagaaatttataaatattaatattgtaggcaagagtaaaaaaagtattctcaaaacaaaattagatgctcttactgcaggtgtattcttaacaagggacttggtgtctgagccaggaaatatattgcacccagatgagtatgcaaaaagaataggtcaattaagaaagataggaattaaagttacagtttacgataagaaaaaattaaagaaaatgggatgtggagctttattgggtgtaggtcaagggagtgtaagaggttcttatcttgttgtgatggaatggaaaggtggctcctctaaatctaaacctctagcatttgtaggaaaaggagtttgttttgatactggtggtatttcattgaaacctgcaaaatttatggaggatatgacatatgatatggctggttctgcagtagtagttggattaatgaaaaattttgcacttcgaaaagcaaaaattaatgcagttggtgtagttggacttgttgaaaatatgcctggaggaaacgctcaaagaccaggtgatatagttaagtcctatagtggaaaaactattgaagtattaaatactgatgcagagggaagattagtattagcagacgcgcttacttttactgaggaaaaatttaaacctaatttaattattgatcttgcaacgttaacaggcgcaatcattgtatcattaggttctgaatatgcaggattattttcaaataatgataagctttcaaaacagctatatgaagctggtgaacaagtagaagaaaaagtatggagaatgccactgcataaaaactatgataaattaattaa

SEQ ID NO: 261819 - DNA, 873 bp, Unknown
  Bacterial polypeptide expressing nucleotide sequence isolated from the Sargasso Sea
taaactctcttaaaaaagatggtttaaaagtaaatatatatgatgaaaaaaaattaaaaaaattaggtatgcatgctttaattggtgtagggcagggaagtatacgaggatcatatctggtaacaatggaatggaatggcgcaaaaaataattctaagcctttggcttttgttggaaaaggagtttgtttcgatactggcgggtattcattaaaacctgcaaaatttatggaagacatgacatatgatatggcaggttctgcaactgtagttggtttaatgaaaaacttggctttaagaaaagcaaaaataaatgccgttggagttgtaggtcttgtagaaaatatggttagtggaaacgcgcaaagaccaggagatattgtaaaatcttatagtggtaaaactattgaaatattaaatacagatgcagaaggtagattagttttagctgacgcattaacttttaccgaaaaaaaatttagaccaaaattcattattgatttggcaaccttaactggagctatcatagtttgtttaggatctgaatatgcaggacttttttcaaatgatgataaattagcaaaacaaatttttaatgcaggtgaaaaagttgaggaaaaagtttggagaatgcctttacacaaaaactatgataaactcatgaattccaaaaatgccgatgtgcaaaatataaattatgttggtggagcaggctcaacaacagctgctcaatttttacaaagatttattttaaacaaaacaccttgggctcatttagatattgctggtatggctttttcaaaatatggtggagctttaaacccaggtggtgcgactggatttggtgtaaggttgttaaaccaactcagttgaa

SEQ ID NO: 261820 - DNA, 790 bp, Unknown
  Bacterial polypeptide expressing nucleotide sequence isolated from the Sargasso Sea
acagtattttcaaaaaatgaaataaaatttaaaggatttggaggagtaacagcagtgggtcaaggaagtaaaaatgaaccaagattcataattttagaatatagaaatgggaagaaagaacaaaaaccaattttacttgttggaaaagctgtaacttttgacactggtggaatatcattaaagccgggtgagaaaatggatgagatgaaatttgacaaatgtggtggttgtacagttttaggcgtaatgaaagcaatttcagaattaaaacttccaatcaatgtagttgcaattgttccatctgttgaaaacatgccagatggagaatcatttagaccgggcgatataatcaaattgtttaatggaaaaactgcagaaattctaaatacagatgcagaaggaagattaattttggcagatggtttgggttacggaataaaacactatcaaccatcagctgtgatggattttgcaacattaacaggtgcatgtattgttgcattaggaacaaatgttgcaggaattgttagtaacaattcaaaattatcatctaaagttaaatcagcatcagaaagaacttctgaagaagtatgggaattgccactaaacgatgattacatggatatggtaaaatcaaaagttgcagacatcaaaaatcttggaattggaagagctgcaggaacaattactgcagcagcatttttggcaaattcagtaggaagtgttccatgggtgcattttgatattgcaggaactgcttggattcaaccatctacgaaaagcaaatctt

SEQ ID NO: 261821 - DNA, 742 bp, Unknown
  Bacterial polypeptide expressing nucleotide sequence isolated from the Sargasso Sea
tgcattcatcggcaagggagtaaccttcgattcaggtggtatctcgatcaagccaagttcgggcatggaggaaatgaagtgggatatgggtggcgcgggtaccgtagtcggtctcatgtgcgcgctagccgggcgtaaggcgaaggtgaacgcgatcggcgcggtcggattggtcgaaaacatgccttctgccaccgcgcagcggcccggagacgtggtcaaggcgctgtcgggaaagacgattgaggtgatcaatactgatgcggagggccgcctcgttctggccgacgttctgtggtacgtccagaatcggtttaagccatcagcgatgatcgacctggcaacactgacaggtgcgatgattgttgcgctcggccataactatgccggcttattcagcaacaacgacgagctttcagagcggcttaccgacgctggtgaagcgaccggtgagcgtgtctggcgtatgccgttgcacgaatcctatgagcctgacatcaagtcgcaaatcgccgacatcaagaatgtcggggccggacgtagcgctggtagcattacggcggcactctttctgcagcattttgtcaacgatgtgccctgggcccatctcgatatcgcgggtatggcttggtgctacaaggcaacaccgacggttcccaagggtggatcgggctacggtgtgcggttgctcgatcgattggtagcggatcactacgaggccggttcgccacgccagaaatag

SEQ ID NO: 261822 - DNA, 678 bp, Unknown
  Bacterial polypeptide expressing nucleotide sequence isolated from the Sargasso Sea
gtggactttctttgaagccagccaagtcaatggaagatatgaaatgggatatgggaggtgcagcaactgtaactggtattatggaagtagcggcactttctaagttaaagcataatttaataggtgttataggtcttgttgaaaatatgccagatggcaatgcacaaagacctggagatgttgtgaaatcttattctggtcaaactatcgaagttttgaatacagatgctgaaggtagacttgtattagctgatatactttcttggactgaaaaaaaatataaacctaagtttatgattaattttgcaacgttaactggtgcaatgattgtagcattggggaatattagggctggtttgttttcaaataataaagaaatttctgaagctatttttaaatcaggtgaaattacaggtgaaaaagtttgggtgatgccattagatgatgaatatgatcaattgataaaaacagagattgcagatatgaaaaatattggggggcctggtgcgggatcaataactgcaggatgttttttaaaaagacacgtagaaaaaaccccgtgggctcatttagatatagctggagttacttggcaaaataaatccacgccatccattccatctggtggtgtgggatggggtgttagaatgttacaccatttaataaaccaatattagt

SEQ ID NO: 261823 - DNA, 863 bp, Unknown
  Bacterial polypeptide expressing nucleotide sequence isolated from the Sargasso Sea
gaactgataaaaggatatcttttgcgccgatatgagttctcaacttataaagctattgacggtaaatgtatgggctcagtaacaatgacgtcaaagcacccaaaagattttggaaaatcattgtcagaaatcaaggctatagtagatggagtatttttcacaagaaatttgataaatgaaccggccaatattttaaacacagttgaattttccgttcgcttgaaagagttatctgctctaggtattgaagttgaaattttagaagaaaaaaaattagcagagttaggaatgaatgcactccttggagttggtcaaggttcagccaacccaagcagagttgtcgtaatgtcttggaaaggtttgtcagagaatactaaacccttagctcttgtaggtaagggtgtggtttttgacaccggaggtatttcccttaaaccagcaggtggcatggaagatatgacaatggatatgggtggtgccggagttgttgctggaacgatgctgtctttggctaagcgaaaagctaaagctaatgttgttggcttagtcggtttggtcgaaaatatgccatcaagcaacgcacaaaggccaggcgatattgtcaaatctatgaaaggtgatactattgaggttattaataccgacgcagaagggcgattagtcctcagtgatcttctttggtatacacaagaaagatttaaaccttccggtatcatcgacttagcaacactgactggcgcaattattgttgcattgggatacgaaaatgcaggggttttttctaatgatgatgatttttgcaattctttcttaaaagttgctaatcaagaaaacgaaggtgcatggcgtatgccacttggtgc

SEQ ID NO: 261824 - DNA, 853 bp, Unknown
  Bacterial polypeptide expressing nucleotide sequence isolated from the Sargasso Sea
aataaatattttattgaagaattttttcatggaacacaattaaaatcttatgaattcttaaaatataaaacaaaaaaagagagtgaaatttttaaattaagtgtatcctgtaatagtaattttttaacaaataataataacaaaaaactcgattcattgttacaaggaacaatctttacaaaggatcttgtttcagaaccaggaaatgtattacacccagatgaatacgcaaaaagacttatccaattaaagaaaattggattgaaagttagagtatataataacaaagaattgaaaaaattaggaatgaatgctttattaggagttggtcaaggtagtattagaggatcatatcttgttacaatggaatggaatggatcaaaatcaaaaaataaaccattagcttttgtcggcaaaggagtttgttttgatacaggaggtatttcattaaaacctgcaaaattcatggaagatatgacctatgatatggcaggttctgcagttgttgtaggattaatgaaaaatttagcattacgaaatgcaaaagttaatgctgttggtgttgttggcctcgtcgaaaatatgccaggaggtaatgctcaaagacctggtgatattgtaaaatcatatagtggaaaaactattgaagttttaaatacagatgctgaaggcagacttgtattagcagatgctctcacatatactgaagaaaagtttaaacctcaatttattatagatttggcaacactaactggagcaatcattgtttctttgggatcagagtatgctggtttattttcaaataatgataaactctcaaaacaactttttgattctggagaaaaagttggcg

SEQ ID NO: 261825 - DNA, 640 bp, Unknown
  Bacterial polypeptide expressing nucleotide sequence isolated from the Sargasso Sea
tatggcaggatcagctgctgtggtcggtttaatgaaaacacttgcattaagaaaagcaaatgtaaatgcagtcggtgtggtaggattagttgaaaatatggtaagcggaaatgctcaaagaccaggcgatattgtaaaatcttatagtggaaaaactattgaagttttaaatacagatgcagagggaagattagttttagctgatgctttaacttttacagaaaaaaaatttaaacctaaatttattgttgatctggctactttaaccggagcaataatagtttctctaggttcagagtatggtggattattctcaaatgacgataaactttctaatcaattaattgatgcaggtaataaagtagatgaaaaattatggagaatgccacttcataaaaattttgataaactaataaactctaaaaatgcagatatgcaaaacataaattatgtaggtggtgctggctcgacaactgcagcacaatttttacaaagatttattttaaacaaaactccttgggcacacttagatattgctggtatggcattttcaaaatatggaggtgcattaaattctggtggcgcaacaggatatggcgtaaggttgcttaataaactcgttgaagattattatgagtaa

SEQ ID NO: 261826 - DNA, 501 bp, Unknown
  Bacterial polypeptide expressing nucleotide sequence isolated from the Sargasso Sea
catatagtgggaagacagttgaaattttaaatacagatgcagaaggaagattggtattagcagacgctcttacttacacagaagaaaaatttaaaccaaaatttatagtagatttggcaactttaacgggagcaattatcgtttctctaggatctgaatatgcaggtttgttttcaaacgatgataaattatcaaaccaattaattaatgcaggagaaaatgttgaagagaaggtttggagaatgccattaaataaaaattttgataaacttatagattctaaaaacgctgatatgcaaaatattaattatgttggaggagcaggatctacaacagctgctcaatttttgcaaagatttattttaaataaaacaccttgggcacacttagatatagcaggaatggcattttctaaatatggaggagcattgaattctggtggtgcaacaggttatggagtgagattattaaacaaactaattgaggataattatgagtaat

SEQ ID NO: 261827 - DNA, 629 bp, Unknown
  Bacterial polypeptide expressing nucleotide sequence isolated from the Sargasso Sea
tgcaacagtagttggtcttatgaaaactctggctttaaggaaagctaaaattaatgcagtcggagttgttgggttagttgaaaatatgcctggagcaaatgcacaaagacctggagatattgtaaaatcttacagtgggcaaaccattgaggttttaaatactgacgctgagggaagattagttttagcagatgcactcacttacacagaggagaagtttaaaccaagtttaattattgacttagccacattaactggtgcaataatcgttgcactcggatcggaatatgctggtctatggtcaaataataaaaaattatcgaaacaactttttgatgctggagaacaggtagaagaaaaagtatgggaaatgcctttacacgaaaattataataaattaatgaattcaaataatgcagatatgcaaaatattaattatgtcggaggagctggatcaactactgcagctcaatttttacaaagatttataattaataaaacaccttgggcacatttagatattgctggaatggcattttctaaatatgcaggagcactaaattctggtggtgccacaggatatggtgtcagattattaaacaaatttattgaggagaattatgaataat

SEQ ID NO: 261828 - DNA, 694 bp, Unknown
  Bacterial polypeptide expressing nucleotide sequence isolated from the Sargasso Sea
aataaatctagacctttagcatttgttggaaagggagtatgtttcgatactggagggatatcacttaagccagctaaatttatggaagatatgacctatgatatggctggttctgcagtcgttgttggtcttttaaaaaacttagctataagaaaagctaaaataaatgcagtcggtgttgttggtctagttgaaaatatgccagatggcaatgctcaaagaccaggtgatattgttaaatcatatagtggtaaaacaatagaaattttaaatactgatgctgaaggaagattagttttagcagatgcattaacttatactgagaaaaaatataaaccgaaatttattgttgatttagcaactttgacgggtgcaataattgtttcattaggatctgaatatgcaggcttatttagtaatgatgataaattatctaaccaattatcgaaagctggagaaaaagttggtgaaaaggtttggagaatgccgctaaatgataattacgataaattaattaattctaaaaaagcagatatgcaaaatataaattatgttggtggagctggctcaacaacagcagcacagtttttacaaagatttattttaaacaaaactccctgggctcaccttgatatagcaggaatggctttttctaaatacggaggggcattaaattcaggtggtgcaactggtt

SEQ ID NO: 261829 - DNA, 508 bp, Unknown
  Bacterial polypeptide expressing nucleotide sequence isolated from the Sargasso Sea
gttaaatcatacagtgggcaaaactatagaagttttaaatactgatgcagaaggaagattagttttagcagatgctttaacttttacagaaaaaaaattcaaacctaaactaatgatagatttagcgacattaacaggagctataattgttagtttgggatctgaatatgcaggacttttttcaaacgatgacaaactgtcaaaacaaatttttgttgctggaggtaaagttggtgaaaaagtatggagattaccattacacaaaaactatgacaaacttatggattcaaaaactgcagatatgcaaaatataaattatgtaggaggtgctggctcaacaactgcagcacaatttttacaaagattcataataaataaaacaccctgggcccatcttgatatagctggaatggctttttcgaaatatggaggtgctttaaatccaagtggtgccacagggtatggtgtaagattattaaataaatttgtagaggataactatgagtaa

SEQ ID NO: 261830 - DNA, 918 bp, Unknown
  Bacterial polypeptide expressing nucleotide sequence isolated from the Sargasso Sea
tataggtcgctttttgcacggactaaaattaaaatcttatgaatttaatttatataaatcaaaaaaaaaagaaaatatttttaaaattaccttaattggaaagcaaagtgctttatcattaaaaaataaattaaaatttaaagctttggaagaaggaactttctttacaagagatcttgtttcagagccaggaaacattttacatccagatgaatatgcaaaaagattgcttaaattaaaaaaatatggattaaaagttacagtttatgatcaaaaaaaattaaaaaaattaggtttaaatgctttattaggagtaggacaagggagcataagaggttcttatcttgtaactgttgaatggaaaggatctaaatcaaaatcaaaacctttagcatttgttggaaaaggagtttgttttgatactggcggttactcgcttaaacctgcaagatttatggaagatatgacttatgatatggcaggctcagctgctgtagtaggattgatgaaaactttagctttaagaaaagcaaaaattaatgctgtgggtgtcgtaggtcttgttgagaatatggtgagtggaaatgctcaaaggccaggcgatattgtaaaatcttatagtggaaaaactatagaagtgttaaatactgacgctgaaggtaggttagttttagcagatgctttaactttcactgaaaaaaaatttaaacctgaattaatggttgatttagcaactttaactggtgcgatcattgtttcactgggttcggaatatgctgggcttttttctaatgatgataaactatcaaaacaattacttgatgccggtgaaagagttgatgaaaaattatggagaatgcctcttcacaaaaactttgataaacttatggactcaaaaaatgcagatatgcaaaatat

SEQ ID NO: 261831 - DNA, 871 bp, Unknown
  Bacterial polypeptide expressing nucleotide sequence isolated from the Sargasso Sea
tatggattaaaagttacagtttatgatcaaaaaaaattaaaaaaattaggatgtaatgcgttattaggagttgggcagggaagcataagaggttcttatcttgtaactattgaatggaaaggaaataaatcaaaatcaaaacctttagcatttgttggaaaaggagtttgttttgatactggtggttactcattaaaaccagcaagatttatggaagatatgacttatgatatggcaggctcagccgcggtagtaggtttaatgaaaactttagctttaagaaaagcaaaaattaatgcagttggcacagtaggccttgtcgagaatatggtaagtggaaatgcacaaagacctggtgatattgtaaaatcttatagtggaaaaactatagaagtattaaatactgacgctgaaggaagattagttttagcagacgctttaactttcactgaaaagaaatttaaacctaaactgatggttgatttagcaactttaaccggtgctatcattgtttctttgggctcggagtatgcagggcttttttctaatgacgataaattatcaaaacaattgtttgaagctggtgaaaaagttgatgaaaaattatggagaatgcctcttcacaaaaactttgacaaacttatggattctaaaaatgcagacatgcaaaatataaattatgtaggtggtgctggctcaactaccgcagcacaatttttacaaagatttattattaacaaaactccttgggctcatctcgatatagctggaatggctttttcaaaatatggtggtgcattaaactcaggtggagccacaggttatggagttaggttattaaataaatttgtggaggataattatgagtaat

SEQ ID NO: 261832 - DNA, 745 bp, Unknown
  Bacterial polypeptide expressing nucleotide sequence isolated from the Sargasso Sea
taaagataaaactaaacctttagcatttgtaggaaaaggagtttgtttcgatacgggaggcatatcattaaaacctgcaaaattcatggaagatatgacttatgatatggctgggtctgccgtcgttgttggattaatgaaaagtttagctattcgaaaagcaaaaattaacgcagttggagtggtgggtcttgttgaaaacatgccagggggcaatgctcaaagaccaggtgatattgttaaatcttatagtggaaaaactgtagaaattttaaatacagatgcagaggggagattggtattagcagatgctcttacatatacagaggaaaagtttaaaccaaaatttattgttgatttagcaactttaacaggtgcaataattgtatctttaggatctgaatatgctggtttattttccaatgatgataaattatcatcacagttaattaaggctggagaatttgtggaagaaaaggtttggagaatgccattaaataaaaattacgataaattaattaactctaaaaatgcagatatgcaaaatattaattatgttggaggagcaggatcaacaactgcagctcaatttttacaaagatttattttaaacaaaacaccttgggctcatttagatatcgctggaatggctttttcaaaatatggtggagctttaaattcaggtggtgcaactggatatggagtaagattgttaaataaactaatagaggatcactatgaataa

SEQ ID NO: 261833 - DNA, 799 bp, Unknown
  Bacterial polypeptide expressing nucleotide sequence isolated from the Sargasso Sea
ttggtcaggtagtattcgaggttcatatctagtaacaatggaatggattggagataaatcaaaatcaaaacctgttgcattcgtaggaaaaggagtttgttttgatacaggtggaatttcattaaaaccagcgaaatttatggaagatatgacatacgatatggcaggttcagcagtagtagctggtctaatgaaaaactttgcattgagaaaagcaaaaattaatgctgttggtatagtaggattagttgaaaacatgccaggtggtaatgcacaaagacctggcgacattgtaaaatcttacagtggaaaaacaattgaggtattaaatacagatgccgagggaagattagttctcgcagatgcattaactttcaccgaaagaaagtataaacctagattcattattgatcttgctacattaactggagctattattgttgcattgggatctgagcatgctggattattttctaacaataataaattatcaaatcaattatatgagactggagttaaagtcgatgaaaaagtttggagaatgccacttaataaaaactatgacaaattaatggactccaaaaatgctgatatgcaaaatataaattatgttggaggagcaagttctataactgctgcacaatttttacaaagatttattttaaataatacaccttgggtacatttagatatagctggcatggcattttcaaaatatgctggagctttaaattcaggtggtgcaacaggtttcggagttagattgttaaacaaattggtggaagattattatgagtaa

SEQ ID NO: 261834 - DNA, 677 bp, Unknown
  Bacterial polypeptide expressing nucleotide sequence isolated from the Sargasso Sea
aaatggtatggaggaaatgataactgatatgagtggctccgcagttgttgttggatcaataatgaatgctgcattaaataaatcttccaaatcattaataggcatcattggtcttgttgaaaatatgcctgatgctaatgcccaaagaccaggtgatattattaaatctttatcaagtcaaactatcgaaatatttaacacagatgctgaaggaagattagtgttagctgatatattaacttacattcaaaaaaaatatattgctaaagaaataattgattttgctactttaacaggtgccattatgatcgcattaggagttcatagagcaggtttattttctaataatgataaattagctaaaaaattagaaaatgctggagaaaattctggtgaaaaactatggagactacctcttggaaaggaatatgatgaagaaattaattcttttagagcagatatgaaaaatataggctcctccagatttggtggatcaactcatgcagcgcagtttataaaaagattcataaataatgatacaccttgggcacacttagatatagctggtgtttcttggactttaaaaggtggcaataattctttctctaaattacatgcaccaggagctacagcttttggaattcgtttaatagatcaatttttgaaaggaaggtaat

SEQ ID NO: 261835 - DNA, 871 bp, Unknown
  Bacterial polypeptide expressing nucleotide sequence isolated from the Sargasso Sea
aatgtaatgacccccccaaaaattgctgaatatgctaaatcgcttggtgaatatggggttgatgtaaaagtattaggtgaaaaagaaatgaaaaagcttggcatgggatctttattaggtgtaggtcagggcagtatacatgagtcacagcttgtgattatgaaatggaatggttcacgtaacaagaaaaaaaagccaatagcatttattggtaagggtgtttcatttgatactggaggcgtatcattaaaaccttcaaatggcatggaagaaatgaaatatgacatgggaggttctggcgttgttattggtttaatgaaagctcttgcgttaaggaaagcaaaagctaatgtaattggtgttgttggcttagttgaaaatcatattggaagcaaggcccaaagaccgagtgatgtagtgaaatcctattctggacaaacaatagaagtattaaatacagatgcagagggtagattagttcttgctgatgccctatggtatactcaagagcaatataagccagagcttatggttgacctcgcaacattaactggagctataatagttgcattaggagatgaatacgccggactcttttcaaatagtgataaagtaagtaagcagctagcagaagctggggatattgaaggagagaaattatggagactcccactaaatgaaaggtatgacaagatgttaaactctcctattgctgacatgcaaaatattacaaatggaagaggtccaggttctatcacagcagcacaattcctgcaaagatttgtaaataaggttccttgggcacatctcgatattgctggtactacttggactaaacagccgctaccaacttcaccaaagggcgcaacag

SEQ ID NO: 261836 - DNA, 544 bp, Unknown
  Bacterial polypeptide expressing nucleotide sequence isolated from the Sargasso Sea
tatgcccggcggaaatgcacaaagaccaggagatatcgtaaaatcttacagtggtaaaacagttgaaattttaaatactgatgcagaaggtagactagtattagcagatgcccttacttatacagaagaaaaatataaaccaaaatttattgttgatttagctaccttaaccggagccattattgtttccttaggatcagaatatgcaggtttattttctaatgataataaattatccaatcaattaattgatgtaggagaaaaaacagaggaaaaagtttggagaatgcctttaaataaaaattttgataaattaatagactctaaaaatgccgatatgcaaaatattaattatgttggtggtgcaggctcaaccactgcagcacaatttttacaaagatttattttaaacaaaacaccatgggcacatttagatatagctggaatggctttttcaaagtacggtggagctctcaattcaggtggttcaacaggatatggagttagattattaaataaactagtagaggactattatgagtaa

SEQ ID NO: 261837 - DNA, 838 bp, Unknown
  Bacterial polypeptide expressing nucleotide sequence isolated from the Sargasso Sea
caggtacgacctgctcctcctgccgccttcgttcccttacggaggcatggagaacccttgcctaacattcgttacccccacgctgcttgcgggggatcgaagccaggcgcacgtggtggcgcacgagattgcgcactcgtggagcggtaatcttgtgaccaacaaaacctgggagcacttctggctcaacgaggggttcaccgtcttcatcgagaggaagataatgaacaagatgtacggcaaaagcgttttcgacttcaacgccatcggcggcttgatggagcttaaagagaccgtggcccgcttgggtacgaatcaccctcacaccgtactcaagcccgaactcgcggggggtgtcgacccagacgacgtcttctcaaaggttccctacgagaaaggcttcgcattcttggtctacctcgagcacatgacccgcggcgacggtggcggaccagagcacgccgatgccgcaaacggtaccccggagtttgcagagtttctcatcgagcacttccagcgccacaagtacgccacagtcgagtccgatgacttcaaggctacatacacggctcggttccctgaggcgtccgcgcaggtggactgggacgcgtggctcaccaaacccggcacgccccctgtgaacatcgggcagtactacgacggcgggtcctcggaggcttccgcggagctcgctcgtaagtggcacctgtgcgatgtgctcggcatgggtggagaagggaccagacccgagggcgcatccgcggatgacatcaaaaatttctcgtcgatgcaggtggaccattttctcctctcgctgatgagtaccgcggcggttcgc

SEQ ID NO: 261838 - DNA, 498 bp, Unknown
  Bacterial polypeptide expressing nucleotide sequence isolated from the Sargasso Sea
atagtggaaaaactatagaagtattaaatactgacgcagaaggtagattagttttagcagacgctttaacttttactgaaaaaaaatttaaacctaaattcatgattgatttagcaactttaactggtgctattattgtttctttaggctcagagtatgcaggacttttttctaacgatgataaattatcaaaacaactacttgaagctggtgaaagagttgatgaaaaattatggagaatgcctcttcacaaaaactttgacaaacttatgaactcaaaaaatgcagatatgcaaaatataaactatgttggtggtgctggctcaacaacagcagctcaatttttacaaagattcattatcaacaaaacaccctgggcacatcttgatatagcagggatggctttttcaaaatatgccggagcattaaattcaggaggagccacaggatacggagtaagattattaaataaatttgtggaagataattatgagtaat

SEQ ID NO: 261839 - DNA, 791 bp, Unknown
  Bacterial polypeptide expressing nucleotide sequence isolated from the Sargasso Sea
aagtattagaggttcttatatggtgactatagagtggaatggaaataaaaataaatcaaaacctttggccttcgttggaaaaggtgtttgttttgatactggaggaatctcactcaagcctgcaaaatttatggaagatatgacatatgatatggcaggttcagcaactgtagttggtcttatgaaaactctagctttaaggagatctaaaataaatgcagttggagttgtaggattggttgaaaatatgcctggttcaaatgcacaaagacctggagatattgtaaaatcttatagcggacaaacgatcgaagttttaaatactgatgctgaaggaagattagttttagcagatgcactaacttacactgaacagaaatttaaaccaagtttaattgttgatttagcaacattgactggagctataatagttgcactagggtctgaatatgctggactatggtcaaataataaaaaattgtcaaaacaactttttgatgccggagaaaaggtagaggaaaaagtatgggaaatgcctcttcacgaaaattataataaattaatgaattcaaataatgcagatatgcaaaatattaattatgttggaggagctgggtcaacaactgcagctcaatttttacaaagatttataattaataaaacaccttgggcgcatttagatattgctggaatggcattctctaaatatgctggagcattaaattctggcggtgcaacagaatatggtgttagattattaaataaatttatagaggaaaattatgagtaat

SEQ ID NO: 261840 - DNA, 476 bp, Unknown
  Bacterial polypeptide expressing nucleotide sequence isolated from the Sargasso Sea
attaaatactgacgctgaaggtagattagttttagcagacgctttaactttcacagaaaaaaaatttaaaccaaagttcatggttgatttagcaactttaactggagctatcattgtttctttgggctcagagtatgcaggacttttttctaacgatgataaactatcaaaacaattacttgaagctggtaaaaaagttgatgaaaaattatggagaatgcctcttcacaaaaactttgacaaacttataaactctaaaaatgcagatatgcaaaatattaattatgtaggcggtgccggatcaactacagcggcacaatttttgcaaagatttattattaataaaactccttgggctcatcttgatatagctggaatggctttttcaaaatatgcaggagctttaaattctggaggagccacaggttatggagttagattattaaataaatttgttgaggataattatgagtaat

SEQ ID NO: 261841 - DNA, 599 bp, Unknown
  Bacterial polypeptide expressing nucleotide sequence isolated from the Sargasso Sea
aatgaaatatgacatggcgggagctgggactgtagtgggattgatgaaaactttggctgtgagaaaagctaaagttaatgcggttggaataataggattagttgaaaatatgccagacggtaatgcacaaagacctggagatgttgtgaaatcttatagtggaaagtcaattgaaatttttaatactgatgcagaaggaagattagttttagcagatatcttaacttatactgaaaaaagattcaaaccgaagtttattataaatttagcaacattgactggagcaattatagtttcattaggtaacgagtatgcaggtttgttttcaaataataatcaactagcagaaaggataaataaagttagttatatagataatgaaaaagcatggagactaccgctaaataaaaattttgataaattaattgattcacaaattgcagatgttcaaaatataaattattcaggcggcgcaggctctataaccgctgcacaatttttacaaagatttattttaaataaaacaccatgggcacatctagatattgccggtatggcatggaataaaaaagttactaagaccatcccagttggtgcaa

SEQ ID NO: 261842 - DNA, 796 bp, Unknown
  Bacterial polypeptide expressing nucleotide sequence isolated from the Sargasso Sea
tatcatcttacaagttcaaaaatatttttctaaaagagatacaaaaaaaacaagcataaaaacaaaaatcaaaatttactcatctcaattttcaagattagaaaaaaactatgaaacagtaaaagcgattcatgagggcgtaactatgaccagaaatcttgttacggaacccccaaatgttatgacgccacctgaattggctaaaaatgctgcctcgcttgaaaaaataggtgttaaagttacgattcttggtgaaaaagaaatgagcaaattaggcatgggatctttacttagtgttggccgtggaagtgaacacgagtccaaactggccatcatggaatggaaaggtcataaaaataaaaagaaaaaaccaatcgcgtttataggtaaaggagtatcatttgatacaggtggagtttcacttaaacctgcaggtggaatggaagaaatgaaatatgatatgggaggctcaggtgttgttattggcttaatgaaaacattagctctaagaaaagcaaaggccaatgtagtaggtgttgtaggtcttgtcgaaaaccatattggcaatatggcaacaagaccaagtgatgtagtgaaatcttattcaggtcaaacaatagaggtgttaaatactgatgctgaaggcaggctagtgcttgccgacgctctatggtatacccaagaaaaatataaacctgagttaatggttgatttagctaccttaactggagcaataattattgcaattggcaatgaatatgctggactattttccaataatgataaattaagtaag

SEQ ID NO: 261843 - DNA, 559 bp, Unknown
  Bacterial polypeptide expressing nucleotide sequence isolated from the Sargasso Sea
gggcttgtggagaacatggttagtggagttgctcaaagaccaggagatattgttaaatcttatagcggtaaaactattgaagtgttaaacacagatgcagaaggtcgattggttttagcagatgcattaacttttactgaaaaaaaatttaagccaaaatttatagttgatttagcaaccctaacgggcgctatcatagtttctttaggatcagaatatgccggacttttttctaacgatgacaaactatctaaacaaattttagatgcaggagaaaaagttgaggaaaaactatggagaatgcctctacataaaaattatgataagcttatgaattctaaaaatgcagatatgcaaaatataaattatgttggtggagctggatcaacaactgcagctcaattcttacaaaggtttattttaaataaaaccccttgggctcacttagatatagctggaatggctttttcaaaatatgggggtgctttaaattcagggggtgcaactggatttggggtgagactattgaaccaattaatagaagaaaattatgagtaat

SEQ ID NO: 261844 - DNA, 814 bp, Unknown
  Bacterial polypeptide expressing nucleotide sequence isolated from the Sargasso Sea
gctttacttggtgttggccagggaagtattagaggatcttatttagtaacaatggaatggaggggagcaaaaaataattctaggccacttgcatttgttggaaaaggtgtttgttttgacacgggaggatattcacttaaaccggcaagatttatggaggatatgacgtatgatatggctggctctgcgactgttgtaggtttaatgaaaagtttagctttaagaaaagcaaaagtaaatgctgttggtgtcgtaggcttagtagaaaatatggtaagtggaaacgctcaaagacccggagatatagttaaatcttatagcggaaagactatagaagtattaaatactgatgcagaagggcggttagttttagctgacgccttaaccttcacagaaaagaaatataaaccaaaatttataattgatctagcaacattgactggcgctatcattgtatgtcttggttcagaatatgcaggattgttttccaatgatgataaattatctaaacaaatttcaaacgctggagaaaaagttgaagaaaaagtttggagaatgcctttacataaaaattatgataaattgatgaattctaaaaatgcagatatgcaaaatatcaattatgtaggtggagcaggttcaacaacggcagctcaatttttacaaagatttattcttaacaaaactccttgggcacatttagatattgcaggaatggccttttctaaatacggaggtgctttgaattctggtggggcaacaggtttcggagtaagacttctgaaccaattaattgaagaaaattatgagtaat

SEQ ID NO: 261845 - DNA, 688 bp, Unknown
  Bacterial polypeptide expressing nucleotide sequence isolated from the Sargasso Sea
ggttattcattaaaacctgcaaaatttatggaagatatgacttatgatatggcgggctcagcgactgtagtgggtttattgataagcttggctttaagaaaggcaaaagttaatgctgtgggagtagtaggacttgttgaaaatatggtaagtggaaatgcacaaagaccaggtgatattgtcaagtcttatagtggtaaaactatagaaatattaaatactgatgcagaaggaagattggtacttgctgatgcattaacttttacagaaaaaaaattcaaaccaaaatttatgattgatttagcaactttaacaggtgcaattattgtttctttaggctcagaatatgctggattattttctaatgatgataaattatcaaaacaattaattgaatctggtgaaaaggttgaggaaaaactatggagaatgcctttacataaaaattatgacaaattaatagactcaaaaaatgcagatatgcaaaatataaattatgtaggtggtgctggatcgacaacagccgcacaatttttacagagatttgttttaaacaaaactccctgggcacatttagacattgcaggtatggccttttcaaaatatggaggtgctttaaactcaggaggagcaacaggttatggtgtaagattattaagccagttaatagaagataattatgagtagt

SEQ ID NO: 261846 - DNA, 850 bp, Unknown
  Bacterial polypeptide expressing nucleotide sequence isolated from the Sargasso Sea
tttgcacggttttaaactaaaatcttataattttgataaatacaaaactaaaaaaaataaaaataatatttccatcaatgtatttggtaagaatataccatcctctaaagatcaaaataaatttaaagcaatagaagaagggactttttatactagagatttggtttcagaacctggaaatattttgcatcctgatgagtatgcgaaaagattaaaatctttaactaaatttggcctaaaaattactgtttatgatgaaaaaaaattaaaaaaattaggaatgaatactttgcttggtgttggacaaggaagtattagaggctcgtatttggttacaatggaatggaaaggattgaaagataattctaaacctttagcgtttgtaggtaagggagtttgttttgatacaggaggtatttcacttaaacctgctaaatttatggaagacatgacttatgatatggctggttctgcagtagttgttggtttgatgaaaagtttagctttaagaaaagcaaaagttaatgctgttggtgtagtagggttagttgaaaatatgccaggaggaaacgctcaaagaccaggagatatagtaaaatcttatagcggaaaaactgttgaaattttaaacacagatgcagaaggcagactagttcttgcagatgcacttacttatactgaagaaaaatttaaaccaaaatttatagttgatcttgcaactctgactggtgcaattattgtatcattgggatctgagtacgcaggtttattttcaaatgatgataaattatcaaaagaactaattaaagctggtgaaaaagtggaagaaaagtatggagaatgcctttaa

SEQ ID NO: 261847 - DNA, 739 bp, Unknown
  Bacterial polypeptide expressing nucleotide sequence isolated from the Sargasso Sea
aaaatccaaaccactagcctttgttggaaaaggagtatgttttgataccggaggaatttctttaaaacctgcaaaatttatggaagatatgacatatgatatggcaggctcagcagtcgttgcaggactgatgaaaaattttgcattgagaaaggctaaaatcaatgcagttggtgtagtaggtctagttgaaaatatgcctggaggaaatgcacaaagacctggcgatattgtaaaatcttatagtggtaaaactattgaaatattaaatactgatgcagaaggaagattagtacttgctgatgcattaacttttacagaaaaaaaatttaaacctcagattataattgatcttgcaaccttaactggagcaattatcgtagcattaggttcagaacatgcaggcttattctctaatgatgataagttgtctgataaattgtataatgcaggaattcaagttgatgagaaagtttggagattacctttaaataaaaattacgacaaattaatgaattcaaaaaatgcagacatgcaaaatataaattatgttgggggtgctagctcaattactgcagctcaatttttacaaagatttattttaaacaatactccgtgggcacatttggatatagcagggatggctttttctaaatatggaggggctttaaactcaagtggagcaacaggatatggtgttagattattaaataagttagtggaggataattatgaatag

SEQ ID NO: 261848 - DNA, 187 bp, Unknown
  Bacterial polypeptide expressing nucleotide sequence isolated from the Sargasso Sea
ccgcagctgaccgccccgctgaaaaagggccaggtggtgggaacgatcgatttccagctcaacggcaaatccattgaacagcgtccgctggtggtgatggacgcggtggaggaggggggcttcttcagccggatgtgggacgtcgtgctgatgaaattccatcagtggttcggcaactggttctgat

SEQ ID NO: 261849 - DNA, 694 bp, Unknown
  Bacterial polypeptide expressing nucleotide sequence isolated from the Sargasso Sea
ttgatagtgggaggtatatcgataaagccagcatcaaaaatggatgaaatgaaatatgatatgtgtggagctggggttgttataggtgttatgaaaattatttcaatcttgaaaccaaagatgaatatagttgggattgttccttcaactgaaaatatgagcggagataaagcttaccgacctggggatattcttactgcatataatggtaaaacaatagaagtattgaatacagatgcagaaggtcgtcttatcttagctgatgcactatcatatgcttcagagcactatgatccggaattcattttagattttgcaacattgacaggtgcagttgttgttgctctaggacatgtggcaaccggtataatgggtacggatgattcgttgattgaaaaaattaaattttcatcaactataacaggagaaaaggtatgggaatttccactttgggaagaatatttggatcaagtaaaatcaacaattgcggatgtaaaaaatctaggcgcgcctggacaggcaggatccattgcaggaggagcatttttgcattcgtttgtacgtgaaaatattccttggtgtcattttgatattgctggatctgcatggggtaataaaaacttaccttatcaaaataaaggtttagcaacaggcgagatgattcgtttggttgtagatttattagaaatatgaa

SEQ ID NO: 261850 - DNA, 820 bp, Unknown
  Bacterial polypeptide expressing nucleotide sequence isolated from the Sargasso Sea
atgaatgcacttttaggtgtggggcaaggcagtattagaggatcatatcttgtaactatggagtggaggggtactagttctaaaaagaaaccattagcatttgttggaaaaggagtttgttttgatactggaggtatttctcttaaacctgcaaaatttatggaggacatgacttacgatatggctggctcagctgtagttgttggactaatgaaaagtttggctttaagaaaagcaaaaattaatgctattggagttgtgggattggtggaaaacatgccaggtggaaatgctcaaagacctggggatatagtgaaatcttatagtggtaaaacaatcgaagttttaaatactgatgctgaaggaagactagttttagcagatgcacttacatttactgaggaaaaatataaaccagaatttattgttgatttagcaactttaacaggtgcaattattgtctccttaggttctgaatttgcaggacttttttcaaatagtgataaattatctaaacaattgtttgatgcaggtcaaaaagttggagaaagagtatggcgtatgccgcttgataaaaattatgataaactaatcaattctaaaaatgcagatatgcaaaatattaattatgttggaggagctggatcaacaactgctgcacaatttttacaaagatttattttaaataaaactccttgggcacatttagatattgcaggtatggcattttcaaaatatggaggtgctttaaactctgagggtgcaactggatttggagttaggttattaaatcaattaattgaagattattatgagtaac

SEQ ID NO: 261851 - DNA, 617 bp, Unknown
  Bacterial polypeptide expressing nucleotide sequence isolated from the Sargasso Sea
cggtgctggaactgtttttggagtaatgtgttcactgcaaaaagcaaaagcagacacaaatgttattggtattatggcatgtgctgaaaatatgccctcagcaaaagctactaaacctggagatgttgttacttcaatgtccggacaaacaatcgaagtacttaatactgatgctgaaggtagattggttttagcggatgcactaacgtatgttgaacgatataaaccatcatatgttattgatatggctaccttaactggtgcagtggtaattgcattaggaagccatgcctctggtgtgatggcaaataaccaattccttgcagataaaattattgagtctggtgaagaaacaggtgatagagcatggcaattacctttatggaatgagtacatgtcttgcacaagaactaattttgcagatttggcaaatattggtgggggaagagaagcaggaacaattcatgctgcagcatttttatcgaaatttgctaaaaattataaatgggcgcatatggacattgctgcttcagcatggtcaagttctccaaaaggcggaactggcagacctgtatcattaatttgtaatttaattttaaataaaaaactcaagtaat

SEQ ID NO: 261852 - DNA, 544 bp, Unknown
  Bacterial polypeptide expressing nucleotide sequence isolated from the Sargasso Sea
tatggtaagtggaaatgctcaaagacctggagatattgttaaatcttatagtggcaaaacaatagaagtattaaataccgatgcagaaggtagattggttttagctgatgctttaacttttacagagaaaaaatttaaacctaaatttatggttgatttagcaactttaactggtgcaattatagtttctttaggctctgagtatgctgggcttttttcaaacaatgacaaattatcaaaacaattactagaggcaggtgaaaaagttgaagagaaattatggagaatgcccttaaataaaaactttgacaaattaataaattctaaaaatgctgatatgcaaaatataaattatgttggaggagctggatctacaactgcagcacaatttttacaaagatttattttaaacaatacaccatgggctcatcttgatattgctggaatggcattttcaaaatatggaggtgcattaaattcaggtggcgccacaggttatggagtaagattattaaatcaattaatagaagataattatgagtag

SEQ ID NO: 261853 - DNA, 526 bp, Unknown
  Bacterial polypeptide expressing nucleotide sequence isolated from the Sargasso Sea
tatgccagcaggcaatgctacaaaaccaggtgatgttgttacatctatgtctggacaaacaattgaggttctaaacaccgatgctgagggcagattggttttatgtgatgtattaacttacatagaaaagtttgatcctaaggttgtaatagacactgcaactctaactggcgcagtcgtggttgcacttggaagtgttgcggctggggttatgggcaatgatcaaaagctagttgataaaattttggaggctggccatgcatctggagagaaagcctggcaactgcctttatgggatgagtatcagagctatttagattcaaactttgcagacattgccaatattgctccagggagggcagcaggaacaattgagggaggatgttttatctccagatttactgaaaattataaatgggctcatatagacattgcaggtgttgccgatattggagacggtcccaaaaaaggatccactggaaaaccagttggactgttgtttgaatttgtaaacagtaataagtaa

SEQ ID NO: 261854 - DNA, 860 bp, Unknown
  Bacterial polypeptide expressing nucleotide sequence isolated from the Sargasso Sea
aggacttaaagtaacagtattagatgaaaaagaattgaaaaaacaaaaaatgggtgcacttttgggcgttgcacaaggaagtgctaataaaccttacgtagttacattagagtggaaaggaaacaaaagcagtaactttgatttctcatttgttggtaagggtgttacttttgatacaggtggtatatctataaaaccatctagtggaatggaagaaatgaagtacgatatgggaggctcagcagttgtattgggattaatgaagtctctagccttaggaaaatcaaaagtcaatgtttcagctgcgataggattagtagaaaatatgccatctggtacagcccaaagaccaggagatgttgttaaatcaatgtcaggacaaaccattgaagttataaataccgatgcagaaggcagattagtacttgcagatgtcgtttggtacgctcagaaaaagtttaaaccaaaaaagcttattgatttggctactcttactggtgcaattattgtaagtattggacaagaaaaagcaggcatgttctcaaatgatgataaactggcagtagaaattgaggaaagtggtaaaaaaataggagaaccagtttggaatatgcctattgatgaaacttacgaaagagatataaagtcagatattgcagacatgaaaaatgttggatctggaagaggtgctggatctacagcaggtgcaatttttattaaaagattcattaaaaatgtatcttgggttcatttagatattgcaggtgtgacatgggctaaacaagacaaaccacttattccaaaaggagggacaggctatggagttagattgttagagcatttggtgaacggtgattaga

SEQ ID NO: 261855 - DNA, 843 bp, Unknown
  Bacterial polypeptide expressing nucleotide sequence isolated from the Sargasso Sea
tttagtatctgagcctggaaatattttacatcctgatgaatatgctcaaagattattagatctaaaaaaatttggtttaaaaataaatatcttagatgaaaagaaattaaaaaaacttggaatgaataccttacttggtgttggacaaggaagtattagaggatcttatttagtaactatggaatggaatggagccaaaaataaatttaaacccttagcttttgttgggaaaggtgtttgttttgatacaggaggtatctccttgaaacctgctaagtttatggaagacatgacttatgacatggctggatcggctgtagtagttgggttaatgaaaagtttagctatcagaaaagcaaaaataaatgctgttggagtagttgggttagttgaaaatatgccaggtggaaatgctcaacgaccaggagatattgtcaaatcatatagtggaaaaacagttgaaattttaaatactgatgctgagggaagattagttttagctgatgctttaacttatacagaagaaaaatataaaccacaaattatagttgatttagcaactttaacaggcgctattattgtttcattaggatcggagtatgctggtttattttcaaatgatgacaaactatcaaaacagttgattaaagctggagagtatgtagatgaaaaagtttggcgaatgcctttaaataaaaattttgataaactaattgattcaaaaaatgcagatatgcaaaatataaattatgtcgggggagcaggttctacaacagcggcacaatttttacaaagatttattttaaacaaaacaccttgggcccatttagatattgctggtat

SEQ ID NO: 261856 - DNA, 583 bp, Unknown
  Bacterial polypeptide expressing nucleotide sequence isolated from the Sargasso Sea
aaaattaatgctgttggtgttgttggccttgtagaaaatatggtcagtggaaatgcgcaacgacccggagatattgtaaaatcctatagtggcaaaactatagaaatattaaatacagatgcagaaggaagattagttttagctgatgcattaacatttactgaaaaaaaatttaaacctcggttcattgtagatttagcaactttaacaggtgcaatcattgtttctttaggttcagaatacgcaggtcttttttcaaatgatgacaaattatccaaagaaatttttaatgcaggtgaaaaagtggaagaaaaagtatggagaatgcctcttcataagaattacgataaacttatgaactctaaaaatgcagatgtacaaaatattaattatgttggtggagcaggttcaactacagcagcccaatttttacaaagatttattttaaacaaaaccccatgggcacatcttgatatcgctgggatggcattttcaaaatatggcggagctttaaactcaggtggtgcgacaggatttggagttagattacttaaccaacttgttgaagaaaattatgagtagt

SEQ ID NO: 261857 - DNA, 886 bp, Unknown
  Bacterial polypeptide expressing nucleotide sequence isolated from the Sargasso Sea
taattctttaaaaaaagtaggtttaaaaattaatatttatgatgaaaaaaaactaaaaaaattaagaatgaataccttgctaggagtaggacaaggcagtatccggggttcttatcttgtcacaatggaatggaaaggtaagaaggataactctaagcctgtagcttttgtcggaaaaggagtttgctttgatactggaggaatatctttaaaacctgctaagtttatggaggatatgacttatgacatggctgggtcagccacagtagttggtttgatgaaaagtttagctttaagaaaggcaaaagttaatgcagtaggagttgtaggtttagtagaaaatatgccaggaggaaatgcacaaagaccaggagatatagtaaaatcttatagcggtaaaactgttgaaattttaaatactgatgcagaaggtagattagtattagcagatgcacttacttatacagaggaaaaatacaaaccaaaatttattgttgatttagctactttaactggagctatcattgtttccttaggatcagaatatgcaggtttattttctaatgatgataaattatccaatcaattaattgatgtaggagaaaaaactgaagaaaaagtttggagaatgcctttaaataaaaattttgataaattaatagactctaaaaatgctgatatgcaaaatataaattatgttggtggtgctggctcaactactgcagcacaatttttacaaagatttattttaaacaaaacaccgtgggcacatttagatatagctggaatggctttttcaaagtacggtggagctctaaattcaggtggcgcaacaggatatggagttagattattaaacaaactagtagaggattattatgagtaa

SEQ ID NO: 261858 - DNA, 842 bp, Unknown
  Bacterial polypeptide expressing nucleotide sequence isolated from the Sargasso Sea
aaaaaaaatgaaatctcttggaatgaatgcattgcttggagtggctcaaggctcagttaggcctggaagagttatgataatgaagtggaatggtaacactaagtcaaaagaaaaacctatttcatttattggtaagggagttacctttgatacaggtggaatatcaattaaaccatctggtggaatggaggatatgaaatgggatatgggcggagctggagttgtggcgggtctgatgtatacactagctcttagaaaatcaaaagctaatgtgattggagcagttggccttgtggaaaatatgcctgatggtaatgctcaaagacctggtgatgttgtaaaatcaatgtctggacaaactattgaggtattaaatacagatgcagaggggagattagtacttgctgatgtactttggtatgtaaaagaaaaattcaaaccaaaactaatgattgatttagcaaccctcactggtgcgataattgtcgcattaggagaaagatatgctggtttgttttccaatgataattctctagtaaaaaaaattcttaattcctctgaaagaactaatgaattagtttggcaacttccattagatgaaaagtttgacaaactgcttgattgtcagattgcagatatgaaaaatataaccggaacaagaggcgcaggaagtataaccgcagcacaatttctaaaaagatttgtcgggaatacaagctgggcccatcttgatattgctggtgtaacctggtcaaaaaaaggcacagaattttcgcgtccaggaggaaccggttttggtgtaagattattggatgattttgtaagaactaattatgaatgaa

SEQ ID NO: 261859 - DNA, 691 bp, Unknown
  Bacterial polypeptide expressing nucleotide sequence isolated from the Sargasso Sea
ttgcatggtttaagactcaagtcttattcatttgaaaaatataaatcaaaaaaaaatgaaaaaaatacttcaattattgtatttggtaaaaatgttccatcaattaaagatcaaataaagttcaaagcaatagagcagggaactttttatactagagatttagtttcagagcctggaaatgtgttgcatcctgacgagtatgctaagagattaggtttattaaaaaaagatggtttaaaaataaatatttatgatgaaaaaaaattaaaaaaattaggaatgaatactttactaggtgttggccaaggaagtattaggggttcttacttagtaacaatggaatggaaaggtttaaaagataattctaagccattagcgtttgttggtaaaggcgtgtgttttgatactggaggaatttcacttaagcccgctaaatttatggaagatatgacttacgatatggctggatcagcggttgttgttggattgatgaaaattttagctctaagaaaagcaaaagtaaatgcagttggagtagttggattagtagaaaatatgccaggtggaaacgctcaaaggccgggagatatagtaaaatcttatagtggaaaaacagtagaaattttaaacacagatgcagaaggaagactagtgcttgcggatgcacttacttatacagaggaaaaattaa

SEQ ID NO: 261860 - DNA, 733 bp, Unknown
  Bacterial polypeptide expressing nucleotide sequence isolated from the Sargasso Sea
aaaaccattaggatttgttggaaaaggtgtttgttttgatacaggaggtatatccttaaagccagcaaggtttatggaagatatgacatatgacatggcaggttcagcggtagtggtaggcttaatgaaaaattttgcgataagaaaagcaaaaataaatgctgtaggagttgtaggtcttgttgaaaatatgccaggtggaaatgcccaaagacctggcgatatagttaaatcatatagcggcaagacaatagaagttttaaatactgatgctgaagggagattagttttggcagatgcattaactttcacagaaaaaaaatttaaaccagagttaattgtagatctagcaacattaacgggagctataattgtttgtttaggatctgaatatgcgggacttttttcaaataatgataaattatcaaaacaaatttttgaagctggagaaaaagtggatgaaaaagtatggagattaccattacataaaaactatgataaacttatggactctaaaacggcagatatacaaaatattaattatgtaggtggtgcaggctctacaacagcagcacaatttttacaaagatttataattaataaaacaccttgggctcatcttgatatagctggaatggctttttcaaaaatggcaggcaatctgaatccaggtggtgccacaggatatggagtaaggttattaaatcaatttgtagaagataattatgaataa

SEQ ID NO: 261861 - DNA, 769 bp, Unknown
  Bacterial polypeptide expressing nucleotide sequence isolated from the Sargasso Sea
catgggtcaatccgcagaggggcgttggttgaagctgaaccacagctttggtgataagtcacccactcacggccaggcgctgcggattgagttcccatcccagtttccaaaagtgcggatttattaccacaccagcccacaagcttcagggctgcaatggctgaccaaagagcaaaccagtgaaaaacaacagccttttatgtatagccagtcgcagtctattcatgcccgtagctggatcccgctgcaggatacaccggcagtacggctgaattatcaggcccgtattcacacacctaaagagttacttgccgtaatgggcgctgataacagtgccaataccgacaaagacggcgactactttttccgtatgcctcaggctattccggcttatttgatagctcttgcgataggggacttagaatttaaagccatgtcagagcgtaccggagtttatgctgaaaaagtctggctggataaagccgtggccgagttttcagatacagagcagatgatgcaagtggcaagcgctatgtatggcgactacccatggggccgttatgacttgctgatattaccggccagttttccttttggtggaatggaaaaccctcgtttatcttttattacgcctactgtcatagcaggggacaaaagcctggtcagtctaatagcacatgagctggcgcattcctggtccggcaatttagtcaccaatggcagctggcacgagctgtggctgaacgaaggtttcaccaactatgtggaa

SEQ ID NO: 261862 - DNA, 784 bp, Unknown
  Bacterial polypeptide expressing nucleotide sequence isolated from the Sargasso Sea
atgagactaaaatcttataagtttgaaaaatataaaactaaaaaaaataaaaaagatattattgttaacgtttgtggaaaaaatataccaagtcttaaagatcagttaaagtttaaagcaattgaggaaggaagcttttatacgagagatttagtctcggagcctggaaatgttctacatcctgatgaatacgcaaaaagattaaactctttaagaaagattggtttaaagataaatatatttgacgaaaaaaaattaaaaaaattaggtatgaatacactacttggtgttggtcagggtagtatcagagggtcatatctagttactatggagtggaatggattaaaagataaatctaaaccattggcttttgttggaaaaggagtttgtttcgacacaggtggtatatctttaaagcctgctaaatttatggaagatatgacttatgatatggctggctccgcagtagtggttggtttaatgaaaagtcttgcattgagaaaagctaaaattaatgcagttggtgtagttggtcttgtcgaaaatatgccaggaggtaatgcattgagaccaggtgatattttaaaatcttacagcggaaaaacagttgaagttttaaacacagatgctgaggggagattggtgcttgctgatgcgcttacttacactgagcagaaatttaaaccaaaatttattgttgatttagcaactttaacaggagcaataattgttgcactaggttctgaatatgcaggtttattttcaaatgatgacaaattatcca

SEQ ID NO: 261863 - DNA, 727 bp, Unknown
  Bacterial polypeptide expressing nucleotide sequence isolated from the Sargasso Sea
ttaaaaagcaaacctggaaaagattttataggtcgatttgttcatggacttaaattaaaatcatatgaatttaatatatataaatcaaaaaaaataaaaaatattttaacaatcagtctaattggaaaacaaagcactttagcactaaaaaataaattaaaatttaaagctttagaagaaggaacattttttaccagagatttagtttctgaaccaggaaatattttacatccagatgaatatgcaaatagattaaaaaaattaaaaaaatatggtttaaaggttacagtttatgaccaaaaaaaattaaagaaattaggatgtaatgctttattaggagttggacagggaagcataagaggatcttatctagtaactattgaatggaaaggaaataaatcaaaatcaaaacctttagcatttgttggaaaaggagtttgttttgatactggtggttactcactaaaacctgcaagatttatggaagatatgacttatgatatggcaggatcagctgctgtagtaggtttaatgaaaactttagctttaaggaaatcaaaaattaatgcagttggtgtcgtaggccttgttgagaatatggtaagtggaaatgctcaaagacctggtgatattgtaaaatcttatagtggaaaaactatagaagtattaaatactgacgctgagggtagattagttttagcagacgctttaacttttacagaaaaaa

SEQ ID NO: 261864 - DNA, 472 bp, Unknown
  Bacterial polypeptide expressing nucleotide sequence isolated from the Sargasso Sea
aatactgatgccgaagggagacttgttttagcagacgcactcacgtatacagaaaaaaaatataatccaaaatttataattgatctagctactttaacaggagctataattgtttctttaggttcagaatatgcaggccttttttctaacaatgataaattatcaaagcaaatttttgatgccggtgaaagtgttgaggaaaaagtatggagaatgcctcttcacgaaaattacaataaacttatgaactcaaaaaacgcagatatgcaaaatataaattatgttggtggagctggttcaacaactgctgcacaatttttacaaagatttataattaataaaactccatgggctcatttagatatagctggaatggcgttctcaaaatatggtggagccttaaattctggtggagcaacaggatttggtgtgcgtttgcttaatgagcttattaaaaagaattatgagtaac

SEQ ID NO: 261865 - DNA, 889 bp, Unknown
  Bacterial polypeptide expressing nucleotide sequence isolated from the Sargasso Sea
cgggtaaagggtgccgctgtggcgcggagtgagttcgcacctctcgagcgcattgtcgaaggtgtcttcttcacgcgcgacctagtttcggaaccgccgaacgtcctctaccccaagagctttgcgacggaagtcaaggcgttgaccaagcttggtatcaaagtcgaggtgctcggtgagaaacagatggcgaagctcggtatgggatcgcttttaggcgtcggacagggctccgttcgtgaaagccagatcgcgattatgcggtgggacggtggtgcaaagtcgcaaaaacctgtcgcctttatcggtaagggggtcaccttcgatacgggtggtatttccttgaagccgggtcctggcatgcaggacatgaaatgggatatgggcggtgctggggcggtttccggcgtgatgaaggcgcttgccgggcgcaaggctaaggtcaatgtcgttggattgattggcctagtcgagaatatgccggacgggaacgcacaacgaccgggcgatatcgtcacgtcgatgtcgggacagaccatcgaaatccataatacggatgcagagggccgtctcgtcctggcggatgtcatgtggtacgcgcaggaacgctttaagccgcaatgcatgattgatctggcgacgttgaccggagcaatcattatcagccttggtcacgagcacgcgggcatgttctcgaacgacgacgcgctatcggaacagctaacggcagccggcctggttaccggagagaaggtttggcgcatgcctcttggtgacgcttacgacaaaaagatcaatacggacggcgccgatatgaaaaatgtcggcggacgtgatgcggggtcgattactgcggctcagttcctgcaaagattcgtcaaaaaggttc

SEQ ID NO: 261866 - DNA, 865 bp, Unknown
  Bacterial polypeptide expressing nucleotide sequence isolated from the Sargasso Sea
ttaaaaatcaatatttatgacgaaaaaaaactcaaaaaattaggcatgaatactcttttaggagtaggtcaaggcagtataagaggatcatatttagcaactatggaatggaaaggtcttaaatctaatacaaagcctttagcttttgtaggcaaaggtgtttgttttgatacaggtggaatatctttaaaaccagcaaagtttatggaagatatgacatatgatatggctggatcagctacagtagttggtttgatgaaaagtttggctttaagaaaagcaaaagttaatgctgtaggagttgtaggtttagttgagaatatgcctggtggaaatgctcaaagaccaggtgatattgtaaaatcttatagtggcaaaacagttgaaattttaaatactgatgccgaaggtagactcgtattagcagatgctattacttatacagagaaaaaatataagccaaaattcattgttgatttagcaaccctaacaggtgctataattgtttcattaggatcagaatacgctggtttattttctaacgatgataaattatccaaacaattaatcgatgtaggtgaaaaaactgaggaaaaagtttggagaatgcctttaaacaaaaattttgacaaattaatagactcgaaaaatgctgatatgcaaaatattaattatgttggtggagctggttcgactaccgcagcacaatttttacaaagatttattttaaataaaactccttgggcacatttggatatagctgggatggctttctcaaaatatggtggagcacttaattcaggtggtgcgactggatatggcgtaagattattaaataaactagtagaggattattatgagtaaa

SEQ ID NO: 261867 - DNA, 647 bp, Unknown
  Bacterial polypeptide expressing nucleotide sequence isolated from the Sargasso Sea
tttcgataaggccaggctcaggcgccttcggatgcgcgctttgcttggcgtcgcgcagggcagtgcccatgacccgcgcgttgtcgtcatgcgttggaacggcgctccgcgttcgaacaagaagcccatcgcgtttattggcaagggagtcacctttgattcaggcggtatctcgatcaagccaagctcgggcatggaggaaatgaagtgggatatgggcggcgcgggtaccgtagcgggtctcatgtgcgcgctggcggggcgtaaggcgaaggtgaacgcgatcggcgcggtaggattggttgaaaacatgccctctgcgacagcgcagaggcccggagacgtggtcaaggcgctgtcgggcaagacgatcgaggtgatcaataccgatgcggagggccgcctcgttctggccgacgttctttggtacgtccagaatcggtttaagccggcagctatgatcgatctggcgacactaacaggtgcgatgattgttgcactcggccataactatgccggcttgttcagcaacaacgacgagctttcagagcggcttgccgaagctggtgaagcgatcggcgagagggtctggcgcatgccaatgcacgaatcctatgaaccagacatcaagtcgcaaatcgctgaca

SEQ ID NO: 261868 - DNA, 640 bp, Unknown
  Bacterial polypeptide expressing nucleotide sequence isolated from the Sargasso Sea
tatggcgggatctgctgttgtagtaggattgatgaaaagtttggctttaagaaaagcaaaaataaatgctgtaggtgtagttggattagttgaaaatatgccaggtggaaatgcacaaagaccgggtgatattgtaaagtcttacagcggtaaaactgttgaaattttaaacactgatgcagaaggaagattagtacttgcagatgctttaacatatacagaagaaaagtttaaacctaaatttatagtagatttagcaactttgactggcgcaataattgtatctctaggatctgagtatgcaggtttgttttcaaatgacgacaaattatcaaatcagttaattaatgtgggagatagtgttgaggaaaaagtttggagaatgccattaaataaaaattttgacaaacttatagactctaaaaatgcggatatgcaaaatattaattatgttggaggtgcaggatccacaactgctgctcaatttttacaaagatttattttaaataaaacaccttgggcacatttagatatagctggaatggctttttcaaaatatggaggagcattaaactcaggtggtgcaacaggttatggagtaagattactaaataaactaatagaggatcactatgagtaa

SEQ ID NO: 261869 - DNA, 631 bp, Unknown
  Bacterial polypeptide expressing nucleotide sequence isolated from the Sargasso Sea
tatgtccggtggggccgcggtaatcgctactatgcaggcgatcgcggaactggaggtgagggagaatgtcgtgggtctaattcccgcctctgacaacatgccatctggtactgctacaaagcccggcgatgtcatttctagtctcgctggaaagactatcgaggtgatcaacactgacgcagaggggcgtcttatccttgcagacgcgctggcttggggtgcgcgcttaaaaccggcagcgatgattgactgtgccacgctgacaggctcagtgatcattgcgctcgggcatcacgcagccgcggtaatgggcaacgacaatgccttagtctctgagcttagagatgcgggggatgctgcaggcgagcgttgctggccacttccattatgggacgagtatcgaaagcagttagactcgaattatgcagaccttcagaatatcggcggccgtccagctggttcaatcacagctggagcgttccttaaggagtttgttggtgatgttccttgggctcatctcgatattgcggggactgcatggggtgacgggaatctgtcgtatcagcgaaagggaggaacaggcttcccaactaggcttctgatagagtgggtaaggaggcgagcggggtga

SEQ ID NO: 261870 - DNA, 802 bp, Unknown
  Bacterial polypeptide expressing nucleotide sequence isolated from the Sargasso Sea
tttggaagaaggtacattttatactagggacttagtatctgaaccaggaaatgttttacatccagatgaatatgcaaaaagactaaaatctcttaaaaaacatggtttaagaattaatctatacgatgataaaaaattaaaaaaattaggtatgaatgctttacttggggtagggcaaggaagtgtaagaggatcatatcttgttacaattgaatggaatggtgcaaaaaataattcaaagcctttagcctttgtagggaaaggagtttgctttgatacaggtggatattctttaaaaccagcaagatttatggaagacatgacttatgatatggctggatcagcaactgtcgttggtttaatgaaaaacttagctttaagaaaagcaaaagttaatgttgttggtgtggttgggttagttgaaaatatggtaagtggaaatgctcaaagaccaggtgatattgtaaaatcttatagcggtaaaactatagaagtattaaatactgatgcagaaggtagattagttcttgctgatgctctaacttttactgaagaaaaatttaaaccaaaaattatagttgatttagcaactttaacaggtgcaatcatagtttctcttggttcagaatatgcagggcttttttcaaataatgataaattatcaaaacaactaattgatgcaggaaataaagttgaggaaaaactttggagaatgccgttacataaaaattacgacaaattaatgaattctaaaaatgcagatatgcaaaatataaattatgttggtggggctggatcaact

SEQ ID NO: 261871 - DNA, 505 bp, Unknown
  Bacterial polypeptide expressing nucleotide sequence isolated from the Sargasso Sea
aaatcttacagtgtaaaaacagtggaaattttaaatactgatgcagaaggaagattagtattagcagatgcccttacttacacagaagagaaatataaaccaaaatttattgttgatttagctactttaactggagccatcattgtttccttaggatcagaatatgcaggtttattttctaatgatgataaattatctaatcaattaattgatgtaggagaaaaaacagaggaaaaagtttggagaatgcctttaaataaaaattttgataaattaataaactctaaaaatgctgatatgcaaaatattaattatgttggtggtgcaggctcaactactgcagcacaatttttacaaagatttattttaaacaaaactccgtgggcacatttagatatagcaggaatggctttttctaagtacggtggagctctcaattcaggtggcgcaacaggatatggagttagattattaaacaaactagtagaggaccactatgagtaat

SEQ ID NO: 261872 - DNA, 578 bp, Unknown
  Bacterial polypeptide expressing nucleotide sequence isolated from the Sargasso Sea
tggattgaaagtaaatatttacgacgaaaaaaaattaaaaaaacttggcatgaatgctctccttggtgtgggtatgggtagcataagaggatcttatttagtaactatggaatggaacggtgcaaaaaataattctaaacctttagcgtttgttggcaaaggagttacatttgatactggaggctattcattaaaaccagcaagatttatggaggatatgacttatgatatggctggctcagctgctgttgttggtttattgaaaagtttagctttgagaaaagcaaaagtaaatgcagtcggcgtagtaggacttgtagaaaatatggtaagcgatagagctcaaagaccaggagatattgttagatcttatagtggtaaaactatagaggtattaaatactgatgctgaaggtcgtttagttttagctgatgcacttactttcaccgaaaaaaaatttaaaccaaaatttataattgatctagctactttaactggagctattatagtatgtctaggatcggagtatgcaggcctattttctaatgatgataaattgtctaaacaaattttaaatg

SEQ ID NO: 261873 - DNA, 910 bp, Unknown
  Bacterial polypeptide expressing nucleotide sequence isolated from the Sargasso Sea
aaatcatgcaactccttcttacattgcaaatgccgtaaagggtctagctaaagatatcggtggtttttcagttgaaatattagaagaaaaagatatgaaaaaactcggcatgggctgtttactgtcagtttcaagaggaagtattgaaccagctaagttagtaactatgcagtacaaaggtggtaaaaagggagccaagccaattgttttagtagggaaaggtgtaacttttgatacagggggcatcagtttaaaaccaccgcaaaaaatggatgaaatgaaatgggatatgtctggtgcaggatctgtaataggaacaatgtgtgcagttgctaaatcaaaacttccagtaaatttggtctgtacagttgcactttcagagaatatgccaggaagtaaagctacaaaacctggtgatgttgtaacaagcatgtcaggacaaactgttgagatccttaataccgatgctgaaggcagactagtactttctgatgctttaacctacgttggaaaatatgatcctaaagttgttattaatactgcaacccttactggtgcggtagttgtagcattgggctcagttgctgctggtgttatgggtaatgatcaaaagctagttgatgagatacttgaagctggacaaacaactggcgaaaaggcttggcaattacctatgtgggatgagtatcaaacatatttagattcaaactttgctgatattgctaatatcgctccaggaagagcagctggaacaatcgaaggagcatgtttcttatctagatttacaaaagattatagatgggctcatattgatatagcaggtgtagctgatattggacaaggaaaagctaaaggctcaacaggtgttcctgtaggcttactgtttgagtacgtaaaaagtaatttttaa

SEQ ID NO: 261874 - DNA, 895 bp, Unknown
  Bacterial polypeptide expressing nucleotide sequence isolated from the Sargasso Sea
aataatcctacaaccaaaaaacaattacattttaaagcgatcgaggaaggtgctttttatgcgagagatttagtttcagaacctggaaatattttacatcccgatgaatacgctaaaagattaaattcacttaagaaagacggattgaagataaatatttacgataaaaaaaaattaaaaaaactcggcatgaatgctttgcttggtgttggaatgggaagcataagaggatcatatctagtgactatggaatggaatggtgcaaaaaataaatctaaacctttagcatttgttggaaaaggggttacttttgataccggaggatattctttaaaaccagcaagatttatggaagacatgacgtatgatatggcaggttctgctgctgtagtaggtttaatgaaaagcttagctctaagaaaagcaaaagtaaatgctgttggtgtcgtaggattagttgaaaatatggtaagtggagttgctcaaagaccaggagatattgttaaatcttttagtggaaagacaatagaagttttaaatactgatgctgaaggaagattggttttagctgatgcattatcatttactgaaaaaaaatttaaaccaaaatttattattgatttagctactttgactggagcaataattgtttgtttaggatcagaatatgctggacttttttctaatgacgacaaattgtcaagacaaattttagatgctggagataaagttgaagaaaaattatggagaatgcctcttcataaaaattatgataaacttatggactccaaaaatgctgatgttcaaaatataaattacgtaggtggcgctggctcaacaacagctgcacaatttctacaaagatttattttaaataaaacgcccatgggctcac

SEQ ID NO: 261875 - DNA, 596 bp, Unknown
  Bacterial polypeptide expressing nucleotide sequence isolated from the Sargasso Sea
caatgtttttaaaaaaaataatgataaaaaattaaaaaataaattaaatgcaattttagaaggaacaaattttactagagatttagtttcagaaccaggaaatgttttaacccctgatgaatatacaaaaaggttaattaaattaaaaaaatatggattaaaaattacagtttacaatgaaaaaaaaatgaaaaaacttagaatgaatgctttgctaggagttggcaaaggaagcatttgtggttcttatttggtaacattagaatggaaagggataaaaaataattctaaaccacttgcattcgtaggcaaaggtgtttgttttgatacgggtggtatatctttaaagccagcaaggtttatggaagacatgacatatgatatggctggctcagctgttgtagttggactaatgaaaaattttgctttaagaaaagcaaaaataaatgctattggagttgtaggactagttgaaaatatgcctggcggaaatgcacaaagacccggagacattgtaaaatcatatagcggaaaaactatagaggtactaaatactgatgcagaaggaaggttagttttagctgatgcactaagtt

SEQ ID NO: 261876 - DNA, 601 bp, Unknown
  Bacterial polypeptide expressing nucleotide sequence isolated from the Sargasso Sea
aataaaattaataaatcaatagttggtataataggtctagttgaaaatatgccagatggcaaagctcaaaggcccggtgatattataaattctttgtctggacaaactattgaagttctaaacactgatgctgagggtagattagttttagctgatataattacttatattcaaaaaaaatataaacctttagaaataatagattttgcaacattaactggtgcaataatgattgctcttggcacacataaagctggtatattctcaaataatgataaattatctaataaattagaaagtgccggtaaattagttaaagaaaatatatggagattacctcttggagatgaatataatgctgaaattaattcatctagagctgatatgaaaaatattggttcttcgagatatggtggctcaatccatgcagctgaatttataaaaagatttattgataaaaatactccgtgggctcatttagatattgctggcgtatcttggactatgaaagcagggcaaaataatataacaaaactacataatccaggagctacagcttttggtgttaggttaattgataaatttttaaggagtaaataga

SEQ ID NO: 261877 - DNA, 498 bp, Unknown
  Bacterial polypeptide expressing nucleotide sequence isolated from the Sargasso Sea
tttcaggcaagactatagagattctaaatacagatgcagaaggaagattagttctagcagatgctatgtcattcactcaaaaaaaatttaaaccttctctaatgatagatcttgcgacgttaaccggagcaataattgtttcacttggatctgagtattctggattattttctaataatgataagcttgcaaaacaacttttcgaggctggaaacaaagttgaagaaaaagtatggagaatgccacttcataaaaattatgataaattaattgactctaaaaacgctgatatgcaaaatataaattatgtaggtggtgcagggtcaacaacagctgcacaatttctgcagaggtttgtaagtagtaaaattccatgggcacatttagatattgcaggaatggcattttcaaaatatggaggtgcattaaattcgggtggtgcaactggttatggagtaagaattcttaataaatttatagaagataattacgaataag

SEQ ID NO: 261878 - DNA, 845 bp, Unknown
  Bacterial polypeptide expressing nucleotide sequence isolated from the Sargasso Sea
aaagcagcccgtgaagggattgctattgcaaaagcctccggcgcgactaaaccactccttgtggtgcctgcggtaagtgatacacgctatcaacatgcacaacaagttgcagcattagcgtgtggtcaggagttatggcagccactagaagcacgagaagcaaagtcactaaccccaagtttagcagcaatagggctgcttaatagtgagtctcacagccagttgatcaatgcggcagaatcagggagagtgctggcgcgtgatctttgtggtactgagccagaacgaatgtcagccatgggatttgctcagtattgtgtcgatgcgtttgccgacagtggattagcggtatctgtcattgatcaggttgaacagttacgtactgactacccgctattaagtgctgtggggcgaagctcatttggggttgatcgccaccatcctcgggtcgtaaaactagaatatatcggtgagggcactattactaaaaccttattttttgccggtaaaggggtggtttacgatacaggcggcgcagacatcaaagtggccggctctatggctgggatgagccgtgataaaggcggtgcagcagctgtagctggattaatgaaagcactgtcaatcctaaaacctaaaggcattaaagtggttgctgagttggggctggtgagaaacagtattggtagcaatgcctttgtgactgatgagatcattcgtagccattctggtgcgcgggttcgtatcggtaatactgatgccgaagggcgtcttgtgcttgctgatctactgtcacatcttcgtattcaagccttgcaggctatcaacccacaggtattttccgt

SEQ ID NO: 261879 - DNA, 604 bp, Unknown
  Bacterial polypeptide expressing nucleotide sequence isolated from the Sargasso Sea
aaattttgcacttagaaaagctaaagttaatgcagtgggagtagttggtctcgttgaaaatatgcctggaggaaatgctcaaagaccaggcgatatagttaaatcttacagtggtaaaacaatcgaggttttaaataccgatgctgaaggaaggttagttttagctgatgcacttacatttacagaagaaaaatttaagccacaggtaattattgatcttgccacattaactggcgcaatcattgtttcattaggttcagagtatgcaggattattttcaaacgatgacaaattatcaaagcaattatatgaagcaggtaaaaaggtagaggaaaaagtttggagaatgcctttacacaataactacgataaattaattaattctaaaaatgcagatatgcaaaatattaattatgttggtggcgcaggatctacaacagctgctcaatttttacaaagatttatacttaacaaaacaccatgggcacatttagacatagctggaatgtctttttctaaatatgcaggagcattgaattctggaggtgcaacagggtatggcgttagattattaaataaatttgtggaagaaaattatgagtaa

SEQ ID NO: 261880 - DNA, 822 bp, Unknown
  Bacterial polypeptide expressing nucleotide sequence isolated from the Sargasso Sea
aatgatttctagatacactaatcaattaaatgtaaaacatgtatccttggaatcaaaatctttgcatttaaatgataaaaatttatcaaaatctctatttgaaggagttgtattaggtaattatgaatttttagcttataaaacagtagatcctaagccaaactctttaaataaagtaacaatcttaggtaagtgtgataagaaaaatcaacaatcttcagtagttattgctaatagtgttaactatgctagggatttaggtaatcatcctgcaaatatattaacaccaacatatttagcaaatgaatctaaacgaatttctaaagcaaaaaatatgaaatgtactatttttgatgttagtaagtttgaaaaaatgggtcttgggagtttttatggtgttgctagaggagctaaagaacctgctaaaatgattatcgtagagtataatggtggttctaaatctgaaaaaccaattgctttagttggcaaaggattgacatttgatactgggggtatctctttaaagccaggagcaagaatggatgaaatgaaatttgatatgtgtggtagtgccactgtaatgggtgtaatgaatgcagtatctattttacagccaaaattaaatattatttttgcaataggatctacagaaaatatgccaggcagtgatgctcaaagacctggtgatatagtaacagcttataatggtaaaactatagaggtattaaatactgatgcagagggaagattagttttagctgatgtattatcttatgttgataaaaattataaacctaaattcatggttgactttgcaacatt

SEQ ID NO: 261881 - DNA, 532 bp, Unknown
  Bacterial polypeptide expressing nucleotide sequence isolated from the Sargasso Sea
aatgctcagagaacctggtgatattgtaaaatcttatagtggaaaaactatagaggtgttaaatactgacgctgaaggtagattggttttagcagatgctttaactttcactgaaaaaaaatttaaacctaaattcatggttgatttagcaactttaactggtgctatcattgtttctttaggttcagagtatgcaggacttttttctaatgatgataaactatcaaaacaattaattgaagctggtgaaagagttgatgaaaaattatggagaatgcctcttcacaaaaactttgataaactgataaactctaaaaatgctgatatgcaaaatattaattatgtaggtggtgccggatcaactactgcggcacaatttttacaaagatttattattaataaaactccttgggctcatcttgatatagctggaatggcattttcaaaatatgcaggagctttaaattctggtggagccacaggttatggagttagattgttaaacaaatttgttgaagataattatgagtaa

SEQ ID NO: 261882 - DNA, 872 bp, Unknown
  Bacterial polypeptide expressing nucleotide sequence isolated from the Sargasso Sea
cttaaaaaaaaatttattagtttttgaacttaattcaaataaaaaaattgttataatatctattaaaaataatcttaagaatgctgacattgaaaatctaggagcagaattttttggacgaataaactacggtaagaatagtgagtattttattttttctgacagtgttaagactaagcatgataattttttgggtcattttctacatggtttaaaattaaaatcttatgagtttaaaaagtataagacaaaaaaggatacaagattaattataataaatgtaactggtaataaaaataaaccttcagaaaaaagtcaattaaagtttaaagctctagaagagggtacattttatgcgagagatctagtttcagaaccaggaaacattttacatcctgatgaatatgcaaaaagattaaatttacttaagaaggatggtttgaaagttaatatatatgatgaaaaaaaattgaaaaaacttggcatgcatgcactacttggagtaggccaaggaagtattaggggatcatatcttgtaacaatggaatggaacggagcaaaaaataattctaaacctttggcttttgttggaaaaggcgtttgttttgacacaggcggctattctttgaaaccagcaagatttatggaagacatgacttatgatatggcaggttcagccacagttgttggtttaatgaaaaatttggctttaagaaaagctaaggttaacgctgtcggagttgttggtcttgttgaaaatatggtaagtggtaatgctcaaagaccaggagatatagtaaaatcttatagtggcaaaactatagaggtttttaacacggatgcagaaggtagattagttttagctgatgctt

SEQ ID NO: 261883 - DNA, 409 bp, Unknown
  Bacterial polypeptide expressing nucleotide sequence isolated from the Sargasso Sea
actttattgagcgtagggaagggatcaagaaacccttcgaaattagtaattttagagtggaatgggagacccttatcaaagaaattactaggattggtgggaaaaggagtaatgtttgattcaggcggcatttctcttaaatctgcatctggtatgcaagaaatgactggagatatgggtggtgcggcagtaatagcagggttgttcaaggcattagctttgagaaaatccaaatctaatgtagtgggtttcttgggtttggtcgaaaacatgccaggtggggacgctatgaaacctggagatataattcaatctttaaaaggcgataccgttgaggtgaataatacggatgctgaaggaagactggttttagctgatcttttgtggtattgccaaatgaaatataaag

SEQ ID NO: 261884 - DNA, 750 bp, Unknown
  Bacterial polypeptide expressing nucleotide sequence isolated from the Sargasso Sea
gagcaaaaaataattctaaacctttagcctttgttggaaaaggagttacttttgatactggtggctattcattaaaacctgcaagatttatggaagatatgacctatgatatggcaggttctgctgctgtagttggtttaatgaaaagtttggcattaagaaaagcaaaaattaatgcagttggtgtcgtaggacttgtagagaatatggtaagtggagttgctcaaagacctggagatattgtaaaatcttatagcggaaaaactgtagaagttttaaatacagatgcagaaggtcgattagttttagctgatgcattaacttttactgaaaaaaaatttaaaccaaaatttatgattgatttagctactttaacaggagcaatcatagtttctttaggatcagaatatgctggactcttttctaacgacgataatctatctaaacaaattttgaatgccggtgaaaaagttgaggaaaagttatggagaatgcctcttcataaaaattatgacaaacttataaattcgaaaaatgcagatatgcaaaatataaactatgttggtggagcaggctcaacaacagctgcacaatttttacaaagatttattttaaataaaactccatgggctcatttagatatagctggtatggcattttcaaaatatggtggagctttaaattccgggggagcaactggatttggagtaagattattaaaccaactaatagaagaaaattacgaataaa

SEQ ID NO: 261885 - DNA, 709 bp, Unknown
  Bacterial polypeptide expressing nucleotide sequence isolated from the Sargasso Sea
tttactcaaatgggaatgggtgcacttgctggtgttgcctctggaacagatgtgcctcctaaatttattattatggagtatatggcgggtccaaaaaatcaaaaaccaaaaatattagttggtaagggtttgacctttgatagcggtggaatatcgataaaacctgcatcaaaaatggatgagatgaaatatgatatgtgtggtgctggagttgttattggtgtaatgaagattgtttcaattttgaaacccaaaatgaatatagttggcattgttccttcaactgagaatatgagcggagacaaagcatatcgtccaggtgatattcttactgcatataatggtaaaacaatcgaagttttaaatacagatgctgagggacgacttatcttggctgatgcactatcctatgcttcaaaacattatgatcctgaatttattttagactttgcaactctaactggtgccgtggttgttgctttggggcatgtagcttccggtataatgggaacagataacccattaattgaacaaattaaatcttcctcaaaaataactggtgaaaaagtatgggaattccctctttgggatgaatatttagatcaagttaaatccgaaattgcagatgtaaagaatttaggtgcacctggacaagcaggatccattgctggtggagcatttttaaattcatttgttaataaggatattc

SEQ ID NO: 261886 - DNA, 629 bp, Unknown
  Bacterial polypeptide expressing nucleotide sequence isolated from the Sargasso Sea
tggagcggctaatgtcttagctcttacttctatgatcctatcaaccggtatgaaaattcaattaagggtacttataccagcagtagaaaattctatttccggaaattcatttcgcccaggcgatatccttaccgccagaaatgggtcaactgttgaaatcaataatacagacgcagaaggccgccttgtgctagctgatgcattgtctttcgcaagcgaggatggccctgatttaataatatcaatggcaacactaactggtgcagcgcgtgttgcctttggatcagatatcgctccgttttttgctgaaagaaacgaaatcagcgatatattaaaagcttcaggtgctaagcagaatgatcccgtatggcccttaccgttttgggatccttacgaaaaaatgatcgagtctgacactgctgatttagacaattctcctagtggcggctatggtggggcgattacggctgcactatttttgcgcaggtttgttacaaatccaaactcatacgtacactttgacatctacgcgtggtcagacacaaataaaccagggctaccaaaaggcggaataacacagggacccagagccatatttgatgcacttccagaaatcctaaatatttaaa

SEQ ID NO: 261887 - DNA, 688 bp, Unknown
  Bacterial polypeptide expressing nucleotide sequence isolated from the Sargasso Sea
ggatactcattaaaaccagcaagatttatggaggatatgacttacgatatggcgggttcagcaactgtagttgggttaatgaaaaatttagcgctaagaaaagctaaaataaatgcagttggagttgtaggacttgtagaaaatatggtcagtggaaatgcacagcggccaggagatatagtaaaatcatatagtggtaaaactatagaagtgttaaatactgatgcagaaggtagacttgttttagctgatgctttaacttttactgaaaaaaaattcaaaccaaaatttattattgatttagcaacattaacaggtgcaattatcgtttgtttaggttctgagtatgctggactattttctaatgacgacaagttatctaaacaaatctttagcgcaggagaggaggttgaagaaaaagtatggagaatgccgcttcataaaaattatgataaactaatgaattctaaaaacgctgatgtacaaaatataaattatgttggtggagcaggttcaacgacagctgcccaatttttacaaagatttataataaataaaacaccttgggctcatttggatatagcaggtatggctttttcaaaatatggcggggcacttaattcaggtggtgctactggctttggagtaagactattaaataagttaatagaaaaaaactatgagtagt

SEQ ID NO: 261888 - DNA, 757 bp, Unknown
  Bacterial polypeptide expressing nucleotide sequence isolated from the Sargasso Sea
tggagaggaaaaaatcaaattcaaaaccattggcttttgttggtaaaggagtttgctttgaccactggaggaatatctttaaagcccgcaaggtttatggaagatatgacttatgacatggctggttcagctgtagtcgttggtcttatgaaaaatttagctcttagaaaatcaaaagttaatgcagttggcgttgttggattagtagaaaatatgccaggaggtaatgctcaaagaccaggagatattgtaaaatcgtatagtggaaaaacaattgaggtattaaatactgacgcagagggaagattagttttagcagatgctataacttttacagaaaaaaaatttaaacctaatttgattattgatttagcaacacttactggtgcaatagtggttgcgttgggatctgagtacgctggattattttcaaataacgataatttatcaaaacaaattcatgatgctggtgaaaaggttggggaaaaagcttggagacttccattacattctaattacgataaacttatgaattctaaaaatgcagacatgcagaatattaattatgttggtggagcaggttcgactaccgcagcccagtttttacagagatttattttaaataaaacaccttgggctcacttagatattgcggggatggccttttcaaaatatgctggagctcttaattcaagtggagcaacaggttatggagttagattgttaaataagtttgttgaggataactatgagtaga

SEQ ID NO: 261889 - DNA, 890 bp, Unknown
  Bacterial polypeptide expressing nucleotide sequence isolated from the Sargasso Sea
tttgaaaagtaaacatgaaaattttttaagttattttcttcacggtattaaacttaaatcttactcatttaataagtataaaacaaaaaaagaagacagaaaaatatcaattaatgtaattggaaaaaaaaatataccatctgctcaattaaaattaaaatttaaagctttggaggaaggcactttttatgctagggacttagtttcagaaccaggtaatattttacatccagatgaatatgccaaaagaatcagttctttaaaaaaagacggtttaaaagttactatctatgatgaaaaaaaattaaaaaaacttggtatgcatgctctgttaggtgttggtcagggaagtataagaggatcatatttagtcacgatggagtggaatggaaaaaaaaataattctaaaccattagcatttgttggaaaaggagtttgttttgatactggaggttattctttgaaaccagctagatttatggaagatatgacttacgacatggctggatcagcaaccgtagtaggtttgatgaaaagtttagcattaagaaaagcaaaaattaacgctgtcggtgtagttgggttggtagaaaatatggtcagcggaaatgctcaaagaccaggagatattgtaaaatcatacagtggaaaaactatagaagttttaaatacagatgcagaaggccgtctagttttagcagatgctttaacttttacagaaaaaagatttaaaccacaatttattgttgatttagctactttgacaggcgcaattattgtttgtttaggctcagaatacgcaggccttttttctaatgacgataagttgtcaaaacagatatttagtgcaggtgagcaagtagaagaaaaagtgtggagaatgccattac

SEQ ID NO: 261890 - DNA, 775 bp, Unknown
  Bacterial polypeptide expressing nucleotide sequence isolated from the Sargasso Sea
ttgcaattaaaatcttatgaattcaacaagtataaatccaaaaataaagaaaaaagatttgatattgaaatattaaatagaaataaatcttttatattcaacaaaaataaaaagtttaaatctttaattgagggatcaaatttaaccaaggatcttgtttcagaaccaggtaatattttacatccagatgaatatgctaaaagattacttcagcttaaaaagtttggtttaaaagttaatattttgaataaaaaaaaattaaaaaaacttggaatgaatgcacttcttggagtgggacagggtagtataagaggatcatatcttgtaactttagaatggaaaggtctcaaagcaaaaaaggaacccctagcatttgttggaaaaggtgtttgctttgatactgggggtatttctctcaaaccagcgaagttcatggaagatatgacttatgacatggcaggttctgctgtagttgttggattgatgaaaagtcttgctttaagaaaagcaaaaattaatgcagtcggagtcgtaggtctggttgaaaatatgccaggtggaaatgctcaaagaccaggagatatagttaaatcttacagtggtaaaacaattgaagttttaaacactgatgctgaaggtagattagttttagcagacgcaattacctatacagaaaaaaaatataaaccaaagtttattgtcgacctcgcaactttaactggagcaattatagtctcattaggttcagagtttgctggtcttttctcaaaataat

SEQ ID NO: 261891 - DNA, 793 bp, Unknown
  Bacterial polypeptide expressing nucleotide sequence isolated from the Sargasso Sea
aaagcatcatcacataaacctcgtctctttgagttaacatataaaagatctaattcatctcttaatctaactttaataggaaagggtgtttgttttgatacaggtggattaaatttaaagagcagttctggtatgataaatatgaaaaaagatatgtcaggagcagcttcagttttgggtcttgctcactattttataagattaaatttaaatattaatttgagaatactgattccttgtgtagagaattcattatcagaaaagtcatttagacccagtgatattttaatttctagaagtggtatggggatagaagtcaaaaatacagatgcagagggaagattagttttggctgatgttttaacatattcaactgaaaaaaaatcagatattttggtaacatttgcttcacttactggagcagccagagtagcgatggggccggatataactcctttcttttcaacctgtgatgattttgcagacctattaaaaattagtggagataaaatgtttgacccagtttggcgacttccattctataaagattataataaggaattatcatcagaatttacagatttaaacaatgcacctttaagtggaatggctggcgctataacggctgcactttttttgaaaaaatttacaaaaagtcacaatatgtttttacattttgatatatttgggtggaatacaaaatcaaaacctggaaaaacttatggaggcttaatgcaaggagtaaggtctttaggcatagcaattgaagaaaaaattttaaaattaaactaaa

SEQ ID NO: 261892 - DNA, 784 bp, Unknown
  Bacterial polypeptide expressing nucleotide sequence isolated from the Sargasso Sea
acgcaaacccaattcactatgccgcaggcgattcctgcctacttgattgccattgccgcaggacacctgcaatttgccgccttagacgacacctcaggcatttgggccgagccagaaatgcttgccaaggccagcaaagaatttgccgatacgccggagatgatcgccatcgccgccaaacgttacggcgattaccgctggggtcgatacgatctgttgatcctcccgcccagcttcccgttcggcgggatggaaaatccgcgattatcttttattactcccacagtcatcgcgggagataaaagcttagtgagtttaattgcccacgagctggcccattcttggtcgggcaatttagtcactaacgccacctggcgcgatctctggctcaacgaaggttttaccacttatgtggaaaaccgcattatggaagatctctatggccgcgaccgtgcattgatggagcaaaccattggttactctgagctattggccgaattagccgagttgcccgcaggcgacaccgtactgcatattgacttaggtgagcgcgatcccgacgatgcctttagcggcgtgccctatgtcaaaggacaattattcctgcgtttccttgagcaaaaattcggccgcgaacgcttcgataactttgtaaaaagctacttcgatcactttgcgtttcaaagcattaccacggagcagttccgcaattacctcacgcagcagttattgcaaaaatatcccaatatcgtcagcgagtccgaagtggatacttgggtggagg

SEQ ID NO: 261893 - DNA, 757 bp, Unknown
  Bacterial polypeptide expressing nucleotide sequence isolated from the Sargasso Sea
gttcttggaaaataataattgtagcaaaattacaatttttaataccaacaaacatataaagaaatttaatttaattgaacatttaattcatggattaaaattaaaatcgtatacttttgacatttataaatccaaaaatgaacaaaaaaaaatttcaataaatttagttaccaacacaaataaagaagatatcaaaataaagaaaaaattagactcattattagatggtataaattttactaaggatttagtttctgagccaggaaatgttttgcacccagatgagtattctaaaagattattaaaattaaaaaaaattggattaaaagtaactgtatacgacaaaaaaaaattaaaaaaattaggatgtaatgcattattaggtgtaggtcagggaagtataagaggatcatacttagttgtattagagtggaagggtaaaaaaaataaatctaaacctttagcttttgttggaaaaggagtctgtttcgatactggagggatctctttaaaacctgcaaaatttatggaagatatgacatatgatatggctggttcagcagttgtagtgggattgatgaaaaactttgctttaagaaaagcaaaaataaatgctgtaggtgttgttggacttgtagaaaacatgcctggaggtaacgctcaaagaccaggagatataattaaatcttatagtggaaaaacaattgaagttttgaatacagatgcagagggcaggctagttttagcagatgctatt

SEQ ID NO: 261894 - DNA, 826 bp, Unknown
  Bacterial polypeptide expressing nucleotide sequence isolated from the Sargasso Sea
attaggttttaacgcattgctaggcgtcggacaaggaagtatcagaggttcttatatggtaacaatagagtggaatggaaataaaaataaatcaaaacctttagccttcgtcggaaaaggtgtttgttttgatactggtggaatttcactcaaacctgcaaaatttatggaagatatgacatatgatatggcgggttcagcaacagtagttggtcttatgaaaactctagctttaaggaaatctaaaattaatgcagttggagttgttggattagttgaaaatatgccaggagcaaatgcacaaagacctggagatattgtaaaatcttacagcggacaaacaatcgaagttttaaatacagatgctgagggaagactggttttagcagatgcacttacatataccgaggagaaatttaagccaagcctaattattgacttagcaacattaactggagcaataattgttgcgcttggatctgaatatgctggactttggtcaaataataaaaaattgtccaaacaactttttgatgctggagagcatgtagaagaaaaagtatgggcaatgccactccatgagaattataacaaattaatgaattcaaataatgccgatatgcaaaatataaattatgttggaggagctggatcaacaactgcagctcaatttttacaaagatttataattaataaaacaccttgggctcatttagatattgctggaatggctttttctaaatatgctggagcactgaattctggtggcgcaactggatatggtgttagattattaaacaaatttatagaggagaattatgagtaa

SEQ ID NO: 261895 - DNA, 504 bp, Unknown
  Bacterial polypeptide expressing nucleotide sequence isolated from the Sargasso Sea
agtcatttagtggtaaaactattgaagttttaaataccgacgcagaaggtcgtttagttttagcagatgcattaacttttactgaaaagaaatttaaaccaagattcatagtagacttggctactttaactggagcaattatcgtttgtttaggttcagaatatgcagggcttttttcaaatgatgacagattatcagaacaaatatttaatgcaggtgaaaaggtagaagaaaaggtatggagaatgcctttacacaaaaattatgataaacttatgaattctaaaaatgcagacgtccaaaatataaattatgttggtggagctggttctactactgcggctcagtttttacaaagatttattttgaataagactccatgggcacatctagatattgctggtatggccttttctaaatatggaggagctttaaattctggtggagcaactggttttggagttagattattaaatcaactagttgaagaaaattatgagtaat

SEQ ID NO: 261896 - DNA, 447 bp, Unknown
  Bacterial polypeptide expressing nucleotide sequence isolated from the Sargasso Sea
taaatactgatgctgagggacgactggtcttagctgatgctttgacttatgttgaaagatttgaaccccgatcagttgtagacattgctacactaactggtgctgtgataatggcattgggttattctacatctggactaatgtctaataatgacaaacttgcagaagaattattggaggctggccgaaaagcttcagatagagcttggcaattgcccttatgggatgtttaccaaaaggatttggatagtaattttgcagatatcgcaaacataggtggtcgagctggtactattaccgctgcatgttttttatcaagatttgcagagaaatacccatgggctcatctagatgtggctggaactgctagttataaaggagccgcaaaaggtggttcaggcagacctgtgcctcttctgagtcaatatctcattgataagtcttagt

SEQ ID NO: 261897 - DNA, 706 bp, Unknown
  Bacterial polypeptide expressing nucleotide sequence isolated from the Sargasso Sea
tttgcctttgatactgggtggttactctctaaaaccggcaagatttatggaagatatgacttatgatatggcaggctcagctgcggtagtaggattaatgaaaactttagctttaagaaaagcaaaaattaatgcaataggtgcagttggtcttgttgaaaatatggtgagtggaaatgctcaaagacccggcgatatagtaaaatcttatagtggaaaaactatagaagtattaaatactgatgctgaaggaagattagttttagcagatgttttaactttcactgaaaaaaaatttaaacctaaactcattgttgatttagcaactttaactggtgccattattgtttctttgggttcagagtatgcgggtcttttttctaatgatgataaattatcaaaacaattacttgatgccggtgaaagagttgatgaaaaattatggagaatgcctcttcataaaaactttgataaacttatgaattcaaaaaatgcagatatgcaaaatataaattatgtaggtggtgcgggttcaactacagcagcacaatttttacaaagatttattattaataaaacaccctgggcacatcttgatatagctggaatggctttttcaaaatatgcaggagctttaaattcaggcggtgctacaggatatggagtaagactattaaataaatttattgaggagaattatgaataa

SEQ ID NO: 261898 - DNA, 584 bp, Unknown
  Bacterial polypeptide expressing nucleotide sequence isolated from the Sargasso Sea
caaagttaatgcagttggagttgttggacttgtagaaaacatggtaagcggaaatgctcaaagacctggagatattgtaaaatcttatagtggaaaaactatagaagttttaaatacagatgctgaaggtagattagttttagcagatgcgttaacttttacagaaaaaaaatataaaccaaaatttataattgatttagcaactttaactggcgcaataatagtttgtttaggatcagaatacgctggattgttttcaaatgatgataaactatctaagcaaattttcgaagctggtcaaaaagtggaagaaaaagtttggagaatgcctttgcataaaaattatgacaaattaatgaattctaaaaacgcagatatgcaaaacataaattatgttggtggagcaggctcaactactgcagctcaatttttacaaagatttattttaaataaaactccttgggctcatttagatatagctggaatggctttttcaaaatatggtggtgctttaaattctggtggagcaactggttttggagttagactgttgaaccagttaatagaagagaattatgagtaat

SEQ ID NO: 261899 - DNA, 952 bp, Unknown
  Bacterial polypeptide expressing nucleotide sequence isolated from the Sargasso Sea
cacccaggaaatgttgctactccaactaaactagcacaagaagctaggaaaattggaaaacgcggaaagatgcgtgtaaaagtatttgatcgatcaaaaattattaaaatgggtatgggtggactagctggtgtagcggctggaacagatgaaccgccaaaatttattttaatggaatattggggtacaaaaaaaacagagaaaccaaaggtgttggttggtaaaggacttacttttgattctggtggaatttcaataaaaccagcggcaaagatggatgaaatgaagtttgatatgtgtggttctgctgtagtcttgggagcaatgcatgcccttgctgatttaaaaccaaaaattaatgtagttggtattgttccctcaacagaaaatcttagtggagcaaaagcatataagcctggagatatcttaaaagcatataatggtaaaactattgaagtattaaatacagatgcggaagggcgattaattttggcagatgcattatcgtatgctagcaaacactacaagccagagtatattcttgattttgcaactttaactggagcggttgttattgctcttggttatgtggcgactggtataatgggaacagatgataagctaatcaagaaagttaaatcttcttccgatgctacggcagaaaaagtctgggaacttccactttggaaagaatattgtcatcaaattcgatctaagattgctgatataaagaatacaggggcaccaatgcaagcaggtactatcgctgcaggagcttttttaaaagaatttgtaaaggatgacatcccttggtgtcattttgatattgctgggactgcttggaacgattcagaaacggatagtggtggaaaattactagaaaaaccatacacacctagagaaggtgcttcaggaaatataattagattagttttggatctaattgaggcat

SEQ ID NO: 261900 - DNA, 760 bp, Unknown
  Bacterial polypeptide expressing nucleotide sequence isolated from the Sargasso Sea
agagatttagtttcagagcctggaaatattttgcatcctgatgaatatgcaaaaagaataagtcttcttaaaaaagatggattaaagataaatatatatgatgaaaaaaaattaaagaaacttggcatgtatgctttgcttggtgtagggcaaggaagtattagaggatcatatcttgtaacaatggaatggaatggcgcaaaaaataatagtaagccattagcatttgttgggaaaggggtctgctttgatactggaggctattctttaaaaccagcaaaatttatggaagacatgacgtatgacatggcaggatcagccacggtagttggtttgatgaaaaattttgcattaagaaaagcaaaaattaatgctgttggcgttgtgggactagtagaaaatatggttagtggtaacgctcaaagacctggagatattgtaaaatcttatagtggtaaaacaatagaagtcttaaatacagatgcagaaggacggttagttttagctgatgcattaacatttactgaaagaaaatataaaccaaaatttattgttgatttagctacccttacaggtgcaataattgtttccttaggttctgagtatgcaggattattttcaaatgatgataaattatcagatcaaatctttagcgcaggtgaaaaagttgaagaaaaagtttggagaatgccgcttcataaaaattatgataaactcatgaactctaaaaatgcagatgtacaaaatataaattatgttg

SEQ ID NO: 261901 - DNA, 919 bp, Unknown
  Bacterial polypeptide expressing nucleotide sequence isolated from the Sargasso Sea
acagatttagattatgaaaaaataagaaaaatcactggcagcttgtctcgttatataaataatatgaatattaaaaaagctagtataataattcctggagaaaacaataacaaactgaaatttaatgaaacagctgatgcagtagcacttggatttttaattggctcttataaatatgataaatacaagactgaaaaatctccaaattctcttcaagaattgactttactaaatacttcaggtcaaaatattagccatgatttaagtgatattattaacgaatctgagtctatcaatttagtacgagatctaatcaatgaacctccaaattatatgcatccgggtacattagaagaaatttctacaaaagtggcttccaaaggaccaattgaaatgtccgtattaaacgtaaaagaaatggaaattctaggtatggaagttatattaggagtagggaagggaagtacacatgatcccaaaatgattatattaaactatcaaggtgacaaatctaatcctgataataatattgctataatcgggaaaggaattacatttgactctggtggtttaaatttaaaaccaggaaatagtatgcgtactatgaagactgatatgtctgggtccgctgttgtgttaggagttatgaatgctgtagctcatcaaaaacctaaaaaaaatattatgggtatattagctattgcagaaaatatgcctggtggaagtgcgcaaagacctggagatgtagtaaaagctatgaatggcaaaactatagaaatagataatacggacgctgaaggtcgattggtactttctgatgctttaagctatgcagttgataaaggtattaataaaataatagatattgccactctaacaggcgcaatatctgttgcattaggcaatgaatacacaggat

SEQ ID NO: 261902 - DNA, 757 bp, Unknown
  Bacterial polypeptide expressing nucleotide sequence isolated from the Sargasso Sea
gtgcaaatcaaattttggaaaacccttagcttttgtaggtaaaggtgtttgttttgataccggaggaatatctttgaagccagctagatttatggaagaaatgaaatatgatatgggaggatctgctgttgtagtaggtttgatgaaatgtttagcgaaaagaaaagctaaagttaatgctgtaggcgtagttggattagttgaaaatatgcccgatggtaatgcccaaagacctggagatatagttaagtcttattctggaaaaactattgaggtgcttaatactgatgcagagggaagattagttttagcagatgctttaacttatacagaaaaaaaatttaatccgaaatttataattgatctagctacattaaccggagctattattatggcattgggagaagagtacgctggattattttcaaataatgataaaatatcaaatgaactacacgaaattggtaataaaattaatgagaaggtatggagattgccgcttcataaaaactatgacaaattaatgaactctgcttatgcagatgtacaaaatataaattatgctggaggcgccggttctattacggcagcacaatttcttcaaagatttattgtgaaaaatactccatgggctcacttagatatagccggtatggctttttctaaaaaagctgccagcttaaattctggcggagcaacaggttttggagttaggctgcttaatgatcttgtcaaaaaacattatgaaaaaagatga

SEQ ID NO: 261903 - DNA, 1393 bp, Unknown
  Bacterial polypeptide expressing nucleotide sequence isolated from the Sargasso Sea
tgcgatgaaaaatatagcattagtggaataaaaaaatatatttctagtgcagaattttcttatattaatgatttaatcagaacaattgatattaaaaaaaacttatttatttttgaaatcaattccaaaaaaaagatagtattaatatcgattaaaaaaaatttgaaaaattctgatatagaaaatttgggagcagaacttcataaaaaaatagactctaaaaaaaataacgaatattttgttgtatctgacagcgtagtaggaaaaaatgaaaattttttaggatattttctacatggtttaaaattaaaatcttatgaatttaaaaaatataaaactaaaaaagactcgaaaattatttcaataaatattgtaggaaccaagaatataccatcagctcaaaatcaattaaaatttaaagctctcgaggagggcactttttacgcaagagatttagtttcggaacccggtaatgttttgcatccagatgaatatgcaaaaagaatagagactttaagaaaagatggattaaaaataactgtatatgatgaaaaaaaattaaaaaaattaggtatgaatgctttacttggtgtaggacaaggaagtattagaggttcttatcttgttacaatggagtggaatggagcaaaaaacaattcgaagcccttagcatttgttggtaaaggagtttgttttgatacaggaggctattcattaaaaccagcaaaattcatggaggatatgacatatgatatggcaggttcagctacagtagttggtttaatgaaaaactttgcaatcagaaaagcaaaaattaatgcagtaggtgttgttggccttgtagaaaatatggtaagtggaaatgcacaaagacctggagatattgtgcagtcatatagtggcaaaactatagaaattttaaatacagatgcagagggccgtttagtattagccgatgcattaacatttactgaagaaaaatttaaaccagaatttatagttgatttagcaactttaactggtgcaatcattgtttgccttggatctgaatatgcaggtctcttttcaaacaatgataaattatcaaaagaaatatttaatgctggggaaaaagttgaggaaaaagtatggagaatgccccttcataaaaattatgacaagctcatgaattctaaaaatgcagatgtgcaaaatataaattatgttggtggagcaggatcaaccacggcagctcaatttttgcaaagatttatcttaaataaaactccttgggctcatctagatattgctggcatggctttttctaaatatggtggagccttaaattcaggtggtgcgacaggttttggtgtcagattgttaaatcaacttgttgaagaaaactatgaataga

SEQ ID NO: 261904 - DNA, 640 bp, Unknown
  Bacterial polypeptide expressing nucleotide sequence isolated from the Sargasso Sea
tatggcaggttctgcagttgttgtaggattaatgaaaaatttagctttaagaaaagcaaaaatcaatgcggttggtgttgtaggtcttgtagaaaatatgccgggtggaaatgcacaaagaccaggagatatagttaaatcttacagtggcaaaacagttgaggtattgaatacagatgcagaaggaaggttagttttagcagatgctttaacgtatactgaagaaaagtttaaaccaaaatttattgttgatttagcaactttaacaggagctataattgtttctcttggttctgaatacgcaggattattttctaatgatgataaattatcaaagcaattaattgatgtaggtaatgaagtagaggaaaaagtatggaggatgccattaaataaaaactatgataaacttattgactccaaaaatgccgatatgcaaaatattaactatgttggtggcgcagggtcaacaactgctgcacaatttttacaaagatttattcttaataaaaccccttgggcacatttagatatagcaggaatggctttttcaaaatatggcggtgctttgaattcaggtggagcaacaggtttcggcgtgagattattaaaccaattaatagaggaatattatgaataa

SEQ ID NO: 261905 - DNA, 889 bp, Unknown
  Bacterial polypeptide expressing nucleotide sequence isolated from the Sargasso Sea
attaaaaaaattaaaaaaatatggtttaaaagtattaatttatgatcaaaaaaaattaaagaaattaggatgcaatgctttattaggagttggacagggaagtataagaggatcttatctagtaactgttgaatggaaaggaaataaatcaaaatcaaaacctttagcatttgttggaaaaggagtttgttttgatactggtggttactcactaaaacctgcaagatttatggaagatatgacttatgatatggctggatcagctgctgtggtaggtttaatgaaaactttagctttaagaaaagcaaaaattaatgcagttggtgttgtaggttttgttgagaacatggtaagtggaaatgctcaaagacctggcgatattgtaaaatcttatagtggaaaaactatagaagtattaaatactgatgctgaaggtagattagttttagcagacgctttaactttcaccgaaaaaaaatttaaacctgaattaatggttgatttagcaactttaactggtgctatcattgtttctctgggttcagaatatgcagggcttttttctaatgataataaactatcaaaacaattaattgaagctggtgaaagagttaatgaaaaattatggagaatgccccttcacaaaaactttgataaacttatggattcaaaaaatgcagatatgcaaaatataaattatgtaggtggtgctggttcaacaacagcggcacaatttttacaaagatttattttaaacaaaacaccttgggctcatctagatatagctggaatggccttttccaaatacgggggcgctgtaaatccaagcggagctacaggttatggagtaagattattaaatcaatttgtggagaataattatgagtaa

SEQ ID NO: 261906 - DNA, 1336 bp, Unknown
  Bacterial polypeptide expressing nucleotide sequence isolated from the Sargasso Sea
ttgggttatataatcaataacaaaaaatcagaaaaaaataaaatttattgcctcaatgaggatcatgataggaaaattttaattatttttgtatcacaaattaaatctttaaacgatagtgaaagtttaggagccaatttttatgaccatattaaaaaagagcaaataaaagatgtttctatagttgggtctaatcaatcgaatattaaaaaaaaagttaaattagaatcatttgttcatggtgcacaattaaaatcctatgaatttaacttatacataactaaaaaaaaacttagagatattcaattaaatataatcaaatcaaaaaaccagatagatattaaattgagaaataaattaaatgcaatattagatggggtcaactttacaaaagatctagtatctgaacctggaaatattttacatcctgatgagtacgctaagagaattgtcaaacttagaaaatttggcttaaaggttactgtttatgataaaaaaaaattaaaaaaaatgggatgcaatgcattacttggagttggtcaaggcagcgctaggggctcttatttagtagttgtagagtggaaaggtttaaaaaataattctagacctttagcatttgtaggaaaaggagtatgttttgatacaggtggttattcacttaaaccagcaaaatttatggaagatatgacatacgatatggcaggctctgcagcagtaataggtttaatgaaaactattgctttaagaaaatccaaaattaatgcagttggtgttgtgggacttgtagaaaatatggtaagtggaaatgcgcaaagacctggagatattgttaaatcctatagtggtaagacaatagaaattttaaatacagatgcggagggtagattagtattagctgatgcattaacctttactgaagaaaaatttaaacctcagtttatgattgatttagcaactttaacaggagccataatagtttcgttgggatcagaatacgcaggactgttttcaaacaatgataaattatcaaaacaattaattgactctggtgtaaaaattcaggaaaaactttggagaatgcctttacataaaaattttgataaattaattaattcgaaaaatgcagatatgcaaaatataaattatgttggaggagcaggatcaacaacagctgctcaatttttacaaagatttgttttaaaaaaaacaccctgggctcatctggatatagcaggaatggctttctcaaagtatggaggtgcacttaattcaggaggtgcaacaggatatggggtaagactattaaataatttaattgaggataattatgaataat

SEQ ID NO: 261907 - DNA, 738 bp, Unknown
  Bacterial polypeptide expressing nucleotide sequence isolated from the Sargasso Sea
aatcaaaacctttagcgttcgtgggaaaaggagttactttcgatactggtggttattctttaaaacctgccagatttatggaagatatgacgtatgatatggcaggttccgctgctgtagttggtttaatgaagagtttagcattaagaaaagcaaaagttaatgctgttggtgtagttgggctcgtagaaaatatggttagtggtgtcgcgcaaagaccaggggatatagtaaaatcttatagtggaaaaactattgaagtattaaatacagatgctgaaggtagactagttttagcagatgctttaagctttacagaaaaaaaatttaagccaaaatttattgtagatctcgccactcttactggtgctataattgtttgtttaggatctgaatatgcaggtttattttctaatgatgataatttatcaaaacaaattcttgctgctggagaaaaagtggaggagaaattgtggaggatgcctcttcacaaaaattatgataagctaatgaattctaaaaatgctgacgtgcaaaatataaattatgtaggtggcgcaggatcaactactgcagctcagtttttacaaaggtttattttaaacaaaactccttgggctcacttggatattgcaggtatggctttttcaaaatacggtggcgcacttaattcaggaggcgcaacagggtttggagtaagattattgaatcaattaattgaagaacaatatgagtaat

SEQ ID NO: 261908 - DNA, 481 bp, Unknown
  Bacterial polypeptide expressing nucleotide sequence isolated from the Sargasso Sea
tgaagtattaaatacagacgcagagggaagattagttttagcagatgctttaacatttacagaaaaaaaatttaagccaaaatttatagttgatttagctacattaactggagcgataatagtttcgctaggctctgagtacgcaggtttattttcaaatgatgataaactttcaaaacaattaattgatgcaggagaaaaagttgatgaaaaattatggagaatgccacttcataaaaattttgataaactaatgaattcaaaaaatgcagatatgcaaaacattaattatgttgggggcgcaggatctacaactgcagctcaatttttacaaaggtttattttaaataaaactccttgggcgcatcttgatattgcaggaatggcattttctaaatacggaggtgcattaaattctggtggagctacaggatatggagtgcggttattaaataaacttgttgaagattactatgagtaa

SEQ ID NO: 261909 - DNA, 908 bp, Unknown
  Bacterial polypeptide expressing nucleotide sequence isolated from the Sargasso Sea
tttggaaggagtttttcttacaagagatttagtttctgaacccggaaatattttgcacccagatgaatacgcaaagagaattgttaaattaagaaagtttggattaaaagtaacagtttatgaccaaaagagattaaaaaaattaggttttaacgcattgcttggcgtcggacaaggaagtatcagaggttcttatatggttacaatagagtggaatggaaataaaagtaaatcaaaacctttagccttcgttggaaaaggtgtttgttttgatactggtggaatttcactcaaacctgcaaaatttatggaagatatgacatatgatatggcgggttcagcgacagtagttggtcttatgaaaactttagctttaagaaaatctaaaattaatgcagttggagttgttggattagttgaaaatatgccaggagcaaatgcacaaagacctggagatattgtaaaatcttacagcggacaaacaatcgaagttttaaatacagatgcagagggaaggctagttttagcagatgcacttacatatactgaggagaaatttaagccaagtctaattattgacttggcgacattgactggagcaataattgtagcacttggttctgaatacgctggactatggtcaaataataaaaaattgtcgaaacaactttttgatgctggagaaaaagtagaggaaaaagtgtgggaaatgcctcttcacgaaaattataataagctaatgaattcaagtaatgctgacatgcaaaatatcaattatgttggaggagcggggtctacaactgcagctcaatttttacaaagatttataattaatagaacaccctgggcacatttagatattgctggaatggctttttctaaatatgctggagcactgaattctggtg

SEQ ID NO: 261910 - DNA, 1138 bp, Unknown
  Bacterial polypeptide expressing nucleotide sequence isolated from the Sargasso Sea
atgagtccattacttcgcaatacatcttctggtattcctttatcatttattcttaaaagcgaactctctgattggcaatcaaagcagcctacatttattcaaaattggctaaacaatacaggctttgaaaagcaaggtttagcattaattcccgatagcaattccggggagttgtcccaagtaatttgtttaatgcaaagcccaaacgacttttgggctgctggcaatttggccaatacgctaccagtgggtagttatcaaattcaaggtgacgatacgtttatagagtttgtggcattaggatttgttcttggtggctacgaatttagtgaatacaaagaaaaaccgactgttaaagccgagttgtgtattggcgatgaacagctttacacgcgtatcaagcagcaagcggaagctatttttttagcgcgtgatttagtaaacacacctgccgtcgatatgatgccgcaacatttatcgcaagtgatggaagatttggcttcaactcatggcggtgatttttcacagtggataggcgatgaattgttagagcaaaactacccaactattcatatggtaggtcgtgcaagcgagaataaaccgcgtttgcttgatttaaagtggggagcagatgatgcgccactaataacgcttgttggtaaaggtgtgtgttttgactctggcgggctcgacttaaagccaagcaatggtatgcgtaatatgaaaaaagacatgggcggtgctgcgcatgttattgcattagctcagctgattatggctgctaaattgcctgtccgtttgagagtattagtaccggcagttgaaaatgcggtgtcgcgaaatgcatttcgcccgggcgatgttgtaaaaacgcgcaaaggtattatggttgaaatagataacacggatgctgaagggcgtttagttttgtgtgacgcgttaagtgaagcacaaaacgataatccggagcttattattgattttgcaacattaacgggggcatgtcgtgtagcgttaggtactgagttacctggtttcttttctacagagcgtgatgtagcaaatggtataattgatgcaggaatcagtgtgaatgaccctgtttggcagttgcctttatttgagcagtatcgtggat

SEQ ID NO: 261911 - DNA, 913 bp, Unknown
  Bacterial polypeptide expressing nucleotide sequence isolated from the Sargasso Sea
acatcctgatgagtatgcaaaaagattaaactcacttaaaaaatatggtttaaaggtaactgtatacgatgaaaagaaattaaaaaaacttggaatgaataccttacttggtgttggccagggaagtataagagggtcatatcttgttacaatggaatggaatggtttgagtaaaaaaactaaaccattggcatttgttggaaaaggagtttgctttgataccgggggaatatctttaaagcctgcaaaattcatggaagatatgacttatgatatggctggttctgcagtggtagtgggactaatgaaaagtttggcgcttagaaaagcaaaaataaatgctgttggggttgtaggcttagttgaaaacatgcctggaggtaatgctcaaagaccaggagatatagttaagtcctatagtggaaaaactgtagaaattttaaataccgacgcagagggtagattggtattagcagatgctcttacttatacagaagaaaaatttagaccaaaatttatagtagatttagcaactttaacaggagcaatcattgtttctctaggatctgaatatgcaggtctattttctaatgatgataaattgtcaaatcaattaattaaagctggagaaaatatggaggaaaaagtttggaggatgccattaaataaaaattttgacaaattaattgactctaaaaatgcagatatgcaaaatattaattatgttggcggggcaggatcaacaactgctgctcaatttttgcaaagatttatcttaaataaaacaccttgggcacatttagatatagcaggaatggctttttcaaaatatggaggagcattaaattctggtggtgcaacaggttacggagtgagattattaaataaactaatagaggatcattatgagtaa

SEQ ID NO: 261912 - DNA, 1888 bp, Unknown
  Bacterial polypeptide expressing nucleotide sequence isolated from the Sargasso Sea
atgctgctgccattagtacaatatgccaatgcggccaatatcttaccgaatacgagccaagccagcgtcaccgccagccaaaagcactctgtcaccgatgagctgacctttgccaattaccagcaagtgagcattcatcacatcgcattggcattaaacgtagattttgcacagcagcaactctcgggggacgcgattctcgaactggattggcatcaggccggaaaagtgctggtgctcgacacccgtgaccttacgattaagagtgtcagcatgttaaatgcaaacggccaatggcaatccgtgccctttagtttaggctcggtcgataaggttaaaggcgcagcgctcaccatcaatctgcctcaagagcgagtcgctaaggtcaaagttaattaccatacctccaagaatccatccggtattcaatggctgactccagagcaaacccaaggtaaacaatggccatttatgtttagccagagccaagccatccatgccagaagctggatcccgctacaagatacgcccgcagtgcgccaaacctacagcgccaccgtcaccgctaagcaaggcattaatgtcgtgatgagcgccagccgaaagagcgtgtctgcgacgcaaactcaattcactatgccgcaggcgattccggcctatttgattgccattgccgcgggacacctgcaatttgccaccttagacgacacctcaggcatttgggccgagccagaaatgcttgccaaggccagcaaagaatttgccgatacaccggagatgattgccatcgccgccaaacgctacggcgattaccgttggggtcgatacgatttactgatccttccgccgagtttccccttcggcgggatggaaaatccgcgcttatcctttattacccccaccgtcatcgcgggagataaaagcctagtgagtttaatcgcccacgagctggcccattcttggtcgggcaatttagtcactaacgccacctggcgcgatctctggcttaacgaaggttttaccacctatgtggaaaaccgcattatggaagatctctatggccgcgaccgcgccctgatggagcaaaccattggttactctgagctattggccgaattagccgagttgcccgctggcgattcagtgctgcatattgacttaggcgatcgcgatcccgacgatgcctttagcggcgtcccctatgtgaaaggacaattatttttgcgcttccttgagcaaaaatttggccgcgaacggttcgacacctttgtgaaaagctacttcgatcactttgcgtttcaaagtattactacggagcagttccgaagttaccttacgcagcagttattgcaaaaatatcccaatatcgtcagtgaatctgaagtggatacttgggttgagggacaaggtttacccagctttttagtgccaccgaactcacacgctttcgatgatatcgatgcccagcgccaagcgtggttagaaggcaagcgtgaggcccgcgcgctaaacactcaggactggactgtgcatcaatggctacgctttattaatgaaatgccaaggctaaatctcacagagcagcaattagccgagttagataaagcctttcattttactggcacccacaataatgaaatcgcctttgcttggtatgccctcgccctcgataacggttattacagtgtgttgccggcactgaaacaacatttaaccgagattggccggcgcaggctaattgtgcctctgtatcaaaaactggcgagcagcgagcactatgactgggcaaaagctgtttatttggcggcccgcagtggttaccacccacagacccaagccagtctcgatatgatgtttagtgataaaccaatggagcatacccattaaa

SEQ ID NO: 261913 - DNA, 979 bp, Unknown
  Bacterial polypeptide expressing nucleotide sequence isolated from the Sargasso Sea
ttgaatgcattattagatggagttttttttacaagagatttagtttctgaaccaggaaatattttacatccagatgaatatgcaaaacggttagtaaaattaaaaaaaaatggattgaaagtaacagtttataataaagagaagttaaaaaaattaggatgcaatgctttgcttggagttggacagggaagtgttagaggttcttatcttgtaactattgaatggaaaggaaataaatcaaaatcaaaacctttagcatttgttggaaaaggagtttgttttgatactggtggttactcgctaaaaccagcaagatttatggaggatatgacttatgatatggcaggctcagctgctgtagtaggtttaatgaaaactttagctttaagaaaagcaaaaattaatgcaataggtgtagttggccttgttgagaatatggtaagtggaaatgctcaaagacctggtgatattgtaaaatcttatagcggaaaaactatagaagtattaaatactgacgctgaaggtagattagttttagcagacgctttaactttcactgaaaaaaaatttaaacctaaatttatgattgacttagcaactttaactggtgctatcattgtttcgttgggttcagagtatgcagggcttttttctaacgatgataaactatcaaaacaattacttgaagctggtgaaagagttgatgaaaaattatggagaatgcctcttcacaaaaactttgataaactgataaattctaaaaatgcagatatgcaaaatattaattatgtaggtggcgcaggatcaacaacagctgcacaatttttgcaaagatttattattaacaaaactccttgggcacatctggatatagctggaatggctttttcaaaatacgctggggcgctgaactcaggaggagcaaccggttatggagttagactattaaataaatttgttgaggagaactatgagtaat

SEQ ID NO: 261914 - DNA, 850 bp, Unknown
  Bacterial polypeptide expressing nucleotide sequence isolated from the Sargasso Sea
tatgaatgagaaaaaattaaaaaaacttggtatgcatgctttacttggagtgggtcaaggaagtattagaggatcatatcttgtaacaatggaatggaatggagctaaaaacaattctaaaccactagcttttgttgggaagggagtttgttttgatactggtgggtattcattgaaacctgcgagatttatggaagacatgacttatgatatggcaggctcagccactgtagtaggcttaatgaaaagcttagctttgagaaaagcaaaaattaatgcagttggtgtagtgggtcttgtagaaaatatggtcagcggaaatgctcaaaggcctggagatattgttaaatcttatagtggtaaaactatagaagtattaaacactgacgctgaaggccgattagttttagcagatgctttaacttttacagaggaaaaatttaaaccaaaattcattattgatttagctaccttaacaggtgcaataatagtttgtttaggatcggaatatgcaggacttttttcaaatgatgatcagttatctaaaaaaatttttaatgcgggtgaaaaggtagaggagaaagtatggagaatgcctcttcataaaaattacgataaacttatgaattctaaaaatgcagatatgcaaaatataaattatgttggtggagcaggatcaacaactgcagctcaatttttacaaagatttattttgaataaaactccatgggctcatctagatattgcaggtatggctttttcaaaatatggaggtgctttaaattcagggggtgcaactggttttggggtaagattattaaatcaattaattgaagaaaattatgagtaa

SEQ ID NO: 261915 - DNA, 985 bp, Unknown
  Bacterial polypeptide expressing nucleotide sequence isolated from the Sargasso Sea
aataagttaaatgctcttttgcaaggagttttccttactagagatttagtctcagaacctggcaatattctacatccagatgaatatgcaaagagaattgttaaattaagaaaatttggattaaaagttaaagtctacgatcaaaaaaaattaaaaaaattaggttttaatgcattactcggtgtaggacagggaagtataagaggttcttatatggtgactatagagtggaacggaagtaaaaataaatcaaaacctttagctttcgttggaaaaggcgtttgttttgatactggaggtatctcacttaagcctgcaaaatttatggaagatatgacttatgatatggcaggttcagcaactgtagttggtcttatgaaaaccctggctttaaggaaatctaaaatcaatgcagttggagttgtaggattagttgaaaatatgcctggagcaaacgcacaaagaccaggggatattgttaaatcttacagtggacaaacgattgaagttttaaatacagatgctgagggtagattagttttagcagatgcacttacatacactgagaagaaatttaaaccaagtttaattattgacttagcgacactaactggagcaataatcgttgcactaggatctgaatatgctggattatggtcaaataataaaaagttatctaaacaactttttgatgctggagaacaggtagaggaaaaagtatgggaaatgcctttacacgaaaattacaataaattaatgaattcaaataacgctgatatgcaaaatattaattatgttggaggagctggatcaactaccgcagctcaatttctacaaagatttataattaacaaaacgccttgggcacatttagatattgctggaatggcgttttcaaaatatgctggagcattaaactctgggggtgcaactggatatggcgttagattactaaataaatttatagaggagtattatgaataat

SEQ ID NO: 261916 - DNA, 1170 bp, Unknown
  Bacterial polypeptide expressing nucleotide sequence isolated from the Sargasso Sea
tttggataatgaattatttaaagatcaattatttatacaaagagaatataaaaatataaattatatttttattaattgtaaaaaattaaagatatcatctgattacgaaaatattggttcaaaattatttgattatttgaataaaaataaaatagaaaactcttatattgatattagcaaaattgatatcaaccttacacaattagaaaaggttatacacggtgcaaagctaaaatcttacagttttaacatttataaatcgaataacaaaaaaaataaaaattttaatttaaatattgtaggcatacaaacaactaaatctaacttattaagaaaaaaattagatgcattattagaaggagttttctttacaagagatctagtttctgaacctggaaatattttacatccagatgaatatgcaaaaagattacttaaattaaaaaaaattggactgaaggtaacagtttataatgaaaaaaaattaaaaaaattaggttgtaatgctttgcttggagtggggcagggaagtattagaggttcttatcttgtaactgttgaatggaaaggaaataaatcaaaatcaaaacctttagcatttgttggaaaaggagtttgttttgatactggtggttactcgctcaaaccagcaagatttatggaagatatgacttatgatatggcaggttcagccgctgtagtaggtttaatgaaaactttagccttaagaaaagcaaaaattaatgcagttggtgtagtaggtcttgttgagaatatggtaagtggaaatgctcaaagacccggcgatattgtgaaatcttatagtggaaaaactatagaagtattaaatactgatgctgaaggtagattggttttagcagacgcattaactttcactgaaaaaaaatttaaacctaaattcatgattgatttagcaactttaactggtgctatcattgtttctttaggttcagagtatgcggggcttttttctaatgatgataaactatcaaaacaattagttgaagccggtgaaatagttgatgaaaaattatggagaatgcctcttcacaaaaactttgataaactgataaactctaaaaacgcagatatgcaaaatattaattatgtgggtggtgctgggtcaactacagcagctcagtttttaca

SEQ ID NO: 261917 - DNA, 868 bp, Unknown
  Bacterial polypeptide expressing nucleotide sequence isolated from the Sargasso Sea
aatgaaatgtactgtattttcaaaaaatgaaataaaatctaaaagactgggcggtgtaacagcagttggacagggaagtaaaaatgaacctagattcataattttagaatatagaaatgggaagaaagagcaaaaaccaattttacttgtaggtaaggctgtaacttttgatacaggtggaatttctttgaagccaggagaaaagatggatgaaatgaagtttgacaaatgtggaggatgtacagtattaggtgtaatgaaagcaatttcagaattaaaacttccaatcaatgtgatagcaattgttccttctgttgaaaacatgccaagtggagatgcatttagaccaggagatattgtcaaattatttaatggaaagactgcagagattctaaatacagatgcagaaggaagattgattttagcagatggacttgcttatggaataaaacatttccaaccatcgtcggtaatggattttgcaacgttaactggagcttgtattgtagcattaggaactaatgttgcaggaatcgtaagtaataacacaaaacttgcaacaaaggtcaaatcatcatctgcaaaaacttcagaagaagtttgggaacttccaataaatgatgattatatggacatggtaaaatcaaaggttgcagacattagaaatcttggaatgggaagagccgcaggaactattacagctgcagcatttttagcaaatgcagtaggaaatgtgccatgggttcatttcgatattgcaggaactgcatggatacagccatctacaaaaagtaaatcttacaattcacacggtgcaacaggatttggtgtgagactagtagtagattatctaatgaatcagaaataa

SEQ ID NO: 261918 - DNA, 1223 bp, Unknown
  Bacterial polypeptide expressing nucleotide sequence isolated from the Sargasso Sea
cttgagtgaaggcgatttcaaagctaaggctggttcagcaatgacactggctggaaccgacggcggcaaagcaatgctaatcggcttaggaaaggcagaagatgctaatcttcaatcgatgagagaatcaggagcaaaggttacagcaagtctttctaagattcatggcaaaactatcaccgtcaagttctccggtatggagagtgcagacatgggagcattcgtcgaaggcatgattttgagagattattcctatgacaagtacaagtcaaaggatgaagatgatgactctgatgatggtgaagtacatgcgcatgttacatgtgaagcagagaagattgaagatcttcaaaaatcagcaaaactgtctcaagcagttgcatctggagtttacctagctagagacctaggtaatgcaccacctaacgacctataccctatggcattcgcagagcaagcaatcgaatttggtgcaaagcacgacaatgtaaaggtcacaatcatcacttacgaacaagccatttccatgggaatgggtgggcttgttggagtaggtatgggctcggcaaggaaaccatgtatggtaatattcgaaatcaatccagatatgcctggaccaagtccatgtattgtcggaaaaggaatcacattcgatactggaggaatttcgttgaagccaccgccctcaatggatgagatgaagtacgacatgcatggttctgcaaccacctttggtgtaatgcaagcaatcgttgctagcgggcacaaggacagggtaatcggcgtcacatgtatggcagaaaatatgccgtcttctaacgctcaacgcccaggtgacgtaatcaagacatactctggtaagaccgttgaagttctgaacacagacgcagaaggaagattggttttgtccgatggattgtggtacacaggaactcatctgaacccgtcttacattatcgatttggcaactctaaccggagcttgtgtcgttgcacttggtcacgaagcaagcggcctatggtccaatgacgatgatttgagaaacaagatcaaggaagcaggagaacactgtggagaaatcgcatggcctatgccactgttcaaggcattcgagaaggaaatgactgactccaagattgcagatgttcgcaacctcggtgctggccgctggggtggttcaaacaccgctgcggctttcttgaagcaatttattccaaacaagg

SEQ ID NO: 261919 - DNA, 1522 bp, Unknown
  Bacterial polypeptide expressing nucleotide sequence isolated from the Sargasso Sea
tatggatattcaatttaataatataagacaagaaaaagatgctgtaggagtagtattttgtgacagtaagtgtcggcttataggatatggaaaaaaattagatcagctttccaaaaaatatatatcaaatattattaaatcagacatatcgtttcaggaaagaaattctaaaaactttgattattcaataatacaccaacctgcaaatttaaagctttcaaaattatacgtatttaaattaaaaaattttaaggactatcaaataagggattttcaggtcctaggtggccatttaaattctctcatcaaattctataaggaaaccaatgtaatagtatatcccgatggcatttcttcattaaaagtcggttcattaaatgccataagtgaaatgattcttggaatgtcattagcttcatatagcttcacaaagtacttttctaaaaaagatgacaaaaaaaataaaactaaaactataaagaaaaaagtaaaaatctattcatctcagcatactcgactttcaaaaaattatgaaagtataagtgcaatacatcagggcgttactctaacaagaaacctagttactgaacctccaaatgtgatgaccccaccaaaaatcgctgaatatgcaaaatcacttggtgaatacggtgttgatgtaaaagtattaggtgaaaaagaaatgaagaagctcggtatgggatctttattgggtgtaggccagggcagcatacatgagtcacagttggttatcatgaaatggaatggtgcaagaaataagaaaaaaaaaccaatagcatttattggtaagggtgtttcatttgacactggaggcgtatcattaaaaccttcaaatggtatggaagaaatgaaatatgatatgggtggctcaggagttgtaattggtttaatgaaagccctttcaataagaaaggcaaaagccaatgtaattggtgttgtaggcctagttgaaaatcatattggtagcaaagctcaaagaccgagtgatgtagttaagtcttattcaggtcaaacgatagaggtattaaatacagatgcagagggaagattagttcttgctgatgctctatggtacacgcaagagcaatataagccagagcttatggttgaccttgcaacattaactggagctataatcgttgcattaggtgatgaatatgcaggacttttctcaaatagtgacaaagtaagcaagcagctatcagatgctggagatattgagggagagaaattgtggagacttccccttaatgataggtatgacaaaatgttaaattcacccattgcagatatgcaaaatattacaaatggtagaggtccaggttctattacagcagcacaattcttgcagagatttgtaaataaagttccgtgggcacaccttgatattgctggaactacatggactaagcaaccattgccaacctcgccaaagggcgcaacagcttttggtgttaagcttttaaatagatttgtatctaaatattatgagggtaaatag

SEQ ID NO: 261920 - DNA, 856 bp, Unknown
  Bacterial polypeptide expressing nucleotide sequence isolated from the Sargasso Sea
ggttctgataaaaatgaaatatcaaaaggagcaatgatcggtaatgcagtttgttttgctagagacctgggaaatcatcctggcaatgtgacgactcccagcaaattagcatcgtctgcaaaagatattgcagatgagggtggtatggatctaacagtattcgaaagaaaagagttcacagaaatggggatgggtggtctcgcaggtgtagcacaaggtacggatgagccgccaaaattcattattctagagtatatgaaaggtggtgacaaaaagcctaaggtattagtaggcaagggattgacatttgactcaggtggtatatcgatcaaacccgctgggagaatggatgaaatgaaatatgatatgtgtggttctgcggttgtccttggagtttttaaagcgcttgctttgttaaaacctgaactgaacgttgttggcatcattccatcaacggagaatctaaatggtgcaaaagcctataaacctggtgatatattaaaagcttataatggtaagaccattgaggtccttaatacagatgcagaaggccgtttaatacttgctgatggactctcctatgcttctaaacattatgaccctgagtatatacttgattttgcaaccctcaccggtgcaatggttgtgaccttaggacatattgcaacaggcgtcatgggtacagatgataatcttatagataaagtgcttaaagcatcaaaagcaacaggcgagaaagtttgggagttacctctttgggaagagttctgtaaacagattcagagttccatcgctgatgtcaagaatcagggctcaccgccgcaagcgggtactattgtcgctggagcattttaaa

SEQ ID NO: 261921 - DNA, 1882 bp, Unknown
  Bacterial polypeptide expressing nucleotide sequence isolated from the Sargasso Sea
ctgccattagtacaatatgccaatgcaaccaatagcttacctaatagtaatgttgctagcgtcgcctccagccaattgcatactgccaccgatgaactgacctttgccaattaccaacaagtaagtattcgccacattgaactcgcattaaatgtggattttgcgcagcaacaactttcgggcaacgccattctcgagctagattggcataaagcaggcaagatgctggtgttagatacccgtgacctgacgattaacagtgtcagcatgttaaatgcaaacggccaatggcaatccgtgccctttagtttaggtgcgaccgataaggtcaaaggcgcagcgctcaccatcaatctgcctcaagagcgagtcgctaagatcaaagttaattaccatacatccaagaatccatcaggcattcagtggttaactccagagcaaacccaaggtaagcaatggccatttatgtttagccagagccaagccatccatgccaggagctggatcccgctgcaagatacacccgcagtgcgccaaacctacagcgccacagtcacagcgaagcaaggtattagtgtcgtgatgagtgccgaccgagagagtatgtctgcaacgcaaacccaattcactatgccgcaggcgattcctgcctacttgattgccattgctgcgggacacctgcaatttgccgccttagacgacacctcaggcatttgggctgagccagaaatgcttgccaaggccagcaaagaatttgccgatacgccggagatgatcgccatcgccgccaaacgttacggcgattaccgctggggtcgatacgatctgttgatcctcccgcccagcttccccttcggcgggatggaaaatccgcgattatcctttattactcccacagtcatcgcgggagataaaagcttagtgagtttaattgcccacgagctggcccattcttggtcgggcaatttagtcactaacgccacctggcgcgatctctggctcaacgaaggttttaccacctatgtggaaaaccggattatggaagatctctatggccgcgaccgtgcattgatggagcaaaccattagttactcagagctgctggcagaattagccgagttacccgcaggcgacaccgtactgcatattgacttaggtgagcgcgatcccgacgatgcctttagcggcgtgccctatgtcaaaggacaattattcctgcgtttccttgagcaaaagttcggccgtgaacgcttcgataactttgtcaaaagttactttgatcattttgcgtttcaaagcattaccacggagcagttccgcaattacctcacgcagcagttattgcaaaaatatcccaatatcgtcagcgagtccgaagtggatacttgggttgagggacaaggtttacctagctttttagtgccccccaactcacacgccttcgatgatatcgatgcccagcgccaagcatggttagaaggcaagcgtgccgccagcgccctaaacactcaggactggactgtgcatcaatggctacgctttattaatgaaatgccaaggctaaatctcactgagcaacaattagccgagttagataaggcctttcattttactggcacccacaataatgaaatcgcctttgcttggtatgccctcgccctcgataacggatactacagtgtcttaccagcactgaaacaacatttaaccgagattggccggcgcaggctgattgtgcccttgtaccaaaaactggcgagcagcgagcactatgactgggctaaagccatctaccttgcggcgcgcagcggctaccatccacagactcaagccagtttagatatgatgtttagcgataccccgattgaacacgagcattaac

SEQ ID NO: 261922 - DNA, 757 bp, Unknown
  Bacterial polypeptide expressing nucleotide sequence isolated from the Sargasso Sea
ttgacctggacgcccaagggtcggccgaagggcacgctggctctggtgggcaagggtctgacgttcgatgccggtgggctgtccatcaagtccggtcaggggatgatggacatgaagatggacatgggtggcgccgcggcggtggtgggcgccatgtcggtgatgccggacgtcgcaccccggtgtcgggtccgggcctacctaccgatgaccgacaacatgctgggcggggacgccacccgccctggtgacgtgttgaccatccgcaatggcaagaccattgaggtacttaacaccgacgccgagggtcggctcgtgctggccgatgcactgtcgttggcatcggagggcaagcccgatgcggtgatcgatctggccacgctgaccggtgcctgcatggtggccctcggcccacggatcgccggcctgatgggtcggggggacggtttcctggagcaggtggaggcggcatcgtcgaggaccggcgaacgggtgtggcgcctgccgctacccgacgactatcggcacatggtcgactcacccgtggccgacatgaagaacatcggcggtccacacggtggggccatcaccgccggtctgatcctcggcgagttcgtagccgagggcatcgactgggcacatctagacatcgccggcccggcgttcaccgactcggacgacgccgaggtggtccggggtggaaccgggttcggagtgcgtctgctagtcgatctggcgagctccttcacggcttaat

SEQ ID NO: 261923 - DNA, 1219 bp, Unknown
  Bacterial polypeptide expressing nucleotide sequence isolated from the Sargasso Sea
cctatcccttcgtatcttattgcgttggctataggtgatttagaatttaaagccatgggtgagcgtaccggtgtgtatgctgagcctgcgctacttgaaagtgcagcgaaagaatttgaagatacagaggcgatgttagaagtaacagaagaaacctatggaccttaccaatgggaccgttacgatctgctaattctaccaccgtcattcccgtttggcggtatggagaaccctcgtttgtcgtttatcaccccaacggtcattgctggtgataaaagcttagtttcattgattgctcatgaattggcgcacagctggtctggtaacacggtaacaaacgctacatggcgcgatctgtggctaaacgagggcttcacaacctacttaacttaccgaattatggaaatgatctacggtcacgatcgttttaaaaaagaagcggtgctcggttatcaagacctggagaatgatgttgctgcattagaggaaaatgatgagatcctggctatcgaccttcgtggtcgcaatccggacgatgttttctcaaatattccttatgaaaaaggcgcactgttcttacgtgaaattgaacaaaagattggccgagaaaactttgatgctttcttaatgcagtattttaaagactttgcttttaagagcattactaccgacacgtttattgcttatttagatgataccttgttaaaacagtatccagataagctagacgcggagcgcattcaaacgtggatttttgaaccaggcattcccgagggggcgccacagccagaatctgatgcgttcactaaaatcgatgacacacgaagcgcttggctttctggcgacgtgaaagcggcggatattgaaaccgcgcagtggactgtacacgagtggctatattttctaaacaacatgcccgaatcgctaagcagcgcacagctggctgagctagattcagcgttttcactcacctcgactaaaaacaacgaaattgctcatagctggttgatgatcgcagtagagaataactatcagcctgcctatgatcgtttgtatagctacttggtgtcgatagggcgcaataagcttgttaagcccctttatcgtgagctatcaaaaacacctgaaggcaaggcgtttgctaaacgcgcatttgaagaagcgaaaccgggctatcacccacttacagtgaaagctaatgaagtctatgtgaactaag

SEQ ID NO: 261924 - DNA, 1294 bp, Unknown
  Bacterial polypeptide expressing nucleotide sequence isolated from the Sargasso Sea
aatagtataaaagatagcaagctaaaaacagtttatatttgtggattaggaagtaaaataaaggacctaaatgcattagattttgagaaaattggtggaagaattactgaattaactaaattaaaaattaaaacttccgtaatcattgataaagaaattaataataatgaaaatataatgagacttggatatggctcaattcttggttcatattcttttaataaatataaaacaaaaaattttacaaatcataagatttcaaaaattgagattgtttcaaataattatacaaagcttaacagagatttcaaaagatatacctccatctcagatggtgtcttttatgcaagagatctagttaatgaacctagtaatgttttatttccaaaagcatatgctcaaagaattcagaaacttcgacaatacggtttaaagattgaagtgcttggtgaatcaaaaatgaaagctcttaaaatgcactcacttgttggtgttggacaaggaagtcaaagagaaagtcaattagtgataatgcattggaatggaaataaagctaagaaaaccaagcctctctgttttgtaggaaaaggagtttgttttgactcaggtggtatatctattaaaccaagtaacaaaatggaagagatgattggtgatatgggtggatctgctgcagttgttggtacgatgctatcactagccaagagaaaagctaaagtaaatgctattggtattgttggtttagttgaaaatatgcctgatggcaaagctcagaaacccggtgatataattaaatctatgtccggtcaaaccattgaaattcagaatactgatgccgaaggaagattagttctggctgatgcattatggtatgcgcaaaaaagatttaaaccagagtttatgattgatctagctacattaacaggagcaatggttatttcgttaggtagtctaattgcaggattattttcaaatgacgataggttgtcatcaaagttaattgatgcaggagaggagagtggagaccaagtatggcgttttccacttaataaatcttacgataaattaataaactcaaaatttgctgatatgaagaatattggaatgggtggagctggatcaattacagccgcacaatttcttcaaagatttgttaataaagttccttgggcacatttagatattgctggaacagctacaggtatgccaaaaacatctacaaacactagctgggcaacaggttttggagtacatttattagatacttttgtcaaaaagttctatgagaaataag

SEQ ID NO: 261925 - DNA, 1347 bp, Unknown
  Bacterial polypeptide expressing nucleotide sequence isolated from the Sargasso Sea
tttttgaatcaagttttgaaaaaaaagaagactttataagcgataatgaaatatttcaggaatacatttccacccattcttttgaaggaaaatccaatgagttattattcatgcctccttcaatgtcatcaaaaaataacaaaacgcttttaattgggtgtgaagacatctctcaaaacaataaagaattattggaacttggatattcaattggaagcaagctaaaagataattgtgaattgaatatccttaattttaaaggagataaagatgcaattatattgggaattttactttctaaatataattttgataaatatctatcagacgataaagatgtggtcgaaataagttttaatgaatcatttgaagttgagtcgtcgataaataagagagactctatcttttgggttagagatttaataaatactcctgcttttgatagatctccagaatatttcattgaacaagttgaattgattacatctaataaagaaataaatgtagaggtccataataaagagtggcttgaaaaaaataattttggaggagttcttggtgtagcacaaggttctgtaagagaaccatattttctaactggacaatataatcctgatgcaaaaatacagattgcattaattggaaaaggcgttctctttgattcaggaggtctttcgctgaaaagcccttcaggaatggagactatgaagactgatatgtcaggagctgctacagcatggggagctattaatttattagctcaaaataaaattgatgttggcttaacagtttataccccacttgttgaaaatatgccaagtggttcagcaataagaccaggtgatgtgctcacaactagaaatggaaaaacaattgaggttttaaacactgatgcggaaggaaggcttattatggccgacgctttggcctatgctgctgaaaaaaaaccagatataatttgcgatgttgcaacacttactggtgcggcagtagcagctctcggattagatgttggtgcgcttttttctaatgatcctgagcttgaatctttgtttatgaaagctagtgcaatatctttagaaccctaccatcctttacctttgtattctgactataagaaacttgtagaatcagatattgctgatatgaagaatactggaggcagatatgggggagctataactgctgctttgattcttgaagaatttatagatgaaaataaatggatacacttagatattgctgggcctgctaggtcagacaacaggaaaggggctacaggatttggggtcctttctctttacgaattttttaaaagtatttctactgatcttcctgagaattagc

SEQ ID NO: 261926 - DNA, 1330 bp, Unknown
  Bacterial polypeptide expressing nucleotide sequence isolated from the Sargasso Sea
atgacagttcaaattaattataaaaatagtggcacaaaaaagatttcagcaaattttatattatttgttgatgaaaaattcaatattagtagtttaaaaaaacatgcctcaaatcatgagttttcatacatatctgacctattaaaaaccacggatataaaaaaaaatttacttgtttttaatataaattcaaaaaaaaagattattttagtttcagtcaaaaaaaattatcttgcaatagatgttgaaaacttaggtgcagagttgtttagtcaaattaataatggaaagaaaagcgaatatataattaattcagacttaataagtagtaaaatagaaaattttttagggcatttacttcatggtttaaaattaaaatcttataattttaataaatataaaacaaaaaaagaatcaagacttattactataaatgtaattggaaataaaaataaaccttcggttcaaaatcaattaaaatttaaagctctagaggaaggaactttttatacaagagatcttgtatctgaaccaggaaatgttttacatcctgacgagtatgcaaaaagattaaactccctaaagaagcatggtttaaaagtaaatatatatgatgaaaaaaaattacaaaagttaggcatgaacgctttactaggtgtaggccagggaagtatcagaggatcatatttggttacaatagaatggaatggattaaaaaataattctaaaccactagcttttgttggcaaaggtgtgtgttttgatacaggtggttattcacttaaaccggcaaaatttatggaagacatgacctatgatatggcgggctctgcaacagtagttggtttaatgaaaagtcttgctttaagaaaagcaaaaattaatgcagtgggagttgttggactagtagaaaatatggttagtggaaatgcccaaagacctggggatatagttaaatcctatagcggaaagactatagaaattttaaatactgatgctgaaggaaggttggttttagcagatgccttaacatttacagaaaaaaaatatcaacctaagtttattatagatttagcaactttgactggtgccattatagtttcattgggatcagagtatgcaggacttttttcaaataacgataaattaacaaaacaactacttgatgcaggagataaagttgaagagaaactttggagaatgcctttacataaaaactttgacaaacttataaattcaaaaaatgcagatatgcaaaatattaattatgtaggtggagctggatctacaaccgctgctcaattcttacaaaggttttattttaaacaag

SEQ ID NO: 261927 - DNA, 1356 bp, Unknown
  Bacterial polypeptide expressing nucleotide sequence isolated from the Sargasso Sea
tagggcagcaattaaatattattgcaccttctggtagtagaatcgatgaggttattataataggcttgggtaaagcctcagagctcacagagctagaacttcagaaaatgggaggtgctatctatgcgaaaacaaatagagtcaaaagtggcacagttcatgtaattttagataatgtagctggctcaggaatgccagcgtcaaagatggcagccgaaatagcctatggcgcccgtttgagatcctatcggtttgataaatacaaaacaaaacaaaagtccgaatcaaagccaaatattaaaaatttaaaccttctttgtagtggttccaaggcggcaaaggatctttttagaaaattagataagattgttgaaggtgtttttttcacgagagacctagtgtcagaacccccaaatgtactgtatccagagacgttagctaaggaggcgagaaaattagaaaaacttggcattgctgtggaggtcatgggcgaaaaccaaatgcgtcgtcttgggatgggtgctttgcttggtgtaggacaagggagtgttcgggagtctaaattggtcgttatgcattggagaggcaaagcaaaaaataggggaaaacttcttttaagtgacaatcctatttcatttattggaaagggagttacctttgataccgggggtatttctattaagccgtcggctggaatggaggatatgaagtgggatatgggaggtgctggggtagttgttggattgatgaaggctttagctggacgacgcgcaaaggtcaacgttgttggtgtagttggactagtggaaaatatgcctggcggcaatgcccaaaggcctggtgacatagtttcttctatgtctggtcagacaatagaagtattaaatactgatgccgagggaagattggtgttggctgatgcattatggtatacaaataagcgttttaagccaaaaatgatgataaacttagctaccttgaccggtgcaattatagtcagcttggctgacaaatatgcggggttgttctcaaataatgacgtattatgtgatagactttccaaggctggtgaggaagtcggtgagctagtttggcgccttcccttatctgcagaatataataaaatgatagattcagatgttgcagatatgaagaatattggtggtaggggtgccggaagtataactgcagcacaatttttgcagcgctttgtcggagatactcgttgggctcatttagatatagctggcgtaacttggacaaaaacaaactccccaatagtacctaaagggggcacggcatttggcgttcggttgctggataagctagtacaaaaccactatgaagataaataaa

SEQ ID NO: 261928 - DNA, 1330 bp, Unknown
  Bacterial polypeptide expressing nucleotide sequence isolated from the Sargasso Sea
gggttttgggtttaagcttaatgagatcattgaaataaacaatataaaagataaaaagctaaaaacagtttatatttgtggattaggaaacaaaactaaagatgtgagtgcgttagattttgaaaaaatcggaggaagaattactgaattaacaaagttaaaaaccaaaacttctgtaatcattgataaagaaatcaataataatgaaaatataatgagacttggctatggctcaattctcggctcatactcttttaataaatataaaacaaagaatctcacaaatcataaactttcattaattgagattgtttcgaataatcatactaaacttaataaagacttcaaaagatatgcctccatctctgacggcgttttttatgcaagagatctagttaatgaacctagtaatgttttatttccaaaagcatatgctcaaagaattcagaaactgcggcaacatggtctaaagattgaagtacttggcgaatcaaaaatgaaagctcttaaaatgcactcacttgtaggtgttgggcaaggtagtcaaagagagagtcaattagtgataatgcattgggttggaaataaagctaagaaaactaaacctatttgttttgtaggaaagggagtttgttttgattctggcggtatttctattaaaccaagcaataaaatggaagagatgattggtgatatgggtggatctgccgcagttgttggagctatgttatcactcgctaagagaaaagctaaagtaaatgctattggtattgttggtttggtggaaaatatgcctgatggcaaagctcagaaacctggtgacataattaaatctatgtcggggcaaaccatagagattcagaatactgatgctgaaggaagattggtacttgctgatgcactatggtatgcacaaaaaagatttaagcctgagcttatgattgatttggctacattaacaggagcgatggttatttctttaggtagtttaattgcaggattattttcaaatgatgataaattatcatcaaagttaattgatgccggagaggaaagtggagaccaagtatggcgttttccacttaataaatcatatgataagttaataaactcaaaatttgccgatatgaaaaatattgggatgggtggagcaggatcaattacagctgcacaatttcttcaaagatttgttaataaagttccttgggcacatttagatattgctggaacagctacgggtatgccaaaaacatcaacaaatacaagctgggcgacgggatttggagttcatttattagatacttttgtcaaaaagttctatgagaaataa

SEQ ID NO: 261929 - DNA, 883 bp, Unknown
  Bacterial polypeptide expressing nucleotide sequence isolated from the Sargasso Sea
cttggaagtatcagaaaataaacaaaatgttattatttcaaaattattacttgggtttaaattaaagtcatattcgttcttgaaatataaagaaaataataaaataaatactaaaaaaattgagtacgtcaaagtattaaaaaaagaaaaaaaaatattagaacaacagcttcacctaaatgataacttaatttcaggaatatttttttcaaaagatttaacttttgaacctccaaattttcttaccccgcaagaatttgtaaatcaaataacttcattagagaaaattggtattgaaatagaagttttaaatgaagaaaatatgaataaattgggcatgcattcacttctaggtgttggccgtggtagtgccgaaaaaagctatcttgttataatgaagtggaatggtagtccaaattcaaagaaaaatattgcatatgttggtaaaggtgtttgttttgactcaggaggactttctttaaaaaccccgcggggaatgattgacatgaaagaggatatgggcggggcaggtattgtagtaggggcaatgaaagcaatagctcttcaaaaagttaaaagaaatgtaattggagttgtgggtttggttgaaaatatgccaagttcaaacgctcaaagaccaggtgatattgttaaatcaatgtctggaaaaactatagaaattttaaatacagatgcagaaggaaggctggttttagctgacgctttatattttacaataaaaaaattcaaaccagattttgttatagatcttgcaactttaacaggggctataatctctgccttaggaaaggagagggctggattattttccaatgacgacaatttgtcagaatacatttttcagactggtgaaaaggaatag

SEQ ID NO: 261930 - DNA, 751 bp, Unknown
  Bacterial polypeptide expressing nucleotide sequence isolated from the Sargasso Sea
ggtaataggtcaaaaagtaagccattagcatttgttggtaagggcgtatgttttgatactggtggctactcgctaaagccagcaaggtttatggaagacatgacatatgacatggcgggttctgctgctgtagttgggttaatgaaaactttagctctaagaaaagcaactgtaaatgccgtaggtgtagtaggtttagttgaaaatatggtaagtggaaatgctcaaagacctggagatatcgtaaaatcctatagtggaaaaacaatcgaagtattaaatacagatgctgaaggtagattagttttagcagatgcacttacttttacagaaaaaaaatttaaacctaaatttataattgacctagcaactttgactggtgcaataatagtttctttgggatcagaatatggaggactgttttctaataatgataaactttccaaacaattaattgatgctggtgagaagactgatgaaaaattatggagaatgcctctacataaaaactttgataaattgatggactcaaaaaatgcagatatgcaaaacataaattatgtaggtggagcaggctctacaacagcagcacaatttctacaaagatttattttaaataaaacaccttgggcccatcttgatatagctggtatggctttttcaaaatatggcggagcattaaattcaagtggagctacaggttatggagtaagattgctaaataaattagttgaagataattatgagtaat

SEQ ID NO: 261931 - DNA, 498 bp, Unknown
  Bacterial polypeptide expressing nucleotide sequence isolated from the Sargasso Sea
caatgtctggtcaaacaatagaaattcagaataccgatgctgaaggaaggttagttcttgctgatgccttatggtatgcgcagaaaagatttaaacctgaacttatgattgacctcgcaactttaactggtgcaatggtgatttcattgggaagtttaattgctggattgttttcgaataacgataaactatcaaaaaatttaattgatgctggagaagagagtggtgacctagtttggcgttttcctcttaacaagtcttacgataaattaattaattcaaaatttgctgatatgaaaaatataggtatgggtggagctggatcaatcactgctgcccaatttctccaaagatttgttaacaaagttccttgggctcatcttgatattgcaggtacagcaacaggtatgccaaaaacttctacgaacacaagctgggcaactggtttcggggtgcatttattagatacttttgtaaaaaagttctatgagaaataag

SEQ ID NO: 261932 - DNA, 499 bp, Unknown
  Bacterial polypeptide expressing nucleotide sequence isolated from the Sargasso Sea
cttacagtggaaaactattgaaattttaaatacagatgcagaaggaagattagttttagctgatgcactaacttttactgaagaaaaatataagccaaaatttattatagacttagcgacattaacaggagctataattgtatcactaggatctgaatatgctggtttattttctaatgacgataaattgtcaaagcaacttattaatataggtgaaaaagttgaagaaaaggtatggagaatgcctttaaacaaaaattttgataaattaataaattctaaaaacgcagacatgcaaaatatcaattatgtcggaggggcaggctcaacaacagctgcacaatttttacagagatttattctaaataaaacaccttgggcacatttagatatagcaggtatggctttttcaaaatatggaggcgcattaaattcaggtggtgcaactggttatggtgttagattattaaataaactaatcgaggaacattatgagtaa

SEQ ID NO: 261933 - DNA, 735 bp, Unknown
  Bacterial polypeptide expressing nucleotide sequence isolated from the Sargasso Sea
gtgtatgttttgatactggaggtatttctttaaaacctgcaaaatttatggaagatatgacatatgacatggctggttcagcagttgttgttggattaatgaaaaatttggcaattagaaaagctaaaataaatgcagttggtgttgttggtctagttgaaaatatgcccgggggtaatgctcaaagacctggtgatattgtaaaatcatatagtggtaaaactatagaagttttaaacacagatgctgagggaagattagttttagctgatgctttaacttttactgaaaaaaaatttaaaccacaatttattattgatttagccactttgactggtgcaattattgtctctttaggatctgagtacgcaggtttattttcaaacaatgataagttatcaaatcaaattttcgaagctggaaaaaaagttgatgagaaagtatggagaatgccccttcatactaattacgataaattaatgaattcaaaaaatgcagatattcaaaacattaattatattggtggagcaggttcgattacagccgcacaatttttacaaagatttattttaaataaaactccctgggcacatttagatatagctggaatggctttttcaaaatatggtggagctttaaattcgggtggagccacaggtttcggagtaagattattaaataaacttatagaggataattatgagtggtatcgaacaaactttatcaataattaaa

SEQ ID NO: 261934 - DNA, 1471 bp, Unknown
  Bacterial polypeptide expressing nucleotide sequence isolated from the Sargasso Sea
tatggcacatctttctaatgtaaaatatggctctggtgattggcgcaacaataaaactgatgcagtggctgtaggtatttatgaggatctaaaaatgtctcgtcaaatacaaggtgttaatagagaattaggaagaggaatatctaatgcattatctgctaatttgctaaaaggtaaaattggtgaagtcaagataattattggtaaaaaaggtaatcttgcttttgtatttggtttaggtaaagtaggaaatcttatcccagaaacacttcgtaaggctgctgctggtgtatcaaaattatgcatttctaattcagtaagttcagtaagttttttaatcccaaaggaagcaaaggatgattatatatctcaagctgcggccgaaggattagtgcttggaagttatcagtttaacgaatttaaaacgactggagaaaagccatttaatataaagagtgcaatcatattaggtggtaataaaaaagcaattactaaaggtgttattattgctgaaggtgtttgtttggcacgtaacttagagaatagacctggtaatgtctctacacctagtcatctggctgatcacgcaaaaaaaatcggaaaaacgccaaatatgaaggtaactgtttttgaaagagaaaaatttactaaaatgggaatgggtgcacttgctggcgttgcatctggaacagatgaacctcccaaatttatcattatggaacatatggcgggtcctaaaaatcaaaaaccaaaaattttagttggtaagggtttaacctttgatagtggaggtatatcgataaagccagcatcaaaaatggatgaaatgaaatatgatatgtgtggagctggggttgttataggtgttatgaaaattatttcaatcttgaaaccaaagatgaatatagttgggattgttccttcaactgaaaatatgagcggagataaagcgtaccgacctggggatattcttactgcatataatggtaaaacaattgaagtattgaatacagatgcagaaggtcgtcttatcttagctgatgcactatcttatgcttcagagcactatgatccggaattcattttagattttgcaacattgacaggtgctgttgttgttgcactaggacatgtggcaaccggtataatgggtacggatgattccttaattgaaaaaatcaaattttcctccggtattacaggagaaaaggtgtgggaatttccactttgggaagaatatttagatcaagtaaaatcaacaattgcggatgtaaaaaatctaggcgcgcctggacaggcaggatccattgcaggaggagcatttttgcattcgtttgtacgtgaaaatattccttggtgtcattttgatattgctggatctgcatggggtaataaaaacttaccttatcaaaataaaggtttagcaacaggcgagatgattcgtttggttgtagatttattagaaatatga

SEQ ID NO: 261935 - DNA, 1231 bp, Unknown
  Bacterial polypeptide expressing nucleotide sequence isolated from the Sargasso Sea
tttgaaatgccgcaagctatttcgccatacctaattgccattggtgcaggtaacctagaatttaaagcaatgtctcatcagacgggtatatttgcagagcctgaaattttagaagcctctgttgccgaatttaacgacacgcaagccatgatcgataaaaccaatgccatgtatggcgactatgcttggggccgttacgacttactcatgcttccgccaagctttccgtttggtggcatggaaaatccacgtttatcgtttattacccctaccgttgttgcaggcgataaaagcttagttaaccttattgcgcatgagcttgctcactcttggtctggtaacttagtgactaatgcgacgtgggaagatttatggttaaacgaaggttttacctcatacgttgaaaaccgtattatggaagaagtgtttggccgcgaccgtgccgttatggagcaagcactcgatgcagcaggtcttcgcgcacagcttaaaaccattgacgcgccagacacacgccttaacttaaagcttaatggtcgtgatccagacgatgcgtttagctcggtaccatacactaaaggtcaattattcttaatttacttggaaaacaagtttggtcgtgacaagtttgaccctttcgtaaaaacttattttgacgagtttgcttttaaatcgttaacgactgcacaatttgttacctatattgaagctaatttaattaacaggtacccaggtattgttagcatggataaagtgaacgagtggatttttgagccaggtttaccaacagatgcccctaaccctacctctgatgcgttcgataaggttgatactgcaaccacagcctggttacaaggcgcaaaaactgctgctcagttacctacagcaaactggacagtacacgagtggttgcactttttaaataacttaccacgcgatttaagcattgaaaaaatgactgagttagatgacgagtttaacttaacgcagtcaaccaactcagaacgtgcatttgcatggtatatgctagcagtaggcaacggttatcagccaatttaccctgcacttgatgcgcatttatcaggtattggtcgtcgtaagctaattgtgccgctgtacaaatcacttatcactaacggtaagaaagactgggcgcagagtgtttacttaaaagcacgtcccggataccacccactagcacaaggcactattgacgcattatttgaataat

SEQ ID NO: 261936 - DNA, 589 bp, Unknown
  Bacterial polypeptide expressing nucleotide sequence isolated from the Sargasso Sea
attggcagcgaagcctttgtcaccgatgaaattatcaccagccatgggggcgtgcgggtacgcattggtaataccgacgctgaaggtcgtttagtgctggctgatttgctcagtcatctgcgtattaaagcggtaacggctgttaagcctgagctgttttcggttgcgacgctcacgggacatgtggtgcgctgctacggtaattatcccgcggcggttgaaaatgcggtcgccagtggtgcactgtgcgcgcagacacttgcgtcacaagcgagccactggggcgaaccctttgaggtttccacattacgccgtgaggattttgccaagatccgcgaagtgtctggggcggctgatattttatcttcaaacaatgcgccgtcttcagtaactgcccgcgggcatcaatatcctgcagcctttctacttaaggcgtcaggtctgtttgaacacggtgttaatgccgctattcctttagcttatacacacttagatattgctggcagtgcaactgagggcgatccgctctacggtaaacccacagccagccccttggttagtttgtatcaatatctgatcaatcgttaac

SEQ ID NO: 261937 - DNA, 697 bp, Unknown
  Bacterial polypeptide expressing nucleotide sequence isolated from the Sargasso Sea
tgatacaggaggaatatcactaaagccagcaaaatttatggaagatatgacttatgatatggctggttcagctaccgttgtaggtcttatgaaaactttagctttaagaaaatcaaaaattaatgcggttggagttgttggtttagttgaaaatatgccaggaggaaatgcacaaagacctggtgatatagtaaaatcttatagcggacaaactatagaagtattaaatacagatgcggaaggaagattggttttagcggatgcattaacttacactgaggaaaaatttaagccaagtttaattgtagatttagcaacattaacaggcgcaattattgttgcacttggatctgaatattctggtttgtggtcaaatgacgaaaaattatctaaacagctattagaggctggagaacatgtagaggaaaaagtttggagaatgcctctacatgaaaattataataaattaatgaattctaaaactgcagatatgcaaaatattaattatgtaggtggagcaggttcaacaacagctgctcaatttttgcaaaggtttataatcaataaaacaccttgggcgcatttagatatagctggtatggctttttctaaatatgctggcgcattgaattccggtggagctactggttatggagttagattgttaaacaaatttattgaggagaattatgaataa

SEQ ID NO: 261938 - DNA, 1504 bp, Unknown
  Bacterial polypeptide expressing nucleotide sequence isolated from the Sargasso Sea
aatgaaattctctacgaataataaaaagattaatgagatcaaatcagattgcttgatgatttcaatatttaatgatggaaagctcagaggatgtgcaaagctcgtcaatacagcaaatggaaagttgattgatgattttattaaaaataaagacattcaagggaaaattggtcaaacaagaattattcccgtaacaggaaaatcttacaaaaggattgttctggttggatgcggaaaatatgaagatttttcacaaaagaattatagaaaagcagttatatcggcactaaataagatttcgcataccaatcataagagtgttgtgagcttaattcatgacggcgttgaaaaaattgataatccagaaaaagcatatcgattatcaagagttttagcggagtcatggcattccattagctatcaatacaccactacaaaagaaagcaataaaaagaatctaggccttcgaaagattgagattggaaccaatggaaagaaagctataagagaactacaaacaggcttgaaacatggtgacgccataggaaaagcaacgcaactcgtaagagaactgggtgaccttccagcaaatatttgtacaccaagttacctggcgtctgtggctagaaaaatagttggcaagaataaatcagcaaaactaaaggttttaaatgaagctcagatgaaaaagcttggaatggactcacttttatcggtcacggcaggagccaaagaacccgcaaaaatgattattgctgaatttttaaatggcccaaaaagtcaaaaaccagtcgccgttgttggcaaagggatcacatttgatactggaggtatttcgctaaaaccctccaataaaatggatgaaatgaaatatgacatgtgtggagcttccacaacaattggtcttttgcaaatggttacagaacttaaccttccgattaatgcattattcgttgtaccggcatgtgaaaatgttccaagcagtactgcgacattgcctggtgacgtagtaaaatcaatgtcaggaacaacgattgaaatattgaatacggatgctgaaggaagactgatattggctgatgcattgacctatgctcaaaaatacaagcctaaattaattatcgatatggccacgctcacaggagcttgtgtcgttgcactgggagctcatcattctggacttatgagtaattctgaccagctcgctgaaaaactattcgaatgcggacaaacgaccgatgatgtgacatggaggcttcctttaactgaagagtatgccgatcagattgtcagcaactttgctgacgttgccaatatcagtactcgtggctctggagccggaacaatcactgcggggtgctttctccaaaaatttgtaggggattatgattgggcacacattgacatagcaggtgtcgcttgggccgaaggcgctaacaaaggtgcaactggaagaccaatgggcttaatgtcagaatttcttatcaacgaatcaaaaacataa

SEQ ID NO: 261939 - DNA, 475 bp, Unknown
  Bacterial polypeptide expressing nucleotide sequence isolated from the Sargasso Sea
ttgaacactgatgcagagggtagattagtcttagcagatgctttaacttttacagaaaaaaaatttaaaccaaaatttattattgatttagctacattaacaggcgcaataatagtttgtcttggatcagaatatgcgggacttttttccaatgatgacaaattatcaaaacagatttttgaagctggggaaattgttgacgaaaaagtatggagaatgccattacataaaaattatgataaacttatgaattctaaaaatgctgacgttcaaaacattaattacgttggtggtgcaggatccactacagctgctcaattcttaaaaagatttattattaataaaaccccttgggcacatttagatattgcaggtatggctttttcaaagtacggtggtgcattgaattcgggtggtgcaactggctttggagtaagattactaaaccaactagtagaaaaagattatgagtgat

SEQ ID NO: 261940 - DNA, 652 bp, Unknown
  Bacterial polypeptide expressing nucleotide sequence isolated from the Sargasso Sea
tatgacatacgatatggcaggctcagcagcagttgtgggtttgatgaaaaatcttgctttaagaaaagctaaaataaatgcggttggtgtagtcggacttgtagaaaacatggtaagtggaaacgctcaaagacctggcgatatagtaaaatcttacagcggtaaaactattgaaatattaaatactgatgcagaaggaagattagttcttgcagatgctttaagttttacagaaaaaaaatttaagccaagatttataattgatctagcaactttaactggagcaattattgtttccttaggctcagaatatggaggacttttttctaacaacgacaatttatctaagcaattaatcgatgctggtgaaaaagttgaggaaaaattgtggagaatgcctctaaatgataattttgataaattgataaattcgaaaaatgcagacatgcaaaacataaattatgtaggcggtgcaggatcgactacagcagcgcaatttttgcaaagatttattttgaataaaacaccatgggctcatttagatatagccggaatggcattttcaaaatatggaggagctttaaattcaagtggagcaacaggttatggagttagattattgaacaaattaattgaggataactatgagtga

SEQ ID NO: 261941 - DNA, 1363 bp, Unknown
  Bacterial polypeptide expressing nucleotide sequence isolated from the Sargasso Sea
tttgaaaaaagttttatcggataatgaatattcttatgttagtgatttaataaaattagaagatcaaaaaaaaaagattttaacttttgatataagctcaaaaaaaaaaataatcctaatatcttttaaaggtaatttcaatagttctgatgctgaaaatttaggagctaagtgttatgaagtatttagcaaattaaaaaaaaatcaatatattgtaaatacgaatacattatcaaaccaatcaataaaactaattggatattttttacacgggatcaaactaaaatcttacaaatttgaaaagtataaaacaaaaaaaaataaaaaagacattttcttaaatgtgattggtaaaaatgttcctaatcaaaaagatcaaattaaatttaaggcacttgaggatggaactttttatacaagagatctagtgtctgaacctggaaatatactacatcctgatgaatatgctaaaagaataaaatctctaagtaagataggtctgaaagttaatatttatgatgataagaaattgaaaaaacttggtatgaacactttactgggtgttggccaaggaagcattaggggatcatacttagtaacaatggaatggaatggaacaaaaaataaatccaaacctcttgcttttgttggtaaaggagtttgttttgatacaggaggtatttctttaaaacctgctaaatttatggaggacatgacatatgacatggctggttctgcagttgtagtagggttgatgaaaaatttagctttaagaaaagctaaagttaatgctgtaggtgtggttggtcttgtagaaaacatgcctggtggtaatgcacaaagaccaggtgatattgtaaagtcttatagtggcaagacagtggaaattttaaatactgatgcagagggcagattagttcttgctgatgcacttacttatactgaaaaaaaatttaaaccaagatttatagtggatttagcaactttgacaggagccatcattgtttctctaggttctgagtatgctggcctattttctaatgatgataagttgtctaagcaattgataaatgctggtgaaattgttgaggaaaaagtttggcgtatgccgttaaataagaactatgataaattgatagactcaaaaaatgcagatatgcaaaatataaattatgttggaggagctggatctacaactgctgcacaatttttacagagatttattttgaataatacaccttgggctcatctagatattgctggaatggcattttctaaatatggtggagccttaaattcaggtggtgcaacaggttatggtgtaagattattaaacaaattaattgaggataattatgagtaa

SEQ ID NO: 261942 - DNA, 1321 bp, Unknown
  Bacterial polypeptide expressing nucleotide sequence isolated from the Sargasso Sea
gatctattgaaagtaagcaataagaaaagcaaaataatttcttatgatataagttctaaaaaaaaaataatattagtttcgattgataaaaatcttaaaaattctgatttagaaagtttgggagcaagattttatgatcacattaaagatatcaaacaatctaattttatagtaaattcagatacagctaaaaatacttcagaaaatattattggtcattttttacatggaataaaattaaagtcctatatttttgaaaaatataaatcaaaaaaaaataaaaacaaaataactatatctgtaattggaaaaaaaataccatctaaaaccgatcaattaaaatttaaagctattgaggatggaacattttatgcaagagatttagtatctgaaccaggaaatgttttgcaccctgatgaatatgctaaaagattgacctctctaaaaaaaataggtttaaaaataaatattttcaacgataaaaaattaaaaaaattaggtatgaatactttgcttggtgtaggtcaaggaagtataagaggatcttatttagtgacaatggaatggagaggattaaaaaacaattctaaacctttagcattcgtaggaaaaggagtttgttttgatactggaggaatatctcttaaacctgcaaaatttatggaggatatgacatacgacatggctggatctgcaaccgtagttggtttgatgaaaagtttagcgttaaggaaagcaaaagttaatgcaataggtgtagtgggtctggttgaaaatatgcctggtggaaatgcacaaagaccaggagatattgtaaaatcttatagtggtaaaacagttgaaattttaaatacagatgcagaaggtagattagtattagctgatgctcttacttacacagaagaaaaatataaaccaaaatttattgttgatttagctactttaactggagcaattattgtctcgttaggatcagaatatgcaggtttgttttctaatgatgataaattatccagtcagttgattgatgtaggagaaaaaacggaggaaaaagtttggagaatgcctttaaatgaaaattttgataaattaatagactctaaaaatgctgatatgcaaaatataaattatgttggtggcgcaggttcaaccactgcagcacaatttttacaaagatttattttaaacaaaacaccctgggcacatttagatatagctggaatggctttttcaaaatatggaggtgctcttaattcaggtggtgcaacaggatatggagttagattattaaacaaacttgtagaggactattatgagtaat

SEQ ID NO: 261943 - DNA, 1540 bp, Unknown
  Bacterial polypeptide expressing nucleotide sequence isolated from the Sargasso Sea
atgtttcaagttaactttgttgatgtacaagcagaaaatgccatttttgatggtgaaggctgggatgcggttgtggtggtcactccggatctcgtttctatcggaattgatgagatcagtttattggccgagcatggcgctaaggtcgataagcgtgtcggtaagagcccgacgttactgtttgcccccggtttagccggtggccgtttaatcatagcgcccgtcactcaagtggctgatgattatgccgatgtgcgtatttatggcgatgcggcaagagtcgcgattgccatcgctaaagacgcgggtgctaagcgccccctactgtatgtggtgccttctacgacgcctaagtttggttttgcgagtgaagttgcggcgctcgcctgcggccaagaattatggcaaaccttagaattgcgcgaggcaacgggcttaacgccagcctttgaagccattgggttgttgtctttatcatctgaaaagagccacttgctcaacgcattagaagctggccgtgtattggctcgggatttatgtggcactgaacctgagcgcatgtcggctaaggcctttgccgaatattgtttgcaagcctttaaaggtagcgtgattaaaaccgcagtggtggaagatagggatattctcgagcgagattatccgctgttaagcgcggtggcgcgttcttcctttgccgtcggacggcatcaaccgcgggtggtgaaactcgaatatctgcccgagggtgagattactcgtaccttcttatttgctggtaaaggtgtggtctacgatacgggcggtgccgatctgaaagtgggcggcgcaatggccggcatgagccgtgataaaggcggcgcctctgccgtggcggggttatttaaaaccttgtcaatgctcaagcctaaagggatccgggtgatcgccgaactgggcttagtgcgtaatagcattggcagcgaagcctttgtcaccgatgaaattatcactagccatgcgggcgtgcgggtacgaattggtaatacggatgcggaagggcgcttagtattggcagacctgttaagtcatctgcgtattaaagcggtctcggcgatgcaaccagagctgttctcagtcgcaacgctgacgggccatgtggtgcgttgctatggtaattatcctgctgcggttgaaaatgcggtcgccagtggcgcccagtgtgcgcagacactcgcgttacaggcaagccaatggggcgaaccctttgaggtttctacattacgtcgtgaggactttgccaagatccgtgaagtgtcgggggcggccgatattttatcttctaacaatgcgccatcttcggtgacggcccgtgggcatcaatatcctgcagcgtttctgctcaaggcttcgggattgtttgaacacggtgttaacgccgcaattcctttagcttacacacacttagatattgccggcagtgccactgagggcgatccgctatatggtaaacccacagcgagtcccttagtcggtctgtatcaatatctgatcaatcgttaac

SEQ ID NO: 261944 - DNA, 697 bp, Unknown
  Bacterial polypeptide expressing nucleotide sequence isolated from the Sargasso Sea
tgatacaggtggttattcattaaaaccagcaagatttatggaagacatgacttatgatatggcaggctcagctgccgtcgtaggtttaatgaaaactttagctttaagaaaagcaaaaattaatgcagttggtgcagtaggacttgttgagaacatggtaagtggaaatgctcaaagacctggagatattgtaaaatcttatagcggaaaaactatagaagtattaaacactgacgctgaaggtagattagttttagcagacgctttaacttttactgaaaaaaaatttaaacctaaattgatggttgatttagcaactttaactggtgctataattgtttccttgggctcagagtatgcaggacttttctctaacgatgacaaactatcaaaacaattaattaatgctggtgaaatagttgatgagaaattatggagaatgcctcttcacaaaaactttgacaaacttatggactctaaaaatgctgatatgcaaaatattaattatgtaggaggtgctggctctacaacagcagcacaatttttacaaagatttattattaacaaaactccttgggctcaccttgatatagctggaatggctttttcaaaatatgcaggtgctttaaatacaggtggtgccacaggttatggtgtaagactactaaatcaatttgtagaagataattatgagtaa

SEQ ID NO: 261945 - DNA, 1474 bp, Unknown
  Bacterial polypeptide expressing nucleotide sequence isolated from the Sargasso Sea
atggcaaatcttttaaaaattaaacacataactaatgattggcatagttcaaatgaccaatctgtatcagtaggaatttacgataatttgcaattaaatcgtcaacttcagggggttaataggaaatcagggagagcaatttcacataatttatctgcagatctgatcaagggtaaagtaggtgaagtgacgcgtatcgttggtaaaaaaggttttgttgcttatgtatatggattaggtccaaaaggtaatttaacccctgagacgctaagaatttcagcagcagcagttactaaatcttgtattgcagataaaatcgattctgtcacctttctcttaccaattgaggctaaagaaaatgtcatgtcacaagcagcatctgaagggatggtattgggtagctatcagttcaacgaattcaagtcaaaaaaagacgatctttttgaattgcgccatgccagcattgcaggtggcaataaaaaagctgttgagcgaggcgcaattataggcaactctgtttgctttgcgcgagatcttgaaaatcgtcctggaaatattgcaaccccatcgcatttagctgataatgctcttgaaattggtaattcatctgatgtcaaagtaaccgtctttgatagagataagtttactaaaatagggatgggcgcattggcaggcgtagcatctggaactgatgagccgccaaaatttattattttagaatattttaatggtcctaaaaaacaaaaacctaaagtattggtagggaagggcttgacatttgacagtggcggtatttcaatcaagcctgctgctaaaatggatgaaatgaagtatgatatgtgcgggtctggagtcgtccttggtgttatgaaagctgtatcaatcattaagcctaaaagcaatattattggaataataccatctacagaaaatatgagcggagataaagcctaccgtcctggagatattcttacagcttacaatggaaaaactatagaagtcttaaatactgatgccgagggaagattgatattggcagatgctctttcatatgcctgtaagcactatgatcctgaatatattttagattttgcaacacttaccggagcagtagtggtcgcattaggtcatattgcatctggaatcatgggtacggacccttctttaatttctgcaataaaaaactcttctgaaattactggagaaaaagtatgggaatttccattgtgggatgaatatttagatcaagtaaaatcaaaaattgcagatgtcaaaaacttaggcgctccaggtcaggcaggtacaatagctggtggtgcattcctaaaagcatttgtagatgataatataccctggtgtcattttgacattgcaggatctgcgtggggtgataaaaaacttgcttatcaaaaccctggaacagcatcaggagaggttattcgtttaattctggatttaatagaagtaaaatgaa

SEQ ID NO: 261946 - DNA, 1306 bp, Unknown
  Bacterial polypeptide expressing nucleotide sequence isolated from the Sargasso Sea
atccaaaacgtttgaccaagttacgagagattggattaaacagaataactttttaggatctcttggtcagtctgttttatgtcccaccaaaacaagtgacatggttgcggttttaggcttgggtgacgaaaattcaagaaagagatcacggttttcactagctgctgctgcaaaatcacttcccgcaggaaattatgagattataaaccctgaggaggtagagaatttagaaattgaagcgctcggatggctcctaaacaattatgttttcgacaaatataaaaataaaaaagcttctcagtcttatttagttcagcccaaaacaataaacagtgaccgcgttttgaaatttgctgaagcagaagcgttagccagaaacctcataaatacaccttcttcagatatgggaccagaagatttagcttctgctgtaaaaaatttggccaataaatttgatgctgaatactccgaaattgttggggaaaaattaatccagcaaaattttcccctcattcatgctgttgggcgtgcgtctgctcaagaaccaagactacttgaaattaagaatggaagcgcagggccaaaagtaactttggtaggtaaaggggtttgtttcgatactggagggttaaacattaagcctggtcgctcaatgggcctaatgaaaaaggatatgggcggagcagctaatgttttagcgcttacttccatgatcctatcaacgggtatgaatattcaattaagggtacttataccagcggtggagaattctatttccggaaattcatttcgaccgggcgatatcctaacagccagaaatggatcaactgttgaaatcaataatacagacgcagaaggacgccttgtgctggcggatgcattgtctctcgcaagcgagggtaatcccgatcttataatatcaatggcgacactcacaggcgcggcgcgcgttgctgttggggctgatatcgctccttttttcgccgaaaggaatgaggtcagcgatatattaaaatcgtcaggtatccagcaaaatgatcctgtatggcctttgccattttgggatccttacgaaaaaatgatcgagcctgacactgctgatttagacaatgctcccagcggtggctatggtggggcgattacggctgcattatttttacgccgctttgtcaccatgccaaactcatatattcattttgatatttactcgtggtcagacacaaataaaccagggctggcaaaaggtggaataacacagggacctagagccatatttgatgcacttccaaaaatcctagatatttaa

SEQ ID NO: 261947 - DNA, 893 bp, Unknown
  Bacterial polypeptide expressing nucleotide sequence isolated from the Sargasso Sea
ggctaaaaatctttgtaaatctgaagggcttaaatacaaagtcatcgaagaaaaagaaatgcaaaaacttggcatgggaatgctgctgggggtttcccagggttcgatcacgcctgccaagttgattttcatggaataccggcaccctgaagcgaaagacactctggcagtcattggtaaaggcgtaacatttgattctggagggatttcgctcaaaccgagcaagtcgatggacgagatgaaattcgacatgtgcggttcggctgcggttttgggagcgatgaatgctgtcgctaagattaaaccgaaactgaacgtgataggagtcgttcctgctacagaaaatctcccgggtgggaatgcccagcgaccgggtgacatcgtaacggcctacaatgggaaaaaggttgaaatcttgaacactgatgccgaagggcgcctgatcctcggcgatgccttgagctacaccatcgagaaatacaatcccgttgcggtagtcgatctggcgaccctcaccggagcttgtgtggttgccttgggacatcatgccaccggtgctttgagcaaccattcaggattcatggaacgtatcaggcaggcaggtgaaaaaagcggtgacagggtttgggaacttcccaacttcccggaatacggagaattgctgaaaggcaaatacggtgacctgcaaaacattgggggaccggctggcggtacgatcaccggagggaaatttctccaacattttgtgggagataccccctgggttcatctggatatcgcgggtactgcatggaatgtaaaatacgtcgattaccaccctgcaaacggcgccacaggcgttggggtgaggcttttaatcgaccttatcagtgaatggcaacccttgaactgat

SEQ ID NO: 261948 - DNA, 1168 bp, Unknown
  Bacterial polypeptide expressing nucleotide sequence isolated from the Sargasso Sea
atggactttagcataaaagcctgtgatgggaccaaaggctcgtcaaacggtttcctgaccgggaaatcggattgcatcgtaatcggcgtgttcgagtcgcaaacgctctcgggcgctgcgctggagatcgatgcggccaccaagggcctcctgacccgcatcatcaaagccggcgacatggacggcaaagccggtaccacgttgttcctgcacgaagtctcgggcatcggcgcttcgcgcgtgctgctcgtcggcctcggcaagcaggatgctttcagtcagaaagcctacggcgaagccgtgcgggccgcctggcgcgcactgctgggcaccaagatcgtccaggtcaccttcacgctcgcccaattgccgatcctcgagcgctcggccgattggggcgtgcgcgccgcgatcctcgcactgcgtgagctgacctacaggttcacgcagatgaagagcaagccggacaacgccccgcgtgctttgaagcgcatcgtgttcagcgtcaataccggcgacgaaaaggccgccaagctcgcggccaagcagggcgccgcgctcgccaacggcatggatctgacgcgcgacctcggcaatctgccgagcaacgtctgcacgccgacctacctcgccaacacggcgaaaaaactcgccaaagactggaagcttaaggtcgaagtgctcggcgagaagcagtgcgaagcgctcaagatgggctcgttcctgtcggtcacggccggctcggtcgaacccgcccagttcatcgtgctgcagtatcacggcggcgccgcgaaagccgcgccggtcgtgctggtcggcaagggcgtcacgttcgacaccgggggcatttcgctcaaaccgggcgaaggcatggacgagatgaagtacgacatgtgcggcgccggttcggtgctgggcacgttgcgcgccgtcgccgaaatgggtctgaaaatcaacgtggtcggcattatcccggcggtcgagaacatgccgtcggctactgccaccaagccgggcgacatcgtcacgagcatgaagggcctgacgatcgaagtgctgaacacggacgccgaaggccggctgatcctgtgcgacgcgctgacctacgccgaacgcttcaagccggctgcggtgatcgacatcgccacgctcacgggtgcctgcatca

SEQ ID NO: 261949 - DNA, 1495 bp, Unknown
  Bacterial polypeptide expressing nucleotide sequence isolated from the Sargasso Sea
atggcacatttaaagacagtttcagctacaacaaaaaattggtctgaattaccctcagatgtgatagttgttggggtattttcaaaaggggaattatcgccaatggcaaaagatgttgatgaaactttaggagggcagttacaaactgcagttaaaaatggtgacgtgacaggtcgcgcaggtgaatcaatgattttttatggtaagaaacatcgcttaatagcggttggattaggagaaaagaaaaatttagacttagagcagattaggcgtgcaagcggtacagcagttaagacggccactagaaaaaagcttgctaatatatttatggaagaatttgctcaagataaagatggagcagctcaggcgcaagcagagggcgttattttagcttcataccaatttcttgattataaaacgatgaacaaacaaaataactttatgttgaagaaggttattgttcgtacctgggatagatctggtttgaggaaaggttcgttaatagcaaatgctgtttgttttgcaagagatcttggaaatcacccagggaatgttgctactccaacgaaattagcacaggaagctcgaaaaattggaaaacgtggaaaaatgcgagtacgtgtttttgatcgggcaaaaattataaaaatgggcatgggtggacttgcaggtgttgcggcagggacggatgagcctcccaaatttattttaatggaatattggggtactaagaagacagagaagcccaaagttcttgttggtaaaggtcttacttttgactctggaggtatttctataaagccagcatctaaaatggatgaaatgaaattcgatatgtgtggctctgccgtagttttaggagcaatgcatgctattgcagatttaaagcctaagattaatgttgttgggatagtgccctcaacagaaaatctaagtggagcaaaagcatataagcctggagatatcctaaaagcatataatggtaaaactattgaagttttaaatacggatgcggaaggaagattaattttagcagatgctttatcctatgctagtaagcattataaaccagaatatatccttgattttgcaacattaactggtgcagtcgttgtcgctcttggatatgtggctactggtattatgggtacagatgatacgctaatcaagaaggttaaatcgtcttcaaatactacggcagaaaaagtctgggaacttccactttggaaagaatattgtcatcaaattcgatcaaagattgctgatgtgaaaaatataggtgcacccatgcaggcaggaactattgctgcaggggctttcttgaaggaatttgttaaggatggaattccatggtgtcattttgatattgctggaactgcatggagtgattctgaaacagataatggaggtgtagtaagagaaaaaccgtatactccaaaggaaggagcctctggcaatgtaattagattagtattagatctaattgaggcatgac

SEQ ID NO: 261950 - DNA, 1090 bp, Unknown
  Bacterial polypeptide expressing nucleotide sequence isolated from the Sargasso Sea
agctgatcctggtgagctggtcataatcccacaagataaagataatataagaaaagttttactagggagaacatatgaaaatgatgtttactctaaatttatttgcagtaatttgtcaaaaaaattacctggcaataattattacatttcaaatttagatcctgacgatattttaccgtatataagctgggctctgggttgttataaatatgatagtgcaccaatttccacttcaaaacttttccttccggataagatccataatgaggtaagtattcatgtggagagtatctttttcacaatggatcttataaatcatccagccaatagacttacaacagaggaatttgcaaaaataattggagaatattttacgaataaaaactgtaaagtcactgaaattatcggagaagatctgctcaagcataatttccctctgatatatgaggttggaaaagcaagctcgcataaaccaaggttagttgagattcagtgggggaaaaaaaatgatccaaaagttacactagttggaaaaggcattacttttgatacaggtggcttagatattaaaccttcatctggtatgcttctaatgaaaaaagatatgggcggggcggcgaatatattgggcctcgcaaatatgataattggaaataaactgaatttaaacttgagagtattgataccaattgccgagaactcaatttcaagtaattctttcaggccaggcgatattttaaattcaagatcaggtttgacggttgagattggaaacactgatgcagagggtagattgatattagcagactctctaactctcgctgatgagggctccccagacttaatcatcgatatggctaccctgacaggagccgcaagagtggcggtgggaccggagatagttccattctttagtactagtgaggcaatttctaatatcctaaaaaaagtttcacaaaatgttcaagatccagtttgggaacttccattttttgccccatacggaaaatggctcaataatgagatctcagacctgaataattcaccaaatacaccgtttgcaggctctattatcgcagcagaattttga

SEQ ID NO: 261951 - DNA, 712 bp, Unknown
  Bacterial polypeptide expressing nucleotide sequence isolated from the Sargasso Sea
attgttggtaagggcatcacttttgatacgggtggtataaacctgaaaacagattctgactcgatagtccgtatgaccagcgatatggccggtgcagcagcggcattggggactattaaagcattagcattgcaaaaagccccggtaaacgtggttgctgtgatggctatggcggagaatatggtatccgacaaagccatgttgcccggtgatgtactcaaatcagccgctggtttaactattcaggtcactaacactgatgccgaaggccgcttagtgctggccgatgcgctttggtatgccaataaagaattccagccgcgtgctatggtcgatattgcgactttaacaggggccaaagtaggtgccgttggtacttactatgcgggtttgttctcccagcagcagtcactggtggatcaattaaccttagcgggcgaaaaagtgaatgaaccgctgtggcgtttacctttaggcccacaatttggcgatgaaattaaaagcgacattgccgatctgaaaaataccggcagcagcactggagcttcaaccgcggcctggtttttaaaacaatttgctggtgatacgccatgggctcatttggatatcgcaggtaatgcgttaagcagaacagataaagaggttaataccaaaggtgcaacgggttatggtgtgcgtttgctgacagagtgggcgttaaagcaaccttaag

SEQ ID NO: 261952 - DNA, 1294 bp, Unknown
  Bacterial polypeptide expressing nucleotide sequence isolated from the Sargasso Sea
tttgagcaaagaactaacagggttaaaaggagattttttagtattaagagatttcaataaaaacaagtctgagtacaaaaaatacgcttggatgaagggcctatttgcaaatttagataaatatgccgtaaagaatgctgtaatttatgctgatacaagtcacctttttaaagatgataatttcctttttgacttagctaaaactgctgaaaaaacgagctataggtacacagatacaaatccgaataccaaaaaggaattgattctgaaaaatgtttcgttagccgtagaaaatgctagtgcagcacaaaagaaagttgttgaacttggatataacgtaggatctggagctaatactgcaagaaacttaggagatagaccagcaaatcatgcaactccttcttacattgcaaatgccgtaaagggtctagctaaagatatcggtggtttttcagttgaaatattagaagaaaaagatatgaaaaaactcggcatgggctgtttactgtcagtttcaagaggaagtattgaaccagctaagttagtaactatgcagtacaaaggtggtaaaaagggagccaagccaattgttttagtagggaaaggtgtaacttttgatacagggggcatcagtttaaaaccaccgcaaaaaatggatgaaatgaaatgggatatgtctggtgcaggatctgtaataggaacaatgtgtgcagttgctaaatcaaaacttccagtaaatttagtttgcacagttgcactttcagagaatatgccaggaagtaaagctacaaaacctggtgatgttgtcacaagcatgtcagggcaaactgtagagattctaaataccgatgccgaaggcagactagtgctctctgatgctttaacctacgttggaaaatatgatcctaaagttgtcattaatactgcaacccttactggtgcggtagttgtagcattgggttcagtagctgctggtgttatgggtaatgaccaaaagctagttgatgagatacttgaagctggacaaacaaccggtgaaaaggcttggcaattacctatgtgggatgagtatcaaacatatttagattcaaactttgctgatattgctaatatcgctccaggaagagcagctggaacaatcgaaggagcatgtttcttatctaggtttacaaaagattatagatgggcgcacattgatatagccggtgtagctgatattggagaaggaaaagctaaaggctcaacaggtgttcctgtaggcttactgtttgagtacgtaaaaagtaatttttaa

SEQ ID NO: 261953 - DNA, 1360 bp, Unknown
  Bacterial polypeptide expressing nucleotide sequence isolated from the Sargasso Sea
aatgactttaaaaataaaatatttagatagccaaaaaggctcttcaaaaaacaaagccctttttttaggaaaggactcaaaactttccgattttaaagggatttttgacgataaaataaataaaaaaatagttaattttttaaataataataaaaaaacccaggaagacaaaatactttcattaaatctagattttgaccaaagattagtaattatttatttaatcaaaaaaaatgatgcactgcagtcagaaaaaataggtgcaaaattttatgattttataaaaagcaataatgttaacgatattttaattttaggctctaatttttctccagtaaaaaatcatataaaatttaatgaatttatacatggtgcagaattaaaagcttatgaatttaatttatataaaacaaaaaaaaataaaaaagaaataaatataaatattttaaaaaataaaaatcaaattaataaaaatattaaatataacttagatgcggttttaaatggtataaattttacaagagatttggtttcggaaccagggaatattttacatccagatgaatatgcaaaaagattaactaagttaagaaagtatggattaaaagttacaatttatgatcaaaaaaaattaaaaaaattaggatgtaacgctctattaggagttggacagggaagcataagaggttcttatcttgtaactattgaatggaaaggaagtaaatcaaaatcaaaacctttagcatttattggaaaaggagtttgttttgatactggtggttactcattaaaaccagcaagatttatggaagatatgacttatgatatggcaggttcagcagctgtagtaggtttaatgaaaactttagctttaagaaaatcaaaaattaatgcagttggtgtagtaggacttgttgagaatatggtaagtggaaacgctcaaagacctggtgatattgtaaaatcttatagtggaaaaactatagaagtattaaatactgatgctgaaggtagattagttttagcagatgcgttaacttttactgaaaaaaaatttaaacctaaattcatgattgacctagcaactttaactggtgctattatagtttctttgggttcagagtatgcggggattttttctaacgatgatagattatcaaaacaattaattgaagccggcgaaaaagttgatgaaaaattatggagaatgcctcttcacaaaaactttgataaactaataaactctaaaaatgcagatatgcaaaacatcaattatgtaggtggtgctggatcaactaccgcagcacaatttttacaaagatttattattaacaaaactccctgggcccaccttgatatt

SEQ ID NO: 261954 - DNA, 1227 bp, Unknown
  Bacterial polypeptide expressing nucleotide sequence isolated from the Sargasso Sea
ttacagactctgaaacagagagtttaggggcaaaattttatgataatattaaagagattaaacaaaataatttcattattaattcagatataactaaaagtatttcaaaaaaatttattgggcattttttgcatggaattaaattgaaatcttatatttttgaaaagtataaatcaaagaagagtataaaaaaaatgaccatgactgtaattggaaaaaatttaacacctaaagctgatcaattaaaatttaaagctattgaagatggaaccttctttgcaagagatttggtatctgaaccaggaaatattttacaccctgacgagtatgctaaaagattaaactctttaaaaaaaattggtttaaaaattaatgtttatgatgaaaaaaaattaaaaaaattaggtatgcatactttattgggcgtaggtcaaggaagcataagaggatcttatctggtgacaatggagtggaaaggactaaagaataactcaaaacctctagcttttgtgggcaaaggtgtttgctttgatactggaggtatatcattaaaacccgcaaaattcatggaagatatgacatacgatatggctggatcggccacagtagttggtttaatgaaaagtttagcgttaagaaaagcaaaagttaatgcaataggtgttgttggtcttgtagaaaatatgccaggtggaaatgctcaaagaccaggagatatagtaaaatcttatagtggcaaaacagtagaaattttaaatactgatgcagaaggcagattagtattagcagatgcccttacctatacagaggaaaaatacaaaccaaaatttattattgatttagctactttaacaggtgcaataattgtttcattgggatcagagtacgctggtttattttcaaatgatgataaattgtcaaaacaattaattgatgtaggtgaaaaaacagaagaaaaagtttggagaatgccattaaataaaaattatgataagttaatagactctaaaaatgccgatatgcaaaatattaattatgttggtggagctggttcaaccacagcagcacagtttttacaaagatttattttaaataaaacaccgtgggcacacttggatatagcgggcatggctttttcaaaatatggtggagctcttaactcaggtggggcaacaggttatggtgttagattgttaaacaaactagtagaggactattatgagtaat

SEQ ID NO: 261955 - DNA, 889 bp, Unknown
  Bacterial polypeptide expressing nucleotide sequence isolated from the Sargasso Sea
aataaataaagtcttgataaataataatcggcctttaaaatattcacttaatggtccaaagcttaatattgaattagacaggacatatgggttcgatgataccttaactttgtctattgattatatatctagaccaaaaaaaggtctttactttgtacaaaatgatagaagttatcctgataaaaatgttcaagcttggactcaaggtgaaggaatggataaccataattgggttcctttatgggactatcctaacgataggtcaacatttgaagttatcctaactgtagatactccatatactgcaatttcaaatggtgaatttattggtatgaaagataatggaattacaaggacttttcattggcatgagcaatttcctatggtttcttatctaatttcctttgtaataggtgattatcgaagaatagaagacaaatatggtgatttgtcaataggttattgggttactccagaatatagcgatgaagatgcatttagatcatttagtcgcacgccagaaatggtagcttattttaatgagttgactggcatcccttatccatatgaaaaacttgatcagattattgttgatgattttatgtggggagggatggaaaatattaccttaattcatcaaagttcaagaacgatgcacactgatagagctaggccagaccatactagcgacgggttagtagcgcatgaaattgctcatcaatggtttggaaatatgttaaccactagaaattgggcaaatgcttggctgaatgaaggttttgctacttttcttacttatgtatggcaagaatacgataaaggaagagataatgccgaatatagccgtagatggatgatgtcaagtgtgagatgggctgataaatcaaat

SEQ ID NO: 261956 - DNA, 970 bp, Unknown
  Bacterial polypeptide expressing nucleotide sequence isolated from the Sargasso Sea
aaagataaattttggtttctggaaacaatctcaagatctattgaatcaggagcttatattttttctactaccaaaaataaaacagctaaaactgaaaaaattggtaaagacataatttcaagccaaatttcgttaagaaatgtcgccataattactgcaaagctatctgcatctgatactaaaaaagcaaaaattgctgttgcaagaggattttcagttggcgaaggagtaaatactgctaaacatcttggtgatttacctgcaaatcatgcaacaccaaaacttatagaaaaaatagtgaaaaatactgttaaaaattactcaggtttaaaagttaaatcacttaatgagaaagatcttgctagattaaaaatgggctcttatctaagcgtgtcaaagggaagtgatgaacctcctcgaatgatagtcattgaatataagggcggcaaaaaaaatgaaaagccagtagccttagttggaaaaggcattacttttgatacaggtggtatttcgttaaagccaagttctggcatggatgaaatgaaatgggatatgtgtggagcaggaaccgtttttggtgttatgtgttcattggcaagaattaaagctgatgtaaatgtaattggtattatggcatgtgctgaaaatatgccttctgctagagcaacaaaaccaggagatgtagtaacctctatgtcaggtcaaacaattgaaattcttaatactgatgcagaaggaagattagttttagcggatgcgctgacatatgtcggaagatataagccttcatatgtaattgatatggctacacttactggtgctgtagtgattgcattaggaagtcatgctagtggcgttatggcaaataatcagtttcttgctgacaagataattgagtcgggagaggaaactggtgatagagcatggcaattgccattatggaatgagtataagtcgtgtacaaaaacta

SEQ ID NO: 261957 - DNA, 684 bp, Unknown
  Bacterial polypeptide expressing nucleotide sequence isolated from the Sargasso Sea
gccagcgggtattatgtatcccgaaagctttgccaatgaggcgcgtaagcttaagtccctcggcgtaaaagtcacagtactcgaagccaaagatattgaacgtttaaacctcggtgccttagccgcggtgggtaaaggcagcgagcgtccacctaagttggtcgtcgcccattggcccggcagcaaagaagcgccgattgccctagttggtaaaggcattaccttcgactctggcggctacaatatcaaggccacaggcacctctatcgcgcggatgaagtccgatatggcgggcgcagcgaccgtgctcggcactgtcaaggccatggccattcaaaaggcaccagtaaacctagttgcgattatgccgatggcggaaaacatggtatcgggacatgcaatgatcccaggcgatgtgattaaaaccgcccaaggcctcacggttgaagtgctcaacaccgacgccgaaggccgcttagtgttagccgacggtctctggtatgcccgtgagaattaccgcccttcaattatcgtcgatgtggcgaccctcacaggctcgaaagtgggcgcgctgggtagcgtttatgcaggattatttaccgattctgagccgctagtgcagcagctcacctttgcgggtcaacaggtgggtgaaaaaagtctggcgcttgccgttagatcaag

SEQ ID NO: 261958 - DNA, 724 bp, Unknown
  Bacterial polypeptide expressing nucleotide sequence isolated from the Sargasso Sea
acctaaaatattagttggcaaaggactcacatttgatagtggaggtatttctatcaaaccatcctcaaagatggatgaaatgaaatatgatatgtgtggatctggagttgtattaggagttatgaaaatcatagaaactcttaaaccaaaaatgaatgttattggtattattccatcaactgaaaatatgagtggtgataaagcttatcgtccaggtgatgttcttaaagcatataatggtaaaactattgaagtgttaaatacagatgctgaaggtaggcttatattagctgatgcattatcctatgcatcaaagcattatgatccagagtatattcttgattttgctacactgactggagcggtggtagttgcattgggtcatgttgcaactggaattatgggtacagataaaaaattgattgataagattaaagactcggcagttactacaagtgaaaaagtttgggaatttcctctttgggatgaatatatagatcaagtcaagtccaatatagctgatgttaaaaatttgggcgctcctatgcaagcaggtactattgcaggtggtgcatttttaaaatcatttgttaaagatgaaataccttggtgtcattttgatatagctggaactgcatggggtgataaatcacttccttatcaaaataaaggaacggctactggtgaggtgattcgattagtagttgatcttatgggaatttaa

SEQ ID NO: 261959 - DNA, 908 bp, Unknown
  Bacterial polypeptide expressing nucleotide sequence isolated from the Sargasso Sea
atttgcacgcccaaaataccttgccggcgaagcgcgtcgccttgcacgcaagacaaagaatctttcagtatccttgctggatgagcgcaaaatggctgatctgggcatgcactccctgctatccgtgggcaacggctccgatcagcagtcacaattgattgtgatgaagtatcagggcgccgctgccaacgcgcgcccctactgtctggtcggaaaaggcatcacctttgacaccggcggcatcagcctgaaacccggtgccaaaatggatgagatgaagtttgatatggggggtgcgggctctgtgttcggtgcgctgtatgccgcgtcactcatgagcttgcctatcaacattgtgggcgtgattgcggccgcagaaaacatgccaagcggccgcgctacaaagcccggagatgtcgtcacgagcatgtctggtaaaaccattgagatattaaatacggacgccgaggggcgcttggtcttatgtgacgccctcacctacgtcgagcgattttcgccgattgaggtcatcgacatcgcaactttaaccggcgcgattatcgtcgcgctcggacaagaagcgaccggcatattttccaacgatgatcaattggcagagagtctgctggcggcgggtgatagaagccatgatcgaggctggcgattccctatctgggaggaatatcatcgtcagcttgacagtcaatttgcggacctcgccaacatcgggacgggtggcgcaggcagcatcacggcggcctgcttcctatctcaattcgcgcagaactataagtgggctcacctcgatatagccggcacggcttttcgggcggcccccaagggcggcactggcagacccgtgccgttgttgatgcaatacctgagagagcgagccggcaagatttgac

SEQ ID NO: 261960 - DNA, 838 bp, Unknown
  Bacterial polypeptide expressing nucleotide sequence isolated from the Sargasso Sea
atggtttcattagcaaatgctcataatgagaaagaactttcaattcatcttaatgattcaattatttcaaatccttttggaaatttagttgaagtagctgcaagaaccgttgagtcctcatcatataagtttaatcaaacaaaaaataaaactgtaaagaaattgtccctctcaaaagtcacctttactagttttcaattatcggcttctgaatctagaaatacttcggcagctgttaaaaaaggctatgctattggtgaaggcatgaacgcaacaaagtttcttggtgacttgcctgccaatcattgcactccgaggatcatagaatctaaagcgaaacaactaaaaaaaatctttcctaaacttaaaataaaatctttaaatgaaaaacaattggcacagctaaaaatgggttcttatttatctgttgcaagaggaagtattgaacctcctaggatgattattatcgagtacaacggaggcccaaaaaatgttgctcctgcggtgctagtcggaaaaggaataacatttgatacaggaggaatctcacttaaacccagcgggaaaatggatgaaatgaaatgggatatggggggtgcagcatcagtttttggtgtcatgcagactcttgcaagaattaatgcaaaagtaaatgtgattggtgtcatggcttgtgctgaaaatatgccatcatcaaaagctacaaaaccaggtgatgttgtaacatcgatgtctggtcaaacaattgaaatcttgaatactgatgcagagggtaggcttgttttgtgtgatgcgcttaccttcgttaaaagatataaaccaaaatatggtaattgat

SEQ ID NO: 261961 - DNA, 637 bp, Unknown
  Bacterial polypeptide expressing nucleotide sequence isolated from the Sargasso Sea
atggatgagatgaaatatgatatgtctggagcgggctcggtgataggtactatgcaagcatgtgcagagatgaatttaaaaaataatgtgattggtattcttgcttgtgcagagaatatgccaggaagtcaagctacccgtcccggtgatgtagtaacaagcatgtcgggaataacaattgaaattctaaatacagatgccgagggaagattagttttatgcgatgcacttacattttgtaaaaaatataaaccaaggtacattttagatatggcaacactgacaggcgcatgtctcgttggtctggggaaatacccttctgggttgttttcaaatagcagtgagcttagctccaaaataaaaaaatctgcagataacactggggatcgtgtttgggagctgcccctctatcaagactattttgatgagttaaaaacaaattttgcggacattcaaaacataggcggtagatatggcggagcgattactgcagctgcttttttagctaattttacaaaagatcagaaatgggcccatttagatattgcaggtacggcatgggagataggtcaagacaagggttcaacgggcagacctgtcaaacttctgactgattttgtcatgacaaataaataaa

SEQ ID NO: 261962 - DNA, 835 bp, Unknown
  Bacterial polypeptide expressing nucleotide sequence isolated from the Sargasso Sea
taaatataaagcagataccgccaatgtattatttgacgatgtaacgggtgttgatgcaaaccatttacttgctgcaaactttgcgcatggcgcgaacctgcgtgaccatcgttttgaaaaatacaaacaaacacctagcacgcaaacagtgacttactcgtttgatgtcgatagcacaaaaaagacgaaaacaacgtataaacagctagaaagtattcaggccggtgtatttttagcacgcgatcttacctctgaagtagccactgaaatgacgcctgttgattttgcaaatgctgcaaaagagcttgaatcgttaggcgtgaccattacagttttaaagcctgaacaacttaaagagcttggtatgggcgcattagaagccgttggccgcggtagcgatcagggtgctcgcttagtcgttgcacattataaaggctctaacgacgaccccattgcattagtaggtaaaggtataacattcgactcgggcggttatagtattaaaacaggtgcatctatcgcacgtatgaaatcagacatggcaggcgctgcagctgtactcggtacggttaaagcaatggctatggccaaagccgacaaaaacgttgtagctgtaatgggtatggcggcaaatatggtttcgcaatttgcagtagcacctggcgatgttgttcgaacagctgaaggcttaagtgttgaaatactcaacaccgatgccgaaggccgtttagttttaagtgatgcaatgtggtatgcacgtaagcacttcaacccaagcataatgattgatgtagctacacttactggttcaaaaattcgtgccgttggtaacgag

SEQ ID NO: 261963 - DNA, 891 bp, Unknown
  Bacterial polypeptide expressing nucleotide sequence isolated from the Sargasso Sea
gcgatcgttcctcccgacaccgacgactccacgatcaccgatgttgcgatggccgcccgactcggtgcctatgcgttcaccgccttcaagtccagcgacccagcgaccgcccgtcccgtgcgcagcgtcacgatcctcgtcccggctcccgcgggggccgcgcgagagatcatcgacaaaaccgagacggtcggcgaggccgtgtgcttcacccgcgatctcgtcaataccccgccgaacgccctcgcgccggccgacctcgcgcaggcggcgaaggactccgtggcaggtctaccggtcacggtgaaaatctgggacgagaaggccctcgagaaagacaattgcggcggaatcctaggagtcggtaagggctcgtcacggcccccgcgcctggtgcgcatgacgtacgcgccccgcggtgccacatcgcacgtggccctcgtcggcaaaggcatcactttcgacaccggcggcatctccatcaagccggcggccaacatggacgaaatgaaggccgacatgtccggtgcagctgccgtgatcggcgccatgcgtgcgatcgcgtcgctcgggctcagcgtgaaggtcaccggttgggtgccggccgcggagaacatgccgagcggcaccgcgcaacgccccggtgacgtgctcaggacctacagcggtaccaccgtcgaggttctcaacaccgacgccgaaggtcgacttgttctcgccgacgcactcgggatggccgtcgaggacgcccccgatctcatcgtggacgtcgccaccttgaccggtgcgcaacgcatcgcactcggctcgcgaaccgcgggagtgatggccaacgacgacgatgcgcgcacgcaggtgatcgacgcggcgaacgcggcaggtgaggctatg

SEQ ID NO: 261964 - DNA, 796 bp, Unknown
  Bacterial polypeptide expressing nucleotide sequence isolated from the Sargasso Sea
tggtgttgcgcaggggacagatgagcccccgaaattcattatccttgaatacaataacggaggagaccagaagcccaagattctagttggtaaaggtctaacatttgactctggaggtatatcaattaagtctgcatctaaaatggatgaaatgaagtatgatatgtgtggttccactgttgttctcggtgtgatgcaggcaatagctatgctaaaacctaaattaaacgtggtaggcattatcccatctactgaaaatctaagcggagctaaagcatacaagcctggagatatacttacggcctataacggcaaaaccattgaggtgttaaacaccgatgcagagggacgtttaatactggcagatggtctttcatatgcttcaaaacactatgacccagaatatattcttgattttgcaactttaacaggcgcagtgttggtatcactaggacatgtagcaactggcataatgggtacagacgataatctaatgaaaaaagtaaaaaaatcttctaagtctgtagcagaaaaagtctgggagcttccattatggtcagagtattgcaagcaggtccagagtaatatcgcagatgtcaaaaatactggagcacccatgcaggcagggtctattgccggtggggcattcttaaaagaatttgttaaggatgatattccatgggttcattttgatattgctggaacggcctggggagtaaaaccagacagtatgaatccaaaaggaagcgcaactggatggggtattagactagttttagatatgatgggcatataa

SEQ ID NO: 261965 - DNA, 1459 bp, Unknown
  Bacterial polypeptide expressing nucleotide sequence isolated from the Sargasso Sea
tatggcacacataactaaagtagatgtttctaatgaatcatggaatgagaccaatgctgggctcatcgccgttggtgttttccaagacaagagttttactacaatggctagtaatataaatgatagcaatgatggtgtattatcaaaagctattgaaatgggagatgtcaaaggcaagaatggcgaatctaatctattctatatagatggtcaaagaattcaattgttaggattgggtaagaaagaagaattaaaccccgacactatgcgattggccggaggccgtgcatctagattagcaatagataagaagatcgatcatattgcaatagaatgtccgtcaaatgaaaatgagatatgccaggcattggcagaaggcctggtgttaggtagttatcaatttttagattataagacaaaagaaaagaatgctttcgagctaaagtcagcaacagttctagggtctgataaaaatgaaatatcaaaaggagcaatgatcggtaatgcagtttgttttgctagagacctgggaaatcatcctggcaatgtgacgactcccagcaaattagcagcatctgcaaaagatattgcagatgaaggcggtatggatctgacagtatttgaaagagaagagttcacagaaatggggatgggtggtctcgcaggtgtagcacaaggtacggatgagccgccaaaattcattattctagagtatatgaaaggtggtgacaaaaagcctaaggtattagtaggcaagggattgacatttgactcaggcgggatatcgatcaaacccgctgggagaatggatgaaatgaaatatgatatgtgcggttctgcggttgtccttggagtttttaaagcacttgctttgttaaaacctgaactgaacgttgttggcatcattccatcaacggagaatcttaatggtgcaaaagcctataaacctggtgatatattaaaagcttataatggtaaaactattgaggtccttaatacagatgctgaaggccgtttaatacttgctgatggactctcctatgcttctaaacattatgaccctgagtatatacttgattttgcaaccctcaccggcgcaatggttgtgaccttaggacatattgcaacgggcgtcatgggtacagatgacaaacttatagataacgtacttaaagcatcaaaagcaacaggtgaaaaagtttgggagctacctctttgggaagagttctgtaagcagattcagagctcaatcgctgatgtcaagaatcagggttcaccaccacaagcgggtactattgttgctggtgcatttttaaaagagtttgtcaaaaaaggtattccatgggcccattttgatattgctgggactgcatggggcggtaaacctagcagtattaaccccaaagggagtgccacaggatggggcgtgagattggttttggatatgatggatgtctaa

SEQ ID NO: 261966 - DNA, 1405 bp, Unknown
  Bacterial polypeptide expressing nucleotide sequence isolated from the Sargasso Sea
ttgtgtgttggcgtttacaaagacctttcaatgacgcccagtgggtctgatattgatcaggaatttgatggtgcaataagcagcgcaataaaggttggggatataaagggtaagtctaatgaggtaaattatttttatgcgaatggccatagacttgttgtgattggtttaggcgaaaaagaaaagatcaattcctcaaaaataagacatgctgccgcaacagttttacgatctgccatatctaaaaaaattgattcactaacgatagattgtttatgtgaaagtttagaaagttgccaggcaatgggtgaggggattgtgctcggtagctatcaattcctagactataaaaccaaagagaagaaaaaatttgaaatacagtctgttagcatggtgggttgtagtcaaaaagaccaagatgaaataaataaaggtgttgtaataggatcgtctgtttgtcttgcaagagatttgggaaatcaccctggtaataaggcaacaccaagccttcttgctgaaactgcaaaagatatcgctgatgtgggtgatatgaaattaactgtttttgatagggatgaatttactcaaatgggcatgggtggtttagctggtgttgcgcagggaacagatgagccaccgaaattcattattcttgaatacaataacggtggagatcagaagcccaagattctggttggtaaaggtctaacatttgattctggaggtatatcaattaagcctgcatctaaaatggatgaaatgaaatatgacatgtgtggctccactgttgttcttggtgtgatgcaagcaatagctatgctaaaacctaaattaaacgtggtaggcatcatcccatcaactgaaaatctaaacggcgctaaggcatacaagcctggagatatacttacggcctataacggcaaaactattgaggtgttaaacaccgatgcagagggacgtttaatactagcagatggtctttcatatgcttcgaaacactatgacccagagtatattcttgattttgcaaccttaacaggcgcagtgctggtatcactagggcatatagcaactgggataatgggtacagatgataccctaataaaaaaagtgaaaaaatcttcacaatctgtagcagaaaaagtctgggagcttccattatggtcagagtattgcaaacaggtccaaagtaatatcgcagatgtcaaaaatactggagcgcccatgcaggctggctctatagcaggtggggcattcttaaaagaatttgttaaggatgatattccatgggttcattttgatattgctggaacggcctggggagtaaaaccagatagtatgaatccaaaaggaagcgcaactggttggggtattagactggttttagatatgatgggaatataag

SEQ ID NO: 261967 - DNA, 802 bp, Unknown
  Bacterial polypeptide expressing nucleotide sequence isolated from the Sargasso Sea
atgggatcatacttaagtgtgtctaaaggtagtgatgaacctcctagaatgataattattgaatacaagggaggtaaaaaaggcgaaaaaccaattgctctagttggaaaagggattacctttgatactggaggaatctctattaaacctagctcaggcatggatgaaatgaaatgggatatgtgtggggctggaactgtttttggtgttatgtgttcacttgcaagcataaaagcagatgttaatgttgttggtatcatggcatgtgctgaaaatatgccctctgctaaagctacaaagccaggtgatgttgttacatcaatgtcaggtcaaacaattgaagtacttaatactgatgctgaaggaaggctggttttggcagatgccctgacctatgttggcagatataaaccatcttatgtaattgatatggcaacacttacaggagcagtagtaatagccctaggaagtcatgctagcggcgttatggcaaataatcaattcttggcagataaaattattgaatctggagaggcaactggtgatagagcatggcaattacctttatggaatgaatataaatcatgtacaagaactaattttgctgacttagctaacataggcggaggaagagaggcaggaactattcatgctgcagcatttttatcaaaatttactgaagattataaatgggctcatatggatattgctgcgtcagcatggtctagctctccaaaaggtggaactggaagacctgtaccattaatctgtgatttaattttaaataaaaaacttaaatagc

SEQ ID NO: 261968 - DNA, 1474 bp, Unknown
  Bacterial polypeptide expressing nucleotide sequence isolated from the Sargasso Sea
gttgcttgttataccagttaataaaaagatattggcttctcctgagtttaaagaattagataaaaaatctaatggttatatctctagatcaattaaagattcaattagtccctctaaccaaaatcatcttatctcttcattaggaggcgttaaagcaaaaaaaattcttcttataaatgacctcaatgaaaaagatgacatatacctatggttgaacaagtataaatacattgcaaaaattgcaaattcaattggttgtaaaaatcttgcggtacttgatggtcaaaattacccaaaaggtaaagataagttttggtttctagaaacaatctcaagatctattgaatcaggagcttatattttttctactacaaaaaataaaacagctaaaactgaaaaaattggtaaagacataatttcaagccaagtttcgttaagaaatgtcaccataattactgcaaagctatcttcatctgataccaaaaaagcaaaaattgctgttgcacgaggattttcagttggcgaaggagtaaatactgctaaacatcttggtgatttgcctgcaaatcatgcaacaccaaaacttatagaaaaaatagtaaaaaatactgttaaaaattactcaggtttaaaagttaaatcacttaatgagaaagatcttgctagattaaaaatgggctcttatctaagcgtatcgaagggaagtgatgaacctcctcgaatgataatcattgaatataacggcggcaaaaaaaatgaaaagccagtagccttagttggaaaaggtattacttttgatacaggtggtatttcgttaaagccaagttctggtatggatgaaatgaaatgggatatgtgtggagcaggaacggtttttggtgttatgtgttcgctggcaagaattaaagctgacgtaaatgtggttggtattatggcatgtgctgaaaatatgccttctgctagagcaacaaaaccaggagatgtagtaacttctatgtcaggtcaaacaattgaaattcttaatactgatgcagaaggaagattggttttggcagatgcgttgacatatgttggaagatataagccttcctatgtaattgatatggcaacacttactggtgctgtagtgattgccttaggaagtcatgctagcggcgttatggcaaataaccagtttcttgctgataagataattgagtcgggagaggaaactggtgacagagcatggcaattaccattatggaatgagtataagtcgtgtacaaaaactaattttgctgatttagcaaatattggcggtggtagagaagcaggtacaattcatgctgctgcatttttatcaaagtttgcagaagactataaatgggcgcacatggacattgcagcctctgcatggtcaagttctccaaaaggtggaactggaagacctgttcctttgatatgtgacttaatattaaataaaaaacttaaataa

SEQ ID NO: 261969 - DNA, 1537 bp, Unknown
  Bacterial polypeptide expressing nucleotide sequence isolated from the Sargasso Sea
catgaaaaataagaataaatttttgttaagcgttatggcgctggcgtgccttaactctctcaatgctaacgccgaaacctttagttttgacactcgtaactcactcaattccgacacattagtgctgttccaaagtgctgattcgacaacctatagtctcgattttttacctcaatcgactcaagaccaactcaaccttgcggtcgccgacaacagttttgcgggtaaacgcggtgaaatcttagaaatccttgtcccgagcgaaatcgacgctaagcgggtgttactggttggaattggcgatgctaagaccttaacaccgggtgaaatcaatacgttagggggcaatattgccgccaagcttgaaaccgtgccgcaagccacagtgcgtgtgctgacccaaggcttaagtaacgcgccgctgtttggctcagaactggcccacggcattgagctgcgcagctaccgctacactcaatttaaagccagcaatcgcgccgagaagaactatcaaatcggggttgatgacttaagccaaaaccaaaaacaccataaaaatctgcaagctatcgaagcgggtgtgtttttagcgcgggatctcaccaatgcgccagcgggtattatgtatcccgaaagctttgccaatgaggcgcgtaagcttaagtccctcggcgtaaaagtcacagtactcgaagccaaagatattgaacgtttaaacctcggtgccttagccgcggtgggtaaaggcagcgagcgtccacctaagttggtcgtcgcccattggcccggcagcaaagaagcgccgattgccctagttggtaaaggcattaccttcgactctggcggctacaatatcaaggccacaggcacctctatcgcgcggatgaagtccgatatggcgggcgcagcgaccgtgctcggcactgtcaaggccatggccattcaaaaggcaccagtaaacctagttgcgattatgccgatggcggaaaacatggtatcgggacatgcaatgatcccaggcgatgtgattaaaaccgcccaaggcctcacggttgaagtgctcaacaccgacgccgaaggccgcttagtgttagccgacggtctctggtatgcccgtgagaattaccgcccttcaattatcgtcgatgtggcgaccctcacaggctcgaaagtgggcgcgctgggtagcgtttatgcaggattatttaccgattctgagccgctagtgcagcagctcacctttgcgggtcaacaggtgggtgaaaaagtctggcgcttgccgttagatcaagcctacgacgatgagctgaaatccaccatcgccgatttgaagaataccggtaaagaaggcagcgcgggagcatcgtctgccgccatgttcctcaaacgctttgcgggagagcaaccttgggctcacctagatatcgctggcaatgccttaaccgccaccgataccgcagtggtgcccgctggtgccacaggctatggcgtacgcctactcagcacttggttaactcagccaaaagcgcaaaactaa

SEQ ID NO: 261970 - DNA, 800 bp, Unknown
  Bacterial polypeptide expressing nucleotide sequence isolated from the Sargasso Sea
tctcttgggaatgggatctttcttatctgtttcaagaggtagtaagcaacctgctcaattaattgttattgaatatatgccgcttaaaaatgaaaaaccaatagtattagttggcaagggtataacattcgataccgggggaatatctttgaaaccgtctgctaaaatggatgagatgaaatatgatatgtctggtgctggcagtgttatgggtgtaatgaaggcatgcgcacaaatgaaattgaaaaaaaatgttataggtatacttgcgtgtgcagaaaatatgccaggtagtcaagcatctcgccctggagatgtagttacgacgatgtctggaataactgtagaaattctgaatactgatgctgagggacgtttagttttgtgtgatgctttaacatactcaagaaagttcaaaccaaaatatgttattgatattgcaacactcactggagcgtgccttgttggtcttggcaaatatcctagtggactcttttctaaaagtgacaaaatatctaagctcatagaaaaatcctcggagagaacaggagatagagtatggagattacctctctatgatgactatttcgatgaaataaaaacaaactttgctgatattcaaaatataggtggaagatatggtggagcaataacggctgcagcattcttagctaaatttaccgagggattagaatgggcgcatttagacatagcaggtactgcttgggatgaaggtgcgaataaaggctcgactggaagaccggtcggcctattaatagattttgttaggtctaactaaa

SEQ ID NO: 261971 - DNA, 1069 bp, Unknown
  Bacterial polypeptide expressing nucleotide sequence isolated from the Sargasso Sea
ttgaaaataatcataccatttttatttatatatcttacaataattcatggtgaggaggttccgtataatcctacccctgatagatatgttgatattcatcattcaagaattgatatcaaagtaaatttagatgatagcactgtaattggtaatgtaacccatattatgagttcgcttcggacagatctatatattattcaattagattgtgaagatactgaaataaataaagtattgataaacaataatcggcccttaaaatattcccttaatggtccaaaacttaatattgaattggataggacatatggattcgatgataccctaactttatctattgattatacatctaggccaaaaaagggtctttattttgtgcaaaatgatagaacttatcctgataaaaatgttcaagcttggactcaaggcgaaggaatggataaccataattgggttcctttatgggactatcctaatgataggtcaacatttgaagttattctaactgtagatactccatatactgcagtttcaaatggtgaatttatgggcatgaaagacaatggtattacaaggacttttcattggtatgaacactttccgatggtttcttatctaatttcctttgtaattggtgattatcgaagaatagaagacaaatacggtgatttgtcaataggttattgggttacaccagaatatagcgatgaagatgcatttagatcatttagtcgcacgccagaaatggtggcatattttaatgagttgactggtatcccttatccctatgaaaaacttgatcagattattgttgatgattttatgtggggagggatggaaaatattaccttaattcatcaaagttcaagaacgatgcacactgatagagctaggccagatcatactagcgatgggttggtagcgcatgaaattgctcatcaatggtttggaaatatgttaaccactagaaattgggcaaatgcttggctaaatgaaggttttgctacttttcttacttatgtatggcaagaatacaataaaggaagagatgatgccgaatatagccgca

SEQ ID NO: 261972 - DNA, 1177 bp, Unknown
  Bacterial polypeptide expressing nucleotide sequence isolated from the Sargasso Sea
gatgggctttaactatccaaaaggcaaagataaatattggttcttagaaatgattgcaagatcaatggaatctggggcatatattttttctaccacaaaaaataaaacagcaaaatctgaaaaagttggaaaagatctagtttctagccaagtatcacttaaaagcgtttctttgattacaacaaaactttctactgcggaagttaagaaagcaaaaacttctatttcaattggtttttcagttggcgaaggtgtaaatacagcaaaacatctaggtgacttacctgcaaatcatgcaactccaaaacttatagaaaaaattgtaaaaacaactgttaaaaattacccaagtttaaaagtaaaagctttaaatgagaaagacttagcaaaacttaaaatgggatcatacttaagtgtgtctaaaggcagtgacgaacctcctagaatgataattattgaatataagggaggtaaaaaaggcgaaaagccaattgcactagttggaaaaggaattacctttgatactggaggaatctctattaaacctagctcaggtatggatgaaatgaaatgggatatgtgtggggctggaactgtttttggtgttatgtgttcacttgcaagcataaaagcagatgttaatgttgttggtatcatggcatgcgctgaaaatatgccctccgctaaagctacaaagcctggtgatgttgttacatcaatgtcaggtcaaacaattgaagtacttaatactgatgctgaaggaaggctggttttggcagatgccctgacctatgttggcagatataaaccatcttatgtaatcgatatggcaacacttacaggagcagtagtaatagccctaggaagtcatgctagcggcgttatggcaaataatcaattcttggcagataaaattattgaatctggagaggcaactggtgatagagcatggcaattacctttatggaatgaatataaatcatgtacaagaactaattttgctgacttagctaacataggcggaggaagagaggcaggaactattcatgctgcagcatttttatcaaaatttactgaagattataaatgggctcatatggatattgctgcgtcagcatggtctagctctccaaaaggtggaactggaagacctgtaccattaatctgtgatttaatt

SEQ ID NO: 261973 - DNA, 1029 bp, Unknown
  Bacterial polypeptide expressing nucleotide sequence isolated from the Sargasso Sea
tttgaaaataattattacattaattcttattatttttgccatagttcaggctgaagaagtcccatataaccctacccctgatcgttatgtggatattcatcattcaataattgatgttcaagttgatttagaggatagtacagtagtgggtaatgtaacccatacgatgagctctcttcgcacagatctgtatataattcaattagactgtgaggacactaaaattaaaagggtaacaattaataataatcggccgttaaaatactcgctcaatgggccaaagctaaacattgaattagatagaacatatggatttgatgatacgttaactttatcaatagattatcttgccaaaccaaaaaaaggactttatttcgttcaaaatgatcaaaattacccagataagaatgtgcaagcttggacacagggagaaggaatggacaatcataactgggttcctctatgggattatccaaacgatcgttctacctttgaggttattttaactgttgatacaccatatactgcagtttctaatggtgaatttatggggatggttgataatggtataacaagaacctttcattggcacgagcattttcctatggtgtcttatttaatatcttttgttgttggagaatttcgaagaattgaagataaatatggtgatttatctattggatattggatttctccggaatatagtgaagaagatgctttaagatcatttagtcgcactccagaaatggttgcttattttaatgagcttataggcattccttatccatatgaaaaacttgatcaaatcattattgatgattttatgtggggaggaatggagaatattactttaattcatcaaagctcaagaactatgcatacggatagagcaagacctgaccattctagcgatggattggtggctcatgaaattgcccatcaatggtttggaaacatgttaactacacgaaattgggcaaatgcttggttaaatgaaggatttgctacttttcttacatatgtttggca

SEQ ID NO: 261974 - DNA, 2044 bp, Unknown
  Bacterial polypeptide expressing nucleotide sequence isolated from the Sargasso Sea
taaccataattgggttcctttatgggactatcctaacgataggtcaacatttgaagttatcctaactgtagatactccatatactgcagtttcaaatggtgaatttatgggtatgaaagataatggcattacaaggacttttcattggcatgagcaatttcctatggtttcttatctaatttcctttgtaataggtgattatcgaagaatagaagacaaatatggtgatttgtcaataggttactgggttactccggaatatagggatgaagatgcatttagatcatttagtcgcacgccagaaatggtagcttattttaatgagttgactggtatcccttatccatatgaaaaacttgatcagattattgttgatgattttatgtggggaggcatggaaaatattaccttaattcatcaaagttcaagaacgatgcacactgatagagctaggccagaccatactagcgatgggttggtagcgcatgaaattgctcatcaatggtttggaaatatgttaaccactagaaattgggcaaatgcttggctaaatgaaggttttgctacttttcttacttatgtatggcaagaatacgataaaggaagagatgatgccgaatatagccgcagatggatgatgtcaagtgtgagatgggctgataaatcaaatcctagaccaatggtgcaatattattatgtatcagatatggatctttttgattcaaatatttatgcaaaaggggctctggttttaaatatgttaaggcaaatcttaggatatgatgccttttggagagcagttcgtaattatgctaaagaatatcagcacaaaaatgttgaatcacaggatctaaaaagaatttttgaagatgttactgggcaaaacctagagtggttttttgatcagtgggtatatactgccggattgccagaattagaaataaaatacaaatataatcgtcgaaatgaacatgtaaagctcactgttaagcaaactcaaaaagtagaaaattcatctttatttcgattaccattaactgtactaatagacaacggtgaaattattagacaggaaatttggattgaagaagaagaatcaacttttttgattccatcaataagaaacccaaatatggtattggttgatgaagggcatattatacctaaaagaatgaagttcgataaaaaacatccggaattaatgtatcaagcaaaaaatgctcctcatattttagatcgtatttgggcaattgagcaattagcagatcatccacataagaaatcgattgagaatacattagtattttcattaaaaaatgatcctttttatggagttcgtatagcagcagcaacagcacttggagaatatgaaccaagaaaaggtggagaaattttaatgaattcaatagatcgacaggataatcgcgtaaaaagagcatgcatacgtagtttgcgaaattacaaaggaacaaaaattagaaactttttattaaatacaataatgaactcagataatgactatttagtaaatgatgcgtataatacgatgtttcgtgttgactctatgacagctgattcattatatgattgggcaatgaaacaagattcacataatgatataatacggaaatctgctataaggtctttatctaaatataacaagactaattataaaagacttaaagtgttacttaaatacggagaagccccttggtcatgtcgttcaacagttctttcaacaataggtaagcatgtgaaaaaacaccctgaattaattcaagaatttgaagaactgttatttgatccaagccgaagtgttagaacaacagctgctaatttattaagtcaatatggagatgaaagtcatatacctaaattagagagtcttatcataagagatcctataactgatcgctggataacacctttaatctcccgtttaaaaggggaaaaagattcagaagaaaaatcttactcaataaagaatgatcttttagatatacgtgaccgtcttgataagcttattaaatcacaaaaggaatag

SEQ ID NO: 261975 - DNA, 1537 bp, Unknown
  Bacterial polypeptide expressing nucleotide sequence isolated from the Sargasso Sea
atgaaaaataagaataaatttttgttaagcgttatggctctggcgtgccttaactctctcaatgctaacgccgaaacctttagttttgacactcgtaattcacttaattcagataccttagtactgttccaaagtactgattcaacaacctatagtctcgattttttgccccagtcgactcaggatcaactcaatcttgcggtagctgataatagtttttcgggtaaacgcggagaaattttagagattttagtcccgagcgaaatcgacgcaaaacgagtattactggttgggattggcgatgctaaaaccctaacacctggtgaaatcaataccttaggtggcaacattgccgccaaacttgaaaccgtgccacaagccacggtacgcgtgctgagccaaggcctcagtaacgcacctctctttggttcagagctcgcccacggcattgagctgcgtagctaccgctacactcaatttaaaaccagcaatcgcgccgagaagaactatcaaatcggcgttgatgacttaagcaaaaaccaaaaacatcataagaatctgcaagctatcgaagcgggtgtgtttttagcgcgcgatcttaccaatgccccagcgggaaacatgtatcccgaaagctttgctaacgaggcgcgtaaactcaaagccctcggcgtaaaagtcacagtactcgaagccaaagatattgaacgcttaaacctcggcgccttagcggccgtaggtaaaggcagtgagcgcccacctaagctggttgtcgcccactggccaggcagtaaagaagcacctatcgccctcgtcggtaaaggtattactttcgactctggcggttacaacattaaagcaacaggcacctccatcgcgcggatgaagtccgatatggcgggcgcggcaactgtactcggtacagtcaaggcgatggcgattcaaaaggcgccagttaaccttgtcgccattatgccgatggctgaaaatatggtgtcgggccatgcgatgatcccaggtgatgtgattaaaaccgcccaaggccttacggttgaagtgctcaacaccgatgccgaaggccgtttagtgctcgccgatggtctctggtatgcccgtgaaaactaccgcccatcggtcatcattgatgttgccacccttacaggctcaaaagtcagtgcgctaggcaccgtttatgcggggttatttaccgattcagagccgctagtgcagcaactcacctttgcgggtcaacaggtgggtgaaaaagtctggcgcttgccgttagatcaagcctacgacgacgagctaaaatccaccatcgccgacttaaagaataccggtaaagaaggcagcgcgggagcatcgtctgccgccatgttcctcaaacgctttgcgggtgagcaaccttgggctcacctcgatatcgctggtaatgccttaactgccaccgatactgccgtggtgcccgctggtgccacaggttatggcgtacgcctgctcagcacgtggttaacccagcctaaggcgcaaaactaga

SEQ ID NO: 261976 - DNA, 1000 bp, Unknown
  Bacterial polypeptide expressing nucleotide sequence isolated from the Sargasso Sea
gtttgtgaagataaatcctctcttttagtagtccttgttgataagtctgctaaaaagaataaattgctaattcatatggataaagtaacaaagggaggtttatttaaatctataaattcctttgtgaagtcaaaagctaagtctcttaatcttcagagtcccgatggtgtttcatcaaaagaagttctgcttatgaagactcctgagaaatctaatacctacctatggttagatctatttaaatccatctcaaaaatagctaattctcttggaaaacaggacatctcagttatgtttgcatgcaaatgtcctgatgggaaagatgaaagctggttaactgaagtttgttgcagacaaatagaagcatctgcatatatttttggtagctctaaaaataaaacagttgtaaaaccaagtttaaaaaaggcttccatcatagcgagttctgtaacatcctcggctttgaagaagcttaaaacctcggctaaggttggctttgctgtcggtgaagcaatgaatgcagctaagcatttaggcgatatgcctgcaaatttatgtactccaaggataattgaaagaaaagttaaagccttaaaaaaaccatttccgaaattaaagatttcaacttttaatgaaaaagacttggctaaacttaaaatgggttctttcttaagtgttggaagaggaagtgatgagccttcaagaatgatgacaattgagcacaaaggtggaaaagctggtgaaaaaccaattgtcttagtaggtaaaggaataacctttgatactggcggtatatcgttaaagccatcccctgcaatggatgaaatgaaatgggatatgtgcggagcagcctcggtttttggcgtaatgattgctctagcgagactcaatgcaaaagttaatgttgtgggtcttcttgcatgtgctgagaatatgccctctgctcatgcaactaaacctggagatgttgtaacatcaatgtcgggacaaacaatgaaat

SEQ ID NO: 261977 - DNA, 279 bp, Unknown
  Bacterial polypeptide expressing nucleotide sequence isolated from the Sargasso Sea
ccggtacccaggcgggcgatcgcgcctggcaactgccgctgttcgatgaataccaggagcagctcgacagccccttcgccgacatggccaacatcggtggccccaaggccggcaccatcactgccggctgcttcctctcgcgctacaccaaggcctacccctgggcgcacctggatatcgccggcaccgcctggatcagcggcggcaaggacaaaggcgccaccggccgcccggttccgctgttgatgcaatacctgcttgatcaggccaaggcctgat

SEQ ID NO: 261978 - DNA, 816 bp, Unknown
  Bacterial polypeptide expressing nucleotide sequence isolated from the Sargasso Sea
tatgaagactcctgagaaatctaatacctacctatggttagatctatttaaatctatctcaaaaatagctaattctcttggaaaacaggacatctctgttatgtttgcatgcaaatgtcccgacgggaaagatgaaagctggttaactgaagtttgttgcagacaaatagaagcatctgcatatatttttggtagctctaaaaataaaacagttgtaaaacctagtttaaaaaaggcttctataatagcgagttctgtaacatcctcagctttgaagaagcttaaaacctcggctaaggttggctttgcagtcggcgaagctatgaatgcagccaagcatttaggcgatatgcctgcaaatttatgcactcctagaataattgaaagaaaagttaaagccttaaaaaaaccatttccaaaattaaagatttcaacttttaatgaaaaagacttggctaaacttaaaatgggttctttcttaagcgttggaagaggaagtgatgagccttcaagaatgatgacaattgagcataaaggtggaaaagctggtgaaaaaccaattgtcctagtaggaaaaggaataacctttgatactggcggtatatcgttaaagccatcccctgcaatggatgaaatgaaatgggatatgtgcggagcagcctcggtatttggcgtaatgattgctctagcgagactcaaagcaaaagttaatgttgtgggtcttcttgcatgtgctgagaatatgccctctgctcatgctactaaacctggagatgttgtaacatcaatgtcaggacaaactattgaaatccttaa

SEQ ID NO: 261979 - DNA, 868 bp, Unknown
  Bacterial polypeptide expressing nucleotide sequence isolated from the Sargasso Sea
catgagcttagcgaaatcagctaaagcaaaagattttgcttaccttatgagctcgactacttcaaaagactttgatctaatatgggcagctgaagctgcagctcgaacatttgaatctgcagcttatactttcaatgcaactaaaaataaaactgcaaagccagttactgttaagaaagggactatattaattgggggcttaacgtcagcgaaacttaaagctgtgaaagctgctgtcaagcttggtcacgctgttggcgagggtatgaatgcaactaaacaccttggtgacttgccagcaaatcattgcactccaaggattattgaacgcaaaacaaaagcactcaagaaagattttccagccctcaagatatcaagtctgaatgaaaaagatatggagcgattaaaaatgggatcgtatttatcagttggaagaggtagtgatgagccatctagaatgatgaccattgagtacaaaggtggtgccaaaaataagcagcccgttgtattagtaggaaaaggaattacgtttgatacaggcggaatctctataaaaccgagtccagcgatggatgaaatgaaatgggatatgtgcggagcagcttctgtatttggaattatgcaaacacttgctaggcttaaagctaaagtaaatgttgtaggtttgctggtttgcgcagaaaacatgccatctgctcatgctactaaacctggtgatgttgtaacttcaatgtcaggacaaaccattgaaattttaaatactgatgccgaaagtaggctgggtctatgcgatgcgttgacttactcaaagaaattcaaacctagtcatgttattgatatggcaaccctaactggtgctgtagtgatt

SEQ ID NO: 261980 - DNA, 823 bp, Unknown
  Bacterial polypeptide expressing nucleotide sequence isolated from the Sargasso Sea
gttggttaaagagtcaatcaaagaaattaacagtgggtctagaaaatctatttttcttcctgccccaactaaaattgcagctaaaaatattctgctcatcaaagaaccagaccctaaagcagccagttttttagtgcttcgttactacgaagagatcatgggcttagtcaaatcagccaaggcaaaggattttgcatatctcatgagttcaaccacttcaaaagattttgatctggcgtgggctgctgaagtggcagctagaacatttgagtctgcagcctacactttcaatgcaacaaaaaataaaactgctaaacctattatagttaaaaagggagcccttttatttgctggcttaactccggcaaaactaagatcagttaaagctgcggtaagacttggtcatgctgttggtgaaggaatgaatgctacaaaacatcttggtgatttgcctgcaaaccattgcacaccaaggattattgagcgtaaaacaaaagcactgaaaaaagattttccagctctaaaaatttctagtctcaatgaaaaggatatggaacgattgaaaatgggatcatatttatcagttggcaaaggtagtgatgagccatccaggatgatgaccattgaatacaggggtggtgcaaaagataagcagcccatcgtgttagtaggaaaaggaattacatttgatacaggcggaatctcaatcaagccaagtcctgctatggatgaaatgaaatgggatatgtgtggagctgcatctgtatttggaataatgcaaacgctggctagactaaaagctaaagtgaatgttgtgggctta

SEQ ID NO: 261981 - DNA, 944 bp, Unknown
  Bacterial polypeptide expressing nucleotide sequence isolated from the Sargasso Sea
tttggtagtccttgttgataagtctgccaaaaagaataaattgctaattcatatggataaagtaacaaaaggtagcttatttaaatctataaattcctttattaagtcaaaagctaagtctcttaatcttcaaagtcccgatggtgtttcatccaaagaagttctacttatgaagactccagaaaaatccaatacctacctatggttagatctatttaaatctatctcaaaaatagctaattctcttggaaaacaggacatctcagttatgtttgcatgcaaatatcctaatgagaaagatgaaaactggttaactgaagtttgttgcagacaaatagaagcatctgcatatatttttggtagttctaaaaataagacagttgtaaaaccttctttaaaaaaggcttccatcatagcgagctctgtaacatcctcagctttgaagaagcttaaaacctcagctaaggttggctttgcggtaggtgaagcaatgaatgcagctaagcatttaggtgatatgcctgcaaatttatgtactccgagaataattgaaagaaaagttaaagccttaaaaaaaccatttccaaaattaaagatttcaacttttaatgaaaaagacttggctaaacttaaaatgggttctttcttaagtgttggaagaggaagtgatgagccctcaagaatgatgacaattgagcataaaggtggaaaagctggtgaaaaaccaattgtcctagtaggtaaaggaataacctttgatactggcggcatatcattaaagccatcccctgcaatggatgaaatgaaatgggatatgtgcggagcagcctcagtgttcggtgtaatgattgctctagcaagactcaatgcaaaagttaatgttgttggtcttcttgcttgtgctgagaatatgccatctgctcatgcaactaaacctggagatg

SEQ ID NO: 261982 - DNA, 907 bp, Unknown
  Bacterial polypeptide expressing nucleotide sequence isolated from the Sargasso Sea
aatgcgtattgcaaatctaaatacgtctatgcttgttattccagtaaatactaatacaaaaaaaaatagagtgtttaaagaaattgatggggtttctaatggctatatttctaaaacaatagccaatcaattaaaagataaaacaaataccgttttgctgcctcaaatacagggtgttaaagctaaaaatattttattgatcaaatctttgtcaaaagaagatcaaatatacaaatggttaaaacattttcaatcgattacaagaactgcaaatcaatataaatgtaacgatatttcaattttaatagatgcagttgctccaaagagtaagaacaagttttgggtaattgagacaattgcgcgtgttgttgaatcaaatgcatatattttttctcaaacaaaaaataaaactgcaattaagccaacccttaagagattacaaatattaacatcagacttttcaaatcaagaaatattaaagggcaaacaatatgcaaaaaaaggttttgcaattggagaaggtgtaaatactgcaaaatatcttggtgatctgcctgcaaatcactgcacaccaagaattattgaaaaaaaggtaaaagctatgaaaagagattttcctagccttaaaataaaatcctttaatgaaaaagatcttgctaagttaggaatgggatcttttcttagtgttggtcatggaagtgatgaaccttctcgtatgatggtaattgaatataaaggaggctccgcaagtgaaaaacctgttgcgctagttggcaaaggtataacatttgatactggtggaatttcaattaagccaagtccagctatggatgaaatgaaatgggatatgtgtggtgcagcctcagtttttggtgtaatgagcatgcttgcaagactaacgcaaaag

SEQ ID NO: 261983 - DNA, 1513 bp, Unknown
  Bacterial polypeptide expressing nucleotide sequence isolated from the Sargasso Sea
aatggcgtataaagttttaaataatgttcatttaaaggacgcaacaggtgtatcttccttatcgacagatatgcttgttttagttattaataaaaatacaaaaaatgacacgtctttcatggagctaaataaaaaatctaagaattatctttctaaaactatcaaatctcacttagatcaaccaggcagtagtatattgcttccaaaaacagatggaattaatgccaagcatattcttcttgttaaaggtcttgatgtagatgcgcccactcataaatggcttagtctgtaccaaagcattgcacaaaaaggaaatcaaaataaatgtaaggatatatctgtcatgcctggaacagtttcgccaaaaggtaaggatgaactttggttaattgagatggtttctaaaacaattgagtctaatgtttatattttttctgaaacaaaaaataaaacttctaagaaacccagcgttaaaaaactaactatccttacaacaggtttaactggatctaaattaacaaaagctaaacaagctgcaaaggttggatatgctattggtgagggagtgaatacggcaaaatacttgggtgatcttccagccaatcattgcacaccaaaaataattgaaaaaaaggtaaaagcaatgacaaaagattttcctaagctaaaagttaaatcttttaatgaaaggcaaatgcataaaatgggtatgggttcatttttaagtgtttctaggggtagtgaagaaccagctagaatgatggttatcgaatacaagggaggcaaatcaactgataaacctattgcattagttggcaaaggcgttactttcgatactggaggagtttcaatcaaaccaagtcctggaatggatgagatgaaatgggatatgtgcggagctgcaactgtgtttggagtcatgtctaccctagcaagattaaatgcagatgttaacgtagttggtgttatgggttgcgctgaaaacatgtgctcatctaaagccacaaaacctggcgatgttgtaacttcaatgtctggtcaaaccattgaaatacttaatactgatgctgaaggaagattgattcttgccgattgtttaacatacgttggaaaatataagccctcctatgttattgatatggcaacgctaaccggagctgttgtcattgctcttgggagacatgcaagtggagttatggcaaatgatcagtatcttgcagataaaataattgaatccggtgaagaatcaggtgatagagcttggcaacttccattatgggatgagcatcaatcatgtactaaaactaaatatgcagatttagcgaatattggtgggggaagagaagctggaacaattcatgcagctgctttcctttcaaaatttactaatgattataagtgggcgcatattgatattgccgctacagcctcatatagcactcctgtaaaagctggaactggaagacctgtgccacttataagtcagctaattcttagtaagaaattaaaatag

SEQ ID NO: 261984 - DNA, 1273 bp, Unknown
  Bacterial polypeptide expressing nucleotide sequence isolated from the Sargasso Sea
tatgaaaatagcatgcagtgaatttacagaattaggatcacaaatggttctccctctcttcgaaggagttgataaggcgccaaacaactctctcagagggctaagtaggagtcaacgtagtctagtgagagacgctctctcatccggaggcttcgatgggaagaaaggcaggaggatgacgctttggactccggggtgcaatatcgtcctagtcggcatgggggagaaggattccctcggacataagagagccaggaacactggtgccagactgatagcttctatgtccaaaaagaagggcatcgacgtgacggtgagattcacttcaggttggtcagtgaagagaatgatcgactttgccgaggggatgctacttcgggactacgagttcctggagcaccaagagtcaccgaaggaccacatatctgaaccttggaacgtatctttccaagcaagctcgaggtatcaagagtcattggcccgagggctaagcaaggtaggttcagtggcggaaggagtccatctagcaagagacttgggcaatgagcctgcaaacgtgctttacccaatggaatacgcaaagagagcggaggaatgggccaaggacaaggccaacgtagaggtagaggtattcgattggaagaaactgcaggaactaggcatgggaggactaatcaacgttggcaaggggagcgatcggaaaccctgcatggtcctattcacattgaatccggatgctgatgaaggagtgcagcggccctgtattgtagggaagggcattacattcgacaccggtggaatttcgatcaagcccactggagggatgtgggacatgaagtacgacatgtgtggagctgcgacagtattcggcctaatgcactcgctacacgccaccggatatcagaggagggtgaacggaatcgcttgcctagcggagaatatgcccggatctggggcttacaggcccggcgacgttttcaaaacatactctgggaagacgatcgaggtgttcagcacggatgccgaaggcaggaatgttctggctgatggactatggaaggcgggcgagttagacccagaatacatcgtggatcttgcgacacttaccggagcagtggttgttgccctagggaaccagatatcggggatgtggggctacgatgaggggatttgcaagaggctcaagcagctgcaaagaggagcggcgagcctgtctggaggatgcctcttacgctcagttccgcaagtacatgaccgactctgcattcgctga

SEQ ID NO: 261985 - DNA, 779 bp, Unknown
  Bacterial polypeptide expressing nucleotide sequence isolated from the Sargasso Sea
tatgaagactcctgataaatctaatacctacctatggttagatctatttaaatctatctcaaaaacagctaattctcttggaaaacaggacatttctgttatgtttgcatgtaaatgtcccgatgggaaagatgaaagctggttaactgaagtttgttgcagacaaatagaagcatctgcatatatttttggtagctctaaaaataaaacagttgtaaaacctagtttaaaaaaggcttccatcatagcgagttctgtaacagcctcagctttgaaaaagcttaaaacctcggctaaggttggctttgcagttggcgaagctatgaatgcagccaagcatttaggcgatatgcctgcaaatttatgcactccaagaataattgaaagaaaagttaaagccttaaaaaaaccctttccaaaattaaagatttcaacttttaatgaaaaagacttggctaaacttaaaatgggttctttcttaagtgttggaagaggaagtgatgagccttcaagaatgatgacaattgagcataaaggtggaaaagctggtgaaaaaccaattgtcctggtaggaaaaggaataacctttgatactggtggtatatcgttaaagccatcccctgcaatggatgaaatgaaatgggatatgtgcggagcagcctcggtatttggcgtaatgattgctctagcgagactcaacgcaaaagttaatgttgtaggtcttcttgcatgtgctgagaatatgccctctgctcatgcaactaaacctggagatgttg

SEQ ID NO: 261986 - DNA, 1519 bp, Unknown
  Bacterial polypeptide expressing nucleotide sequence isolated from the Sargasso Sea
aatggcgtataaagttttaaataatattttattaaaagatgtttcatcatcaggcttatcatctttgaagacggacttactggtgcttgttataaataaagaaacaaaaactaatgcttctttcaaagatctaaataagatttcaaaaaattacttatcaaaagcaatttcatcccatctaaaagaatcaggcagttctgttcttcttcctaatattgatggaattcatgctaaaaatttattattagtaaaaggtttggataaaaaagatcctgttcataaatggctaagcatgtatcagtctgttgctcataaaggcaatcatattggatcaaaagatatatctgtaatgcctggatcagtgatgccaaatggaaaagatgaattttggctaatagagatggtatctaaaactattgaatcaaatgtttatattttttctgaaacaaaaaataaaacagtaaaaaaaccatctgttaaaaaattaacagttctaacatcgggtctttctggttcaattttaaacaaggcaaagaaggcagctaaaaaaggatacgctattggagaaggtgttaatacagcaaaatacttaggagatcttcctgcaaatcattgtacaccaaggattattgaaagaaaggtaaaagcaatgacgaaagactttccaaagctaaaagttaaatctttcaacgaaaaagatatgcaaaaaatgggcatggggtcatttctaagtgtctctagaggcagtgaagagccagcaagaatgatggtaatcgaatataaaggaggtaaagcttcagaaaaacctattgccttggttggtaaaggagttacctttgatactggaggagtttctattaaaccaagtcctgcgatggatgaaatgaagtgggatatgtgtggtgccgcaactgtatttggagttatgtcaactctagctagattagacgcagatgttaacgttgttggcataatgggttgtgccgaaaatatgtgctcatcaaaagctacaaaaccaggcgatgttgtaacctcaatgtctggacaaactattgaaattcttaataccgatgcagaaggaaggttgatacttgctgactgtttaacatatgttgaaaaatacaaaccctcatacgtaattgatatggcaacactaaccggagctgttgtaattgctcttggaaggcacgccagtggagttatggcaaatgaccaatatcttgcagataaaataattgagtctggtgaagagtcgggtgatagggcatggcagcttccattatgggatgaacatcagtcatgtacaaaaactaaatatgctgatttagctaatattggtggaggaagagaagctggcactatacatgctgctgctttcttgtctaaattcacaaaaaattataagtgggcgcatatcgatattgctgctactgcatcatatagcactccagttaaagcaggaactggcagacctgttccattaattagtgaattaatattaagtaagaaattaaaataa

SEQ ID NO: 261987 - DNA, 1492 bp, Unknown
  Bacterial polypeptide expressing nucleotide sequence isolated from the Sargasso Sea
aatggcatataaagttttaaataacgtttcagtaaaagatgtaacatcatctgatttactatctcttaaatcagatttattagtaattgtgataaataaaaacaccaaggataaagttgttaatcaacttgcaaaagatgtttcgtcacatttaaaagaatctggaagctcagtattagttccaaatgctaaatcatttaacgctaagaatgtgcttttagtaaaaggatttcaggatagtgatcaaattcacaaattaatctcaatgtatcaatcaatagcacaaaaaggcaatcagttaaaagccaaagatatttcaataatgccagggacggtttatccaaaaggtaagtgtgagatgtggctgattgaaatggtagctaaaactattgaatcaaacgtctatattttttctgaaacatgcaataaaactgcaaaaaaaccaagtgttaaaaagcttaacattctagtatcttctcttacaaaatctgatttgataaaagccaaaaacgctgcaaaaaaaggatacgcaattggtgagggagtaaatagtgccaaatatttgggtgatttgcctgctaatcattgcacaccaagaatcattgaaaagaaggtaaaggcaatgacaaaagattttccaaagctgaaagtaaaatcattcaatgaaaatcaaatgaaaaaaatgggtatgggttcatttttaagtgtctctagaggaagtgaagagcctgcaagaatgatggtaattgaatataaaggtggtaaatcatcagagaaaccagttgctttagtaggaaaaggggtaacttttgacactggtggagtttcaataaaacctagtcctgcaatggatgaaatgaaatgggatatgtgtggtgcagcaacagtatttggtgtcatgtcaatgcttgcaagactaaatgccaatgtaaacgttgttggaattatgggttgtgctgaaaatatgtgttcatcaaaggctacaaaaccaggtgatgttgtcacttctatgtctggacaaactattgagatactaaatactgatgctgaaggacgacttattcttgctgactgtttaacttatgttggaaagtataagccatcacatgtaattgatatggccacattaacaggtgcagttgtaattgctcttggaagacatgccagcggcgtaatgacaaatgatcaacatcttgcagatatgatcattgaatctggtgaagagtctggagacagagcatggcagttacctttatgggatgaacatcaatcatgtacaaatacaaaatatgcagatttagctaatattggaggcggaagagaagcaggcactattcacgctgctgcatttctttctaagttcaccaaagattataagtgggctcatattgatattgctgccaccgcatcctacagcacgcctgtgaaagctggaactggaaggcctgttccacttattagtgaacttcttctaagtaaaagattgaaataa

SEQ ID NO: 261988 - DNA, 922 bp, Unknown
  Bacterial polypeptide expressing nucleotide sequence isolated from the Sargasso Sea
atgagttacagagtattaaatagcatttcagttaaaaatctaagcggcaaagagtttgtgaaagataaatcctctcttttggtagtccttgttgataagtctgctaaaaagaataaattgctaattcatatggataaagtaacaaagggtagtttatttaaatctataaattcctttgtgaagtcaaaagctaagtctcttaatcttcaaagtcccgatggtgtttcatcaaaagaagttctgcttatgaagactcctgataaatctaatacctacctatggttagatctatttaaatctatctcaaaaatagctaattctcttggaaaacaggacatctctgttatgtttgcatgcaaatgtcccgatgagaaagatgaaagctggttaactgaagtttgttgcagacaaatagaagcatctgcatatatttttggtagttctaaaaataagacagttgtaaaaccttctttaaaaaaggcttccatcatagcgagctctgtaacatcctcagctttgaagaagcttaaaacctcagctaaggttggctttgcggtcggtgaagcaatgaatgcagctaagcatttaggtgatatgcctgcaaatttatgtactccgagaataattgaaagaaaagttaaagccttaaaaaaaccatttccaaaattaaagatttcaacttttaatgaaaaagacttggctaaacttaaaatgggttctttcttaagtgttggaagaggaagtgatgagccttcaagaatgatgacaattgagcataaaggtggaaaagctggtgaaaaaccaattgtactagtaggtaaaggaataacctttgatactggcggtatatcgttaaagccatcccctgcaatggatgaaatgaaatgggatatgtgcggagcagcctcggtattggcgtaat

SEQ ID NO: 261989 - DNA, 890 bp, Unknown
  Bacterial polypeptide expressing nucleotide sequence isolated from the Sargasso Sea
aaagatgaaagctggttaactgaagtttgttgcagacaaatagaagcatctgcatatatttttggtagctctaaaaataaaacagttgtaaaaccaagtttaaaaaaggcttccatcatagcgagttctgtaacatcctcggctttgaagaagcttaaaacctcggctaaggttggctttgctgtcggtgaagcaatgaatgcagccaagcatttaggcgatatgcctgcaaatttatgtactccaagaataattgaaagaaaagttaaagccttaaaaaaaccatttccgaaattaaagatttcaacttttaatgaaaaagacttggctaaacttaaaatgggttctttcttaagtgttggaagaggaagtgatgagccttcaagaatgatgacaattgagcataaaggtggaaaagctggtgaaaaaccaattgtcctagtaggtaaaggaataacctttgatactggcggtatatcgttaaagccatcccccgcaatggatgaaatgaaatgggatatgtgcggagcagcctcggtttttggcgtaatgattgctttagcgagactcaacgcaaaagttaatgttgtgggtcttcttgcatgtgctgagaatatgccctctgctcatgcaactaaacctggagatgttgtaacatcaatgtcaggacaaactattgaaatccttaatactgatgcagaaggaagattagtactttgcgatgctcttacatatgttaagaaatataagcctgctcatgtaatcgatatagccacattaactggagcatgtgtagttgctcttggaaactatgcatctggcttaatggcaaatgatcaaaaacttgctgataagatattgcaagctggagaaaattctggcgatagagc

SEQ ID NO: 261990 - DNA, 1077 bp, Unknown
  Bacterial polypeptide expressing nucleotide sequence isolated from the Sargasso Sea
ctatttaatctatctcaaaatagctaattctcttggaaaacaggacatttctgttatgtttgcatgcaaatgtcccgatgggaaagatgaaagctggttaactgaagtttgttgcagacaaatagaagcatctgcatatatttttggtagctctaaaaataaaacagttgtaaaacctagtttaaaaaaggcttccatcatagcgagttctgtaacatcctcagctttgaaaaagcttaaaacctcggctaaggttggctttgcagtcggcgaagctatgaatgcagccaagcatttaggcgatatgcctgcaaatttatgcactccaagaataattgaaagaaaagttaaagccttaaaaaaaccatttccaaaattaaagatttcaacttttaatgaaaaagacttggctaaacttaaaatgggttctttcttaagtgttggaagaggaagtgatgagccttcaagaatgatgacaattgagcataaaggtggaaaagctggtgaaaaaccaattgtcctggtaggaaaaggaataacctttgatactggtggtatatcgttaaagccatcccctgcaatggatgaaatgaaatgggatatgtgcggagcagcctcggtatttggtgtaatgattgctctagcgagactcaacgcaaaagttaatgttgtgggtcttcttgcatgtgctgagaatatgccctctgctcatgcaactaaacctggagatgttgtaacatcaatgtcaggacaaactattgaaatccttaatactgatgcagaaggaagattagtactttgcgatgctcttacatatgttaagaaatataagcctgctcatgtaatcgatatagccacattaactggagcatgtgtagttgctcttggaaactatgcatctggtttaatggcaaatgatcaaaaacttgctgataagatcttgcaagctggagaaaattctggcgatagagcatggcaattacctctctgggatgaatataaatcttgcaccaaaacaaattttgctgatttagcaaatataggtggtgctggtgctggcactgttacagcagcagc

SEQ ID NO: 261991 - DNA, 865 bp, Unknown
  Bacterial polypeptide expressing nucleotide sequence isolated from the Sargasso Sea
gataaccaccgcctcgcaggcgctcgtcggactttccataccaagcgctgcgattgacgtgactagtttcaaagttaaaggggtaaatacagactggctcgtagaatctgcgatggccagtctcagccacagctcctaccaatttaatcaatacaaaagcaaagcgtcgaaaaaatttcagcttaagtccgcagttttttatgtcgatgcgctcgaaaaacgcggtctagcgaaaaccatcaaatgcgggaacgcgttagatgaaggattagccttcgccaaggatctcggcaatcagccgccaaatatttgcaatcctgattacttgctttcagagactagacgactcctgaagggtgaaaaggtcaaggttagtcagctggatgaaagaaaaatgacgagtctgggtatgggcgcctttatggccgtatccaagggaagtgatgctcaggggagaatgatcataattgagtattctggcggaaaaaaaggcgacgcacccactgttttagttggcaagggcatcacgtttgacactggtggaatctcgttaaaaccgccaccagggatggatgaaatgaagttcgatatgtgtggtgccgcagccgtcctaggcgtcaccagggcagtgatctctgccaaactcccaataaacttggtgacgatagttgcggccgcagagaatatgccgagtggtcgagccaccaggcctggtgacatagtcaccacaagctcgggcaagacagtggagatattgaatactgatgctgaagggcgactcgtcttatgtgatgcgattaattacgctctgagatacaagccaaaatccatcgtagacgttgcgaccttgaccggagcatgcatc

SEQ ID NO: 261992 - DNA, 484 bp, Unknown
  Bacterial polypeptide expressing nucleotide sequence isolated from the Sargasso Sea
aggtgatattttaacaacgatgtcggggcaaacggttgaagtacttaataccgatgctgaaggtcgtttagtattatgtgatgcgttaacctacgtagagcgttttgacccagataccgtcatagatgtagccacccttacaggtgcatgtattgttgcattaggtgctcatgcaacaggcttgcttgcaaaccataacccccttgcccacgacttattgaaagcgtctgagcaaagtggcgaccgtgcatggcagctaccactgtgggacgattaccaagaccaactagaaagcccatttgctgattttactaacttaggtgggcgcgcggcaggcacaattaccgcagcgtgttttttatctaagttcaccaaaaaatataattgggcgcatttagatgtagcgggtactgcatggcgaagtggtgcaaataaaggcgcaacaggacgccctgttcctatgctaactcagtatttattgaac

SEQ ID NO: 261993 - DNA, 430 bp, Unknown
  Bacterial polypeptide expressing nucleotide sequence isolated from the Sargasso Sea
catggagtttagcgtaaagagcggtagccccgaaaaacaacgctcagcctgcatcgttgtcggtgtttatgaaccccgccgtctatccggcatcgccgagcaattagacaagattagcgaaggttatatcagtaatctactgcgtcgcggcgatttagaaggtaagcctggccaaatgttattactgcaccacgttcctaacgtattgagtgaacgagtgctgttagtcggttgcggcaaagaacgagaactagacgaacgccagtacaagcagatcatcactaaaaccatcaacaccttaaatgaaacaggttcaatggaagccgtgtgcttcttgaccgagttacacgtgaaaggtcgcgatacctattggaaagttcgccaagcggtcgaaacgaccaatagcagtttatatagcttcgatgcgctc

SEQ ID NO: 261994 - DNA, 644 bp, Unknown
  Bacterial polypeptide expressing nucleotide sequence isolated from the Sargasso Sea
cgaaatgaaatacgatatgtgtggagctgctacagttgtgggggtaactgctgctcttgccgaaatgagcgcttccgtgaacttcgtagggataatccctgctgtcgaaaacatgcctgacggcgcggcgtcgagacctggagatatcgtcacaagcatgtccggcaaaacgatagaaatactcaacacagatgcggaaggacgcttgattttgtgtgacgcactaacctactgtgagaaattcgacccggaagtagtaatagatatcgccaccttgacaggagcttgcatcgttgcgctcggatctcaagccagtggtttgatgagcaacgatgatcgacttgcggacgatcttttagctgcgggacagagatgcggtgataaagcatggaggctcccaatttgggatgggtatcaaaagcagattgatagcccttttgcggatatggccaacgtcggaggaagagctgccggaactataacagcagcgtgcttcctcgcccgatttgccgaaaattatcgttgggctcacttagacatagccggaacagcttgggtgtcgggcaaaaacaaatctgccagcggtagacccgtacctctgttagtagaatatataatgcacagagcagcactactgtcatgac

SEQ ID NO: 261995 - DNA, 661 bp, Unknown
  Bacterial polypeptide expressing nucleotide sequence isolated from the Sargasso Sea
gatgaaatgaagtttgatatgtgcggtgctgctgcagttttgggtgccatgaaaattattgggcagataaatccacaaataaatgtggtaggtgtcattgctgcaacagaaaatctgcctggaggggatgcccaacgaccgggagacattgttaccgcatataatggtaaacgtgtggaaatacttaacactgatgcagaaggtagactcatccttggagacgccttaagttatgtggtcaaggaatttaagccaaatgcagttattgacctggcgactcttaccggagcctgcatcacagcattaggtcactacgcatcaggtgctatcacaaacaacgatattttgatggaacaggtaaggaaagctgctaatctaagcggtgataaggtatggcaactacccagctttccagaatatggtgagtcaatcaagggcaaatatggtgacttgcagaacataggggttggagattcaggaacaataataggtggtatgtttttagaacattttgttgacaataccccttgggtgcatctagatattgccggaacagcatggaacgtcaagcaccttggttatcaaccaaatagtggtgcaacaggagttggagtgaagcttcttgccgatcttgtacagaactgggaactgattaaataac

SEQ ID NO: 261996 - DNA, 889 bp, Unknown
  Bacterial polypeptide expressing nucleotide sequence isolated from the Sargasso Sea
tctggttgcaagaaaaatagtaagtaaaaataaatcagcttcactaaaagtactcaatgaggcacaaatgaaaaagcttggaatgaattcacttctatcagtgacagctggtgctcaagagcctgcaaaaatgattatcgctgagtttaaaaatggtcaaaagagtcaaaaaccagttgctattgtaggtaaaggtatcacctttgataccggaggtatttcactaaaaccttctaataaaatggatgaaatgaaatatgatatgtgtggagcggcaacaaccattgggctcttgcaaatggttactgatctgaatcttcccatcaatgcagtttttgttgtaccggcttgtgaaaacataccaagtagtacagcaacattgcctggtgatgtcgtaaaatcaatgtctggtacaaccattgaggtattgaatacagatgctgaaggaaggctgattcttgcagatgcactgacctatactcaaagatataagcctaaactgattatagatatggctacgctaaccggagcttgtgttgttgcacttggggcacaccattcaggtcttatgagtaactctgatcaactagcagaaaagctgtttcaatgtggacagtccactgatgatgtgacatggagacttcctttgacagaggaatatgcaaaccagatcgtcagtaattttgctgatgttgccaatatcagcacccgtggctcaggagctgggacaattacagcaggctgctttttgcaaaaatttgtaggtgattatgattgggcgcatattgacattgcgggtgtggcctgggctgaaggagccaacaaaggtgcaactggaagaccaatggggctgatgtctgaatttctgataaacgaatcaaatacataa

SEQ ID NO: 261997 - DNA, 572 bp, Unknown
  Bacterial polypeptide expressing nucleotide sequence isolated from the Sargasso Sea
actaaagctcccgataaatgttgttgggataatccctgcaacagaaaatatgccaagtggtgatgcaacaaaccccggagatatttttacaagcatgtctgggcaaacagttgaggtcttaaacaccgatgctgaaggtcgtttaatcctgtgtgatgcgattacttatagtaaaaaatataatccggaagttgttattgatattgcaacattaactggcgcgtgtgtgattgcgctaggtaagcacgctacaggtttgctaagtaatcataatcctttagcaagagaattaatcaatgccggtgaagaatctggtgatcgtgtctggcagctacccttatgggatgaataccagcagcaattaaacagcccgtttgctgatatcgcaaacattggcggtagggaggcaggaactattactgcagcctgctttctttcacgatttgctgaaaaactacaatgggcgcatcttgatatcgcaggaacagcatggctatctggaagcaagaaaggagcaacgggaaggcctgtttctcttttaatgcaatatattcttaacaaaataaaataat

SEQ ID NO: 261998 - DNA, 883 bp, Unknown
  Bacterial polypeptide expressing nucleotide sequence isolated from the Sargasso Sea
gatctaaaacctaaagatctcgcatttacagccaaaaatattgcaagacagcataaaatggaatgtaccgttttggaggaaaaacaaatgaaaaaacttggtatggaaatgctgctaggtgtttctaagggctctcgtgaaccagccaagttaattcttatggaatattttcatcaaaaagcaaaacaaacagttgctttagttggcaaaggagtaacatttgattcaggaggtatatctcttaaaccagggaaaaatatggacgaaatgaagttcgatatgtgtggtgctgccgcagttttgggtgccatggaaatcattggacaactaaatcctaaaataaatgtgatcggagtcattgcagcaacagaaaatttaccaggtggggatgcccaaagacccggagatattgttaccgcatataatggtaaacgtgtggaaatacttaataccgatgcagaagggagacttatccttggagatgctttaagttatgtagtcaaagagtttaagccaaacgctattattgacctagcgactcttactggagcctgcatcaccgcattaggtcactacgcatctggtgcaattacaaataacaataaattgatggagctagtacgaaaagcagcaaatttgagtggtgatagagtatggcagctcccaagctttccagaatatggggaatcaatcaaggggaaatatggtgacttacagaacattggtgtcggagattcaggaacaattgtaggcggtatgtttttagaacattttgttgataatactccttgggttcatctggatattgccggcactgcatggaacgtcaagcacgttggctatcagccaaacagtgagcaacaggattggagtgaggctactt

SEQ ID NO: 261999 - DNA, 1516 bp, Unknown
  Bacterial polypeptide expressing nucleotide sequence isolated from the Sargasso Sea
tatggcttacaaagtcttatcaagtctaacagcaaacaatattaattctgcagatctattaaaagtaaaaacagatctcttaattattgctgttaacaaaaaaacatcgtcagcaagtgaactcaatgcactgcaatcaaatccacaatcattgatgaaagagtcaataaaagaaattaatagtggatcaagaaaatctatctttctacctgctccagcgaaggtggctgctaaaaatattttgctcattaaagagccagattcaaaagcggccagttttttagttcttcgatattatgaagaaatcatgagcttagttaaatcagctaaagcgaaagattttgcttaccttatgagctcgactacttcaaaagactttgatttagtctgggcagctgaagctgcagctcgaacatttgaatctgcagcttatacttttaatgcaactaagaataaaactgcaaagccagttaccgttaaaaaaggaactattttaattgggagcctaacgtcagccaaacttaaagctgtgaaagctgctgtcaagcttggtcacgctgttggcgagggtatgaatgcaactaaacaccttggtgacttgccagcaaatcattgcaccccaaggattattgaacgcaaaacaaaagcactcaagaaagattttccagccctcaagatatcaagtctgaatgaaaaagatatggagagattaaaaatgggatcgtatttatcagttggaagaggtagtgatgagccatctagaatgatgaccattgagtacaaaggtggtgccaaaaataagcagcccgttgtattagtaggaaaaggaattacgtttgatacaggcggaatctctataaaaccgagtccagcgatggatgaaatgaaatgggatatgtgcggagcagcttctgtatttggaattatgcaaacacttgctaggcttaaagctaaagtaaatgttgtaggtttgctggtttgcgcagaaaacatgccatctgctcatgctactaaacctggtgatgttgtaacttcaatgtcaggacaaaccattgaaattttaaatactgatgccgaaggtaggctggttctatgcgatgcgttgacttactcaaagaaattcaaacctagtcatgttattgatatggcaaccctaactggtgctgtagtgattgcgcttggaagccctgctaccggtgttatggccaacaatcagcctcttgcagataaaatcttagctgctggcgagaaatctggtgatagagcttggcaacttccactatgggaagaatatgcacactgtactaaaacaaattttgctgatctcgcaaacattggaggtggaagggaagctggtaccattcatgctgcatctttcctatctaactttactaaagatttcaaatgggctcacatggacattgcagcaagtgcatggaatggtggcgcgaaaaaaggtggcactggtagaccggtacctttattagctgaattaattttaaatggaaatttataa

SEQ ID NO: 262000 - DNA, 1480 bp, Unknown
  Bacterial polypeptide expressing nucleotide sequence isolated from the Sargasso Sea
ttgaaaaaaaaccttcttaaagtgaagtcagactctcttatcattggagtaaatgaaggcaatgctttgaatccaatatcatctaagattgatcaagcaactaatggagtgataaaaaaattagcaaaaagaaaggagtttgaggggaaagttggtcaacaagcatatgttgctgctccagaaggattatcggcagaaagactttatttgataggatttggaaaatcaaaagatctactgtctaacgaagatatagataaaatattaaactcgacaataagttcattaaaatcaagtaaatccaataatgcttctatctgttttccttctctaaaatattctaataagtcacaaaatgattcttggttgttacaaaaaatggcaaccttttttgagaatagagtttatacatatgatgcgaaacttaataaaaaaaataaatctgttaatcacttaaaaaaagtaaatttatttttagaatcatctctatctgcaacaaatcaaagaaaagctttaaaaacaggtcaagttattgggcaaggcatgaattctgccaaagaccttgctaaccttccaggaaatatttgtactccttcttatttagcttcgacttctagggcagcggcaaaaaaatacgcaaaactttcttgtaaagtttttggagagagagaaatgaaaaaaatgggcatggactgcttgctctcagtaggcaatggaagtgctcaagaatcgaaacttatttctatgtcttatctaggtggaaaaaaaggtgaccagccttatgccattgttggaaaaggaataacttttgatacaggaggaataagcttaaaacctggtgccgctatggacgaaatgaaatttgatatgtgtggtgcagctagtgtaattgctaccatgcaagttgtttctgaacttaaactacctataaatgtggtaggcgttgttgcgagtgctgaaaatatgcctggcagtaaagcaactaaacctggtgatgtagtcaaaacgatgtcaggactaacagttgaaatcttaaatacagatgctgaaggaaggttggttttagctgatgccttaacttatgttaaaagatttaagcctaaaacagtggttgatatagcaactcttactggagctgtaataatcgctctaggatactcaacttctgggttaatgagtaataatgataaattagctaaagatttattaaatgctggtcaaaaagcttctgataaggcttggcaactaccactttgggatgtctaccaaaaagatttagatagtaattttgcagatatcgcaaatattgggggaagagctggaacgattactgccgcttgcttcttatctagattcgctgaagattttccttgggctcacttagatgttgcagggactgctagttacaaaggcgctgcaaaggggggatccggaagaccagttccattattaagccaatatttgattgataaagcttagt

SEQ ID NO: 262001 - DNA, 940 bp, Unknown
  Bacterial polypeptide expressing nucleotide sequence isolated from the Sargasso Sea
gatgaatgcagcaaaagatctagctaatctacctggaaatgtatgcacaccttcttacttggccagcacttctagaacagcttcaagaaattatcaaaacttgagttgcaaggtttttggtgaaaaagaaatgaagaaaatgggtatggactgtttattatctgtagggaatggaagcgctcaagaatctaaacttatttctatgaactatcaaggtggaaaaaaaggacaaaagccttacgcaatagttggtaaaggaataacttttgatacaggaggaattagtcttaagcctcctgcgactatggatgagatgaaatttgacatgtgcggggctgccagtgtgatagcaacaatgcaagttgtcgcagaattaaaattacctataaacctgattggagtagttgctagtgctgaaaatatgcctgggagtaaagcaaccaaacctggtgatgttgttaaaacaatgtcaggcaaaacagtagagatattaaacactgacgccgaaggtcgattggttttagccgatgctctgacttatgtggagagatttaatcctgtttctgtgatagatattgctactttgactggggcagtaattatggcacttggctactcaacttcaggtttaatgagtaataatgatgaactggcaaaaagattattggaagctggtgaaaaggcttctgatagagcatggcagctacctctttgggatgtctatcaaaaagatctagacagcaactttgcggatattgcaaatataggaggtcgagctggaaccataacggcagcttgctttctgtcaagatttgccgagaagtatccctgggcgcatctagacgttgctggaacagcaagccttaaaggtgctgcaaaaggaggttcaggtaggcctgttcctcttctaagccaatatcttattgatatagctggataa

SEQ ID NO: 262002 - DNA, 568 bp, Unknown
  Bacterial polypeptide expressing nucleotide sequence isolated from the Sargasso Sea
tttgataaaaccaaagtctaatatcattggagtagtcgcttctgctgaaaatatgcctggcagcaaggcaaccaaacctggagatgttgttaaaacaatgtctgggcaaactgtggagatacttaatacagatgcagaaggacgattagttctttgcgatgcactcacctatgtagaaagatttaaacccaaaaatgtaatagatatagcgacattaactggagcagtaatagtagctttaggtcatgttgcttcaggtttgatgagtaataatcagaaattagccgacaaaataatagatgctggtcatgcttcaatggataaagcatggcaattgcctctatgggatgaatatcaaggtgatttggatagtaattttgctgatatagccaacattggtgggcgagctggaacaattactgctgcgtgtttcctttcaaggtttactaaaaagtatccttgggcgcatcttgatgtagctgggacagctcatgggtctggaaaagccaaagcctcaagaggaagacctgttccactcttaactaattacctattgtctcaatcgtaa

SEQ ID NO: 262003 - DNA, 751 bp, Unknown
  Bacterial polypeptide expressing nucleotide sequence isolated from the Sargasso Sea
atgattacgatccgttataacggagccaaggcaaaccaagcgccagtcatactgatcggaaaggggatcacctttgacacaggcggtatctctttaaaacctccccctgcgatggacgagatgaaattcgacatgtgcggagccgcatcagttattggcgcgacgatggccgcgatagaagcaaaactcaaaataaatctaattactatcgtggcagcagcagaaaatatgccaagtggaagggccacacggcctggagacattgtcaaatcttattctggaaagactatcgagattctcaacactgacgccgagggaaggctagttttatgtgatgcgattgcttacgctaaatcttttaagcccaaagcaatcgtcgatgtcgcgaccttgaccggggcatgtatagttgccttgggtagccatgcaagtgccttgtactcaaatgatgaccagcttgcgaactctttagagagtgccgcaaatgaatctggagataaggtctggcgaatgccactttgggaagaatatcagggaaatctcaagagcaattttgccgatatggctaatgtcggaggaagagaagctggaagcgtcgttgccgcctgctttctctctcgtttcgcagacaatgaaaaatgggctcacctggatatagctggtagcgcgtttcattccggaccaagaaaagggtccaccgggcgacccgttccgctgctatttaagtaccttcagagccaggaaaactaaa

SEQ ID NO: 262004 - DNA, 1306 bp, Unknown
  Bacterial polypeptide expressing nucleotide sequence isolated from the Sargasso Sea
gctccagcgaaggtggctgctaaaaatattttgttaattaaagagccagactcaaaagcggccagttttttagttcttcgatattacgaagaaatcatgagcttagttaaatcagctaaagcaaaagattttgcttatcttatgagctcgaccacttcaaaagactttgatttagtttgggcagctgaagttgcagctcgaacatttgaatctgcagcttatactttcaatgcaactaaaaataaaactgcaaagccagtaactgttaagaaaggaactattttaattgggggcttaacgtcagctaaacttaaagcagttaaagctgctgtcaagcttggtcatgctgttggcgagggtatgaatgcaactaagcaccttggtgacttaccagcaaatcattgcaccccaaggataattgaacgcaaaacaaaagcactcaagaaagattttccagccctcaagatatctagtcttaatgaaaaagatatggaacgattaaaaatgggatcgtatttatcagttggaagaggtagtgatgagccatctagaatgatgaccattgagtacaaaggtggtgccaaaaataagcagcccattgtattagtcggaaaaggaattacgtttgatacaggtggaatctctattaaaccgagtccagcgatggatgaaatgaaatgggatatgtgtggagcagcttctgtatttggaattatgcaaacacttgctaggcttaaagctaaagttaatgttgtaggtttgctggtttgcgcagaaaatatgccttctgctcatgctactaaacctggtgatgttgtaacttcaatgtcaggacaaaccattgaaattttaaatactgatgccgaaggtaggctggttctatgtgatgcgttaacttactcaaagaaattcaaacctagtcatgttattgatatggcaaccctaacaggtgctgttgtgattgcgcttggaagccctgctactggtgttatggccaacaatcaacctcttgcagataaaatcttagctgctggtgaaaaatctggtgatagagcttggcaacttcctctatgggaagagtatgcacactgcaccaaaacaaattttgctgatctcgcaaacattgggggtggaagggaagctggtaccattcatgcagcatctttcctgtctaactttaccaaagatttcaaatgggcccacatggacattgcagcaagtgcatggaatggtggcgcgaaaaagggtggcactggtagaccggtacctttattagctgaattaattttaaatggaaatttataag

SEQ ID NO: 262005 - DNA, 1249 bp, Unknown
  Bacterial polypeptide expressing nucleotide sequence isolated from the Sargasso Sea
gaaaggtcttagcagtgaagatattgataagattgcaatgtctgtaacaacttgtctaactacaaaaaaatcttcaacaggtattgtttcattaccttctatgaaacatgaatctaaagaaaataccgatgagactttgctgcagaaaataggtaccgctgttgaaagcaaggcttatacctacgacgcgaaacttaataagaaaaataaaaaaattaattaccttaaaaaagtctcaattgttattgattcaaagcaaggcgtagctaagttgcgcaaagggctcaaaactgggcaagtcataggacaaggaatgaatgtagctaaagatttagcaaatcttcctggaaatgtgtgcactccatcctatttggcaactagttctagatctgcagccaataaatatcaaaaacttagttgtagggtttatggcgaaaaggagatgaaaaaaatgggtatggattgtttactttcagttggaaacggaagtgcgcaagaatcaaaactcatttcaatgaattatcaaggcggaaaaaaaggcgataaaccatatgcgattgttggcaagggtattacttttgatacgggaggaataagcctcaaacctcctccgaccatggatgaaatgaaatttgatatgtgtggtgctgcgagtgttatagcgactatgcaagtagtttcagaacttaaacttccaatcaatatagttggtgttgtggcaagcgcagaaaatatgccaggtagcaaggccactaagcctggtgatgtcgtacgcacaatgtcaggtaagactgttgaaatattaaatactgatgctgagggacgattggtcttagctgatgctttgacttatgttgaaagatttgaaccccgatcagttgtagacattgctacactaaccggtgcggtgataatggcattgggttattctacatctggactaatgtctaataatgacaaactcgcagaagaattattggaggctggccgaaaagcttcagatagagcttggcaattgcccttatgggatgtttaccaaaaggatttggatagtaattttgcagatatcgcaaacataggtggtcgagctggtactattaccgctgcatgttttttatcaagatttgcagagaaatacccatgggctcatctcgatgtggccggaactgctagttataaaggagctgcaaaaggcggttcaggcagacctgtgcctctcctgagtcaatatctcattgataagtcttag

SEQ ID NO: 262006 - DNA, 838 bp, Unknown
  Bacterial polypeptide expressing nucleotide sequence isolated from the Sargasso Sea
actaagttgtagagtttatggtgaaaaggagatgaaaaaaatgggcatggattgtttgctttcagttggaaacggaagtgctcaagagtcaaaactcatttcaatgaattatcaaggcggaaaaaaaggcgataaaccatatgcgattgttggcaagggcattacttttgatacgggaggaataagcctcaaacctcctccgaccatggatgaaatgaaatttgatatgtgtggtgctgcgagtgttatagcgactatgcaagtagtttcagaacttaaacttccgatcaatatagttggtgttgtggcaagtgcagaaaatatgccaggtagtaaagccactaagcctggtgatgtcgtacgcacaatgtctggtaagactgttgaaatattaaatactgatgctgagggacgattggtcttagctgatgctttgacttatgttgaaagatttgaaccccgatcagtagtagacatcgctacacttaccggagcggtgataatggctttaggttattccacatctggactaatgtctaataacgacaaactcgcagaagaattattagaggctggccgtaaagcttcagatagagcttggcaattgcccttatgggatgtttaccaaaaagatttggatagtaattttgcagatatcgcaaatataggtggtcgagctggtacgattaccgctgcatgttttttatcaagatttgcagagaaatacccttgggctcatctcgatgtggccggaactgctagttataaaggagctgcaaaaggtggttcaggtagacctgtacctctcctgagtcaatatctcatagataagtcttag

SEQ ID NO: 262007 - DNA, 817 bp, Unknown
  Bacterial polypeptide expressing nucleotide sequence isolated from the Sargasso Sea
atgaaaaaacttggaatgggatctctactttcagtttcggaaggaagtgttgaaccagctaagttagtcaccatgcaatataaaggtggcaagaaagatgccaaacctatagttcttgttggaaaaggtattacctttgatacaggcggaataagtcttaagccaggagcaaagatggatctgatgaagtgggatatgtctggtgctggttctgtaataggaactatgtgcgcggtagcagcttcaaaattacctgttaatttagtctgtacagtagctttatctgagaatatgccggctggtaatgctacaaaacctggggatgtggtaactactatgtcaggacaaacagtagagatcttaaacactgacgctgaaggacgattagttctttgtgatgctcttacttatgtaaagaaatataaccctaaagtagttataaatacggcaactttaactggagcggtaataatagctttaggtgacgttgcggctggtgttatgggtaatgatcaaaaattaatagataagattcttgaggctggtcaaaatactggtgaaaaagcatggcagctaccactctgggatgaatatcaaagctatttagattcaaattttgctgatattgcaaatattgctcctggaagagcagctggaactattgaagctggttgttttctatctagattcactgaagactacaaatgggctcatatagacattgcaggagttgctgatattggcgaaggaaaaaataaaggttctacaggaaaacctgttggattgttatttgagtacgtaaatagcaatcgttaat

SEQ ID NO: 262008 - DNA, 1084 bp, Unknown
  Bacterial polypeptide expressing nucleotide sequence isolated from the Sargasso Sea
atgaaattcgctacgaataataaaaaaattaatgagattaaatctgattgcctgatggtatcggtttttgatgatggaaaattgagaggggctactaaactggtcaatacttctaatgaaaaattgattgaagactttatcaaaaataaagacattcaaggaaaaattggtcaaacaagaatcattccagtaacgggaaaatcttataaaagaattgttttagttggatgtggaacatttgaaaatttctctcagaaaaattacagaaaagctgtcatttctgctttgaaaaagatttcactgagcaaccataagaaagttgtcagcttgattcatgatggcgctgaaaatattaatagtccaaaaaaagcatatagaatggcaagggttttggctgaatcatggcatgcaataagctatcaatacaccacaacaaaagaaagcaatcataaaaaattaaatctcagaagaattgagattggaacaaatggcaagaaggctacaaaagatctgaaaattggactagagcatggtgatgcaataggaaaagctacacagctggtaaggcatttaggtgatcttccggcaaatatttgtacgcccagttacttagcatctgttgctagaaaaatagtaagtaaaaataaatcagcttcattaaaagtactcaatgaatctcaaatgaaaaagcttgggatgaattcacttttatcggttacagctggtgctcaagagcctgcaaaaatgatcatcgctgagtttaaaaatggtcaaaagagtcagaaaccagtcgcagtggttggtaagggtattacttttgataccggaggtatttcactcaagccttctaataaaatggatgaaatgaaatatgatatgtgtggagcagcgacaaccattgggctcttgcaaatggttaccgatctgaatcttcccatcaatgccgtttttgttgtaccggcttgtgaaaacatacccagtagtacagcaacattgcctggtgatgtcgtaaaatcaatgtctggtacaaccattgaggtattgaatacagatgctgaaggaaggctgattcttgcagatgcac

SEQ ID NO: 262009 - DNA, 1474 bp, Unknown
  Bacterial polypeptide expressing nucleotide sequence isolated from the Sargasso Sea
atggcattttataaagcactagaaaatattgagttgaaaaaatattcagaggcaacccctgaaacatttgctgttgtcttttattcgaaggcatctttaaaaaatagtagtttatttgacaaggatatgaagcaaaaagtttcaacatattttgaagatgagaaaagaacttcaatgctcttgtctaaagagctcactggcgatgaaagggatattttaatcataaaagattttgatactaaaaaacctgatcataaaaaatataagtggatgaatagtatatttgtcggattagataaatatggtgtagttcaagcatccatttatgctgatacaagcagcctttttaaggataaaggtttcgtctttgatttagctaaaatagctgaaaaggcaacgtatagatacacagatacaaatcctaatactaaatctgaagcagtacttaaaactatagatatatgtgttgagaaactaaatgcttcgctaaataaatcggttgaacttggtttcaatgttggtcgtggtgcaaatactgcaagaaatttaggtaatagacctgcgaatcatgcaactccaacttacattgctaatcatgtaaatgaattagccaaagaaattggtggttttactgtagaaattttagaagaaaaggacatgaaaaaacttggaatgggatctctactttctgtttccgagggaagtgtggagccagctaagctagtaacaatgcaatataaaggcggcaagaaagatgccaaaccaatagttcttgttggtaagggtataacctttgatacaggtggaataagtcttaaaccaggagcaaagatggatctgatgaaatgggatatgtctggcgctggttctgtaataggaactatgtgtgcagtagcggcttctaaattacctgtcaatttggtttgtacagtagctttatcagagaatatgccagctggtaatgcaacaaaacctggagatgtagtaactactatgtcagggcaaacagtagagatcttaaatactgatgctgaaggaagattggtgctttgtgatgctcttacttacattaagaaatataaccctaaagtggtcataaatacggcaactttaactggagccgtaataatagctttaggtgatgttgcagctggcgtaatgggtaatgatcaaaaattaatagataagatccttgaggctggtcagaatactggtgagaaagcatggcaactgccactctgggatgaatatcagagctatttagattcaaattttgctgatattgcaaatattgctcctggaagagcagctggaactatcgaagctggttgttttctatctagatttactgaagactacaaatgggctcatatagacattgccggagttgctgatattggcgaaggaaaaaataaaggttcaacaggaaaacctgtcggattgttatttgagtacgtaaatagcaatcgttaat

SEQ ID NO: 262010 - DNA, 886 bp, Unknown
  Bacterial polypeptide expressing nucleotide sequence isolated from the Sargasso Sea
agacctcggcaacctgccgccgaacctctgccacccgagctatctcgccgaagaagccaaaaacctgggcaaggcctacaaaaacctcaaggtcgaaatcctcgacgagaagaaactcaaggaactcggtgccggcgccttcctcgccgtggcccagggcagcgaccaaccgccacggatgatcgtgctcaactatcagggcggcaaaaagaacgagaaaccctacgccctggttggcaaaggcatcaccttcgacaccggcggcatcagcatcaagccggctgccggcatggatgagatgaagtacgacatgtgcggcgccgccagcgtgttcggcaccctcaaggccgtgctggagctacaactgcctatcaacctggtgtgcctgctggcctgcgccgagaacatgccaagcggcggcgcgactcgccctggcgatatcgtcaccaccatgagcgggcagaccgtggaaatcctcaacaccgacgccgaaggccgcctggtgctgtgcgacacactgacctatgccgagcgcttcaagccgcaggcggtgatcgacatcgccacccttaccggcgcctgcatcgttgccctgggcagcaatgtgtccggtttgatgggtaacaacgacgaactggtgcagcagattctcggcgccggcctgaccgccgatgaccgcgcctggcagttgccgctgtatgacgagtaccaggaacagctcgacagcccgtttgccgatatcgccaatatcggcgggccaaaagccggcaccattaccgctggctgcttcctttcgcgctttgccaaggcctacaactgggcgcacctggatatcgccggcaccgcttggatcagtggtggcaaggacaaaggcgcgaccggtcgt

SEQ ID NO: 262011 - DNA, 641 bp, Unknown
  Bacterial polypeptide expressing nucleotide sequence isolated from the Sargasso Sea
catggagtttagcgtaaagagcggtagccccgaaaaacaacgctcagcctgcatcgttgtcggtgtttatgaaccccgccgtctatccggcatcgccgagcaattagacaagattagcgaaggttatatcagtaatctactgcgtcgcggcgatttagaaggtaagcctggccaaatgttattactgcaccacgttcctaacgtattgagtgaacgagtgctgttagtcggttgcggcaaagaacgagaactagacgaacgccagtacaagcagatcatcactaaaaccatcaacaccttaaatgaaacaggttcaatggaagccgtgtgcttcttgaccgagttacacgtgaaaggtcgcgatacctattggaaagttcgccaagcggtcgaaacgaccaatagcagtttatatagcttcgatgcgctcaaaacccgtaaaggtgagacccgtcgtccgctgcgcaagttagtgtttaatgtcccaactcgccgcgaactgaccttaggtgagcgtgcgattgagcacggcatggccgtatctgccggtatgcatttatgccgcgatgtggctaacatgccgccaaatatctgtaatccagcctatttagcctctcaggctcgccaattggccgaagttc

SEQ ID NO: 262012 - DNA, 682 bp, Unknown
  Bacterial polypeptide expressing nucleotide sequence isolated from the Sargasso Sea
accttcgataccggagggatatcaataaaaccatctcaagcaatggatgagatgaaatatgacatgtgtggtgcggcctctgttttgggaacactctcagctgttgccgagctaggactgccaatcaatgttgttggtattgttccggcaacagaaaatatgccaagtggtgatgcaacaaatcctggagatatttttactagtatgtcaggtcaaacagttgaagttttaaacacggatgcagagggacgtttaatactttgtgatgcaattacctatagtaaaaaatataacccagatgtggtaattgatatagccacgctaacgggtgcatgtgtgattgcacttggtaaacatgcaacaggtttattaagcaatcataatcctttggcaagagaaataatcaatgctggcgaggacgccggtgatcgtgcatggcaattgcctctttgggatgaatatcaacaacaattaaatagtccatttgcagatattgcaaatataggaggaagagatgcaggaacgatcacggctgcctgctttctctcacggttcgctgaaaaacttcagtgggcgcatctcgatattgctggtacagcgtggttatcgggaagcaagaaaggtgcaacaggtcggcctgtctctttattgatgcaatacattctcaataaaattaaataat

SEQ ID NO: 262013 - DNA, 931 bp, Unknown
  Bacterial polypeptide expressing nucleotide sequence isolated from the Sargasso Sea
gggcaatctgccgcccaacgactgctacccggagtacctgagcggcgtggcccgagatctgggcaaggcctacgacaaactcaccgtcaaggtgatcagtcaggcccaggctgaaaaaatgggcatgggcgccttcgttgccgtggccaagggttccgagcgccagggccagattatcgtcatggaatacaagggcgccaaacccggcaaggcgggccccgtggccctggtcggcaagggcatcaccttcgataccggcggcatctctctcaagcccggcgccaatatggacgagatgaaatacgacatgggcggtgctgccagcgtgttcggcagcgtcaagaccgtgtgcgagctggacctgcccatccacatggtggcggtggttgcagcggcggaaaacatgcccgacgggcgcgcttcccggcccggggatatcgtcaagaccctgtccgggcagaccgtggaaattctcaatactgacgcggaaggccggctggtgctgtgtgatgcgttgacctacgtgcagcagaaacacaaaccacacaccgtcattgatgtcgcgaccctcaccggcgcctgcgttgtcgccctgggcgcccatgcccaggcggtatacagcaacgacgatgatctcagccaggcgctgctggccgccggccaggagaccggtgaccggggctggcccatgcccctgtgggacgagtaccagagccagctggacagtcccttcgccgacatgcagaacatcggcggccccaaagccggctccatcactgccgcctgcttcctgtcacgttttgccaaggacgtgaaatgggcgcatctggatatcgccggcaccgcctggatcagcggcggcatgagtaaaggtgctaccggtcgtccggtccccatgctgacccgctatctgatgaacctgagccagtaa

SEQ ID NO: 262014 - DNA, 943 bp, Unknown
  Bacterial polypeptide expressing nucleotide sequence isolated from the Sargasso Sea
gatgttgttattacaccatgtaccaaacgtgttgagtgaacgtgtactgttggtgggttgtggtaaagagcgtgagctggacgaacgtcagtaccgccaaatcattgccaaaaccatcagcaccctgaatgaaaccggctcaatggaagctgtgtgtttcttatctgagctgcatgtcaaaggccgtgacacctactggaaagtacgtcatgcagtggaaaccacccaagactgcttatacgtattcgacaaattaaaaagccgcaaagacgaaacccgtcgcccgctgcgtaaaattgtctttaacgtaccaacccgtcgcgatttaaccataggcgaaaaagccgttgaacatggtttagctgttgctgctggtatcaaggtgtgtaaagacgtatcgaatatgccgccaaacatctgtactccggcttatctggccgatcaggcagtggcgttagcgcaacacgacaaagtgtcggtggaagtgctgggcattgctgaaatgacagctttgggtatgcattcgtacgtggctgttggccgtggctcagaaaacgaagccaaaatggcggtgattaaatacaacggcgctatggataacagcgcgcctgtggtgttggtcggcaaaggtttaacctttgacacaggcggtatcagcatcaagccaagcgatgcgatggacgaaatgaaatacgacatgtgtggcgcagcttcagtgctgggcactatgcatgcagtggtgagtttaggtttgcctattaatatggtagctgtgctggctggcgctgaaaacatgccggacggccgcgcttatcgcccaggtgatattttaacgaccatgtctggtcagacagtagaagtgttaaacacagatgctgaaggccgtttagtgctctgtgacgccttaacttatgtcgagcgttttgacccgggacgtggtcat

SEQ ID NO: 262015 - DNA, 702 bp, Unknown
  Bacterial polypeptide expressing nucleotide sequence isolated from the Sargasso Sea
catggagtttagcgtaaagagcggtagccccgaaaaacaacgctcagcctgcatcgttgtcggtgtttatgaaccccgccgtctatccggcatcgccgagcaattagacaagattagcgaaggttatatcagtaatctactgcgtcgcggcgatttagaaggtaagcctggccaaatgttattactgcaccacgttcctaacgtattgagtgaacgagtgctgttagtcggttgcggcaaagaacgagaactagacgaacgccagtacaagcagatcatcactaaaaccatcaacaccttaaatgaaacaggttcaatggaagccgtgtgcttcttgaccgagttacacgtgaaaggtcgcgatacctattggaaagttcgccaagcggtcgaaacgaccaatagcagtttatatagcttcgatgcgctcaaaacccgtaaaggtgagacccgtcgtccgctgcgcaagttagtgtttaatgtcccaactcgccgcgaactgaccttaggtgagcgtgcgattgagcacggcatggccgtatctgccggtatgcatttatgccgcgatgtggctaacatgccgccaaatatctgtaatccagcctatttagcctctcaggctcgccaattggccgaagttcacgaaaacctgcatgtcacgactgtaggcgaagagcaaatggcgaaactcggcatgaactc

SEQ ID NO: 262016 - DNA, 850 bp, Unknown
  Bacterial polypeptide expressing nucleotide sequence isolated from the Sargasso Sea
cttacgggtgaaagtattgagccaggctcaggcagaaaaaatgggcatgggagtcttccacgcggtagccaaaggctccgaacgccagggccaaatcattgtgatggaatacaagggcgccaaacccaccaagcaaggcccggttgccctggtcggcaaagggatcaccttcgataccggcggcatttctctaaagcccggcgccaccatggatgagatgaaatatgacatgggcggcgctgccagtgttttcggctcagtaaaaactgtgtgcgaactggacctgcctatccatctggttgccgtcgtggcagcggcggaaaacatgcccgatggccgcgccgctcgcccgggagatatcgtcaaaaccctatccggccagaccgtggaaattctcaataccgatgctgaaggtcgactggtactgtgcgacgcgttgacctacgtgcagcaaaaacacaaaccacacacagtcatcgacatcgccaccctgaccggcgcttgcgttgtcgccctcggcgcccacgcccaggcagtctactccaacgacgatgacctcagcgaagctctgctcgccgcgggtaaagaaaccggcgaccgcggctggccgatgcccctgtgggatgagtaccaggggcagctggacagcccctttgccgacatgcaaaacattggcggccccaaagcaggctccatcaccgccgcctgcttcctctcccgcttcaccaaagaagtaaaatgggcgcatctggatatcgccggcaccgcctggaccagcggcggcatgagcaaaggcgccaccggtcgccctgtgcctatgcttacacggtatttgatggacaacgcctaa

SEQ ID NO: 262017 - DNA, 1510 bp, Unknown
  Bacterial polypeptide expressing nucleotide sequence isolated from the Sargasso Sea
atggagttcagtgtaaaaagcggtagcccggagaaacagcggagtgcgtgcatcgtcgtgggtgtctttgaaccacgccgcctctctccgattgcagagcagctcgacaagatcagcgacgggtacatcagcgcactgctgcgtcgtggcgaactggaaggcaaaccgggtcaaaccctgttgctgcaccatgttcctaacgttctgtctgagcgaattctcctcattggttgtggcaaagagcgcgaacttgatgagcgccagtacaagcaggtcattcagaaaaccatcaatacgctgaatgatactggctcaatggaagccgtctgctttctgactgagctgcacgtcaaagggcgcaataactactggaaagtgcgccaggccgttgagacggcacaggaaacgctgtacagctttgaccagttgaagaccaacaaaagcgagccgcgtcgcccgctgcgtaaaatggtcttcaacgtgccgacccgccgcgagctgaccagcggtgagcgtgcgatccaacacggtctggcaatcgccgctggcattaaagcggcgaaagatctcggcaacatgccgccgaacatctgtaacgcagcttatctggcctctcaggcgcgtcagttggcagacagctacagcaaaaatgttgtgacccgcgtgatcggcgagcagcagatgaaagagctgggtatgcactcttatctcgccgtcggtcacggttcgcagaacgagtcgctgatgtcagtcatcgagtacaaaggcaacccgtccgaagacgcgcgtccaattgtactggtcggtaaagggttaaccttcgactccggcggtatctccatcaaaccagccgaaggcatggatgagatgaagtacgacatgtgcggcgcggcggctgtgtacggcgtaatgcgcatggtggccgagcttcagttgcccatcaacgtcgtcggcgtactggcgggctgcgaaaatatgccgggtggccgcgcgtatcgcccaggcgacgtgctgaccaccatgtctggtcagaccgttgaagtgctcaataccgacgccgaaggccgtctggtgctgtgcgacgtgttaacctacgtcgagcgctttgagccggaggcggtgattgacgttgcgaccctgaccggcgcgtgcgtgattgcgctgggccatcacattaccggcctgatgtcgaaccacaacccgctggcgcatgagctgatcggtgcgtccgagcaggctggcgaccgcgcgtggcgtttgccgctgggtgatgaataccaggagcagttagagtctaactttgcggatatggcgaacatcggcggacgccctggcggcgccattaccgcgggctgcttcctgtcacgctttacccgtaagtacaactgggcgcacctggatatcgccggtaccgcatggcgttccggtaaggccaaaggtgcaaccggtcgtccggtcgcgttactgtcgcagttcctgctcaatcgcgcgggttttaacggcgaagagt

SEQ ID NO: 262018 - DNA, 1312 bp, Unknown
  Bacterial polypeptide expressing nucleotide sequence isolated from the Sargasso Sea
cgcccggaaaccctgaaaaccgcgaccctggtcgtcgccatcggtgaaggccgcaagctcggcattgcggccaaggccgtcgacctggccagcaacggtgcgctgagcgccgtgctcaagcgtggcgacatcgccggcaagccgggccagaccctgctgctgcacagcctgccgggactcaaggccgagcgtgtactgctggtgggctgcggcaagggcgatctatccgaccgtcaactgcgcaaattggttgcaagcgtgcatggcgtgctcaagggtctgggcggcggcgatgccctgctcgccctgggcgaactcaaggtcaagggccgcaatacctacggcaagacccgcctgatcgtcgagaccctggccgatggcacctacctgttcgagcagttcaagagccagaaagccgacccgcgcgccctgaagaaaatcaccctggtcgtcgacaaggccgagctggccgatgccgaacgcggcctgcagcatgcccgcgccatcgccaacggcgtcgccttcaccaaagacctgggcaacctgccaccgaacctctgccaccccagctacctggccgaagaggccaaggccctgggcaaggcgcacaagaacctcaaggtcgagatcctcgacgagaagaagctcaaggagctgggcgccggtgccttcctcgccgtggcccagggcagcgagcagccgccacggatgatcgtcatgcactaccaaggcggtaagaaggacgacaaacccttcgccctggtcggtaaaggcatcaccttcgataccggtggcatcagcatcaaaccggccgccggcatggacgagatgaagtacgacatgtgcggcgccgccagcgtgttcggtaccctcaaggccgtgctcgagctgcaactgccgatcaacctggtgtgcctgctggcctgcgccgagaacatgcccagcggccgcgccacccgccccggcgacatcgtcaccaccatgagcgggcagaccgtggaaatcctcaacaccgacgccgaaggccgtctggtgctgtgcgataccctgacctacgccgagcgcttcaagccgcaggcggtgatcgacatcgccaccctaaccggcgcctgcatcgtcgccctgggcagcaacgtttccggcctgatgggcaacaacgacgcgctgatcaagcagattctcaaggctggcgaaagcgccgacgatcgcgcctggcaactgccgctgtacgacgagtaccaggagcagcttgatagccccttcgccgacatcgccaacatcggcggggccgaaggccggcaccatcaccgcc

SEQ ID NO: 262019 - DNA, 1507 bp, Unknown
  Bacterial polypeptide expressing nucleotide sequence isolated from the Sargasso Sea
atggagttcagcgtaaaaagcggtagtccggaaaaacaacgaagtgcatgtatcgttgtcggcgtttatgagccgcgccgcttgtcagcggttgccgaacagctggataaaatcagcgaaggctacatcagcaatttattacgtcggggcgatttagaaggcaaacccggccaaatgttgttattacaccatgtgcctaacgtgttgagtgaacgtgtactgttggtgggctgtggtaaagagcgtgagctggacgaacgtcagtaccgccaaatcatcgccaaaactatcagcaccttaaacgaaaccggctcaatggaagctgtgtgtttcttatctgagttgcatgtcaaaggccgtgacacctactggaaagtacgtcatgcggtggaaaccacccaagattgcttatacgtattcgacaaactaaaaagccgcaaagacgaaacccgtcgcccgctgcgtaaaattgtctttaacgtaccaacccgtcgcgacttaaccataggcgaaaaagccgttgaacatggtttggctgtggctgctggtatcaaagtctgtaaagacgtatcgaatatgccgccaaacatctgtactccggcttatctggccgatcaggccgtggcgttggcgcaacacgacaaagtatcggtggaagtgctgggcatagctgaaatgacagctttgggtatgcattcctacgtggctgttggccgaggctccgaaaacgaagccaaaatggcggtgattaaatacaacggcgctatggataacagcgcgccagtggtattggtcggcaaaggcttaacctttgataccggcggtatcagcatcaagccaagcgatgcgatggacgaaatgaaatacgacatgtgtggcgcagcttcagtgctgggtactatgcatgctgtggtcagtttaggtttgcctattaatatggtggctgtgctggctggcgctgaaaacatgccggatggccgcgcttatcgtccaggtgatattttaactactatgtcgggtcagacggttgaagtgctcaacactgacgctgaaggccgtttagtgctgtgtgatgctttaacttatgttgagcgttttgacccggacgtcgtgattgacgtagcgactttaacaggcgcttgtgtcattgctttaggtaaacacgcttcaggtttattaagtaaccataacccactggcgcatgaaattttaaatgcgtcggatcaaagtggtgacagagcctggcgtttgcctttgtgggatgactatcaggatcaactggaaagcccgtttgcggatttcagtaacttaggtggccgcgccgccggtactattaccgccgcttgtttcctgtcgcgcttcacccgtaaatacaactgggcgcatttggatattgccggtactgcatggcgcagtggtggtaaagacaaaggagcaacaggccgccctgtggctatgttgacccagtttttaattaaccgtgtcggaaccgacatcgagggataac

SEQ ID NO: 262020 - DNA, 460 bp, Unknown
  Bacterial polypeptide expressing nucleotide sequence isolated from the Sargasso Sea
gatgccgaaggccgtttagtattatgcgacgcgctaacctatgtagagcgcttcgacccagagctagtaattgacgtagccacgctaactggcgcagcgattatcgcacttggtcaccatgcaacagcggtaatgagtacgcacaatccgcttgctcacgaactacttaatgcgtcagagcaaagctcagatcgcgcatggcgtctaccgctatgggacgattaccaagagcagcttgaaagcccgtttgccgacatgacgaaccttggtggtcgcccagcagggtcaattactgcgggttgtttcttgtcgcgcttcactaagaagtacaactgggctcaccttgatattgccggtacggcatggcgcagtggtaagaacaaaggcgcaacaggccgtccagtgcctatgctgtctcagttcctaatgaaccgcgctgatatcaagttagaggactaat

SEQ ID NO: 262021 - DNA, 1510 bp, Unknown
  Bacterial polypeptide expressing nucleotide sequence isolated from the Sargasso Sea
tatgagtataaaggtcttaaatacaatatctacaaaaaatctttctggaaaagaaattgttaaatataaatcatcattattagttgtcgttgttgataaaacatttactaaaaatgaattaatttctaacatggatgaatcaactaaaggctcttttaaaagatcaattcgtcattttctgaattcaaaagcttcttcggttaatcttcaaaatgtaaatggtctgcaagcaaaagatgtcctgctagtaaagtctcccgatcaagaagatacttttgtttggttagattgtttcaaagctattccaaaaatggccaattctcttgaaaaacgtgatttatctgtaatttttgcagcaagtcttcccaaaggcaaagatttaaattgggtgcttgaaattacagcaagacaaattgaatcaaatgcttatatctttggttcatcaaaaaataaaactgttaaaaaaccctctttaaaatctgcttctgttattgttaattctctttcaccaaaagatcttacacttgctagaaaagctgtgaaaagaggctttgcagtaggtgaagcaatgaatgctgcaaagtttttaggtgatctgcctgctaatcattgcactccgagaattatagagagaaaagtaaaagggcttaaaaaactatttccaaaacttaaaataaaaacctttggagaaaaagatttgacctcgttaaagatgggttcttttttaagtgttggtagaggcagtgatgagccttctaggatgatgacaatagagtatacaggaggaaaatcatcagaaaaaccaattgttctggtaggtaaaggtattacttttgatactggtggaatttctcttaaaccttcccctgcaatggatgaaatgaaatgggacatgtgtggtgctgcatctgtgtttggaaccatgattgcactcgcaagattaaatgcaaaggttaatgttgttggtgtaatggcatgtgctgagaacatgccctctgctcacgcaacaaaacctggagatgttgttacatcaatgtctggtcaaacaatagaaatattaaatactgatgctgagggcagattagtgctatgtgatgctctcacctatgtaaaaagattcaagccagcacatgtcatagatattgcaactttgaccggtgcagtagttgtagcccttggaaacttcgcatctggtttgatggcaaatgatcaaaaacttgctgataagctattagattgtggtgagattactggtgaccgtgcttggcagcttcccttatggaatgagtacaaagcatgcacaaaaactaactttgcagacctagcaaacattggcggtgcaggtgctgggacagtaactgcagcatgttttttgtctaaatttacagacgattatagttgggcacatatagacattgcaggaacagcatggatgaaaggtgctgaaaaaggaggtacgggaagacctgtcccgcttttatgtcaacatattttgggcgctgtgaaataa

SEQ ID NO: 262022 - DNA, 1510 bp, Unknown
  Bacterial polypeptide expressing nucleotide sequence isolated from the Sargasso Sea
atggagtttagcgtaaagagcggtagccccgaaaaacaacgctcagcctgcatcgttgtcggtgtttatgaaccccgccgtctatccggtatcgccgagcaattagacaagattagcgaaggttatatcagtaatctactgcgtcgcggcgatttagaaggtaagcctgggcagatgttattactgcaccacgttcctaatgtattgagtgaacgagtgctgttagtcggttgcggcaaagaacgagaactagacgagcgccagtacaagcagattatcactaaaaccatcaacaccttaaatgaaaccggttcaatggaagccgtatgcttcttaaccgagttacacgttaaaggtcgcgatacctattggaaagttcgccaagcggtcgaaaccaccaatagcagtttatacagctttgatgcgctcaaaacccgtaaaggtgagacccgtcgtccgctgcgtaaattagtatttaatgtgccaacacgtcgcgaattaaccttaggtgaacgcgcgattgagcacggcatggccgtttctgctggtatgcatttatgccgcgatgtggctaacatgccgccaaatatctgtaatccagcctatttagcctctcaagctcgccaattggccgaagtccacgaaaatctacatgtatcaactgtaggtgaagagcaaatggcgaaactcggcatgaactcttaccttgccgtaggtcgcgccagcgccaatgaatccattatgacagtgatggaatacaaaggtgccgtcgacaacacggaaaaacctatcgtattgattggtaaaggcttgactttcgattcaggcggtatttcattaaaaccgggcgaagccatggatgaaatgaaatacgacatgggtggcgcagcaggtgttatcggcaccatgaaagccatttgtgaaatgaagctgcctatcaacgtcgtcggtattctcgcaggttgtgaaaacatgccatcgggcaacgcttaccgcccaggtgacattttaaccaccatgtcagggcaaactgttgaagttctgaacaccgacgccgaaggccgtctagtattgtgtgatgtgttaacctatgttgaacgtttcgatcctgaattagtgattgacactgctacgctcactggcgcctgcgtgattgccttaggtaaacatgcatcgggtctgttctcatcacataatccacttgcgcacgagctactcaacgcaggtgagcagagtggtgaccgcgcatggcgtatgccactgtgggatgagtaccaagatatgctcgatagcccatttgcggatatgaccaacttaggtggtcgtccagcgggcgcgattactgcggcttgtttcctctcgcgtttcgcgaaaaagtacaactgggctcacctagatgtcgcaggtacggcgtggaacagcggtgccaataaaggttcaaccggccgcccagtaccgattttgactcagttcctgatcaaccgtgctggcgtcgaattaggcgaataat

SEQ ID NO: 262023 - DNA, 1510 bp, Unknown
  Bacterial polypeptide expressing nucleotide sequence isolated from the Sargasso Sea
catggagtttagcgtaaagagcggtagccccgaaaaacaacgctcagcctgcatcgttgtcggtgtttatgaaccccgccgtctatccggcatcgccgagcaattagacaagattagcgaaggttatatcagtaatctactgcgtcgcggcgatttagaaggtaagcctggccaaatgttattactgcaccacgttcctaacgtattgagtgaacgagtgctgttagtcggttgcggcaaagaacgagaactagacgaacgccagtacaagcagatcatcactaaaaccatcaacaccttaaatgaaacaggttcaatggaagccgtgtgcttcttgaccgagttacacgtgaaaggtcgcgatacctattggaaagttcgccaagcggtcgaaacgaccaatagcagtttatatagcttcgatgcgctcaaaacccgtaaaggtgagacccgtcgtccgctgcgcaagttagtgtttaatgtcccaactcgccgcgaactgaccttaggtgagcgtgcgattgagcacggcatggccgtatctgccggtatgcatttatgccgcgatgtggctaacatgccgccaaatatctgtaatccagcctatttagcctctcaggctcgccaattggccgaagttcacgaaaacctgcatgtcacgactgtaggcgaagagcaaatggcgaaactcggcatgaactcttaccttgccgttggccgcgcaagtgccaatgaatccattatgacagtgatggaatacaagggtgccgttgacagcacagagaaacctatcgtattgattggtaaaggcttaaccttcgactcaggcggtatttcattaaaaccaggcgaagccatggatgaaatgaaatacgacatgggcggcgctgctggtgttatcggcaccatgaaagccatctgtgatatgaagctgcccatcaacgtcgtcggtattctcgcgggctgcgaaaacatgccatcgggcaatgcttaccgcccaggtgacattttaaccacaatgtcgggtcagaccgttgaagtcctcaacaccgatgccgaaggccgtctggtactgtgtgacgtattaacctatgttgagcgttttgacccagagctggttatcgacacggcaacactgacaggcgcctgtgtgattgccttaggcaaacatgcctcaggcctgttctcatcacacaaccctctggctcatgagctactcaatgctggtgagcaaagtggtgaccgcgcatggcgcatgccactgtgggatgagtaccaggatatgctcgatagcccatttgccgacatgaccaacttaggtggtcgtccagcgggcgcgattaccgcggcttgtttcctgtctcgtttcgccaaaaagtacaactgggctcacttagatgtggcgggtactgcgtggaacagcggcgcgaataaaggttcaaccggtcgccctgtgccaattctgactcagttcctgatcaatcgagctggcgtagaattaggcgagtaa

SEQ ID NO: 262024 - DNA, 1510 bp, Unknown
  Bacterial polypeptide expressing nucleotide sequence isolated from the Sargasso Sea
atggagttcagtgtaaagagtggcagtcctgagaagcaacgcagtgcctgcgtcgtggtcggcgtattcgagccgcgtcgcctctctccggttgccgaacaactggacaagatcagcgatggctacatcagttcgctgctgcgccgtggcgacctggaagggaaaccaggccagatgctgttgctgcatcaagtaccgggcgtgctcagcgagcgcgtgctgctggtcggttgcggcaaggagcgggaactcgacgaacgccagtacaagcagatcatcaacaagaccatcaccaccctcaacgaaaccggctccatggaggcggtctgcttcctgaccgagctgcacgtcaagggacgggatacctattggaaggtgcgccaggcggtagaaaccaccaaggcgggcctctacagcttcgatcagttcaagaccaacaaggccgagccgcgccgtccgctgcgcaagctggtattcaacgtgccaacgcgtcgggaactgaccattggtgaaaaagccatcgcccacggcctggccgtggcgaaaggggtgcgcgtctgtcgcgacgtggccaacatgccgcccaatgtctgcaatccggcctatctcgcttcccaggcccgtcgtctggccgatgccttcgacaacatcaccaccaaggtgatcggcgagcaggagatggccgagctcggcatgaactcctatctggcggtggcgcgcggctccgacaacgaagccatgatggccatcatcgagtacaagggtcatccggatgccaaacccatcgtgctggtcggcaaggggctgactttcgactccggcggcatctccatcaagccggccgagggcatggacgagatgaagtacgacatgggtggcgccgcctccgtgctcggtaccatgcacgccctggcccagctgcagctgcccatcaacgtcatcggcgtactggcgggctgcgagaacatgccgggtggcaacgcctatcgcccgggcgacatcctcacctccatgtccggtcagaccatcgaagtgctgaacaccgatgcggaaggccgcctggtgctgtgcgatgcgctgacctacgtggatcgcttcgagccggaaaccgtgatcgacgtggccaccttgaccggtgcctgcatcatcgccctgggtcaccacaccacgggtctcttggccaaccacaacccgctggcccatgagctgctcaacgcctccgagcaggcgggtgatcgcgcctggcgcctgccgctgttcgacgagtatcaggaacagctggagagtccgtttgccgacatggccaacatcggtggccgcccggccggtaccatcaccgccgcagccttcctgtcacgcttcaccaagaagtacaactgggcccacctggatatcgccgggaccgcctggaagagtggcaaggagaaaggctccaccgggcgtccggtgcctctgctgacccagttcctgctgaaccggtcaggggtggtcatcgaagagaaggagtaac

SEQ ID NO: 262025 - DNA, 697 bp, Unknown
  Bacterial polypeptide expressing nucleotide sequence isolated from the Sargasso Sea
aaaaggtattacatttgatactgggggaatatctataaaaccaagtaatgcaatggatgaaatgaaatatgatatgtgtggagctgccagtgttataggaactatgaatgcattagcaagtatgaaagctaaaacaaatgttattggtattgttgcagcttcagaaaatatgcctggaggtatggcaacgaagccaggcgatgttgttaagacaatgtcaggtcaaactgttgaaattttaaatactgatgctgagggaaggctagttttatgcgacgcattaacatatgcttcaaaatttaagcctgaaatagtaatagacattgcaacacttaccggtgcagttcttgtagctttaggaaaagttgcaagtggcttaatgtcaaataattcttctcttgcaaaagaaatttgtaaagtatcttttgaaagtcatgattatgtatgggaattaccaatgtgggaagaatttcaatctgaacttgatagtaattttgcagatatagcgaatataggtaaaagatatgcaggttccatcactgctgcatgttttctatcaagatttacagaaaattataaatgggcacatcttgatatagccggtacggcttggaatgaaggttcaaataaaggaggcactggaaggccagtttctctgttgacatacttcgttttaaagaaagcaaaaataatttaa

SEQ ID NO: 262026 - DNA, 873 bp, Unknown
  Bacterial polypeptide expressing nucleotide sequence isolated from the Sargasso Sea
aaagaaaagttaaagccttaaaaaaaccatttccaaaattaaagatttcaacttttaatgaaaaagacttggctaaacttaaaatgggttctttcttaagcgttggaagaggaagtgatgagccttcaagaatgatgacaattgagcataaaggtggaaaagctggtgaaaaaccaattgtcctagtaggtaaaggaataacctttgatactggcggtatatcgttaaagccatcccctgcaatggatgaaatgaaatgggatatgtgcggagcagcctcggtatttggcgtaatgattgctctagcgagactcaacgcaaaagttaatgttgtgggtcttcttgcatgtgctgagaatatgccctctgctcatgcaactaaacctggagatgttgtaacatcaatgtcaggacaaactattgaaatccttaatactgatgcagaaggaagattagtactttgcgatgctcttacatatgttaagaaatataagcctgctcatgtaatcgatatagccacattaactggagcatgtgtagttgctcttggtaactatgcatctggtttaatggcaaatgatcaaaaacttgctgataagatattgcaagctggagaaaattctggcgatagagcatggcaattacctctctgggatgaatataaatcttgcaccaaaacaaattttgctgatttagcaaatataggtggtgctggtgctggcactgttacagcagcatgctttttatcaaagtttacagaagactatagctgggctcatttagatattgccggaactgcatgggttaaaggcaatgaaaaaggtggaacaggaaggccagttcctcttctttgtgatttgattctaagctaaa

SEQ ID NO: 262027 - DNA, 599 bp, Unknown
  Bacterial polypeptide expressing nucleotide sequence isolated from the Sargasso Sea
tatgaaaatatcaataaaatctttagatgatattcaaaaaatgaaagtagctggaaaattagctgctcaggttcttgatatgattactccatatgtcaaaccaggagtatcaacaggagaattagatagactttgttatgaacatatagttaacgttcaaggagctgttcctgcaaatattggatataagggctatgaaaaaacaatttgctcaagtgtaaatcaagtcatatgtcatgggattccagataataatagaatccttaaagatggagatatcctaaatatcgatgtaactgttattaaaaatggttggcatggagatacttctaaaatgtttttagtaggtaaatgtgctcctcataatgagagattagttaggattactcaagaatgtctttataaagctattgaagttgtaaagcctggagcatacttaggcgatattggttatataattgaaaagcatgctaaagaaaatcactatagcgtagtagaagattactgcggtcatggtataggtcaaatctatcatgaagatccacaagttcttcattatggaaaaaaaggtactggtcctcaaattaaagaagggatgt

SEQ ID NO: 262028 - DNA, 337 bp, Unknown
  Bacterial polypeptide expressing nucleotide sequence isolated from the Sargasso Sea
ttgaataacactattcatagctcagatgattttgaagggatgcgaaaagcaggtaatcttgcggcatctacattggatctacttgttgaaaaagtaaaaccaggcgtttccactgaagagatagataatattgcatttgattatatagtccgtcatggaggccttattgcccctttattttataagggctatcctaagtcagtttgtacttcaattaatcacgtaatatgtcatggaattccttcatcaagaattttagaaaatggagatattgtgaatatcgatgtaacagtaattgttgatggctggcacggcgatacgagccgcatgtttcctg

SEQ ID NO: 262029 - DNA, 610 bp, Unknown
  Bacterial polypeptide expressing nucleotide sequence isolated from the Sargasso Sea
atccattccagccaatattgggtataacggttatgaaaaaactctttgtacttcaatcaataacgttatctgtcatggtattcctgatgcacaaaaaaaattaaaagatggtgatatcgtaaacattgatgtaacagttcttcatgatggttggcatggcgatacatcaagaatgtttttggttggtaaagttgcgccccatgctaaaagacttgttgatataacaagagattgtatgtatgcaggcattgaacaagtaaaaccaggcgctaaattagggaatgttggtcatgccattcaggtaatggctgaaaaaaattattactcagtagttcgagattattgtggacatggaattggtaaggtctatcatgaagagccgcaagtaatgcattatggtgaaaaagatacaggcatagagttaaaagaagggatgtgtttcacaatagaaccgatgatcaatttaggcacacaccatgcaaaagtattagaagatggttggacagtagtaactaaagatggaaaactttcagctcaatgggagcatactgtagccgtcacagatagcggatatgaaatcttgactctcggagaggaaaaagtggtatga

SEQ ID NO: 262030 - DNA, 796 bp, Unknown
  Bacterial polypeptide expressing nucleotide sequence isolated from the Sargasso Sea
atgagaaacaacaatatcccaatacacacgaaaaaagattttgagggcatgagggaagctggttctttagctgctgaagttctagatactttaaatgaaaagattgttccaggaataagtactcaagaaataaatgacatatgtcatgatcaaattattcaaaacaaagcaataccagctcctttaaattataaaggtttcccaaaatcagtttgtacatctgtaaatcatgttgtttgtcatgggattccttctgaaaaaaaaattctttctgatggcgatatagtaaatgtagatgtaacagttattctaaatggttggcatggtgatagttctagaatgtttgtagcaggcaagacaaataaaaaaagttatgaatttttgaaaataacttatgaatctttattaattggtattagtgaagctaaacctggtaagcatattggtgatataggaaataaaattcagaaacttgcagaaggaaaaggttattctgtagtaagagatttttgtggtcatggaattggaaaagaatttcatactccacctagtgttttgcactttggagaaccaggtgagggaccaatattagagcctggaatgtttttaacaattgaaccaatgattaatttaggtggatggcaaacaaaaatactaaatgatggatggacagctgtaacaaaagataaatctttatctgctcaattcgaacatacaattggaataacagaagaaggaaatgaaatatttacattatctaaaaataatacagcttttccaataaaggatgtataag

SEQ ID NO: 262031 - DNA, 478 bp, Unknown
  Bacterial polypeptide expressing nucleotide sequence isolated from the Sargasso Sea
gatgagtgattataaagaaaaattcgaaaagatgaaagttgcaggtaatcttgcggcaagaaccttagatatgttaacagaaaacattaaagaaggtgtaagcacagactatattgataaattgggttatgagtttataagagacaatggaggctactctgctccgctatattatagaggtttcacaaaatcactatgtacatctctaaatcatgttgtctgccatggtataccttccgatagaattttgagagatggtgatgcagtgaatgtggatgtaactgcaattgttgatgagcattatggtgataccagtagaatgttttgcattggcaaaactccagtgaaactaaataacttaatcgaaacaacttacgagtcgatgatgagagcaattaaaattttaaaaccaggaattaaattaggtgatattggatacacaattcagtcatttgttgaagaaaaggtttttctgtag

SEQ ID NO: 262032 - DNA, 418 bp, Unknown
  Bacterial polypeptide expressing nucleotide sequence isolated from the Sargasso Sea
tatgaatcaaagaacaattaaattacatcaggaacaagattttgtagcaatgcgtaaagcaggaaaacttgcggcaatgacacttgactatatcacaccctttgtaaaaccaggtgttactactgatgaactagataaactctgccataatttcatcagtgaccataatggaattagtgcaccattaggctatagaggctttccaaagtctatatgtacatctattaaccatgttgtttgccatggcattccaagtgacaaaaaattaaagaacggggacataattaatattgacgtaacaccaacattagacggttggcacggtgattctagccgcatgtatccagtggggaaaccttcacgaaaagctctccggcttattgacgttacatatgaggcaatgatgaagggtatagaa

SEQ ID NO: 262033 - DNA, 193 bp, Unknown
  Bacterial polypeptide expressing nucleotide sequence isolated from the Sargasso Sea
atgacatttactattgaacctatgatcaactcaggaaaatatgatgtgaagatgttaaatgatggctggacagctgttacaaaagataaatctttatcagctcaatttgaacatacattaggaattactgaaaatggttatgaaatctttacagaatctgctaaaggttattcaaagcccccgtacttataat

SEQ ID NO: 262034 - DNA, 353 bp, Unknown
  Bacterial polypeptide expressing nucleotide sequence isolated from the Sargasso Sea
gttgctcaccgtgccgaaagatgtcgtgcgaacagattacgcggagacgtcgtacccgaaatctgaggcggagtctcggctgcagcaaatactgtacgagttgaaggatagcgagaaggagcagcttcgcaggtgttgcgtcgtctctcgcggtgcgctcgacgccgtcgttcgtgcgattcgtccgggtgttgtaccggatgagctcgatagaatctgtcacaactacatcacgcagcacggcgggtatccgtcgccgttgaattattacggctttccgaaatcgtgctgcatctccgtgaacgaggtcatctgtcacggcatcccggacgcgcgtccgttagagaagggcg

SEQ ID NO: 262035 - DNA, 457 bp, Unknown
  Bacterial polypeptide expressing nucleotide sequence isolated from the Sargasso Sea
aatgttttttgttggtgaagtatctgttaaggcaaaaaacttggttaataccacttacgatgctcttataaaaacaattaaaattttaaaatctgatgtttatttaggtgatattggattttcaattcaaagctatgtcgagtcaaaaggtttttctgttgtaagagatttttgcggacatggaataggaaaaaagtttcatgaaagtccaaatattttacattatggcgaaaaggggaaaggtcaaaaattaaaagagggaatgatttttactttagagccaatgattaatgaaggaatttttgagacaaagactcttaaggatggatggacagctgtaactaaagataaattattatctgcacaatttgaacacactgttgggataacaaataatggatgtgaaatatttaccttgtcaaaaaaaggtttagattttcccccatataaaatatga

SEQ ID NO: 262036 - DNA, 298 bp, Unknown
  Bacterial polypeptide expressing nucleotide sequence isolated from the Sargasso Sea
gtaagggacttttgtggtcacggactaggtaaaaaatttcatgaacctccaaacattttacataatggagaaccaaaaactggaaacagattgtctgcgggaatgttgtttacaattgaaccaatgattaatgagggtgaatataatacaaaattgctacaagatggttggacagcagttacaaaagataagtctttgtcagcacaatttgaacacacagttggagtaactagtaatggttatgaaatttttactttatctaagaaaaaaatggatctacctgaaacattaaaatgat

SEQ ID NO: 262037 - DNA, 623 bp, Unknown
  Bacterial polypeptide expressing nucleotide sequence isolated from the Sargasso Sea
caacacacagcaggcgattcccgcgcccctgaactacaagggcttccccaagtctatctgcacatccgtcaaccacgtgatctgtcacggcatcccgtccgagaagaaggtgctgaaggaaggcgacatcatcaatatcgatgtcaccgtcatcaaagacagctaccacggcgacaccagcaagatgtggattgtgggtaaacccaagcccggcaccgaacgcctgatccagatcactcaggagtgtctatataaaggcattgagctggtcaaacccggcacccgtctgggtgatattggccacgtgatacagcagcatgccgagaaacaccgttactccgttgtcagagactattgcggccacggcattggcaaagtgtttcatgaggagccccaggtaatgcactacggcaagcccggcaccggcatggaactcaaagaaggcatgacctttaccatcgagccgatgatcaaccagggcaaataccagaccaagctactggcagatggctggacggtggtcaccaaggatcacaaactgtcggcgcagtgggagcacaccattctggtaactgctgatggctatgaggtgctgacccgccgatcggaagagtcattctaag

SEQ ID NO: 262038 - DNA, 535 bp, Unknown
  Bacterial polypeptide expressing nucleotide sequence isolated from the Sargasso Sea
aatgattaagacccaagaagaagtaagaggcatgagagaggctggaagattagctgcggaagtgcttgatatgattactgattttgtaaaaccaggtatttctactggcgaattagataagatttgccatgagcatattgttaaggaacaaaaagctataccagcaaacgtaggttacagaggttttgagaagactttgtgtacaagtctaaatcaggttgtctgtcatggcatacctgatgataaaagatacttaaaaaatggagatattctaaatattgatgtgacggtaattaaagacggttggcatggtgatacttctaaaatgtttttagttggaaaatctgaaactcacaacgaaaggttggttaagatcactcaagaatgcctttacaagggaataaaagccgttagaccaggagccaaattaggagacataggccatgctatccaaaaacatgctgaaaaaaaccattactcggtggtagaggaatattgcggtcatgggattggtaaaatttatcatgatgagcct

SEQ ID NO: 262039 - DNA, 319 bp, Unknown
  Bacterial polypeptide expressing nucleotide sequence isolated from the Sargasso Sea
gaaaataaaaactactctgttgtaagagatttttgtggacacggaattggtcaacaatttcatactgctccaagtgtccttcattatggaaatattggagaaggcccagaattaaaacctggaatgttttttactatcgagccaatgattaacatcggtgattggaaagttaaaattttaaatgatggatggacagcagttaccaaggataaatcttattctgcccagtttgaacataccatagggattactgaagttggtaatgaaatttttactttatcaaaaaacaatacagattttcctataaatgatttataaa

SEQ ID NO: 262040 - DNA, 757 bp, Unknown
  Bacterial polypeptide expressing nucleotide sequence isolated from the Sargasso Sea
ttgaaaaataaacacggtattcacatttacaataaaaaagatttggatggtataaaaaaagcttgtgatattgcgtctgaaactctggacatggtcgctgatttaattgaaccaggtattactaccctttcactagataaagcatgccacgaatttattttattgaaaaatgctattcctgctacacttgggtacagaggatatcctaagtcttgttgcatatcacttaatcatgttgtctgccacggaataccaagcgaaaaaaaacttaaaaacggtgatattctgaatatagatgttacttgtatatttgacggttggttcggtgatacaagcagaatgtttatagttggagatattaatcttaaggcgaaaagattaattgaaattacacatgagtcacttcttaaaggcatagagaaggctatacctggaaatacttttggtgatattggtgcggctattcaaagctttgtagaaaaaaacaaaatgtcggtggtcaaagatttttgtggtcatggtataggtagtgatttccaccaacctcctaatgttcttcattacggaacaaaaaactcaggtcctaaacttgaaccaggcatgtgtttcacaatagaaccaatggtaaatattggtagaccagaaacaaaaatattgtctgataattggaccgcggtgacaagagataaatctctttcagctcaatttgagcatactattttcataaatgaaaaaggtaatgaaatctcacaaaatc

SEQ ID NO: 262041 - DNA, 211 bp, Unknown
  Bacterial polypeptide expressing nucleotide sequence isolated from the Sargasso Sea
aaaaggttattcagttgtaagagatttttgtggtcatggaattagcaacacatttcatgagtcgcctaatattcttcattatggaaaaaaaaatacaggtttggaagtttatgcagggatgacttttacaatagaacccatgattaacgctggaaagtatgacgttaagattttaaatgatggatggactgctgttactaaagataagtct

SEQ ID NO: 262042 - DNA, 245 bp, Unknown
  Bacterial polypeptide expressing nucleotide sequence isolated from the Sargasso Sea
atccatgaaggaggggcacgtgttcaccatcgagcccatgatcaacgccggcgactggcgggacgagacgtggccggatggttggacggctgtgacccgcgacggtaagcggtccgcgcagtacgagcacacgatggtggtgacgtcagatggcgtcgagatcttgacgcgcaggaacgaggactccccgagggtgttcccgtggacggatggggagagcgagggggtcgtgccggggagctgat

SEQ ID NO: 262043 - DNA, 592 bp, Unknown
  Bacterial polypeptide expressing nucleotide sequence isolated from the Sargasso Sea
aatgaatatttcgataaaaaattttaaagacattgaaaaaatgagaatagctggcaaattagcagccgaagttcttgaaatgattactcccttcgtcaaacctggagtttctaccggtgagcttgataaactttgtcatgatcacattgttaatatccaagacgccataccagcaaatgttggatacaaaggatatgaaaaaactatttgctcgagcataaatcaggttatatgccatggcatacctaacaatgaaaaatttctaaaagatggagacatccttaatattgatgtaacagttataaaagatggatggcatggagatacatcaaagatgtttcttgtaggtaaatgtgctcctcacaaccagcgattagtaaaaataactcaagaatgtctttacaagggcattgaggttgttaaaccgggagcatatcttggagatattggaaatgccattcagaaacacgcagaaagaaattactatagtgttgtagaagactactgtggtcatggtattggaaaaatttatcatgaagaacctcagatccttcactatggcaggcctgggacaggtatccagctaaaagaa

SEQ ID NO: 262044 - DNA, 676 bp, Unknown
  Bacterial polypeptide expressing nucleotide sequence isolated from the Sargasso Sea
aatgaatgaagaatttttaaaatcatttgatggaacaagagaagcaggtgctatcgcgtccggtgcacttgatgaattgaataccattataaaaccaggtgtaaccactgagaagatagataaagtatgttatgagtatattaatgatcatgatgcctactctgccccgttatattatagaggttttccaaaatcatgttgtacttctgcaaatcatattgtgtgtcatggaataccacagaataaaattttaagggatggagatatattaaacgtagatgtcacagcaattaagaatggttggcatggtgatacaagtagaatgtatttagttggagacgtttctgtgaaagcaaaaaaattaattaaggttacatatgaatcgatgctcaagggtatagaaatattaaaagaaggatcatttactggtgatataggtaatgcaatacaaactcatgttgaacaacagggtttttcagtagtgcgagatttttgtggtcatggacttggtagaaaatttcatcaatcaccaaatatattacattacggagaggagaaaactggtgaaaaattagttactggtatgttatttactattgagccaatgattaacgaaggtgattacaatacaaaagtattaagtgatgggtggacagcagtaacaaaagacaaattg

SEQ ID NO: 262045 - DNA, 579 bp, Unknown
  Bacterial polypeptide expressing nucleotide sequence isolated from the Sargasso Sea
attgaataacactattcatagttctgatgattttgaagggatgcgaaaagcaggtaatctcgcagcatctacattggatctacttgttgaaaaagtaagaccaggtgtttcaactgaagagttagataatattgcatttgattatatagtccgtcatggaggtcttattgcccctttattttataagggttatcctaaatcagtttgtacttcaattaatcacgtaatatgtcatggaattccttcatcaagaattttagaaaatggagatattgttaatatagatgtaacagtgattgttgatggctggcatggcgatacaagccgcatgtttcctgttggaaaaataaatgctaaagcacaaaaattaattgattgcacttttcatgcaatgcatgaaggcataaatgctgctcaacctgatgctacattaggtgatattggcaatgccattcaaacgtatgcagaaaaacaaaactacagtgttgttcgtgatttttgtggtcatggactaggaaaagtttttcatgagtttccaaacattcttcactacgggaataaaggtaaaggtgagaaaat

SEQ ID NO: 262046 - DNA, 547 bp, Unknown
  Bacterial polypeptide expressing nucleotide sequence isolated from the Sargasso Sea
ccaagtgaaaaaaaactactaaataatggcgatataataaatgttgatgttacagttatcttagatggttggtatggagatagctctagaatgtttgttgcgggtaaaacaaataaaaaaaattatgatttacttaagacaacatatgaatgtcttcatattggaataaaagaagctaaacctggaaaaacatttggagatataggattcaaaattcaagaatatgcagagtcaaaaaattattctgttgtgaaagatttttgtgggcatggaatcggaaagcaatttcatacccctccaagcgttcttcattatggaaaagagggtgaaggtattgaacttaaacctggaatgttttttacaatagagccaatgattaatttaggagactggagaataaaaatacttaatgatggatggaccgctgtaacaaaagacaaatctttttcagctcaattcgaacacactattggaattactgagaatggtaatgaaatttttaccttatcagaaaataatacagattttccaataaatgatttataaa

SEQ ID NO: 262047 - DNA, 444 bp, Unknown
  Bacterial polypeptide expressing nucleotide sequence isolated from the Sargasso Sea
gatgaataattattctgaaaaatttgaaaaaatgagagttgctggaaaactagcagctagtactctagatatgattactgagtatattaagccgggcataagtacagaaaaaattgacagattatgctttgaatatattagagataatggaggatactcagcacctttgttttatagaggatatacaaaatcagtttgcacatctctaaatcatgttatttgtcatggtattccatcagatagaactttggtcgagggtgatatattaaatattgatattactgcagtggtaaatgatttttacggggatactagtagaatgtatgtggtacctgatatttccgttaaggcaaaaaatttgatcgatactacttatgagtccttaattaattctattaaaattttaaaaccaggaataaaattaggagacataggatatgaaat

SEQ ID NO: 262048 - DNA, 367 bp, Unknown
  Bacterial polypeptide expressing nucleotide sequence isolated from the Sargasso Sea
atgagcaccgttaaacccaaaaccgacactgagatcgacgccatgcgcgaggcgggccgtctcgctgcagaggtcctcgagatgatcgagcctagagtcgaagtgggtatgacgaccggcgaaattgaccgcatttgtcacgatcacatcgttagcgtgcaaaaagcggtccccgcaccgcttaactataaaggattccccaaatcgatctgcacgtcggtgaacgaggtgatttgtcatggcatcccctcggacagcaagaaattacgcaatggcgacataatcaacatcgacgtcacggtaatcaaagacggctggcacggtgataccagcatcatgataggtgtcggcaacgtcgcgccccatg

SEQ ID NO: 262049 - DNA, 538 bp, Unknown
  Bacterial polypeptide expressing nucleotide sequence isolated from the Sargasso Sea
aaattttacaagaatggtgatataattaatgttgatataactgtaattgttgacggatggtatggagatagttctaggatgtatgtagcgggaaaaataaaagataaaaaaactcaaaatcttttaaaaacaacttatgagtgtctattgaaagggattgaaattgctaagccaggaaattattttggtgatataggaaatgcaattcaagaatatgctgaatctaaaaatttttcaatagtaagagatttttgtggtcatggtataggtaaacaatttcatacaccccctagcgttcttcattatggaaaaaaaggtggaggtttaaaaataaaaccaggaatgatatttactattgaaccaatgatcaatataggtggttgggaggttaaaacattgaatgatggatggacagcagttacgaaagataaatcactttcagcacagtttgaacacacaattggtattactgaaaaaggaaatgaaatattcactctttctcaaaatgatacatcttttccaataaataccatataag

SEQ ID NO: 262050 - DNA, 193 bp, Unknown
  Bacterial polypeptide expressing nucleotide sequence isolated from the Sargasso Sea
atgacatttacaattgaacctatgattaatgaaggtaaatttgctacaaaaatgcttaatgatggttggacagcagttacaaaagataaatctttgtctgcgcaatttgaacatacagttggaataacagaaaatggttatgaaatttttacagaatctgctaagggttatttaaagcctccatatttataat

SEQ ID NO: 262051 - DNA, 448 bp, Unknown
  Bacterial polypeptide expressing nucleotide sequence isolated from the Sargasso Sea
ttgtgtaggagaaacttcagttaaagcaaaaaatcttattaatgctacatatgaagctatgatgaaagctattaatattttaaaacctggtgttaaattaggtgacattggatatgaaatacaatcttttgttgaggataaaggtttttcagttgtaaaagatttctgtggccatggaattagtaatgtttttcatgaatatccaaatattcttcattatggaaaaaaaaatacaggtatttcattagaatcgggtatgacttttactatcgaaccaatgataaatagtgggaaatttgatgtaaaaattttagacgatggttggacggcagttacaaaagataaatctttatcagcacaatttgaacatactataggaattacagaaaatggttatgaaatatttacaaaatctgataaaaactatttaaggcctccttacaaataa

SEQ ID NO: 262052 - DNA, 580 bp, Unknown
  Bacterial polypeptide expressing nucleotide sequence isolated from the Sargasso Sea
atgataaaaagcatagaagaaataaacgggatgagagatgctggaaagttagccgcagaagtccttgatatgattactaattttgttaaaccaggtatttctacaggtgagcttgataagatttgccatgattatattgtagaagaacaaaaagccataccagctaatgttggctatagagggtttgaaaaaacattatgtaccagtctaaatcaggtcatttgtcatggtatacctgatgataaaaggttcttgaaaaatggggatatattaaacattgacgtgactgttattaaggatggttggcatggagacacttctaaaatgtttctagtaggcaaaactgaagctcataatgaaagacttgttaagattactcaagagtgcctctataaaggaatagaagctgtcatgcctggagctaaattaggagatataggtcatgccattcaagaacatgcagaaaagaaccactactcggtagttgaagagtattgcggacatggcattggaaaggtttatcatgatgaacctcaaatcttacattatggtaccccggaatactggattagaaattaaa

SEQ ID NO: 262053 - DNA, 399 bp, Unknown
  Bacterial polypeptide expressing nucleotide sequence isolated from the Sargasso Sea
aagcagaaaaattaattaacaccacttatgagtctatgatgaaagcaattagtattgttaaagaaggaatccacataggtgatataggttcaacaattcagactcacgttgaagcagagggattttcagtagttcaagatttttgtggacatggaattggacaaacatttcacaaagaaccaaatgtcctacattatggagaaaaaggtacaggtgaaaagttaaaggaaggtatgatatttactatagaacctatgataaatcttggtaattatgagaccaaaactttaaatgatggttggactgctgttacaaaagataaatcattgtcagcacaatttgaacatacaataggtgtaacaaaagatggttgtgaaatttttactcaatcaaattaag

SEQ ID NO: 262054 - DNA, 694 bp, Unknown
  Bacterial polypeptide expressing nucleotide sequence isolated from the Sargasso Sea
atgaatgaagaaattttaaaatcttttgataaaacacgtaaagctggtgctattgcagccggcgcattggatgttttagatgaaattataaagccaggagtaactactgaaaaaatagataaaatttgttttgaatatataaatgatcatggcgcatattctgccccattgttttatagaggttttcctaaatcatgttgtacatctaccaaccatattgtttgccatggaataccacaaaataaaactttgagagatggagatatagtaaatgtagatgttaccgcctttaaggatggttggcacggagatacaagtagaatgtttttagttggaaacgtttctgttaaagcaaaaaaattagtgaaagctacatatgattctatgatagaaggcattaagactttaaaagatgggtcttacattggtgatataggttcggctatacaaaagcatgttgagaaacaagggttttcagttgttagagatttttgtggccacggactcggaaagaaatttcacgaacctccaaatattttacattatggtgaccccaaaactggtgaaaaattaattagtggaatgttatttacaatagaaccaatgattaatgaaggggcattcaatacaaaagtattaaatgatggttggacggctgttactaaagacaaatctttatccgctacaatttgaa

SEQ ID NO: 262055 - DNA, 574 bp, Unknown
  Bacterial polypeptide expressing nucleotide sequence isolated from the Sargasso Sea
tctgtcaccatagtcgtatgccacggtattccaggtgaaaaaatattgaatgaaggtgatattttgaatattgatgtaacagttattctagatggatggttcggagatacaagcagaatgttttttgctgggaaaccttccattaaagcaaaaatattatgcgatattacttatcaatgcttaatggaaggaataaaagtttgtaagccaggaaataaacttggagatattgggtataaaattcaatcaatagcagaaggacaaaggttttctgttgttagagattttacaggtcatggcttaggtaaagtattccattgtgctcccactattcttcattttggtgaccctgatcaaggtatggaactaaaacctggaatgttttttaccgttgaaccaatgataaacgtaggaggttatgcaactaaaattttatctgacggttggactgctgtaaccagagacagatctttatcagctcaatttgaacacacaataggtataactgaaaatggacctgaaatttttacacaatcaaaattaggttttaataaaccaccttatgagatttaaa

SEQ ID NO: 262056 - DNA, 389 bp, Unknown
  Bacterial polypeptide expressing nucleotide sequence isolated from the Sargasso Sea
tatggttgatatcaaatcaaaattagatgttgaaagaatgaaagtggcaggtaaactggcctcagatgttttagtcatgatagaaccatatgtaacacaaggcatttcaaccgaagaattagaccaaatatgtcatgattatatagttaacaagcaaaaggcaattcctgcccctctgaactataaaggctttccaaaatccatatgcacatctgtaaatcatcaagtttgtcatggtattcctgctgctgacaaaatacttaaagatggtgatataataaatattgatatcactgtaataaaagatggttttcatggtgatactagtaaaatgttttttgtcggaaaaccatcagtattagcgaataggttatgtaaaattacgcagg

SEQ ID NO: 262057 - DNA, 606 bp, Unknown
  Bacterial polypeptide expressing nucleotide sequence isolated from the Sargasso Sea
tttacagaggttttccaagatcatgttgtacttcaccaaatcatgtaatttgccatggaatccctaaagataaaattttgaatgaaggagatatagttaatgtagatgtaacagtgctaaaagatggctggcatggtgatacgagcagaatgttttttgttggagaggtatctaccaaagcaaaaaaattagtacgaactacctatgaagcaatgacaaaatctatcaaaatattaagagatggtatttataccggagatctaggttctgttattcaaaatcatgttgaatcaaatgggttttccgtcgtcagagatttctgtggtcatggaacgggaaggaagtttcatgaacaaccaaacatattacactttggagatcctaaaacaggagttaaattaaaaactggaatgatcttcactgttgaacctatgataaacgaaggagaatacgatataaagttattgaacgatggttggacagcagttactaaagataaaaaactgtctgcacaatttgaacacacagttggtgtaactgataaaggatatgaaatattcacttcttcaaaaaaagggctagattttcctccatacaaaatatgat

SEQ ID NO: 262058 - DNA, 217 bp, Unknown
  Bacterial polypeptide expressing nucleotide sequence isolated from the Sargasso Sea
acaggtcatgaattaacagctggtatgacctttacaatagaacctatgataaatgtgggtaaattagatgtaaaagtacttaaagatggatggacagcggttacaaaggacaagtctttatctgctcaatttgagcatacaataggaataacagaagactcttatgaaatatttacagaatctgttaaaggttataagaggcctccatataattaat

SEQ ID NO: 262059 - DNA, 778 bp, Unknown
  Bacterial polypeptide expressing nucleotide sequence isolated from the Sargasso Sea
gatgaaaattaaatcatacaaaactgatgaagtagaaccttgtagagaggcaagtaaaataacagcaactattttagacgaactaaataatattataaaagagggtgtatcaacatctgagattgatgaatattgtttaaatagaattcaagagctaggaggcacacctgcacctttgttttacagaggttttccaaagtctacatgcacctcattaaatcatgttatttgtcatggaattccaaactataatcgaaatcttcaaaatggagatattttaaatgtggatgtaacgacgataattgatggatggcatggtgactcatcaaggatgtttaaagtaggagacatttcaattaaagctagtaatctatgcaaggttacctacgattgtttgatagagagtattaacgagataaaagttggtgcgcctataagtaaaataggaaaaaaaattgaggatatagcaacttcaaacaactttagtgttgttagagatttttgtggacatggagttggattaaaatttcacgagaatccgagtattttacactattacgatagtgagtatgataaagtaaaatttgtagacggtatgatttttacaattgaacccatgatcaatgttggtaaatatcaatctaaaatacttaacgatggttggactgcagtgaccaaagataaaacacttagcgctcagtacgaacatacgatatacataaatggtgatattattgagattctaacagagtccccaagtaaggctttttataattga

SEQ ID NO: 262060 - DNA, 781 bp, Unknown
  Bacterial polypeptide expressing nucleotide sequence isolated from the Sargasso Sea
ttggatagtaaccgcttaaataaggatggtataagaatacatactgattctgaacttgtagaaatgaagctctcttgtaaattagcagctgaaactcttgatatgataggagattatgttgaaccgggagtatcaacagataaaataaacaatttatgccatgaatttatgcttgataatggtgcaaaaccagcaacacttggttatagaggttttcctaaatcatgctgtatttcaattaatcatgttgtatgtcatgggataccaggccccaaaattttaaaggaaagtgacattttaaatattgatgtaacatgcatactaaatggatggtttggagatagcagtagaatgtacattgctggagctactagcaagaaagctatcagattaattgaggttacatacaatgcattattaagaggaattgaagtagttaaaccaggaaatacttttggagatattggagaagctatacaaaaatatgtagaaagcaaaaaaatgtctgtagtaagagatttttgcggtcatggggttggcagaagttttcattcagcaccaaatgttttacattttggtgaaaaaaatactggctcatttttggagcctggtatgttttttactattgagcctatggttaatttgggtaaaccagatacaaaaatcttatcagataattggactgcagttacaagagacaagtcactttcagctcaattcgaacacacagttgcagtcactaatagtggcgtagaagttcttaccctatctccacaagata

SEQ ID NO: 262061 - DNA, 592 bp, Unknown
  Bacterial polypeptide expressing nucleotide sequence isolated from the Sargasso Sea
ccggccaatataggttacggaggttttccaaaaactttatgtacgtctgtaaataacgtgatctgccatggcatccccagtgaagataaaattcttaaaaatggcgatattgttaacattgatgtcacagttatacatgagggttggcacggcgatacttctcaaatgtttctcgtaggaaaagttgctcctcatgcaaaaagattggttgatatcacgaaagattgcctatttgcaggcatcaaccaagttaagcctggcgcaaagcttggggatgtaggatttgctatccaagaattagcagaaaaaaatcactattcggtggttcgagattactgtggtcatggcattggcaaaacataccatgaggaacctcaagtcatgcattatggcgaaaagggacaaggactggaattaaaagaaggtatgtgttttacaattgagcccatgatcaacttaggtgaataccattcaaaagtactaagcgatggttggacggttgttacaaaggatgggaagctatccgctcaatgggaacatacagttgcagttaccaataatggctatgaaatattaactgcaggtgagtgag

SEQ ID NO: 262062 - DNA, 175 bp, Unknown
  Bacterial polypeptide expressing nucleotide sequence isolated from the Sargasso Sea
aatgatttttacaatagagccaatgataaatttaggtgggtatgaaactaaggttttaaatgatggatggacagctgttacaaaagataaatcattatcagcacaatttgaacatactgttggtataacaaaagaaggctacgaaatttttacaaaatcgaagcaagttaattaa

SEQ ID NO: 262063 - DNA, 551 bp, Unknown
  Bacterial polypeptide expressing nucleotide sequence isolated from the Sargasso Sea
cctggcagaccacggcttccccaagtcgtgctgcacgagcgtgaacgaggtcatctgccatggcatccccgactcgtacgagctgcaggagggcgacatcgtcaacgtcgacatcacgacgtactttggcgggtaccacggcgactgctccgagaccttcctcgtcggcgaggtcgacgaggccggcaagcagctcgtcaaagtcacctacgactgctggcaggctgccatcgactactgcaagcccggagccctctaccgcggcattggctgtgcgcccacgcccacgcgccgcgcgccacgggcgccgccccaccccgcccaccgcgcctccccctgcccaccttgccgatgccgtatcgccgcaccctctcgccccgcgcagcgatcatcgaggactacgtccagccctacggctactcgagcgtcacgcacttttgcggccacggcatcggcaaagtcttccacacgacgcccaacatcctgcattacaaaaaccgggaggccggcaagatggaggtcgggcacgtgttcacgatcgagccgatgat

SEQ ID NO: 262064 - DNA, 482 bp, Unknown
  Bacterial polypeptide expressing nucleotide sequence isolated from the Sargasso Sea
tggatggcatggagatagttcaagaatgtttcaggtaggtgatatagataaaagaaaatataaattattaaaaactacttatgaatgtttaaatataggaattaaaaatgctattcctggaaatacattaggtgacataggttacaaaattcaaaattatgcagaaaataaaaaatactctgtagttagagagttttgtggtcatggtattggaaaggaatttcacactcctccacaagtattacattatgggaaaaaaagtaaaggtattatacttgagccaggaatgatttttacaattgaaccaatgattaatataggagaatgggaaactacaattttgtctgatggttggactgcggttactaaggatggctctttatctgcccaatttgaacatacaataggggtaactgaggatggaaatgaaatttttacactttcacaaaataatactgattttccaataaaagaaatataaa

SEQ ID NO: 262065 - DNA, 521 bp, Unknown
  Bacterial polypeptide expressing nucleotide sequence isolated from the Sargasso Sea
tggagatataatttatgtagatgtacttgctttaaaggatggatggcatggtgataccagccgaatgttttgtgttggtgaaatttcagttaaagcaaagaatttaataaatgctacctacgaatctatgatgatggcaataaaaattttaaaaaatggagtctctttaagcgatgtgggttatactattcagaaacatgcggagtcgaaaggattttcggtggtaagagatttttgtggacatgggattggtaaaaattttcatgaacagcccaatgttcttcattacggagatccagcaaataagcaaaaactcaaaaccggtatgattttcaccatagaaccaatgataaatgagggtgaattcaatattggtgttttacaagatggctggacagctgtaacaaaggataaattactttctgcacaatttgaacatacagttggtataaaaaacgatggatacgaaatatttactcaatcaaaaaaagagtttaattttcctccatataaaaaatgat

SEQ ID NO: 262066 - DNA, 288 bp, Unknown
  Bacterial polypeptide expressing nucleotide sequence isolated from the Sargasso Sea
tttgtggacacggtattggaaaaaaatttcatgagcatccaaatatattacattatggggaagaaaagactggtgaaaaattaaaaactggaatgatttttacaattgagccaatgataaatgaaggtgaatacgaaactaaagttttaaatgacggctggacggcagtcacaaaggacaaaaaattatccgcacaatttgaacacactgttggtataactgataatggatatgaaatattcacaacttcaaataaaggtttagattatccgccgtacaaaatatgat

SEQ ID NO: 262067 - DNA, 553 bp, Unknown
  Bacterial polypeptide expressing nucleotide sequence isolated from the Sargasso Sea
gatgactgattacaaagaaaaatttgaaaaaatgagagttgctggtaaccttgctgcaagaaccttagatatgttaaccgaaaatattaaagaaggaatttctactgatcatatagataaattagggtatgaatttattagagacaatggtggttattctgctccactttactacagaggttttacaaaatctttatgtacttctttaaaccatgttgtgtgtcacggtattccctctgatagaattttacaagatggcgacgctgttaatgttgatgtaactgcaatcgttgatgaacattatggtgatactagtagaatgttttgtattggaaagactgcagttaaattaaataatcttataaatgctactcacgaatctatgatgagagctattagaattttaaaacctggaattaaattaggagatattggttatgaaattcaatcatttgttgaagaaaaaggtttttcagttgtgagagatttttgtggtcatggtattagtacaacatttcatgaatcaccaaatattttgcattatggtaaaaaa

SEQ ID NO: 262068 - DNA, 193 bp, Unknown
  Bacterial polypeptide expressing nucleotide sequence isolated from the Sargasso Sea
ttttttacaatagagccaatgattaatattggagattggcagactaaaatattacaagatggttggacagccgttacaagagataaatctttgtctgcacaatatgagcatacaattgggataactaaagatggtaacgaaatatttactctttctcaaaataattcagattttcctgtaaatagaatataat

SEQ ID NO: 262069 - DNA, 778 bp, Unknown; identical to SEQ ID NO: 262059
  Bacterial polypeptide expressing nucleotide sequence isolated from the Sargasso Sea

SEQ ID NO: 262070 - DNA, 241 bp, Unknown
  Bacterial polypeptide expressing nucleotide sequence isolated from the Sargasso Sea
ttgcattatggcaatattggagaggggccaatattaaaaccaggaatgttttttacaatagagccaatgataaacctaggagattggagaaccaaaatattaaacgatggttggacagctgttacaaaagataaatctttgtcagctcaatttgaacatacaattggtattactgaaaaaggtaatgaaatatttactctttctcataataattccgattttccaataaatcctttataag

SEQ ID NO: 262071 - DNA, 505 bp, Unknown
  Bacterial polypeptide expressing nucleotide sequence isolated from the Sargasso Sea
taatattgatattactgtcatattagatggatggtttggagataccagtagaatgttttacgtaggacaaccatctgctaaagcaaaaattttaacaagagtaacgtatgagtgtatgatgcttggtatagaacaagttaaacctggtaacagagttggagatattggtcatgcaatacaaaaacatgcagaaaaaaatcgtttttcagtagtaagagattttactggtcatggtttgggaacagaatttcatacggcgcctactatacttcattatggagaaaaagacactggagagcttttaaaggaaggaatgttttttaccattgaaccaatgataaacgcaggtggtcatgcggttaaagttctttcagatggctggacagcaagaacaaaagattatagtctttcagcccaatttgaacatagtgtaggagtaacttctaaaggttatgaaatttttacactatctaaaaaaaactatacccaaccaccttatctttaa

SEQ ID NO: 262072 - DNA, 243 bp, Unknown
  Bacterial polypeptide expressing nucleotide sequence isolated from the Sargasso Sea
ttcatgaaagtccgcaaattttacattatggaacgaaaaatactggtatgaagttattagaaggaatgacctttactattgagccaatgattaatgctggaaatcataatactaaagtattaaacgacggttggactgtagtaacccaagatcactccctttcggcacagtgggaacacacgattctagttaccaaagatggatttgaaattttaactaaaagagatgaagagctgatatgag

SEQ ID NO: 262073 - DNA, 685 bp, Unknown
  Bacterial polypeptide expressing nucleotide sequence isolated from the Sargasso Sea
atgcaaaatagagaaataccattacataatttatcagattttgagggtataagaaaagctggggcacttgctgctaatattcttgatcaactaaaagatattatcaatccaggtatttcaacccagcaaattaatgatttttgtcatgaaatgattttagataacaatgcaattcctgctcctttaaactataaaggattcccaaaatctatttgtacatcagtaaaccatgttgtttgtcatggtattcctagtgaaaaaaagatcctcgaagagggagatattgttaatattgatgtaacagtaattttagatggttggtatggtgacacttcaagaatgtttgttgcaggaaaaactaataaaaagatatattcatttcttaaaactacatatgaatgtcttttaattggaattaagaatgctttacctggtaaaaatttaggtgatatagggtttgaaattcaaaaatatgctgaagaaaaaaattattctgtagttagagatttttgtgggcacggaataggaaaggaatttcatttaccacctagtgttttacattttggagaacttggaactgggccaaaacttgaaccaggtatgttatttactatagaaccgatgataaatattggtgactggaaaattaaaatactaaatgatggatggactgcagtaactaaag

SEQ ID NO: 262074 - DNA, 463 bp, Unknown
  Bacterial polypeptide expressing nucleotide sequence isolated from the Sargasso Sea
ttgaataacacaattcatagctctgatgattttgaagggatgcgaaaagcaggtaatcttgcagcatctacattggatcttcttgttgaaaaagtaaagcctggtgtttccactgaagagttagataatattgcatttgattatatagttcgtcatggaggccttattgcccctttattttataagggttatcctaagtcagtttgtacttcaattaatcacgtaatatgtcatggaattccctcatcaagaattttagaaaatggagatattgttaatatcgatgtaacagtgattgttgatggctggcatggcgatacaagccgtatgtttcctgttggaaaaataaatgccaaagcacaaaaattaattgattgcacttttcatgcaatgcatgaaggcatcaatgatgctcaacctgatgctacattaggtgatattggcaatgccattcaaacatagc

SEQ ID NO: 262075 - DNA, 784 bp, Unknown
  Bacterial polypeptide expressing nucleotide sequence isolated from the Sargasso Sea
atgaacgacttcgtaaaaacacctgatgaaattgctaaaatgagagtagcagggaaacttgcctcggatgttttaatgatgattgggggctatgtaaagccaggaattaccactggtgagttggacaaaatttgccataaatatattgtggatgtccagaatgcaatcccggcacctttaaattatagaggttttccaaaatcgatctgtacttcagttaatcaccagatatgtcacggcataccatctgatactaaaaaattgaaagatggggatatcatcaatattgatgttactgtaataaaagatggatatcatggtgatacgagtagaatgtttttagttggcaatacatcgatacaatcaaagaggctgtgtgaagttacaagacagtcaatgatagaaggaataaaagctgtaagaccaggtggcacaactggagatattggagcagctatccaagaatatgcagaagcaaataaatattctgttgtaagagaatactgtggacatggaataggtaaaaaatttcatgaaagtccgcagatacttcattatggtaaaaaaaatacaggtattaggttagaagaaggtatgatatttactattgaaccaatgattaatgtaggtagctataaaactaaattacttaatgatggttggacagtggttactcaagatcatgagctatcagcgcagtatgagcatactgttttggtaactaataaaggatcagagatattaaccataaggaccgaggaggatgaaagtgagttcaaataat

SEQ ID NO: 262076 - DNA, 149 bp, Unknown
  Bacterial polypeptide expressing nucleotide sequence isolated from the Sargasso Sea
tgagcctatgataaatgcgggaaaatatgaaactaaacttttaaatgatgggtggaccgcagtaacaaaagataaatctctatcagcacaattcgaacatactgtgggtataacaaataatgggtatgaaatttttaccctttcataat

SEQ ID NO: 262077 - DNA, 286 bp, Unknown
  Bacterial polypeptide expressing nucleotide sequence isolated from the Sargasso Sea
ttgtggacatgggattggaaagaatttcatactccaccaagcgtacttcattatggcaaagttggtgaaggccctgagcttaaacctggaatgttctttacgatagaacctatgattaatcttggtgactggagagtaaaaatacttaatgatgggtggacagcagtaacaaaagatagatctttatctgctcaatttgagcacaccataggcattactgaagatgggaatgaaattttcaccctgtcagaaaataatacagattttccaataaatgatttataaa

SEQ ID NO: 262078 - DNA, 322 bp, Unknown
  Bacterial polypeptide expressing nucleotide sequence isolated from the Sargasso Sea
tgttgaagaacaaggtttttcagtagtaagagatttttgtggtcatgggcttggtaaaaaatttcatcaatcaccaaatatattacattatggagaagagaaaactggtgaaaaattagttgctggtatgttatttactattgagccaatgattaatgaaggtgattacaatactaaagtattaaatgatgggtggacagcagtaacaaaagataaattgttatctgcacaatttgaacacacagttggtataacaaataacggttatgaaatttttactttatctaaaaaaggcttggatcttcctgaaagcttaaaatga

SEQ ID NO: 262079 - DNA, 387 bp, Unknown
  Bacterial polypeptide expressing nucleotide sequence isolated from the Sargasso Sea
catggccgcgattattaaaacagcagatcagatcgaaaaaatgcgtgtagcaggtaagttggctgccgaagtattagagatgattgagccatacgtcaaagccggtgtcaccaccgaagagctcaataccatttgccataattatattgtcgatgtgcagcaggctatccctgcccctttgaattaccacggctttccaaaatccatttgtacatcagtcaatcaggtgatttgccatggtattccgtcagcggagaaaaaactcaaagacggtgacattatcaatatcgacatcactgtgattaaagatggttttcacggcgatacgtcaaaaatgtttgtcattggcaaacccagcattatggctgagcgtttaatacgtgtgac

SEQ ID NO: 262080 - DNA, 626 bp, Unknown
  Bacterial polypeptide expressing nucleotide sequence isolated from the Sargasso Sea
aatgaataacaattatcaagaagcattcgaaaaaactagatcagcaggaataatagctgctggtgcgttaaatgaagtagaaaaaataataaaacctggtattagaactgaccaaattgataaactttgctatgaatacattaatgatcatgatgcttactctgcaccattgttttacagaggtttccctaaatcctgttgtacatcaactaatcatgtagtttgtcatgggataccttcaaacaaaattttacaagatggtgacattttaaatgttgatgtcacagcattaaaagatggctggcatggagatacaagcaagacttttgaagttggaaaagtatcagttaaagcaaaaaaattagttaaaactacctaccaggctttaatgaacgcaatagaaatagtgaaagaaggtgtttgtttaggggatataggatctacaatacaaaattttgtagaagctgaggggttttcagtcgtccaagatttttgtggtcacggtataggcaggctatttcatcaagagccaaatattttacactatggtaaaaaaggtacgggagaaaagttaaaagctgggatgatttttactattgaacccatgataaattttggtaatatga

SEQ ID NO: 262081 - DNA, 346 bp, Unknown
  Bacterial polypeptide expressing nucleotide sequence isolated from the Sargasso Sea
ctggtggaagaatcattaataacaattcatacagaaaaagacttcgattcaatgcgtcgggccggaaaactggcagccgaagtccttgatttcataacccctcacgtcgtgcctggcgtgaccacaggtaaacttgatcagttgtgtcataattttatcattgatcatggtgcgatcccttcaccgttaaactatcgtggcttccctaaatcaatctgcacctcaattaatcatgtggtatgtcatggtatacctggcgaaaaggtgctgcgtaatggcgacattgtgaatatcgatatcactgtcactctcgatggttggcatggagacaccagccgaatgttcc

SEQ ID NO: 262082 - DNA, 646 bp, Unknown
  Bacterial polypeptide expressing nucleotide sequence isolated from the Sargasso Sea
cgagtttattaaagataatggtggatactctgctccactttattacaggggttttccaaaatcttgttgtacttcggttaatcacattgtttgtcatggcatacccggtgaaaaatatttaaaagatggagatatattaaatgttgatgttaccgcggttgttaatggctggcatggtgatactagcagaatgttttttgtaggtgatgtttcaataaaatctaaaaacttagtagctgctacatacgattctatgatgaaagctatttcaataattaaagatggaattcatcttggagatattggcgaaacaatacaaacatatgttgaaaaaaaaggtttttctgttgttagagatttttgtggtcatggaataggaaaaatttttcatgagcctccaaatatattacattatggaaaaaaaggatttggcgataaattaaaacaagggatgatatttactgtagagccaatgataaatgaaggtggttatgaaacaaaagttctcaatgatggatggacagctgtaacaaaagataaatctttatcagcacaatttgaacatactgttggtgtaacaaaagatggttttgaaatttttacggaatcaaaaaaaaaatatgaaaaacctccttattcaatatga

SEQ ID NO: 262083 - DNA, 649 bp, Unknown
  Bacterial polypeptide expressing nucleotide sequence isolated from the Sargasso Sea
aataagatctgccacgaatacattgtaaataagcaaaacgctatccctgcaccactgaactatcacggatttcctaaatctatatgcacctccgtcaatcatgttgtttgtcacgggattccaaactataaagaaaaactaaatgatggcgatattataaatattgatattactgtaattaaagatggctatcatggtgatacaagtaagactttttttattgggcatccaaaaaaagaaactaaaaagcttgttgaaattacatacgaatgcatgaaagaggcaattctaatagttcgcccaggtacacgattgggtgatataggctacacaatacagaaaattgcagaggcaaatggatattcagttgttcgtgaatactgtggtcatggaattggtaaaatttttcacgaagaaccacaaatccttcactacggaaaaccaaatacgggtatggagttggcagagggaatgactttcactattgagccgatgattaatctgggtgagcgttttgttgaattactaaatgataattggactgttgaaacaaaggataaaaaaatatcagctcagtgggagcatactgtgcttgtaactaaaaatagctttgaggttttaactaaaaggacagatgaaagtttctagc

SEQ ID NO: 262084 - DNA, 740 bp, Unknown
  Bacterial polypeptide expressing nucleotide sequence isolated from the Sargasso Sea
attgaataacacaattcatagctcagatgattttgaggggatgcgaaaagcgggtaatcttgcagcatctacattggatcttcttgttgaaaaagtgaagcctggtgtttccactgaagagttagataatattgcatttgaatatatagttcgtcatggaggccttattgcccctttattttataagggctatcctaagtcagtttgtacttcaattaatcacgtaatatgtcatggaattccttcatcaagaattttagaaaatggagatattgtaaatatcgatgtaaccgtaattgttgatggttggcatggcgatactagccgcatgtttcctgttggcaagataaatgccaaagcacaaaaattaattgattgcacttttcatgcaatgcatgaaggcatcaatgctgctcaacctaatgcaacattaggtgatattggtagtgcaattcaaacgtatgctgaaaaacaaaattacagtgttgttcgtgatttttgtggtcatggactaggaaaagtttttcatgagtttccaaacattcttcactacggggataaaggtaaaggtgaaagaattgaaccaggcatgttttttacagtggaaccaatgataaattttggaaaatatgatgttagaatgttaggcgatggttggacagctgttacaaaagataaaagtttgtcagcacaatttgagcatagtattggcattaccaacggtggtgtagaaattttta

SEQ ID NO: 262085 - DNA, 245 bp, Unknown
  Bacterial polypeptide expressing nucleotide sequence isolated from the Sargasso Sea
acatggtatcggagtagatttccatgaagagccatttgtctttcattgtcaccgtcaagaaccacaaatgatgatggttcctggcatgacctttaccattgaaccgatgattaatacagggacccacaaagccgttattctggacgatgattggacggccgtcactaaggatggtgggctttccgcccaatgggaacataccgttttagttacagagtctggcgttgaggtccttacatcatgac

SEQ ID NO: 262086 - DNA, 247 bp, Unknown
  Bacterial polypeptide expressing nucleotide sequence isolated from the Sargasso Sea
tcaattatttcatcaagaacccaatgtacttcattatggaaagagaggaactggtgaaaaaataaaagcagggatgattttcactattgagcctatgattaacgttgggaaatttgagacaaaaacacttcaagatggttggacagctgtttctaaagataaatctttatctgcacaatttgaacatactataggagtaacaaaacaaggttgcgaaatttttactttatcgaaaattaatgattga

SEQ ID NO: 262087 - DNA, 613 bp, Unknown
  Bacterial polypeptide expressing nucleotide sequence isolated from the Sargasso Sea
atgaaaatatctattaaaacttctgaacaaatcgaaaaaatgcgaatagctggaaaattagctgctgaagttctagagatgatatcgccctatgttcttcctgggatttcaacaagtgaacttgatagattatgttacgagcatatcgttaatgttcaaaaagcgattccagcaaatattggttataacgggtttgaaaaaactatatgttcaagtatcaatcaagttatatgtcatggcattccaagcgaaaaaaggattctaaaagagggagatattttaaatattgatgtaactgttataaaagatggttggcatggtgatacctctaagatgtttttagttggaaaatgtgctcctcacaatcaaagattagtaaaagttactcaagaatgtctttataagggtattgaagtagtgaaaccaggagcacacattagtgatattggtaatgcaattcaagaacatgcagaaaaaaattattatagtgttgtggaagattattgtgggcatggaattggaactgtttatcacgaagagcctcaaattcttcactatggcaaaccgggaaaaggtttgcagcttagagaaggtatgtgttttacgattgagc

SEQ ID NO: 262088 - DNA, 772 bp, Unknown
  Bacterial polypeptide expressing nucleotide sequence isolated from the Sargasso Sea
atacgataatcaaagctttgaaaaagttcgagaagcaggatctgttgcctccggagctcttgatgaagtttataaaattataaaacctgggataagtacaaataaaatagatgacatttgttatgaatttttaaacgacaataattcatattcggcacctttatattatcgaggttatcctaaatcatgctgcacttcaataaaccatactgtatgtcatggtgtaccaagcgaaaaaaccctaaaagatggagacattgtaaacgttgatgttacagcatttaaaaatggttggcacggagatactagtagaatgtttttagttggagatgtttcggtaaaagcattaaatttagttaaagcaacatatgactctatgatgaaagcgattgaaattttaaaagatggaatcgcgctaggagacatcggcgcaacaatacaagaacatgtcgagaaagagggattttcagtagtaagagatttttgtggtcacggtgtaggaaaaaaatttcatgaagagccaaatattttgcattatgggaaaagaggtgaaggattaaaaattaaagagggaatgatatttacaatagaaccaatgattaactacggtaaatttgaaacaaaagtacttcaggatggatggactgctgttacaagagataagtctttatcggcacaatttgaacatactgttggaataaaaaagaatggatatgaaatttttacactttcaaaaaaaggtttagatttccctccaaataaaaatgattga

SEQ ID NO: 262089 - DNA, 661 bp, Unknown
  Bacterial polypeptide expressing nucleotide sequence isolated from the Sargasso Sea
aaatgatctatgtcacgattatattttaaaaaataatgcattacctgcacctctaaattatagaggatttccaaaatctacatgtatttcagtaaatcatgttgtttgtcatggtatacctggtgataaaattcttgatgaaggcgatatcttaaatattgatattactgttattcttgatggatggtatggagatactagtaggatgtattttgttggtaaaccatctaaaaaagcaaagtttcttacaaagatcacatatgaatgtctatggttaggtattgaaaccgtaaaacctggaagtacaacaggtgatataggtcacgcaattcaaatgcatgcagaaaaaaatggtctatcagttgttagagattttactgggcatggtttaggtaaagtttttcactcacctccaacaattttacattatggacagccaaatactggtgatacacttgaagagggaatgatatttacaatagaaccaatgattaattcaggtaaatatgatgttaaaattttgtctgatgggtggacagctgtaacacgtgacaaaagtttatctgcacaatttgagcatagtatcggggttactgctgatggctatgaggtatttactatttctcccaaaggatatacacaacctgaatatccaatttaa

SEQ ID NO: 262090 - DNA, 316 bp, Unknown
  Bacterial polypeptide expressing nucleotide sequence isolated from the Sargasso Sea
gtcaaaaggttattcagtagtgagagatttttgtggtcatggtattggtaaaaattttcacgaacctcctaatattttgcattatggggcatctggtagtggtgaaaaattaaaaacaggtatgatttttacgattgaaccaatgattaacgaaggaaaatataatttaaattttttgaaggatgggtgggcagcagtcacaaaagataaaatgttatcagcacaatttgaacacactgttggtataaaagatgatagctatgaaatatttaccctttcaaaaaacgggctagattttcccccatataaaacatga

SEQ ID NO: 262091 - DNA, 205 bp, Unknown
  Bacterial polypeptide expressing nucleotide sequence isolated from the Sargasso Sea
tatggtcaaaaaggaactgggtgaaaagattaaagctggaatgatatttacaatagaacctatgataaatattggaaaatatgagaccaaaacactgaacgatggatggacagcagtaacaaaggataagtctttatctgcacaatttgaacatacaataggtgtaacaaaagatggatatgaaatttttactaaaacaaaataa

SEQ ID NO: 262092 - DNA, 766 bp, Unknown
  Bacterial polypeptide expressing nucleotide sequence isolated from the Sargasso Sea
tatgattataaatatcaaaacaaaagaagaacaggataaaatgagagttgcgggcagacttgcagctgatgttctagatatgattgaagatttcgtcaaacctggtgtaagcactaatgagctagatgaaatttgccataaattcatcgttgaagtacaaggcgcaactccagctcctcttaattacaggggtttcccaaaatcaatatgcacatcggtaaatcatgttgtatgtcacggcatacccagtgaaaaaatcttaaaatcaggagactttcttaacattgatattactgtagttaaagacggttaccatggtgataccagtagaatgttcttcgtcggaaagccaaatataaaagcaaagagactttctgatataacgtataaaagcatgtggctgggtattgaacaattggcatgtggaaaatatctaggtgacgttggtaatgcaattcaatgttttgcagaaaaaaatagatattcagtagttagagaatattgtggtcatggaattggtaaattttttcatgaagatccccaagtactccattatggtaaagcagggacaggcccaaaattagaatcaggaatggtacttacggttgaaccgatgataaacgctggaaaaaaagatgttaaaatacttccagatgggtggactgttgttacaaaagatcatgacttatctgctcaatgggagcatactgtgctgataaaaaaagacggctatgaagtgctaactcttggtcgggaccaaagataa

SEQ ID NO: 262093 - DNA, 682 bp, Unknown
  Bacterial polypeptide expressing nucleotide sequence isolated from the Sargasso Sea
ataagtactcaagaaataaatgacatatgtcatgatcaaattattcaaaacaaagcaataccagctcctttaaattataaaggtttcccaaaatcagtttgtacatctgtaaatcatgttgtttgtcatggaattccttctcaaagaaaaattctttctgatggtgatttagtaaatgtagatgtaacagttattctaaatggttggcatggtgatagttccagaatgtttgttgcaggcaagacaaataaaaaaaattatgaatttttaaaaataacatatgaatctttattaattggtattagtgaagctaaacctggtaagcatattggtgatattggaaataaaattcagaaacttgctgaaggaaaaggttattctgtagtaagagatttttgtggtcatggaattggaaaagaatttcatactccacctagtgttttacactttggagaaccaggtgagggaccaatgttagagcctggaatgtttttaacaattgaaccaatgattaatttaggtggatggcaaacaaaaatactaaatgatggatggacagctgtaacaaaagataaatctttatctgctcaattcgagcatacaattggaataacagaagaaggaaatgaaatatttacattatctaaaaataatacatcttttccaataaaggatgtataag

SEQ ID NO: 262094 - DNA, 508 bp, Unknown
  Bacterial polypeptide expressing nucleotide sequence isolated from the Sargasso Sea
atggattatattaaaacagaatcagatatagaaaaaatgagaattgctggaaaattagcttctcaagtgcttgaaatggttgaagaatacgtcaaaccaggaataagtacactaaaattagatcaaatatgtcatgactatatagtcactcaacaagatgcaattccagccccgctgaattacaagggctttccaaagtcaatatgtacatctgtaaatcatcaagtttgtcatggtattccatcagatgagaagatattaaagaaaggtgatattgtcaatattgatgtaacagtaattaaagatggttttcacggtgatactagtaaaatgtttcaaattggaaaaacgtctatcctggctgataggttatgcaaggttacgcagaaatgtatgtatgaagcaattaagatagtcagaccaggattgcatattggtgatattggagcaataatacaagaaatagcacatgataataaatttagtgtagttagagattattgggaca

SEQ ID NO: 262095 - DNA, 814 bp, Unknown
  Bacterial polypeptide expressing nucleotide sequence isolated from the Sargasso Sea
atgactaaagaacagaaaaagattttctcggatggccgtgaggtaaaaatccactctgaaagcgattttaattcaatggaaaaagctggggctcttgcagccgaagttttggattttatcacaccgcatgtacaacaaggcatcacgacagatgcgttagactctttatgctacgacttcatagtcgacaggaatgcgatacccgccccgcttaactatcggggcttccccaaatccatatgcacctcactcaatcatgttgtatgccatggtatcccagggcaaaagaaattaagagatggagatattattaatattgatataaccgttatcttggaaggatggcacggcgactccagccgaatgtttttggtgggcaaggttcccttaaaggcacgtcggctagtggaaattacctatgaagccatgatgagaggcatagaagtagttaaaccaggcgccactcttggagatattggatacgcaattcagagttttgccgaaaaacaccgctattcggtcgtgcgtgacttctgtggacatgggataggacaggttttccacgacgcccccagtgtactacactatgggagagaaggagatggaatggaactgacggaaggaatgttttttacaatcgaacctatgattaatcagggcaagctcgacgtgaaaatcttagaagatggatggacggcagtgactcgcgatcgctcattatctgcccagtttgaacactcccttggggttaccaaaaatggccataaaatttttaccgtatcgcccaaaggataccattgcccaccctactagg

SEQ ID NO: 262096 - DNA, 772 bp, Unknown
  Bacterial polypeptide expressing nucleotide sequence isolated from the Sargasso Sea
atgtcaatttcaataaaagacaaaaaagacatcgaaaatatgaaaattgcaggcaaaaaagctgctgcagttctaaaaatgttagaagaaaatgtagtgcctggagtcacaactaaagaattggatgatattgcatttaaattcatcacagaggagctaaaatccatcccagccaatattgggtataacggttatgaaaaaactctttgtacttcgatcaataacgttatctgtcatggcattcctgatgcacaaaggaaattaaaagatggtgatatcgtaaatattgatgtaacagttcttcatgatggttggcatggtgatacatcaagaatgtttttggttggtaaagttgcgccccatgctaaaagacttgttgatataacaagagattgtatgtatgcaggcattgaacaagtaaaaccaggcgctaaattaggaaatattggtcatgctattcagataatggctgaaaaaaattattactcagtagttcgagattattgtgggcatggaattggtaaggtctatcatgaagagccgcaagtaatgcattatggtgaaaaagatacaggcatagagttaaaagaagggatgtgtttcacaatagagccaatgattaatttaggcacacaccacgcaaaagttctagaagatggttggacagtagtaactaaagatggaaaactttctgctcaatgggagcatactgtagcagttacaagtaatggttatgaaatcttgactctcggagaggaaaaagtggtatgaa

SEQ ID NO: 262097 - DNA, 769 bp, Unknown
  Bacterial polypeptide expressing nucleotide sequence isolated from the Sargasso Sea
aatgtctgttgaaataaaaacattagagcagcaagaaaaaatgagaattgctggaaaacttgcctctgaagtacttgatatgattggtgagcatgtaaagccaggtgtgagtactatggaattggatgagatttgcaatgatttcattgtaaatacacaaaaaacaatcccagcgaatgtgggttatagaggttttcctgctacaacatgtacatcaattaatcatgttgtatgccatggaatacctaatgagaaaagactaaaaaatggcgatattcttaacatcgatgtcactgtaattaaggacggctttcatggagataccagcagaatgttcagcgtgggcaaaacttcaaatcaagcaaacaaactgattgaaactacctatgaatccatgtgcgaaggaataaaagcagtgaagccagggaataagttgggcgacattggttatgcaatccaaaaacatgctgaaggaaactacttcagtgtagtaaaagaatactgcggtcatggtataggcgagatatatcatgacgaacctcaaattctccattatggaattccaaatactggtatggaactcaaagaaggaatgacatttacaatagaaccaatgattaattctggtggctctgctgtaagactcttatctgatggctggacagtagtaacaaaagatcactctctatctgcacaatgggaacataccatacttgtgacaaatgacggttatgaagtactgacactggcgcctggtgaattgatttaa

SEQ ID NO: 262098 - DNA, 772 bp, Unknown
  Bacterial polypeptide expressing nucleotide sequence isolated from the Sargasso Sea
gttgaataacacaattcatagctcagatgattttgaggggatgcgtaaagcaggaaatcttgcagcatctacgttggatcttcttgttgaaaaagtaaaacctggtgtttccactgaagaattagataatattgcatttgattatatagttcgtcatggaggccttattgcccctttattttataagggttatcctaaatcagtttgtacttcaattaatcacgtaatatgtcatggaattccttcatcaagaattttagaaaatggagatattgtgaatatcgatgtaaccgtaattgttgatggttggcatggcgatacaagccgcatgtttcctgttggaaaaataaatgctaaagcacaaaaattaattgattgcacttttcatgcaatgcatgaaggcataaatgctgctcaacctgatgctacattaggtgatattggcaatgccattcaaacatatgctgaaaaacaaaactacagtattgttcgtgatttttgtggtcatggcctaggaaaagtttttcatgagtttccaaacattcttcactacggggataaaggtaaaggtgataaaattgaaccaggaatgttttttacagtggagccgatgataaattttggaaaatatgatgttagaatgttaggcgatggttggacggctgttacaaaagataaaagtttgtcagcacaatttgagcatagcattggcattaccaacgatggtgtagaaatttttacaaaatcacctgctgggcttgataaaccgtaa

SEQ ID NO: 262099 - DNA, 769 bp, Unknown
  Bacterial polypeptide expressing nucleotide sequence isolated from the Sargasso Sea
aatgaatatttcgataaaaaattttgagggtattgaaaaaatgagaatagctggcaaattagcagctgaagttcttgaaatgattaccccctttgtcaaacctggagtttctactggtgagcttgataagctttgttatgatcacattgttaatgttcaaaatgccataccagcaaatgttgggtataaaggatatgagaaaactatttgctcgagcataaatcaggttatttgtcatggcatacctaacaatgaaaaatttcttaaagatggagatattcttaatattgatgtaacggttataaaagatgggtggcatggagacacatcaaagatgtttcttgttggtaaatgtgctcctcataaccaacgattagttcaaatcactcaagaatgtctttataaaggtatccaggctgtaaaaccaggcgcatatcttggagatattggaaatgccatccagaaacatgctgaaagaaactactatagtgttgttgaggactactgcggtcatggtattggaaaaatttatcatgaagaacctcagatccttcactatggaaagcctggaacaggtatacagctaaaagaaggcatgtgtttcactgtagaacctatgattaatcaaggtacaaaatactgcaaaactcttaatgatggatggacggtggaaactagagacggaagaaactctgctcaatgggagcatactattgcagtaaccaaaactggatcagaaattttaacaaaaagaaatgacgaattttaa

SEQ ID NO: 262100 - DNA, 595 bp, Unknown
  Bacterial polypeptide expressing nucleotide sequence isolated from the Sargasso Sea
gatgaataataattatttagaaaagtttgaaaaaatgagggttgcagggaaattggcagctcaaacattagacgaagtaactccatttataaaacctggtgtaactacaaataaaatagataaaatttgttatgaatatataagagataatggtggttactcagcaccacttttttataggggttttaaaaattctctatgcacatcattaaatcatgtcatttgtcacggtataccgtctgagagagttttggaagatggagatatattaaacgtagatgtaaccgctattgttgatggttactatggtgatactagcagaatgtttaatattggaaaaatttcagttaaagcaaaaaatcttattgatgcaacttatcagtcaatgatgaatgcaattaagattttgaaaccaggaattaagttaggtgatattggttatgagatacaatcctatgtagaagaaaaaaattacagtgtagtaagagatttttgtggtcatggaattagtaatacctttcatgaaccaccaaatattcttcattatggaaaaaaaaatactggagttgaattaaaacctggaatgacattcaaa

SEQ ID NO: 262101 - DNA, 308 bp, Unknown
  Bacterial polypeptide expressing nucleotide sequence isolated from the Sargasso Sea
ccaggcatatcaactgagagagttagatgaaatatgttttaaccatattgtaaatgttcaaaaagcaattccagctaatgttggttataacggttatgagaaaactatttgtgctatcttgaatcaagtcatatgtcatggcattcctagtaacgaaaaagtattaaaaagtggtgacatattaaacatagatgtgactgttgtgaaagatggttggcatggtgatacctcaaaaatgtttcttgtaggaaaatgtgctcctcataatgaaagattagtaaaagttacacaagaggtgtctttataaa

SEQ ID NO: 262102 - DNA, 582 bp, Unknown
  Bacterial polypeptide expressing nucleotide sequence isolated from the Sargasso Sea
cgacctgtatttcagtaaaccacgttgttggccatggaattccaggagataagaaattgcaatcaggcgacatattaaatattgatgtgactgttatacttgatggctggtatggtgataccagcagaatgttttttgcaggagaaccttctgtaaaggcaaagagactttgcgatgtaacatacaaatgtctaatggcaggaatagaagtttctaaaccaggagcaacacttggtgatattgggtacgctattcaaaccttggcagaaaaagaaagattttcagttgtaagggattttacaggtcatggtctaggccaggtgtttcattgtccaccatccgtattacactttggaaatcctggagaagggataaggttagagcccggaatgatatttacaatagagccaatgataaatgctggagggtacgcgactaaaattttatctgacggatggactgccgttacaagggacagatcactttctgctcaatttgaacactctataggaataactgaaaatggagcagaaatttttactttgtcaaaaaagaattatgactttccaccatacaagtaaa

SEQ ID NO: 262103 - DNA, 595 bp, Unknown
  Bacterial polypeptide expressing nucleotide sequence isolated from the Sargasso Sea
ggttttcctaaaacttgctgtacgtctagcaatcatattgtttgtcacggtgttccgagtgataaagttttaagagagggagatataattaatgtggatgtaactgcgtttaaagatggatggcatggagatacaagcagaatgttttatgtaggtgaagtatctgtaagagcaaaaaaacttgttgaaacaacttacgaggcaatgatgaaaggtattgaagctttaaaattaaattctcatttaggtaatattggagaggcgatacaaaaatatgttgaaaaaaaaggatattcagttgttagagatttttgtggtcacgggactggtgaaacttttcataaagagccaaatgttcttcattacggtaaaaatggcgaaggtcaaaagcttgaagttggtatgatatttactattgagcctatgattaatgaaggaaaatatgaaacaaaagttttaagtgatggttggactgcagttactaaagataaaaaactatctgcacaatttgaacacactgttggtataacaaacgatggatacgaaatttttaccatttcaaaaaaaggtttaaattttcctccatataaataat

SEQ ID NO: 262104 - DNA, 548 bp, Unknown
  Bacterial polypeptide expressing nucleotide sequence isolated from the Sargasso Sea
aatgaatgaagaaacattgaaatcttttgacggaacaagagaggcaggtgcaatcgcatctggggcattagatgaattgaatgccattgtaaaaccaggtgtaaccactgagaagatagataaaatttgttatgagtatataaacgaccacggtgccttctctgctccattatattatagaggctttccaaaatcttgttgtacttccgcaaatcatattgtgtgtcatgggataccacagaataaagttttaagagatggggacatattaaatgtagatgtcactgcaattaaaaatggatggcatggcgatacaagtagaatgtatttagttggtgatgtttctgttaaagcaaaaaaattaattaaggttacatatgagtcgatgatcaaaggtatacaaacattaaaagaaggatcgtttacaggtgacattgggtttgcaatacaaactcatgttgaacaacagggtttttcagtagtaagagatttttgtggtcatggacttggtagaaatttcatcaatcaccaaatatattgcattacgg

SEQ ID NO: 262105 - DNA, 681 bp, Unknown
  Bacterial polypeptide expressing nucleotide sequence isolated from the Sargasso Sea
aatgaacgatgaaattttagagtcttttgaaggtacaagaaaagctggtgctattgcagctggagctttggacgagttaaattcaatgataaagcctggggtaacaactgaagttatagacaagttttgctacgaatacattaatgacaacggagcatactctgcaccactattttataggggttttccaaaatcttgctgcacgtctacaaaccacattgtatgccacgggataccacaaaataaatttttgagggatggtgatataataaatgttgatgtcactgcaattaaagatggatggcatggtgatacaagtagaatgtttttagtaggaaacgtatctgtaaaagccaaaaaattaattaaagccacttatgaatcaatgattaagggtatcaaaactttaaaagagggatcctttactggagatatagggtctgcaatacaaaatcatgtggaacaagaaggtttctcggtagtgagagacttttgtggtcatggtttaggtaaaaaatttcatgaacctccaaatattttacattatggagaacctaaaactggaaaaagactgtctgcaggaatgttgtttacaattgaaccgatgattaatgagggtgaatataatacaaaattgctacaagatggttggactgcagttacaaaagataagtctttatc

SEQ ID NO: 262106 - DNA, 382 bp, Unknown
  Bacterial polypeptide expressing nucleotide sequence isolated from the Sargasso Sea
gtgcgcccaggcgcccatctcggcgatatcgcttacgccatccagaagcacgccgaagcgcaaggctacagcgtggtgcgcgaatattgcgcccacggcatcggcacggtgtttcacgaagacccgcagatcctgcactacggccgtcccggcaccgggctggagctgcaagccggcatgatcttcacgatcgaaccgatgatcaacgccggccggcgcgacatccgcaccatgccggaccagtggaccgtcaaaaccaaggaccgcagcctgtcggcacagtgggaacacaccgtgctcgtcaccgaaaccggctacgacgtgctgactgtctcggccggcacgcccgcgcgtccgccggttgtcgcagccacggcctgac

SEQ ID NO: 262107 - DNA, 217 bp, Unknown
  Bacterial polypeptide expressing nucleotide sequence isolated from the Sargasso Sea
tattttacattatggaaaatctggaactggtgaaaaaatacatgaaggaatgatttttacaatagagccaatgatcaaccttggaaattacgaaacaaaaacactcaacgatggatggactgcagttacgaaagataaatcactatcagcacaatttgaacatactattggtgtaaagaaagatggctatgaaatttttacattaccaaaaaaataa

SEQ ID NO: 262108 - DNA, 772 bp, Unknown
  Bacterial polypeptide expressing nucleotide sequence isolated from the Sargasso Sea
catgtcaatttcaataaaaggcaaaaaagacatcgaaaatatgaaaattgcaggcaaaaaagctgctgcagttctaaaaatgttagaagaacatgtagttcctggagtcacaactaaagaattggatgatattgcatttaaattcatcacagaggagctaaaatccattccagccaatattgggtataacggttatgaaaaaactctttgtacttcaatcaataacgttatctgtcatggtattcctgatgcacaaaagaaattaaaggatggtgatattgtaaatattgatgtaacagttcttcatgatggttggcatggcgatacatcaagaatgtttttggttggtaaagttgcgccccatgctaaaagacttgttgatataacaagagattgtatgtatgcaggcattgaacaagtaaaaccaggcgctaaattaggaaatattggtcatgctattcagataatggctgaaaaaaattattactcagtagttcgagattattgtggacatggaattggtaaggtctatcatgaagagccgcaagtaatgcattatggtgaaaaagatacaggcatagagttaaaagaagggatgtgtttcacaatagaaccgatgatcaatttaggtacacatcatgcaaaagtattagaagatggttggacagtagtaactaaagatggaaaactttcagctcaatgggagcatactgtagccgttacagatagcggatatgaaatcttgactctcggagaggaaaaagtggtatga

SEQ ID NO: 262109 - DNA, 907 bp, Unknown
  Bacterial polypeptide expressing nucleotide sequence isolated from the Sargasso Sea
aatgaaacctgctataaactctctttctcgcaattctccctgctggtgtggaagtggaaaaaaattcaaaaaatgtcatcttgggaaagatccaatccattctcttcctatgaatgaaaaacctattttcaatgaaaagcggatttacattaaaaccgaagagcaaatcgagggtataagaaaaagtggtcaattaacaaaaaagctacttgatatggttgaagaccgaattggtgaaggtgtaacaacaaatgatctaaataatttggtacacacagaaactttggctaacggtgcaattccagcccctttaaattacgggcacggccaaggtaggagaagaatgcctttccctaaaagcatttgtacctcaccaaacgatgtgatttgtcatggaattccaaataaccaagctttacgcaacggtgatattttaaatgtggatattacatgtattttggatgggtattatggtgatgccagtagaatgttcataattggagacgttccagaagatacaaaaaaactggttgaagtgacacacgagtgcctaaaactaggaattaagcaggtttttccctcaaaaaggcttggagacatcggacatgctatacaaaaacatgcagaaaataatggcttttctgtagttagagattttgcgggacatggcgtaggcattgaatttcatgaagcaccacagatactccattttggtcaaccggggaaaggagaaatgttaagggaaaatatggtttttacaatcgagcctatgattaacatgggaagttatgaatgcagaattttgggtgacggatggactgcagtaactgctgatggctcattgtctgctcaatgggaacataccctgttagtaacaaaatcaggagctgagatactcacagcatga

SEQ ID NO: 262110 - DNA, 406 bp, Unknown
  Bacterial polypeptide expressing nucleotide sequence isolated from the Sargasso Sea
atgattaaagacctagaagaaattaatggcatgagggaagctggcaggctagcagctcaagtgcttgatatgattagtaatttcgttaaacctggtatttctacaggcgagctagataaaatttgtcatgactatattgtgaaagagcagcaagccattcctgcaaacgtaggctatagaggtttcgagaaaactttatgcaccagtcttaatcaagttgtttgccatggaattccggatgataaaagatttctaaaaaatggagatatattgaatattgacgtgactgtaattaaagacggttggcatggcgatacatcaaaaatgtttttggttggtaaaacagaacagcataacgaaagattagttaaaattacccaagaatgcctctataaaggtataaatg

SEQ ID NO: 262111 - DNA, 757 bp, Unknown
  Bacterial polypeptide expressing nucleotide sequence isolated from the Sargasso Sea
aatgaatgcagatataaaagagtcttttgagaaaactagagcagctggatccatcgcagcaagtactcttgatgaagtagcaaaaataattaaaccaggtattgctacagatcaaattaataacttgtgctatgaatttataaatgatcatggcgcctactctgctccattattttatagaggttttcctaaatcatgttgcacgtctgtaaatcatgttgtctgtcatggagtcccatcagagaagattttaaaagaaggtgatatccttaatgtagatgttactgcttataaagatggttggcatggtgataccggtagaatgtttgaggttggaaaagtatctgtaaaagcaaaaaaattaattgaaacaacttatgagtcgatgatgaaaggaattaaaatactaaaagaaaatgttcaattaggagatataggttcaactatacaagaacacgttgaagcaaatggatgttcagttgttcaagatttctgtgggcacggtattggtcagacatttcataaggaacccaatattttgcattacggaaaaaaaggaactggagaaaaaataaaagctggtatgatttttactattgagcctatgataaaccttggagattatcagacaaaagtattgaatgatggatggactgcggttacaaaagacaaatcgttatcagcacaatttgaacatactgttggtataacaaaagatggatacgaaatttttactcagtcaaaaaaatttagttaa

SEQ ID NO: 262112 - DNA, 772 bp, Unknown
  Bacterial polypeptide expressing nucleotide sequence isolated from the Sargasso Sea
ttgagtaacactattcatagttctgatgattttgaagggatgcgaaaagcaggtaatcttgcagcatctacattggatcttcttgttgaaaaagtaaaacctggtgtttccactgaagagttagataatattgcatttgattatatagttcgtcatgggggtctaattgcccctttattttataagggttatcctaagtcagtttgtacttcaattaatcacgtaatatgtcatggaattccttcatcaagaattttagaaaatggagatattgttaatatcgatgtaaccgtaattgttgatggctggcatggcgatacaagccgcatgtttcctgttggaaaaataaatgccaaagcacaaaaattaattgattgcacttttcatgcaatgcatgaaggcatcaatgctgctcaacctgatgcaacattaggtgatattggtagtgcaattcaaacgtatgcagaaaaacaaaattacagtgttgttcgtgatttttgtggtcatggactaggaaaagtttttcatgagtttccaaacattcttcactacggggataaaggtaaaggtgaaagaattgaaccaggcatgttttttacagtagaaccgatgataaattttggaaaatatgatgttagaatgttaggcgatggttggacggctgttacaaaagataaaagtttgtcagcacaatttgagcatagtattggcattaccaacgatggcgtagaaatttttacaaaatcacctgctgggcttgataaaccgtaaa

SEQ ID NO: 262113 - DNA, 280 bp, Unknown
  Bacterial polypeptide expressing nucleotide sequence isolated from the Sargasso Sea
catggaattggtaaggaatttcacacccctccaagtgtactgcattatggaaatttaggtgaagggcctgaattaaaaccaggaatgttttttacaattgagcctatgattaacttgggtgattggagaataaaaattttgcaggatggctggacagctgttacaaaagataaatccctttcagctcaatttgagcatacaataggaataactgaagaaggtaatgaaatttttacattatcagaaaacaatacagattttccaataaatgatttataaa

SEQ ID NO: 262114 - DNA, 796 bp, Unknown
  Bacterial polypeptide expressing nucleotide sequence isolated from the Sargasso Sea
aatgagacataataatatcccaatacattcaaaaaatgactttgaaaatatgagacttgcaggttcactcgctgctcttgttttagactcactttatgaaaaaattgttccaggaattagtactcaagaaattaatgatatttgtcacgaaataattgttaaaaataatgccataccagctcctcttaattataaaggttttcctaaatcagtttgtacttcagttaatcatgttgtttgtcatggcattccttctgagaagaaaattttatctgaaggcgacattgtaaatgttgatgttacagtaatactgaatgggtggtatggtgatagctctagaatgttcgtagctggaaaaacaaataaaaaaaattttgatttattgaaaataacatatgaatcattacttattggaataaaagaagcaaaaccaggcaatcatattggagatataggaagtaaaattcaaaaactagccgaaagtaatggttattctgttgtaagagatttttgtggtcatggtattggaaaagagtttcatacccctcctagtgttttgcattttggtgaacctggggaagggcctaaattagaacctggaatgtttttgacaattgaacccatgattaatttaggtggttggcaaacaaaaatacttaatgatggctggacagcagtgactaaagataaatctttatcagcacaatttgagcacacaattggaataacagaccaaggtaatgaaatatttactttatctaaaaataatacagcttttcctataaacgatgtataa

SEQ ID NO: 262115 - DNA, 778 bp, Unknown
  Bacterial polypeptide expressing nucleotide sequence isolated from the Sargasso Sea
gatgaaaattaaatcatataaaagtgatgaagtagaaccttgtagagaggcaagtaaaattactgcaactattttagacgagctaaataatattataaaaaaagatgtctcaacatctgagattgatgattattgtttaacaagaattcaagagctaggaggcacacctgcaccgttgttttacagaggttttccaaagtctacatgtacctcattaaatcatgttatttgtcatggtattccaaaccataatcgaaaccttcaaaatggggatattttaaatgtagatgtaacgacaataattgatggttggcatggggactcatcaaggatgtttaaagtaggagacatttcaattaaagcaagtaatctatgcaaggttacccacgattgtttgatagagagtattgacgagataaaagttggtgagcctatcagtagaataggaaaaaaaattgagaatatagcaacttcaaataactttagtgttgttagagatttttgtggacatggggttggattaaagtttcacgagaatcctagtattttacactattacgatagtgagtatgataaagtaaaatttgtagacggaatgatttttacaattgaacccatgatcaatgttggtaaatatcaatctaaaatacttaacgatggttggactgcagtgactaaagataaaacacttagcgctcagtacgaacatacgatatacattaatggtgatattattgagattctaacagagtccccaagtaaggctttttataattga

SEQ ID NO: 262116 - DNA, 274 bp, Unknown
  Bacterial polypeptide expressing nucleotide sequence isolated from the Sargasso Sea
gattattgtggtcacggaattggtactatttatcatgaagagcctcaagttcttcattatggaaaagctggtacaggaattaaattagaagaaggcatgtgtttcacaattgagccaatgattaatcagggaagaaaatattcaaaagtattaaaggatgggtggactgtggaaacaaaagatggaagaaactctgcacaatgggaacatactattgcagttactgacaggggttacgaaattctcacaaaaagaagtgatgaatatgtatgaa

SEQ ID NO: 262117 - DNA, 334 bp, Unknown
  Bacterial polypeptide expressing nucleotide sequence isolated from the Sargasso Sea
tgaaattcagtcatttgtagaggaaagaggtttttctgttgtaaaagatttttgtggtcacggaataagtactacctttcatgagccacctaatattttacattatggtaataaaaattctggaatggaattaaagcctggtatgacatttacgattgagccaatgattaattcaggtaaatatcatgttaaaatattaaatgacggatggacagcagttacaaaagataaatcactgtctgcacaatttgaacatacattaggaattactgaaaatggttatgaaatctttacagaatctgttaaaggttatttaaagcctccatatttataa

SEQ ID NO: 262118 - DNA, 712 bp, Unknown
  Bacterial polypeptide expressing nucleotide sequence isolated from the Sargasso Sea
ttagatgaagtttccaaaataataaaacctggcattaccactgaagagatagacaaattgtgttttgaatttataaatgacttaggagcttattctgcgcctctttattatagaggttatcctaaatcatgttgtacttctactaaccacatagtctgtcacggcataccgggaaacaaaactttaaaagagggagatataataaacgtagatataacaactttaaaagatggttggcacggtgatactagcagaatgttctatgttggagaggtctctgtaaaagctcataatttaacaataaccacttatgaggcaatgatggaatcaataaaaattctcaaaaaaggattgtgcctcggagatataggatcaactattcaaaaatatgtagaagcaaaaggattttctgttgttagagatttttgcggacatggtgttggtaaaaattttcatgaagcaccgaatatattgcattatggccagcctggaactggggataaattagaagcagggatgatttttacaattgaacctatgataaatgagggtgaatataatacaaatgtattaaaagatggatggacagcagttacgaaggataaaatgctttctgcacaatttgaacacacagttggtataaaagatgatggatatgaaatatttaccctctcaaaaaaagggttaaattttcctccttataaaaaatgat

SEQ ID NO: 262119 - DNA, 775 bp, Unknown
  Bacterial polypeptide expressing nucleotide sequence isolated from the Sargasso Sea
ccacgcaggatcttgatcaaaactgaggaacaactggaaggtatccgcaaaagcagtcgtctcactcgggatctgttggatatgatagaggatcgaatagaggcgggggtcagcaccaaccagatcaatgaatgggttcacgaggaaacgctcgcccagggagcaattcctgctcccctcaattatggcagaggcaaaggcccacgaggaagaccctttcccaaaagcgtctgcacctcgatcaacgaagtcatctgtcacggcattcctaatgagcaaattcttgtcgacggggacatcatcaatgttgatgtgacctgtatcgtcgatggttactttggagatgcgagcagaatgtttatcatcggagaggtcccggatgcgactcggaagttggtggaagaaaccaggaaatgcctggagcttggaattgcccaggttcgtccaggtggaaaaactggggacatcggacatgcaatccagacccatgctgaaagtctggggtattcagtggtccgggatttctgcggacatggtgttggagtggaatttcatgaagcaccccaaattcttcattacgggacaccgggtactggagatctcatgcaggagaatatggtcttcaccattgaaccgatgatcaacattggaagacctgaaagcaggattcttcgagacggctggactgcggttacggtggatggttctctttcggcgcagtgggagcatacgattcatgtcaccggggaggggtgtcaggtgttgaccggctgat

SEQ ID NO: 262120 - DNA, 323 bp, Unknown
  Bacterial polypeptide expressing nucleotide sequence isolated from the Sargasso Sea
atttgttgaagaaaaaggtttttcagtagtaagagatttttgtggtcatggaattagcacaacatttcatgagtcaccaaatattttacattatggaagtaaaaatacaggtatggaaattagacctggtatgacatttactattgaacctatgatcaattcaggaaaatatgatgtaaagatgttaaatgatggctggacagcagttacaaaagataaatctttatctgctcaatttgaacataccttaggaattactgaaaatggttatgaaatctttacagaatctgctaaaggttattcaaagcctccatacttataat

SEQ ID NO: 262121 - DNA, 383 bp, Unknown
  Bacterial polypeptide expressing nucleotide sequence isolated from the Sargasso Sea
agcaattaatattttaaaaccagggataactttgggtgatattggccatactatccaattacatgttgaaaaaaaaggttatagtgtagtaagagatttttgtggccatggtataagtactaaatttcatgaaccacctaatattttgcattatgggaaaaaaaatactggaattaaggtttttccaggaatgacttttacaatagaaccaatgattaattttggaaaatacgatataaaaatgttaaatgacggttggactgctgtcactaaagacaaatctttatcagcacaatttgaacatactgtaggaattactgaaaatggatatgaaatctttacagaatctgctaaaggttattctaagcccccttacaaataat

SEQ ID NO: 262122 - DNA, 514 bp, Unknown
  Bacterial polypeptide expressing nucleotide sequence isolated from the Sargasso Sea
atgaccgtcaccatcaaatccgccgaagaaatcgagaaaatgcgcgtggccggccgcctggctgccgaagtgctggagatgatcggtgagcacgtcaaaccaggtgtcaccaccgaggaaatcgaccgcatctgccacgactatatcgtcaacgtgcagcaggccattcccgccccactcaactacaagggcttccccaagtcgatctgcacttcgatcaaccacgtggtgtgccacggcatccccaatgacaagccgctgaaagacggcgacgtgctgaacatcgacgtcaccgtgatcaaggatggctaccacggcgataccagcaagatgttcatggtcggcaaggtcgccgagtgggccgagcgtctggccaaggtcacccaggaatgcatgtacaaaggcatcgaactggtcaaacccggcacgcgcctgggcgatatcggcgaagtgatccagaagcacgcggaaaagaacggtttctccgtggtccgcgaatactgcggccatggca

SEQ ID NO: 262123 - DNA, 541 bp, Unknown
  Bacterial polypeptide expressing nucleotide sequence isolated from the Sargasso Sea
tctgatagagtattgggaagaaggtgatatcgttaatattgatgtaacagcaattattaacaatcattacggtgatacaagtagaatgttttgtgttgggaaaacgcccgtaaaagcaaataatttaattgaaataacttttaactctatgatgaaagcaattagaattttaaaacctggaataaaacttggagacataggaaatgaaatacaaacgtatgtagaaaataacggtttctctgtagttagagatttttgtggtcatggaataagtacagtatttcatgagatgccaaatattcttcattatggtcaaaaaaatactggaagtgaactaaaagctggtatgacttttacaattgagcctatgattaattcaggtaagtatgatgtaaaagttttaaacgacggatggaccgccgttacaaaagataaatccttatctgctcaattcgaacatactgtaggaattacagaaaatggttatgaaatttttacagaatctgctaaaggttattctaagcctccatataataattaa

SEQ ID NO: 262124 - DNA, 595 bp, Unknown
  Bacterial polypeptide expressing nucleotide sequence isolated from the Sargasso Sea
ctaccctaaatccatctgtacatcttcaaaccatattgtttgtcatggaataccagggaataaaactcttgaagagggggatgtagtaaatgtagacgtaacagctattaaagatggttggcacggtgacacaagcagaatgttttatgttggcaaagtttcaatcaaggcacagaatttaacaaaaacaacttacgaagcaatgatggaagcaattaaaatacttaaaagcggtttacatcttggtgatataggttcgtgtatacaaaagtatgttgaggcaaaagggttttctgttgtcagggatttttgtgggcatggggttggtaaaaattttcatgaagcaccaaatgttttgcattatggtgagcctagaactggggataaattaaagccaggaatgatatttacaatagaaccaatgataaatgaaggcgaatatgaaacaaaagtgttgaaggatggttggactgcagttactaaagataaaatgctctctgcacaatttgaacacacagttggtataaaagatcaaggatatgaaatatttaccctatcaaaaaaagggttagattttcctccgtataaaatatga

SEQ ID NO: 262125 - DNA, 322 bp, Unknown
  Bacterial polypeptide expressing nucleotide sequence isolated from the Sargasso Sea
ttttattgaagaaaaaggattttctgttgtaagagatttttgtggtcatggtattagtactacttttcatgaacagccgaatatattgcactatggaaaaaaagatacaggaatagaattaaaacctggaatgacttttacaattgagccaatgattaatgctggagaatttggtgtaaaaatactaaatgatggttggactgcagttacaaaagataaatctttatctgcacaatttgaacatacattgggaattacagaaaatggttatgaaatctttacagaatctgctaaaggttattcaaagcccccatacttataa

SEQ ID NO: 262126 - DNA, 674 bp, Unknown
  Bacterial polypeptide expressing nucleotide sequence isolated from the Sargasso Sea
aatgaataattacactgaaaaatttgaaaaaatgagaatagcgggaaagttagctgcacaaactttagatatgttaactgaaaatattaaagaaggtgtttcaacagcctatattgataagcttggttatgagttcatcagggataatggtggtcactctgctccactatattatcgaggcttcaccaaatctttatgtacatctttaaatcatgttgtatgtcatggtattccaacagaagatagaattttagttgagggtgacgcactaaatgttgatgtgactgcaataattaatgatcactatggtgacacaagtcgtatgttttgtataggaaaaacatctgtaaaattgaataatcttattgatgctacttaccaatcaatgatgaaagctataaaaattttaagacctggaataaaactaggagatataggatatgaaattcaatcttatattgaagaaaaaggtttttcggttgtaagagatttttgtgggcatggtataagcacaacatttcatgaggcaccaaatattttacattatggaacaaagaatacaggtatggaattaaaaactggaatgacatttacaattgaaccaatgattaatgctggaaaatttaatgtaaaagtgctaaatgatgggtggactgcagtcactaaagataaat

SEQ ID NO: 262127 - DNA, 230 bp, Unknown
  Bacterial polypeptide expressing nucleotide sequence isolated from the Sargasso Sea
tggtaaaaaaaataaaggcatggaattaaaacctggcatgacatttacgatagagccaatgataaatgctggtaaatatgatgttaaaatgttgaatgatggttggacagcagttacaaaagataaatctttatctgcacaatttgaacatacgttaggaattactgaaaatggttatgaaatctttacagaatctgctaaaggttattcaaagcctccgtacttataat

SEQ ID NO: 262128 - DNA, 285 bp, Unknown
  Bacterial polypeptide expressing nucleotide sequence isolated from the Sargasso Sea
tttgtggacatggaattagcactacatttcatgaacctccaaatatattgcactatggtaataaaaatactggcatggaattaatacctggaatgacttttactattgaaccaatgatcaacgaaggaaaatttgctacaaaaatgcttaatgatgggtggactgcagttacaaaagataaatctttatctgcacaatttgaacatacattaggaattacagaaaatggttatgaaatcttcacagaatctgctaaaggttatttaaagcctccatacttataat

SEQ ID NO: 262129 - DNA, 606 bp, Unknown
  Bacterial polypeptide expressing nucleotide sequence isolated from the Sargasso Sea
ctgctcctcttaactataaagggtttccaaagtctatatgtacatcagtaaatcatcaagtttgtcatggtattccagctactacaaaaatactaaaaaatggtgatataataaatatagatgtaacagttataaaagatggttttcatggcgacactagtaaaatgttctgtgtaggagaaccttcaattttagcagataggttatgtaaggttacacaggagtgtatgtataaagcaatttcaattgtaaaacctggattacatgtaggcgatattggagcagttattcaagaacatgcgcatgtaaacaattttagtgttgtcagagattattgtggacatggtattggaaaaaatttccatgaaccaccacaaatactacattatgggacaagaaaaactggaataaggttaaaagaaggtatgacgtttacaatagaacctatgattaattctggtaaatataaaacaaaactactcaatgatggttggacagtagtaacccaagatcattcgttgtcagctcagtgggagcatacagtacttgttacgaataatggatatgaggtactaactattagaaatgaagaggaaggcatataaa

SEQ ID NO: 262130 - DNA, 516 bp, Unknown
  Bacterial polypeptide expressing nucleotide sequence isolated from the Sargasso Sea
gagatgcgttgaatgttgatgtcactgcaataattgataatcactatggtgacactagtagaatgttttgtataggagaaacatctgttaaatatacaaatttaataaatgcaacttacgacgcaatgatgaaggcaataagtattttaaaaccaggaatcaaaacaggagatattggattcgaaatacaatctcatgtagaaaaaaaaggtttctctgttgttagagatttctgtgggcacggtataggtacatctttccatgaaccacctaatattcttcactatggcaagaaaggtactggtattgaaattaaacctggcatgacattcactatagaaccaatgattaatgccggtaaatttgatacaaaaacacttaatgatggatggacagctgtaacgaaagataaatctttatcagcacaatttgaacatacggtaggtataactgaaaatggttatgaaatatttacagaatctgctaaaagttatacgaagcctccatacttataat

SEQ ID NO: 262131 - DNA, 667 bp, Unknown
  Bacterial polypeptide expressing nucleotide sequence isolated from the Sargasso Sea
atgaataattattctgaaaaattcgaaaaaatgagagttgctggaaaaatggcagctaaatgtttagatatgataactgaatatattaatccaggtataactacaaataaaattgataaattatgttacgaatttataagagacaatggaggatactgtgcccctttatattatagaggatttgaaaaatctttatgtacatctttaaatcatgtaatttgtcacggtattccttcggacagagaacttgaggaaaatgatattttaaatattgatgttacagcaatagttgatgattattatggtgatacaagtaggatgtttacagttggagaaatttccataaaagcaaaaaatttgatagatgctacctatgagtcattaatgaatgctacaaaaattctaaagccaggtatcaaattgggagatattggatatgaaattcaatcttatgttgaggcaaaaggttttagtgttgtaagggatttttgtggacatgggattagtaatatatttcacgaaccaccaaatgttctgcattatggtaaaaaaaatactggaagcgaattacaacctggaatgacatttacaattgagcctatgataaattcaggaaaatacgatgctaaaattctgacagatggatggacagctgttactaaagata

SEQ ID NO: 262132 - DNA, 700 bp, Unknown
  Bacterial polypeptide expressing nucleotide sequence isolated from the Sargasso Sea
atgagtgattataaagaaaaattcgaaaagatgaaagttgcaggtaatcttgcggcaagaaccttagatatgttaacagaaaacattaaagaaggtgtaagcacagattacattgataaattgggttatgagtttataagagacaatggaggctactctgctccgctatattatagaggtttcacaaaatcactatgtacatctcttaatcatgttgtctgccatggtataccttctgatagaattttaagagatggtgatgcagtgaatgttgatgtaactgcaattgttgatgaacattatggtgacactagtagaatgttttgcattggcaaaactcctgtaaaactaaataacttaatcgagacaacttacgagtcgatgatgagagcaattaaaattttaaaaccaggaataaaattaggtgatattggatatacaattcagtcatttgttgaagaaaaaggtttttcagtagtaagagatttttgtggtcatggaattagcacaacatttcatgagtcaccaaatattttacattatggaagtaaaaatacaggtatggaaattagacctggtatgacatttactattgaacctatgatcaattcaggaaaatatgatgtaaagatgttaaatgatggctggacagcagttacaaaagataaatctttatctgctcaattgaacataccctagg

SEQ ID NO: 262133 - DNA, 619 bp, Unknown
  Bacterial polypeptide expressing nucleotide sequence isolated from the Sargasso Sea
actctgctccactttattatccgtggttttaaaaaatcactatgtacatctttaaaccatgttgtgtgtcacggtattccgtctgatagagttttaattgaaggtgatgctgtaaacattgatgtgactgcagtagttaatgagtactacggagataccagtcgaatgtttactataggtgacatatcggtgaaggcaaaaaatttaattgaaactacttacgaatctatgatgagaggaattaaaatattaaaaccaggagttaaattaggagacattggatttgaaattcaatcctttgttgaagaaaggggtttttcagttgttagagatttttgtggacatggtattagtaatacttttcatgaaccaccaaatattcttcattatggtaagaaaaatacaggtcacgaacttacacctggtatgacctttacaatagaacctatgataaatgtaggtaaattagatgtgaaagtacttaatgatggctggactgccgttacaaaggataagtctttatcagcacaatttgagcatacaataggaattacagaagactcttatgaaatttttacagaatctgttaaaggttataagaggcctccatataattaat

SEQ ID NO: 262134 - DNA, 670 bp, Unknown
  Bacterial polypeptide expressing nucleotide sequence isolated from the Sargasso Sea
atgagtgactataaagaaaaatttgaaaaaatgaaaattgcaggaaaccttgcttcaaaaacattggatatgttaactggtgaaataaaggctggagtttcaaccaacaaaatagataaattaggttatgaatatataagagataatggtggatactctgcaccattattttataggggttttccaaaatctctatgtacatcattgaatcatgtcatctgtcatggaataccaagcgaaagaatattagatgagggagatattttgaatattgatgtgactgcaatcgtagacggtttttatggagacacaagcaggatgtattcgattggaaaaatttcagtcaaagcacaaaatttaattgatgcaacatatgagtctttaatgaaatcaattaaaattcttaaacctggattaaaacttggagatattggtcatgaaattcaaaaatatgttgaggccagaggcttttcagttgtaagagatttttgtggtcatggtattggagacaattttcatgaaccacctaatattcttcattacggaaaaaaaaatactggcgctgagttaagaccgggtatgacctttacaatagaaccaatgataaattcaggtaaatacgatgtaaaaattttagatgatggatggacagcggtttctaaagataaaa

SEQ ID NO: 262135 - DNA, 608 bp, Unknown
  Bacterial polypeptide expressing nucleotide sequence isolated from the Sargasso Sea
tcatggagcttattcggcaccttatttttacaggggttttccaaaatcatgttgtacatctgcaaaccatgtagtttgccacggaataccctctgacaaaattcttaaagagggagatatagtcaatgttgatgttactgcattaaaagatggctggcacggtgatactagcagaacttttgaaattggtgaaatttctgtaaaagctaagaaattagttaagacaacctacgatgcaatgatgaaagcaattaagattgttaaagatgatatttatttaggtgatataggagcaacaatacaaaaacatgttgaagctgagggattttcagtagttcaagatttctgcggtcatggaattggtcaggtttttcataaggagcctaatgtcttgcattatggaaaagagggaaccggagaaaaaattaaagccggaatgatttttaccatagagcctatgattaatttagggaattatgaaaccaaaacccttaaagatggatggaccgcggtaactaaagataaatctttgtcagcacaatttgaacatactataggagtaacaaaagacggttgtgaaatatttacattatcaaaaaataaatgat

SEQ ID NO: 262136 - DNA, 700 bp, Unknown
  Bacterial polypeptide expressing nucleotide sequence isolated from the Sargasso Sea
atgagtgattataaagaaaaatttgaaaaaatgagagttgctggtgatttagcggcaaagacgcttgatatgttaactgataacattaaagaaggagtctcaacagactatatagataaattgggatatgagtttataagagataacggaggacactctgctccactttactatagaggttttacaaaatctttatgtacttcgttaaatcatgttgtatgtcatggagttccctcagatagagttttaagaaatggtgatgcagtaaatgttgatgttactgcaattgtagacgaacattatggtgataccagtagaatgttttgtattggtaaaacaccaattaaattaaacaatctaatagatgcaacatatgaatctatgatgagagcaattcgaattttaaaaccaggaattaaattaggtgatattggttacgaaattcaatcatttgttgaagaaaaaggatattctgttgttagagatttttgtggtcacggtataagtacaacatttcatgaaccaccaaacattttacattatggaagtaaaaactcaggaccagagttaaaacctggaatgacttttacaatagagcctatgataaattcaggtaaatatgatgttaaaatgttaaatgatggttggactgatgttacaaaagataaatctttatcagctcaattgaacatacgttagg

SEQ ID NO: 262137 - DNA, 746 bp, Unknown
  Bacterial polypeptide expressing nucleotide sequence isolated from the Sargasso Sea
gatgaataattataccgaaaaatttgaaaaaatgagaattgctgggaaactagcatccaaaactttagacatgattactgattatattaaaccaggagtcagtactgaaaaaattgatgatctttgttttgaatttataagagataatggtggatattctgctccacttttttatagaggttataagaaatcagtttgtacatctttaaatcatgtaatttgtcatggtataccatcggaaagaactttaatcgaaggtgatattttaaatattgatattacagcaatagttaatgattactatggcgatacaagtagaatgtttgttgttccacatatttctgttaaagcaaaaaatttgattgatgcaacctatgagtcccttatgaattctattaaaattttgaaacctggaaaaaaaataggagatataggttatgaaattcaatcttatgtagaaaaaaaaggtttcagcgtagtgagagatttttgtggccatggaataagtaatgtgtttcatgaacctcctaatgttttgcattatggtaaaaaggatactggaaacgagttagaaccaggtatgacttttactattgaaccaatgataaatgtaggaaaattcgagtcaaaagtgttaaatgacggatggacagctgtaacaaaagataaatctctttctgcgcaattcgaacacactataggtattaatgaaaatggttatgaaatattcacagaatctgttaaag

SEQ ID NO: 262138 - DNA, 718 bp, Unknown
  Bacterial polypeptide expressing nucleotide sequence isolated from the Sargasso Sea
atgaatgaagaatttttaaaatcgttcgatggaacaagagaggcaggtgctatcgcgtctggtacattggatgaattgaataccattataaaaccaggtgtaaccactgagaagatagataaaatatgttatgagtatattaatgatcatggtgcctactctgccccattatattatagaggttttccaaaatcatgttgtacttctacgaatcatattgtttgtcatggaataccacaggataaaattttaagagatggagatatattaaatgtagatgtcacagcaattaaaaacggttggcatggtgatacaagcagaatgtatttagttggagacgtttctgtgaaagcaaaaaaattaattaaggttacttatgaatcgatgttaaagggtatagaaatattaaaagagggatcatttactggtgatataggtaatgcaatacaaactcatgttgaacaacagggtttttcagtagtgcgagatttttgtggtcatggacttggtagaaaatttcatcaatcaccaaatatattgcattacggagaggagaaaactggtgaaaaattagttgctggtatgttatttactattgagccaatgatcaatgaaggtgattacaatactaaagtattaagtgatgggtggacagcagtaacaaaagataaattgttatctgcacaatttgaacacacagttggtataacaaaataat

SEQ ID NO: 262139 - DNA, 709 bp, Unknown
  Bacterial polypeptide expressing nucleotide sequence isolated from the Sargasso Sea
caggggaaacttggctgctcaaacgttagatatgttaactgaaaatataaaagagggaatttctactgactacattgataaacttggatatgaatttattcgtgataatggaggatactcagctcctttgtactatcgaggattcaaaaaatctttatgtacatctttaaatcatgttgtttgtcatggtgttccgtcagaagatagaattttggaagatggagatgcggtaaatgttgatgtgacagcagtagtaaatgaacattatggggatactagcagaatgttttgtattggaaaaactcctgtgaaattaaataatcttattaatgctacctacgagtctatgatgaaagcaatcaagattttaaaaccaggagtaagacttggggatattggatatgaaattcaatcttatgtagaagaaaaaggattttctgttgtaagggatttttgtggtcatggtataagcacaacatttcacgaacctccaaatatattacattatggaaacaaaaatactggaaaaggaataactccaggtatgacttttacaattgaaccaatgatcaatgcagggaaatatgatgttaaaatgcttaacgatggttggacagctgttacaaaagataaatctttatcagcacaatttgaacacacagtaggaatttacagaaatggttatgaaatctttacagaatctgtttaa

SEQ ID NO: 262140 - DNA, 685 bp, Unknown
  Bacterial polypeptide expressing nucleotide sequence isolated from the Sargasso Sea
atgagtaaaaattattctgaaaaatttgaaaagatgagagttgcaggtaagcttgcgtcttcaactttagatatgataacctcttttattaaaccaggaataacaaccgactttatcgataaaacttgttatgaatttattaaagacaatggaggatattcagcaccactaaactatagaggttttgaaaaatctgtctgtacttctttaaatcatgttgtttgtcatggtataccttcagatcgcaccctcgaggatggtgatattttaaatattgatgtaacagcaataattaacaaccattatggagatactagtagaatgtatatagctggaaatacaaatattaaggctcagaatttaataaacgcaacatatgaatcgcttatgaatgcaattagaattttgaggccaggtttaaagcttggcgatataggatttacaatccagtcttatgttgaacaaaaaggattttctgttgtaagggatttttgtggtcatggtataagcaacaaatttcatgaacccccaaatatacttcattatggtaaaagaaattcaggtatagagctttatccaggaatgacttttactatagagccaatgatcaatgcaggaaagtatgatgttaaagttttaaatgacggatggacagctgttactaaagataaatctttatctgcac

SEQ ID NO: 262141 - DNA, 352 bp, Unknown
  Bacterial polypeptide expressing nucleotide sequence isolated from the Sargasso Sea
tttgggggatataggttatgaaattcaatcatatgttgaggggaaaggttttagtgttgtaagagacttttgtggccatggaataagtacaatatttcatgaacctcctaatattttacattacggaaaaaaaaatactggaatcaagacttatcctggaatgacttttacaatagagccaatgattaattcaggaaaatatgatgtaaaactattaaatgatggatggacagctgttaccaaggataaatcactatcagcacagtttgaacatactttgggaattactgaaaatggatatgaaatctttacagaatctgctaaaggttattctaagcccccatacaaataa

SEQ ID NO: 262142 - DNA, 307 bp, Unknown
  Bacterial polypeptide expressing nucleotide sequence isolated from the Sargasso Sea
cttttctgtagtaagagatttttgtgggcatggtataggaaaatcatttcacctatcacctaatattttacattacggtgaaaaaggcaaaggtgaaaaaatttcaacaggaatgatttttacaatagaaccaatgattaatgctggaaaatttcctactaaaactttatctgatggttggaccgctgttactaaagataaaacattatcggcacaatttgaacatactgtaggtataaaagaagatggcttcgaaatttttacactttcacaagaaaatttagatcagcctaaatatgatttatga

SEQ ID NO: 262143 - DNA, 714 bp, Unknown
  Bacterial polypeptide expressing nucleotide sequence isolated from the Sargasso Sea
aatgaaaaatagttatttagaaaaatttgaaaaaatgagaatagctggaaagcttgcatcaaaaactttagatatgattactgaatatgttaaaccaggcatatcaacagataaaatagatcaaatgtgtcacgaatttattagagacaatggtggttactctgcaccactttattatagaggatatactaaatctctttgtacttcattaaatcatgttgtttgtcatggtataccttcagatagaacgcttgatgaaggtgatgcgctaaatattgatgtgaccgcaatagttaacgattaccatggtgacacaagtagaatgttttctgttggagaggtttctataaaagcaaaaaatttaataaatgctacttatgaatctatgattaatgcaattaaaattttaaaaccaggaactaaacttggtgacataggttatgaaattcagtcatacatagaaaaaaaaggtttttctgtagttagagatttttgtggccatggaataagtaatatttttcatgaacagcccaatgttcttcattatggaaaaaaaaatactggtattgaattaacaccgggcatgacttttacaatagaacctatgataaattcaggaaaatatgatactaaaattttaaacgatgggtggactgctgttacaaaagataagtctctttctgctcaatttgaacatacagttggaataactga

SEQ ID NO: 262144 - DNA, 683 bp, Unknown
  Bacterial polypeptide expressing nucleotide sequence isolated from the Sargasso Sea
aatgataaaaactttatctgatatagaagaaatgaaagtagctggaaagttagcagctgaagttctcgaaatgatcactccttttgtaaagccaggtatttcaactggagaactagattcgatttgtcatgattacataattaatgaacaaaatgccattcctgctaatgttggatatagaggatttgaaaaaacaatttgcagtagccttaaccaagttgtctgtcatggcatacctgacgacaaaagaatacttaaaaacggagatatcctaaacatagatgtgacagtactaaaagatggttggcatggggatacctccaaaatgttcttagttggcaaatgtaaaccacataatgagaggttagtaaaagttacgcaagaatgtctttataaagccatagaaatagttggaccaggagcacatcttggtgatataggtcatgcaattcaggaacatgctgaaaaaaattactattctgttgttgaagaatattgtggtcatggcataggaaaggtctatcatgaagagccgcagatacttcactatggtaaacaaggaactggtcttcgacttgaagaaggcatgtgttttaccattgaaccgatgataaatttaggtactaaatttactaaatctttaaatgatggatggacagtggaaacaaaagatggaagaaatt

SEQ ID NO: 262145 - DNA, 778 bp, Unknown
  Bacterial polypeptide expressing nucleotide sequence isolated from the Sargasso Sea
atgacagataaaaaacttgaagcttttgagggaactagaattgcgggagcaattgcctcggctgctttagatgaagttgcaaaggttgtaaaacccgggataaaaacagacgacattgacaaattatgttttgaatttatcaatgatagcaatgcatactctgctccgttattctatagaggttatccaaaatcttgttgtacctccacaaaccatattgtttgtcatggaattcctcaaaataaaattttaaaagaaggtgatatagtcaatgttgatgtaactgcacaaaaagatgggtggcatggtgatactagtagaatgtattttgttggtgatgtttcaattaaagcaaaaaaattagtaaatgctacttatgatgcaatgataaaatcaattcaaattttaaaaaatgatatacatattggagatataggatctgtaattcaaaaacatgttgaagcagaaggtttttctgttgttagagatttttgtggacatggtgtgggaagaagttttcatgctccgccaaatatattgcattatggagaagctaaaacaggagaaaaattaaaagctggtatgatttttacaattgaaccaatgattaatgaagggaattatgaaactaaattattaaatgatggttggacagcagttacaaaagataaaaaattatcagcacaatttgaacatactgttggtataacagacaatgggtatgaaatttttacatcttcaaaaaagggattagattttccaccttataaaatatgat

SEQ ID NO: 262146 - DNA, 553 bp, Unknown
  Bacterial polypeptide expressing nucleotide sequence isolated from the Sargasso Sea
ttgccatggcattccctctgatagagttctaaatgagggtgatgcagttaatattgatgttacagccatagttaatgagtactacggtgacaccagcagaatgtttactattggagatataccggtaaaagctaaaaacttaatagagacaacttacaaatctatgatgaaaggaattgaaattctgaaaccaggagtaaaattgggagatattggatttgtaattcaatcctttgttgaagaaagaggtttttctgtagtaagagatttttgtggtcatggtattagtaatacttttcatgagcaacctaatattcttcattatggtaagaaaaatacaggttacgagttaatacctggtatgacctttacaatagagccaatgatcaatgttggaaaattagacgtaaaagtacttaatgatgggtggacagctgttacaaaggataagtctttatctgcacaatttgagcatacaataggaattacagaagactcttatgaaattttcacagaatctgttaaaggttataagaggcctccatataattaa

SEQ ID NO: 262147 - DNA, 727 bp, Unknown
  Bacterial polypeptide expressing nucleotide sequence isolated from the Sargasso Sea
atgagtgattataaagaaaaatttgaaaaaatgcgtgctgccggaaatctggctgctagaactttagatatgctcaccgatcatataaaaccaggtatatcaacggataaactggataacctaggatatgaatttataaaagatcatggtgcatattctgctccacaattttacagaggttttaaaaaatctttatgtacttcattaaatcatgttgtttgccacggtataccatctgacagagttttggatgaaggagatgctataaatattgatgtaacagcgatattagacggccattatggtgacacaagtagaatgtatactgttggagaagtttcaattaaatctaaaaatttaatagatgcaacttataattctatgatgaaagctattaatattttgaaacctgggttatgtttgggtgacattggtcatgaaatccaatcatatgttgaagaaaaaggcttcagtgtagtaagagatttttgcggccatggtataagtacgaaatttcatgagcctcctaatgttttgcattatggaaaaaaaaatactggaattaaggtttatccaggaatgacttttacaatagaaccaatgattaactttggaaaatatgatatcaaactgttaaatgatggatggacagcagttactaaggataaatcactatcagcacagttcgaacatacagtaggaattactgaaaatggatatgaaatct

SEQ ID NO: 262148 - DNA, 237 bp, Unknown
  Bacterial polypeptide expressing nucleotide sequence isolated from the Sargasso Sea
ttcactacggtagaaaaaatacaggcatggaattaagaccaggtatgacatttactatagaaccaatgattaatgcaggaaaatatgatgttaaaatgttaaatgacggctggacagctgttacaaaagataaatctttatctgcacaatttgaacatacgttaggaattactgaaaatggttatgaaatctttacagaatctgctaaaggttattcaaagcccccatacttataat

SEQ ID NO: 262149 - DNA, 433 bp, Unknown
  Bacterial polypeptide expressing nucleotide sequence isolated from the Sargasso Sea
gtcaattaaatcaaaaaatttaatcgatgctacatacgaagcgatgatgagggcaatcagagtattgaagccaggattaaccttgggtgatataggttatgaaatagaatcatatattgatgaaaaaggttttagcgttgttagagatttttgtggccacggtataagcacaacgtttcatgagccaccgaatattttgcattatgggaaaaaaaatactggatttaaagtttatccagggatgacttttacaattgagcctatgattaattttggaaaatttgaagtaaaagtattaaatgatggatggaccgcagtaactaaggataaatcgttatctgcacaatttgaacatactttaggaattactgaaaatggatatgaaatcttcacagaatctgctaaaggttattctaagcccccatacaaataa

SEQ ID NO: 262150 - DNA, 763 bp, Unknown
  Bacterial polypeptide expressing nucleotide sequence isolated from the Sargasso Sea
ttcagaaaaatttgaaaaaatgagaattgcaggtaaacttgcctctgataccttagacatgcttacagaaaatattaaagaaggtatctcaacagcttatattgataaattaggttatgaatttatcagggataatggtggttactcagcaccactatattatagaggatttaaaaaatctttatgcacttctcttaatcatgttgtttgtcatggaattccatctgaggaaagaattttagaggaaggcgatgctttgaatgttgatgtaactgcgattatcaataatcattatggagacaccagtagaatgttttgtattggaaaaacatcagtgaaacttaataatttaattgatgctacatatgagtccatgatgaaagcaattaaaattttaaaacctggaattaagcttggtgatattggttatgaaattcaaaattatattgaagaaaaaggtttttcagttgtgaaagatttttgtggccatggaattagcacgaaatttcatgaaccacctaatattttacattatggaagaaaaaataccggaatgaagctagagtctggaatgacattcacagttgaaccaatgattaatgctggtaaatttaatgttaaaatgttgaatgacggctggactgcagtaacaagagataaatctttatctgcacaatttgaacatacagtgggtattacagaaaatggttatgaaatttttacagaatctgctaaagattattcgaagcccccatatttataa

SEQ ID NO: 262151 - DNA, 610 bp, Unknown
  Bacterial polypeptide expressing nucleotide sequence isolated from the Sargasso Sea
aattataaaggttttccaaaatctgtatgcacatcagttaatcatgttgtctgtcacggtattccaaatgaaaagaaattactgaataatggcgatatcattaatgttgatgttactgttatcttggatggttggtatggagatagttccagaatgtttgttgctggaaaaacaaataaaaaaaattatgatttgcttaagacaacatatgaatgtcttcttgttggaataaaagaggctttgcctggaaaaacatttggagatataggacacaaaattcaagaatatgctgaagccaaaaactattcagttgttagagaattctgtggacatggaattggaaaagaatttcatactcccccaagtgtacttcattatggcaaagttggtgaaggtcctgagctaaaacctggaatgttctttactatagaacctatgattaatctcggtgactggagagtaaaaatacttaatgatggatggacagctgtaacaaaagataaatctttatctgctcaatttgagcatacaattggcattactgaagatggaaatgaaatttttaccttgtcagaaaataatacagattttccaataaatgatttataaa

SEQ ID NO: 262152 - DNA, 627 bp, Unknown
  Bacterial polypeptide expressing nucleotide sequence isolated from the Sargasso Sea
aatgactgaatatttagaaaaatttgagaagatgagaatagctggaaagctagctgcccaaacattagatatgctaacagaaaatattaaagaaggcatatctacagctcatattgataagcttggttatgaatttattagagacaatggaggtcactctgcaccactttactaccgtggatttactaaatctttatgtacttctcttaatcatgttgtttgtcatggaatcccttctgaagatagaattttagaagaaggtgacgcagttaatgttgatatcacagctatagtgaatgaacattatggagatacaagcaggatgttttgtataggcaatacctcggttaaacttaataatttaattagcactacctatgactcaatgatgaaggcaattaaaattttaaaaccaggaattaagcttggagatattggttatgaaattcaatcacatgttgaagaaaaaggtttttcagttgttaaagatttttgtggtcatggaattggtacaacttttcatgagccaccaaatattttacactatggaagaaaaaataccggtatggaactgaaacctgggatgacttttacgattgaacctatgattaatgagggaaaatttga

SEQ ID NO: 262153 - DNA, 581 bp, Unknown
  Bacterial polypeptide expressing nucleotide sequence isolated from the Sargasso Sea
tttatgtacttcgttaaaccatgttgtttgtcatggaataccctcggatagaattttaaatgaaggtgatacagtaaatattgatgtaacagctatactggatggccattatggtgacacaagtagaatgtatactgtaggtgaagtttcaattaaatctaagaatttaattgatgcaacttataattcaatgatgaaagctattaatattttaaaaccaggattaagtttgggagacattggtcatgaaattcaatcttatgttgaagaaaaaggttttagcgttgtaagagatttttgtggtcatggaataagtaccacatttcatgaacctccaaatattttgcattacggaaaaaaaaatactggaattaaagtttatccagggatgacttttacgatagagccaatgattaattctggaaaatatgatgtaaaactattaaatgatggatggactgctgttaccaaggataaatcactatcagcgcaatttgaacatactgtaggaattactgaaaatggatatgaaatctttacagaatctgctaaaggttattctaagcctccatacaaataat

SEQ ID NO: 262154 - DNA, 568 bp, Unknown
  Bacterial polypeptide expressing nucleotide sequence isolated from the Sargasso Sea
aatcatatagtttgccatgggataccaaaagataaagtcttagatgaaggagatattgtaaacgtggatgtcacagccttgaaggatgggtggcatggagacactagtagaatgtattttgttggtgaagtttcaacaaaagcaaatcagttggtaagaactacttatgatgctttgattaaatctattaaaattttaaaaaatgatatttatcttggagatataggctctgttatccagaattatgttgaaaaaaaaggtttttcagttgtgagagatttttgtgggcacggggttggtaaaaagtttcatgaatatccaaatatattacattacggagaagaaaaaaccggtgatagattaaagactggaatgatttttacaattgaacctatgataaatgaaggtgattatgaaactaaagtattaaatgatgggtggacagcagttacaaaggataagaaattatccgcacaatttgaacacactgttggtataactgatgatggttatgaaatatttacaatttcaaagaaaggattagattatccaccttacaaaatatgat

SEQ ID NO: 262155 - DNA, 526 bp, Unknown
  Bacterial polypeptide expressing nucleotide sequence isolated from the Sargasso Sea
catggaatacctttctgaaaaaattttaaaagacggagatataataaatgttgacgtaactgctttaaaagatggttggcacggtgatactagtaggacttttgagataggtgaagtatctatcaaagctaaaaatttagtaagaacaacttatgaagctatgatgaaagcaattgaagttgtgaaagacaatacccatttaggggatattggatggacaatacaaaatcatgtagaatcaaaaggattttctgttgttcaagatttttgtggacatggtgttggtaaattatttcatgagcctcctaatgttttacattatggtgaaaaaggaactggagaaaaaattaaagcaggaatgatatttacaatagagcctatgattaatgcaggaaactatgagactaaaactcttaatgatggctggactgcagtgactaaagataaatctctttctgcacaatttgaacatactataggtgtaactaaggaagggtgtgaaatttttacattaccaaataaataa

SEQ ID NO: 262156 - DNA, 692 bp, Unknown
  Bacterial polypeptide expressing nucleotide sequence isolated from the Sargasso Sea
gtatttagaagattttgtgcaagttggtattagtaccgaagaaattgatagtcttgcatataaatatataacagaagaattaaaatgcattcctgcaaatgttggatacaacgattatcccaaaacactttgtacttcagtaaatgacgtcatttgtcatggaattccgtctgataaagagattctcaaagacggtgatattgtcaatattgatattacagtcatagtcgatggctggcatggtgatacttcaaaaatgtttttaattggcaagtcgcagccacatgtaaagagacttgtagacattacaagagaatgcatgtttaaaggaatagaagtatgtaagcctggggctttcactggagatattggatacgccattcagacacatgcagagaaaaaccactactcagttgttaaaaattattgcggacacggcattggtaagatttatcatgaagatcctcaaatcactcattttggaaataaaggagaaggcataaaacttgaagaaggtatggtttttacaattgaaccaatgattaacttaggctctcataaaacaaaattactgaaggatgggtggacggttgttacagaggacggaaaactgtcagcacaatgggaacacacaatagctataacagaacaaggttatgagattcttacgttaagagaagaggaaaaataat

SEQ ID NO: 262157 - DNA, 264 bp, Unknown
  Bacterial polypeptide expressing nucleotide sequence isolated from the Sargasso Sea
cagtgtttcatgaagcacctaatattttacactatggtaataaaaatactggcatggaattaagaccaggtatgacttttacaatagagccaatgataaatgctggaaaatttgataccaaagttttaaacgatggttggactgctgttacaaaagataaatctttatcagcacaattcgagcatacaataggaataactgaaaatggttatgaaatctttacagaatctgctaaaggatattctaaaccaccatacaattaat

SEQ ID NO: 262158 - DNA, 202 bp, Unknown
  Bacterial polypeptide expressing nucleotide sequence isolated from the Sargasso Sea
aaaacctggaatgacttttacaatagagcctatgataaattcaggcaaatatgatgttaaaatgttaaatgatggttggactgctgtcacaaaagataaatctttatcagctcaatttgaacatacgttaggaattactgaaaatggttatgaaatctttacagaatctgctaaaggttattcaaagcctccatacttataa

SEQ ID NO: 262159 - DNA, 657 bp, Unknown
  Bacterial polypeptide expressing nucleotide sequence isolated from the Sargasso Sea
gatgaataattattctgaaaagtttgaaaaaatgcgaatagctggaaaagttgcttcaaaaactttagacatgataactgatcatataaagccaggtatctctactgaaaaaattgatcatatgtgttatgaatttattaaagataatggtggtcactcagctccacttttttatagagggtataaaaagtctgtctgtacttcattaaatcatgttatatgtcatggtgttccttcggacagaacattagaagaaggtgatatacttaatattgatgtgactgcaatagtgaatgattattacggtgatacaagtagaatgttctcagtaggtgaaatatctgtaaaagcaaaaaatttaattaactcaacatatgagtccatgatgaatgctataaaaattttaaaacctggagctaaacttggagacattggataccaaatacagtcttacgttgaagaaaaaggttttagtgttgtaagagatttttgtggtcatggaattagtaatacttttcatgaacatccaaatattctgcattatggaaaaaaagatacaggacaagaattaaaacctggtatgacatttacaattgaacctatgattaatgctggaaaatacgaatctaagctattaaatgatggatggactgctgt

SEQ ID NO: 262160 - DNA, 736 bp, Unknown
  Bacterial polypeptide expressing nucleotide sequence isolated from the Sargasso Sea
aatgaatgattataaagaaaaatttgaaaagatgaaaatagctggaggcttagcttcaaaaactttagatatgcttactaatgaaattaaagaaggtatttctacaaacaaaatagataagcttggattcgaatttataagagacaacggaggatactctgcccctttatattatagaggttttagaaaatctttatgtacatcattaaatcacgtgatttgccacggaatacctagtgatagaattcttgaagaaggtgatattgttaatgttgatgtaactacaattgttgatggtttttatggtgataccagcaggatgtattcgataggaaaaatatcagttaaagctcaaaacttgattgatgctacttatgagtctttaatgcgatctattaaaattttaaaacctggagttaagcttggagatataggaaatgaaattcaaaaatatgttgaagccaaaggtttttctgtcgtcagagatttctgtggccatggtattggtgataaatttcatgagccacctaatattcttcattatggaaaaaaaaatacgggcgcagaattaaaaccaggaatgactttcactatagagccaatgattaattcaggaaaatttgaggtaaaaattttagacgatggttggactgcagttacaaaagataagtctttatctgcacaatttgaacatactgttggaataaaagataatggttatgaaatttttacagaa

SEQ ID NO: 262161 - DNA, 682 bp, Unknown
  Bacterial polypeptide expressing nucleotide sequence isolated from the Sargasso Sea
atgaataattattcagaaaaatttgaaaaaatgagaattgctgggaagcttgcatctaaaacattagacatgttaactagtgaagttaaagaaggtgtttcaactgataaaattgatcaattgggttatgagtttataagagacaatggtggacactctgctccactttactacagaggttttaaaaaatctttatgcacttctttaaaccatgttgtctgtcatggcattccctctgatagagttttaaatgaaggagatgtagttaatattgatgtaactgcaatagttaatgagtactacggtgataccagtagaatgtttgccattggagatattccagtaaaagctaaaaacttaattgaaacaacgtatgagtcgatgatgaaaggaattaaaattctaaaaccaggaataaaattaggagatattggttatgaaattcaatcctttgttgaagaaagaggattttcagtagtaagagatttttgtggacatggcattagcaatacttttcatgagcaacctaatattcttcattatggtaagaaaaatacaggtcatgaactaacacccggtatgacctttacaatagagcctatgataaatgtaggtaaattagatgtaaaagttcttaatgatggatggacagctagtgacaaacggataagtctttatctgc

SEQ ID NO: 262162 - DNA, 658 bp, Unknown
  Bacterial polypeptide expressing nucleotide sequence isolated from the Sargasso Sea
taaattgtgttatgagtttattaacgatcataaggcttattcggctccattattttatagaggttatccaaaatcatgttgtacatcgacaaatcatgttgtttgtcacggaataccaaaaggtaaagttttatgtgaaggtgatattgttaatgttgatgttactgcattaaaggatgggtggcatggagacactagtagaatgtatttcattggcgatgtatcaacaaaagcaaaccagttagtaaaaactacatatgacgctttgataaaatctattaaaattttaaaaaatgatattcatcttggtgatataggttccgctatacaaaaatatgttgaaaaaaaaggtttttctgttgtaagagatttttgtggacacggtgttggaaaaaaatttcatgaacatccaaatatattacattatggagaagaaaagactggtgataaattgaaaacaggaatgatttttacaattgagcctatgattaatgagggtcaatatgaaactaaagtattaaatgatgggtggacagcagttacaaaagataaaaaattatccgcacaatttgaacacactgttggtataactgataatggatatgaaatattcacaacttcaaataaaggtttggactatccaccttacaaaatatga

SEQ ID NO: 262163 - DNA, 619 bp, Unknown
  Bacterial polypeptide expressing nucleotide sequence isolated from the Sargasso Sea
aaaatttgaaaaaatgcgaattgcaggtaagctcgcttcaaaaacgttagatatgcttacagataatattaaggaaggtatatctaccgattatattgataaacttggttatgagtttattcgtgataatggtggatactctgctccattatattaccgtggttttaaaaaatctttatgtacatctcttaatcacgttgtttgtcatggtataccttctgaagatagaattttagaagaaggtgatgctttaaatgttgatgtcactgcaattatagatgagcactatggagacacaagtagaatgttttgtataggaaagacttctgttaaattaaataatctaattgatgctacttacgaatctatgatgagagcaattaagattctcaaaccgggtataaggcttggagatattggaaatgaaattcaatcttatgtcgaagaaaaaggtttttcagttgtaaaagatttttgtggtcacggtattagcactacattccatgaaccaccaaatatattacactatggaagtaaaaatactggaattgaaataaaacttggaatgacttttaccattgagccaatgatcaatgctggaaagtttgaggtaaaaatg

SEQ ID NO: 262164 - DNA, 485 bp, Unknown
  Bacterial polypeptide expressing nucleotide sequence isolated from the Sargasso Sea
ggatattgtaaatgttgatgttacatccttagtagagggttatcatggagatacttcaagaacttattgtgtaggacaagtttcagtcaaagcaaaaaatttagttgaaactactaaagaagcgctggaccgatctattaaaatattaaaacctgggatacatcttggaaacatcggaaatgaaatccaaacctatgttgaaaacaaaggttattcagttgttagagatttctgtggacatggagttggtagagaatttcatgaagaaccaaatattcttcattatggaaaaaatggaactggtccaaaattgcaagaaggtatggtatttacgatagaaccaatgatcaatgccggtaagtatgaaactaaagttttaaatgatggctggacagcagttacgaaagacaaatctttgtcagcacaattcgaacacactgtgggtataacaaataatggatatgaaatttttactctttcataat

SEQ ID NO: 262165 - DNA, 770 bp, Unknown
  Bacterial polypeptide expressing nucleotide sequence isolated from the Sargasso Sea
aattcatggacctgacaattttgagagcatgaggaaagcagggcagttagcttcggacgttctcgattacattactccatatgttaagccagaagtaacaacaggctatttaaatgaccttgcgcatgattacattttaagcaataacgctatccctgcccctctaaattataagggatttccaaaatcgacctgtatttcagtaaaccatgttgtttgccatggaattccaggggataagaaattgcaatcaggtgacatattaaatatagacgtgactgttatacttgatggctggtatggagatacgagcagaatgttttttgcaggagaaccttcagtcaaggcaaagagactttgcgatgtaacatacaaatgtctaatggcaggaatagaagtatcaaaaccaggagcgacacttggtgatattggatacgctattcaaaccttagcagaaaaagaaagattttcagttgtgagagattttacaggtcatggtctaggccaggtgtttcattgcccaccatctgtattgcactttggaaatcctggagaaggaataaggttagagcccgggatgatatttacaatagagccaatgataaatgctggagggtacgcgactaaaattttatctgatggatggaccgccgttacaagggacagatcactttctgctcaatttgaacactctataggaataactgaaaatggggcagaaatttttaccttgtcaaaaaaaaattacgactttccaccatacaaataaa

SEQ ID NO: 262166 - DNA, 643 bp, Unknown
  Bacterial polypeptide expressing nucleotide sequence isolated from the Sargasso Sea
atggttcatgaggaaactctcactcaggagcaaattcctgctcccctcaattatggcagaggaaaaggcccacgaggaagaccctttcccaaaagtgtctgcacctcgatcaacgaagtcatctgtcacggcattcccaatgaacaaattcttgtcgacggggacatcatcaatgttgatgtgacctgtatcgtcgatggttactttggagatgcgagcaggatgtttatcattggagaggtccctgatgcgacccggaagttggttgaagaaaccaggaaatgcctggagcttggaattgcccaggttcgtcctggtggaaaaaccggggacatcggacatgcaatccagacccatgctgaaaatctgggatattcagtggtccgagatttctgcggacatggagttggagtggaatttcatgaagcaccccaaattcttcactacgggacaccgggtactggagagctcattcaggagaatatggttttcaccatcgaaccgatgatcaacatgggaagacctgaaagcaggattcttcgagacggctggactgcggtaacggtggatggttctctttcggcgcagtgggagcatacgattcatgtcaccagggagggctgtcaggtgttgaccggctgat

SEQ ID NO: 262167 - DNA, 492 bp, Unknown
  Bacterial polypeptide expressing nucleotide sequence isolated from the Sargasso Sea
cagcaatagttgatgagcattatggtgatactagcagaatgttttgtattggaaaaactcctataaaattaaataaacttattgacgccacttatgagtcaatgatgagagctataaaaattttaaagcctggaattaaattaggagatattggctatgaaattcaatcttttgtagaacaaaaaggtttctccgttgtaagagatttttgtggtcatggcattagtacaacttttcatgaaccaccaaatattctacattatggaaatagaaattcaggaatggaactaagaccagggatgacatttactatagaaccaatgataaattcaggtaaatatgatgttaaaatgttgaatgatggttggacagctgttacaaaagataaatctttgtctgcgcaatttgaacatactttaggaattacagaaaatggttatgaaatttttacagaatctgctaaaggttatttaaagcccccatacttataat

SEQ ID NO: 262168 - DNA, 673 bp, Unknown
  Bacterial polypeptide expressing nucleotide sequence isolated from the Sargasso Sea
caaatcgatagactattgctttgaatatataaacgataataatgccttatctgccccattattttatagaggctttccaaaatcatgttgtacttccgccaatcatattgtttgtcatggaatacctagtaaaaataaaatcttaaaagagggagatattttaaatgttgacgtaactgtgcagaaagatggttggcatggtgatacaagtagaatgtatttagtgggagaagtttctacaaaagctaaaaaattagtcagtaccacttatgaggctatgattaaatctataaatattttaaaagacggagtacatcttggcgatataggttttacaattcaggaatatgtagagtcaaaaggttatagcgtagtaagagatttttgtggacacggaactggaaaaaattttcatgaaccaccaaatattttgcactatggtgatgctaaaactggtgatagaataaaaactggaatgatttttactattgaacctatgattaatgagggtgaaagtgaaaccaaagtcttaaatgatggctggacagcagttacaaaagataaaaaactttctgcacaatttgaacacactgttggtataacagataaaggctgtgaaatatttactgcttcaaaaaaaggattaaattttcctccatataaaaatgattga

SEQ ID NO: 262169 - DNA, 410 bp, Unknown
  Bacterial polypeptide expressing nucleotide sequence isolated from the Sargasso Sea
cgagacaacttacgagtcgatgatgagagcaattaaaattttaaaaccaggaataaaattaggtgatattggatatacaattcagtcatttgttgaagaaaaaggtttttcagtagtaagagatttttgtggtcatggaattagcacaacatttcatgagtcaccaaatattttacattatggaagtaaaaatacaggtatggaaattagacctggtatgacatttactattgaacctatgatcaattcaggaaaatatgatgtaaagatgttaaatgatggctggacagcagttacaaaagataaatctttatctgctcaatttgaacatacgttaggaattactgaaaatggttatgaaatctttacagaatctgctaaaggttattcaaagcctccatacttataat

SEQ ID NO: 262170 - DNA, 582 bp, Unknown
  Bacterial polypeptide expressing nucleotide sequence isolated from the Sargasso Sea
atagaggctttcctaaatctttatgcacttcattaaaccatgttatttgtcatggtatacctggtaagagaatattagacgaaggagacattttaaatgttgatgtcacaacaattgtagatggttattatggagatactagcagaatgtactctataggaaaaatttcagttaaagcacaaaatttaattaatgttacatacgagtcactaatgaaatcaattaaaattttaaaacctggattaaaattgggagatattggtaatgaaatccaaacttatgttgaggctagaggtttttcagttgtaagagatttttgtggtcatgggataggagaaaaatttcatgaaccacctaacattcttcattatggtaaaaagaatactggtatggaattaacaccaggaatgacatttacaatagaaccaatgataaattcaggtaaatatgatgttaaaattttagatgatggatggactgctgtatctaaagacaaatcgctatctgcacaatttgaacatactgtaggtataaaagataatggatatgaaatattcacagaatctgttaaggttatgtgaa

SEQ ID NO: 262171 - DNA, 765 bp, Unknown
  Bacterial polypeptide expressing nucleotide sequence isolated from the Sargasso Sea
aaagtggttttgaaggaatgagaaaagctggtttactagcagcaagaatattagatgagcttaagaatattattcaacctggaatttcaactgaaaaaataaattcgttttgccataaaatgataatagataataatgctattcctgctcccttaaattacaaaggatatccaaaatcaatttgtacttcagtaaatcatgtagtttgccatggtatccctaatgaaaaaaaaattttaaaaaatggagatatcgtaaatgttgatgttactgtaattctaaatggttggcatggagatagctcaagaatgtatgcctcaggagaaataaataagaaaatagaatctcttctcaaaacaacatacgaatgtcttcttttaggtataaaaatagcaaaacctggcaagcaccttggcgatattggatatgtaatacaaaagcatgcagaatcaaaaaaattctcagttgtgagagacttttgcggtcatggtataggtaaaaaatttcatgctcctccaagtgtacttcattatggtaatttagatgaaggtcctgaattaaaaccaggtatgttttttactattgaaccaatgattaatattggtgagtgggatgtaaaaatactaaacgatggttggactgctgttactaaagataagtctttatctgcccaatttgagcatacaattggaataaccgaaaatggtaatgaaatatttactctttctcaaaataattccgatttcccaataaatacaatataag

SEQ ID NO: 262172 - DNA, 442 bp, Unknown
  Bacterial polypeptide expressing nucleotide sequence isolated from the Sargasso Sea
tggagatataccagtgaaagcaaaaaacttaatagaaacaacttacgagtctatgatgaaaggaattaaaattctcaaaccaggcgtaaaattaggagacataggctatgaaattcaatcctttgttgaagaaagaggtttttcggttgttagagatttttgtggtcatggcatcagcaatacttttcatgagcaacccaatattcttcattatggtaagaaaaatacaggtcatgaactaacacctggtatgacctttacaatagaacctatgataaatgttggtaaatttgatgtaaaagtccttaatgatggatggacagcagtaacaaaggacaagtctttatctgcgcaatttgagcatacaataggaataacagaagactcttatgaaatttttacagaatctgttaaaggttataaaaggcctccttataattaa

SEQ ID NO: 262173 - DNA, 311 bp, Unknown
  Bacterial polypeptide expressing nucleotide sequence isolated from the Sargasso Sea
aaaaggtttttcagtcgtaagagatttttgtggtcacggaataagtacaacatttcatgagccaccaaatattttacactacggtaaaaaaaatacaggcatggaattgagacctggtatgacatttacgatagaaccaatgataaattcaggtaaatatgatgtaaaaatgttgaacgatggttggacggctgtcacaaaagataaatctttatctgcacaatttgaacacacgttaggaattactgaaaatggttatgaaatctttacagaatctgctaaaggttattcaaagcctccatacttataat

SEQ ID NO: 262174 - DNA, 213 bp, Unknown
  Bacterial polypeptide expressing nucleotide sequence isolated from the Sargasso Sea
gtgaaaaaattaaaagtggtatggtatttactattgagcctatgataaatgctggcaaatacgagacaaaagtattaagcgatggatggacagctgtaacaaaagacaaatcactatcagcacaatttgaacacactgttggtataacaaaagatggatatgaaatttttaccttatcaaaaaaaggtttaaattttcctccctataaataat

SEQ ID NO: 262175 - DNA, 345 bp, Unknown
  Bacterial polypeptide expressing nucleotide sequence isolated from the Sargasso Sea
atattggatatgaaattcaatcttatgtggaggataaaggttattctgtagttagagatttttgcgggcacggtgtaagtactacatttcacgaaccaccaaatattctacactatggaaataaaaactctggtgcggagttaaaacctggaatgacttttacaatcgaaccaatgataaattcaggtaaatatgacgttaaaatgttaaatgatggttggactgctgttacaaaagataaatctttgtcagctcaatttgaacatacgctaggaattactgaaaatggttatgaaatctttacagaatctgttaaaggttatctaaagcctccatacttataac

SEQ ID NO: 262176 - DNA, 632 bp, Unknown
  Bacterial polypeptide expressing nucleotide sequence isolated from the Sargasso Sea
tgacaatctttgttatgaatacataaatgatcatggtgcctactctgcgcctttattttacagaggctttcctaaatcatgttgtacgtcagccaatcatgttgtttgtcatggaataccgtctagcaaaattttaaatgatggagatataattaacgtagatgtgactgctttaaaagatggttggcatggagatacaagtaggacatttgaaattggtgaagtttcaattaaagctaaaaaattagttagggttacacacgaggcgatgatgaaggcgattgagattattaaggaagatatttgtttaggagatatcggatctactatacaaaatcatgtagaggctgaaggattttctgtggtgcaagatttttgtggacatggtattggacaacaatttcataaagaacctaatattttacattatggggagaaaggaacaggtgaaaagataaaagctgggatgatttttactattgagccaatgataaatcttggaaaatacgaaactaaaactttaaatgatggctggacagccgtaacaaaagataaatctctatctgcacaatttgaacatactgtaggtgtaactaaagacagttgtgagatttttactttgtcaaaataat

SEQ ID NO: 262177 - DNA, 636 bp, Unknown
  Bacterial polypeptide expressing nucleotide sequence isolated from the Sargasso Sea
gcatctcaaactttagatatgctgacaaatgaggttaaggaaggtgtttccacagataaaattgatcaacttggatatgaattcattagagacaatggcggatactctgctccattatactataggggttttaaaaaatctttgtgtacatctttaaaccatgttgtatgtcatggcatcccttctgatagagtattaattgatggtgatgcagttaacatagatgtaacagcaatagtgaatgaatactatggtgatactagtcgaatgttcacgattggagatataccagttaaagcaaaaaatttaattgagacaacttacgagtctatgatgaaaggaataaaaattttaaaaccaggaataaaattaggtgacattggctatgaaattcaatcctttgttgaagagagaggattttcagtagtaagagatttttgtggtcatggcattagtaacacttttcatgaacaacctaatattcttcattatggaaagaaaaatacaggttatgagttaatacctggtatgacctttacaatagaaccaatgattaacgttggaaagctagatgtaaaagtacttaatgatgggtggacagcagttacaaaggataagtctttatctgcacaattc

SEQ ID NO: 262178 - DNA, 680 bp, Unknown
  Bacterial polypeptide expressing nucleotide sequence isolated from the Sargasso Sea
aatgaatatttcaataaaaaataaaaatgatatagaaaaattgaggaatgctggtcaacttgccgcaaatgttctcaatatgattactgaacatgttaaacctggaatatcaacaggggaactagatgatatttgtcatgactttattgttaatgagcaaaaagcgattcctgctaatattggttacctcggctatgaaaaaacatcatgcataagcgttaatcaagttatttgtcatggcatacctaatcaaaacaaaatcctcaaagacaatgatattgtaaatattgatgtttcagtccttaaagatggctggtacggagatacctcaaaaatgtttttagttggaaaaacacagcctcacaatgagaaattagtctcagttacgcaagaatgtttgtacaaagctattgaaattgcaaaacctggtatcaccttaggcgatataggccatgttattcagactcatgctgaaaagaatcactatagcgttgttgaggagtattgtggtcatggaattggtaaggtctatcatgaagaccctcaagtgctgcattttggaagaccaggaacaggaatcgagcttgttgaaggaatgtgttttactattgagcctatgattaatcaaggtacaaaatatactaaaatactttcagatggttggacggtagaaacaaagg

SEQ ID NO: 262179 - DNA, 576 bp, Unknown
  Bacterial polypeptide expressing nucleotide sequence isolated from the Sargasso Sea
tgtacgtcattaaatcatgttgtttgtcatggattcccacagatagaattttaagagatggtgatgcagttaatgtagatgttacagcaattgttgacgagcattatggtgatactagtagaatgttttgtattggaaaaactccaatcaaattaaataatttaatagatactacttatgagtcaatgatgagagcaattaaaattttaaaacctggaataaaattaggtgatattggttacacaattcaatcttttgttgaagaaaaaggtttttctgtagttagagatttttgtggccacggtatcagcacaacatttcatgaggctcctaatattttacattacggaagtaaaaatacaggaatggaactaacacctggtatgacatttactattgaacctatgatcaattcaggaaaatatgatgtaaagatgttaaatgatggctggacagcagttaccaaagataaatctttatctgctcaatttgaacatacgttaggaattactgaaaatggttatgaaatctttacagaatctgctaaaggttatcttaagcctccatacttataat

SEQ ID NO: 262180 - DNA, 379 bp, Unknown
  Bacterial polypeptide expressing nucleotide sequence isolated from the Sargasso Sea
aatatcaattttacaaccaggtaaaaaacttggtgatataggatttgaaattcaatcttatgttgaaagcaaaggttattcagttgtaagagatttttgtggacatggaataagcaatgtatttcatgaacctcccaatattcttcattatggatctaaaaattctggcaaagaactattgcctggcatgacgtttactattgaaccaatgataaattatggaaaatatgacacaaaagttttaaatgatgggtggacagcagtaactaaagataaatcgttatcagcacaatttgagcatactgttggtatcacagaagattcgtatgaaattttcacagaatctgttaaaggttatacgaggcccccatataattaa

SEQ ID NO: 262181 - DNA, 640 bp, Unknown
  Bacterial polypeptide expressing nucleotide sequence isolated from the Sargasso Sea
tttcacaaatgagatagataaaatatgctatgaatatattaatgatcatggagcattttctgctccactcttttatagaggatttccaaaatcctgttgtacttcagcaaatcacattgtttgccatgggataccctctaaaaagattttaaaagaaggtgacattataaatgtagatgtaactgcatttaaaaatgggtggcatggagatacaagtagaatgtttaaagtaggtgaaatttcggttaaagctcaaaaattaataaatgctacttatgactcaatgatgaaggcaattaaaattataaaagatggtgtgcatttaggtgatattggatcaataatacaacatcatgttgagaaagaaggtttttcagttgttcaagatttttgtggtcatggtatcggtgaaacttttcataaagaaccaaatgttcttcattacggtgaaaaaggtacgggcgaaaaaataaaggctgggatgatttttactattgagcctatgataaatcaaggaaaattcgaaactaagacattgaatgatggatggacagctgtaacaaaagataaatctttgtctgcacaatttgaacatacaataggtgtaactaaagatggttatgaaatttttactcgttaa

SEQ ID NO: 262182 - DNA, 265 bp, Unknown
  Bacterial polypeptide expressing nucleotide sequence isolated from the Sargasso Sea
atgtatttcaccaaagtccaaaatatattacattatggaaaaaagaatacaggacctgaattacaacctgggatgacatttactatagagccaatgattaatgctggtaaatatgaggttaaaattttaaacgatggatggacagccgtaactaaagataaagctttatctgcgcaattcgaacatacagttggtataactgataatggatatgaaatttttacagaatctgttaaaaacttaaagaggcctccttataattaat

SEQ ID NO: 262183 - DNA, 664 bp, Unknown
  Bacterial polypeptide expressing nucleotide sequence isolated from the Sargasso Sea
tgaattagataatcttggatatgaatttataaaagatcatggagcatattctgcaccacaattttatagaggctttaaaaagtcattatgtacttcattaaaccacgttgtttgtcatggaataccatctgatagagttttaaatgaaggtgatgctataaatattgatgtaactgcaatactagacggccattatggtgacacaagtagaatgtatactgttggtgaagttccaatcaaatctaaaaatttaattgatgcaacttacgattcaatgatgaaagctattaatattttaaaaccaggattaagtttaggagatattggtcatgaaattcaatcacatgtcgaagaaaaaggttttagtgttgtaagagatttttgtggtcatggaataagtacaatatttcatgaaccaccaaatattttacactatggaaaaaaaaatactggaattaaggtttatcctggaatgacttttacaatagaaccaatgataaattctggaaaatatgatgtaaaactactaaatgatggttggacagctgttacaagggataaatcactatcagctcagttcgagcatacagtaggaattactgaaaatggatatgaaatctttacagaatctgctaaaggttattctaagcccccatacaaataa

SEQ ID NO: 262184 - DNA, 192 bp, Unknown
  Bacterial polypeptide expressing nucleotide sequence isolated from the Sargasso Sea
caggtgaaaaattaaaagctggaatgatttttacaattgaaccaatgattaatgctggaaagtatgagacaaaaatattgaacgatggatggacagcagtcactaaagataaatctttatctgcacaatttgaacatactgttggtataacaaaggatggttacgaaatttttactgaatcaaaaaattaaa

SEQ ID NO: 262185 - DNA, 481 bp, Unknown
  Bacterial polypeptide expressing nucleotide sequence isolated from the Sargasso Sea
agatgaacattatggagatacaagtagaatgttttgtataggtaacactcctgtaaaattaaacaatcttatagatgctacttaccagtctatgatgagagcaattaaaattctaaaacctggaataaaaatcggaaatattggtcacgaaattcaatcttatgttgaggaaaaaggttattccgttgtaagggatttttgtggtcatggaataggtaaaaagtttcatgagccaccaaacattttacattatggaaataaaaactcaggaatagatttatggcctggaatgacatttactatagaacctatgattaattcaggcaaatatgatattaaaatgctaaacgatggttggacagctgttacaaaagataaatctttatcagcacaatttgaacatacgctaggaattactgaaaatggttatgaaatttttacagaatctgctaaaggttattcaaagcctccatacttataa

SEQ ID NO: 262186 - DNA, 569 bp, Unknown
  Bacterial polypeptide expressing nucleotide sequence isolated from the Sargasso Sea
tttaaaccacgttgtttgtcatggtattccctctgatagaattttaagtgaaggagatgcagttaatattgatgtcacagcaatagtgaatgaatattatggtgatacaagtcgaatgtttaccattggagatattccagtaaaagctaaaaacttaattgatacaacttacgaatcgatgatgaaaggaatagcaattttaaaaccaggtgtaaaattaggagatattggatttgaaattcaatcctttgttgaagaaaggggtttttcagtagttagagatttttgtggacacggtattagcaatacttttcatgagcaacctaatattcttcattatggtaagaaaaatactggtcatgaactaacacctggtatgacctttacaatagagcctatgataaatgtaggtaaattagatgtaaaagtacttaatgatggatggacagcagttacaaaggataagtctttatctgcacaatttgagcatacaataggaattacagaagactcttatgaaatttttacagaatctgttaaaggttataagaggcctccatataattaat

SEQ ID NO: 262187 - DNA, 628 bp, Unknown
  Bacterial polypeptide expressing nucleotide sequence isolated from the Sargasso Sea
atgagtgattataaagaaaaatttgaaaaaatgaaaattgctggaaacctagcagctagaacattggatatgttaactgaaaatattaaagaaggtatttctacagattatattgacaaattaggatatgaatttattaaagataacggaggttattctgctccactttattacagaggatacacaaaatctttatgcacgtctttaaatcatgtagtctgtcatggcattccttcagatagaattttaaaagatggggatgctttaaatgtggacgttactgcgattattgaagatcattatggtgatacaagtagaatgttttgtataggaaaaactcctgttaaattaaataaccttattgatgtaacttatgaatctatgatgcgagctataaaaattttaaaacctggaataagactgggtgatataggatacgaaattcaatccttcgtggaagaaaaaggtttttctgttgttaaagatttttgtggtcatggtataggaacctcttttcatgaacctccaaatattttacattatggaagtaaaaattctggaatggaactaaaacctgggatgactttcactattgaaccaatgattaatgcaggtaaatatgatgtaa

SEQ ID NO: 262188 - DNA, 322 bp, Unknown
  Bacterial polypeptide expressing nucleotide sequence isolated from the Sargasso Sea
cttttgtagaaaaaatggtttttcagttgtaagagatttttgtggtcacggaataggcacaaactttcatcaggaaccaaacattcttcactatggatcaaaggatactggaaatgaattaaaaccaggtatgacttttactattgagcctatgataaacgctggaaaatatcacactaaagttttaaatgatggttggacagcggtgacgaaagataaaacattatctgcgcaatttgagcatactgtaggaattactgaaaatggttatgaaatttttacagaatctgctaaaggttataaggagcctccttacaattaa

SEQ ID NO: 262189 - DNA, 772 bp, Unknown
  Bacterial polypeptide expressing nucleotide sequence isolated from the Sargasso Sea
atgactaattataaagaaaaatttgaaaaaatgagaattgcaggtaaccttgctgcacgaactttagatatgttaactgaaagtatcaaagagggtgtttcgacaaatcatatcgataaacttggatatgaatttattagagacaatggtggctactctgccccattatattatcgaggttttacaaaatctttatgtacgtctttaaatcatgtagtttgtcacggtgtaccctctgaaagaattttacaagaaggtgatgctataaatgttgacgttactgcaattgttgatgaacattatggtgacaccagtagaatgttttgtattggtaaaacgcccgtcaaattaaataaccttatagacgctacatacgagtcaatgatgagagctataacaattttaaaacctggaattaaattaggtgacattggttatacaattcaatcatttatagaagaaaaaggtttttcagttgttagagatttttgtggtcacggaatcagcacaacatttcatgagcctccaaatattctacattatgggaataaaaactctggaatggaattaaagccaggaatgacctttacaatagaaccaatgattaattcaggtaaatatgatgttaaaatgttaaatgatggctggacagctgttacaaaagacaaatctttatctgcacaatttgaacatacgttaggaattactgaaaatggttatgaaatctttacagaatctgctaaaggttattcaaagcccccatacttataat

SEQ ID NO: 262190 - DNA, 760 bp, Unknown
  Bacterial polypeptide expressing nucleotide sequence isolated from the Sargasso Sea
atgaattcaataaaaaaatacaatgaaagcgattttgttaaattaagaaaagcaggtaagttagcagcgatagctttggacaatattaaagataaaattttgccgggaattacaacacaaacaatagacgaaataataaaaaaatttttaagagatcacaatgcgtatcctgcccctctgttgtatagagggtatccaaaatcaatttgcacttcaataaatcatgtagtgtgtcatggcattccctctgacaaagagttaaagaatggagatatattaaatatagatgtgacagcttatctagacggttttcatggagattgttcgaaaatgttttgtgtaggagatatttcggtaaaagctaagaatttaattaatgtcactaaagagtgtttaaatagatcaataaaaattttaaagccgggtattcattttggaaatatcggtcatgtaattcaaagttttgcggaggaaaaaggattttctgttgttcgagagttttgtggacatggtgtgggtgaaaactttcatgaagaaccgaacgttttacattacggtaataaaaacgaaggcccaatattagaagagggtatggtttttacgattgaacctatgattaatgagggtaaatttgaaacaaaggtattaaaagatggatggaccgcagtgactaaggataaatccttatcagcacaatttgaacatactgttggtataacaaacaatgggtacgaaatatttactttaaataaaaattaaa

SEQ ID NO: 262191 - DNA, 772 bp, Unknown
  Bacterial polypeptide expressing nucleotide sequence isolated from the Sargasso Sea
atgaatatttcgataaaaagtaaaaatgacatagaaaaattaagaagtgctggtcaacttgccgctgatgtccttaatatgattactgaatatgttaaacctggaatatcaacaggagagttagatgacatttgttatgactttattgttaatgagcaaaaagctattcccgctaatattggttataatggctatgaaaaaacatcatgcattagcgttaatcaagttatttgtcatggcataccaaatcaaaataaaattctcaaagacaatgatattgtaaatatcgatgttacagtcctaaaaaatggttggtatggagatacctcaaaaatgtttttagttggtaagacacaacctcacaatgagaaattagtctcagttactcaagaatgtttatacaaagctattgaaattgcaaaacccggtatgaccttaggcgatattggttatattattcagactcatgctgagaagaatcactataccgttgttgaggactattgtggtcatggaattggtaaggtttatcatgaagatcctcaagtattacattttggaagacctggaatgggaatcaagcttgaggaaggaatgtgttttactatcgagcctatgattaatcaaggtacaaaatatactaaaatactttcggatggatggacggttgaaacaaaagatggaagaaattcagcacagtgggaacacacaattgccattacatcaaatggatgtgatgtccttactaaaagagatgaagagagattctagt

SEQ ID NO: 262192 - DNA, 835 bp, Unknown
  Bacterial polypeptide expressing nucleotide sequence isolated from the Sargasso Sea
actgcggcggactagctcagtaccgaatccgattcagccggggtatgtgtcaccacaacgctctgtgccctccgatatcggcagaccggactacgcactagacggcatcccgaaagccactacgccaaatgatttacggaaggacgcggcaacccttgacagaatgcgtgccgcgggttcggcggcgcgccgagtgcttcgtaaggtagcagcagagatttctccaggtgtcacaactgagcacctggatgaaacttgccacgaagcgtgtatagcggagggtggctacccaagcccccttaactacaacggtttcccaaaatcactttgcacgtctatcaacgaaattatttgccacggcattccagatgaccgttcgcttagagaaggcgacatcatcaattgcgacgtgaccatctttctggatggggtgcatggggaccacagcgaaactttcgcagttggcgaagtcgatcagcaatctcaaaaattgatagacatcacacgggaatgtctgtacctgggaatcggcgctgtgcgggcggggggcgttgtgagcgatattggtaaagcgattcaacaccatgccgaagaagcaggttttggagtcgtccgagagttcatcggtcacggagtaggggaaattttccatcacctaccaaacattccacattatttcgagccatctgctcggttcgaattcaagcccggcatgaccttcacgatcgaaccgatgatcactatcggcgagcccaaggcaaccctctgggacgatggttggacagcggccaccatggacctgagtcgcacggcgcaattcgaacacacagtagtg

SEQ ID NO: 262193 - DNA, 769 bp, Unknown
  Bacterial polypeptide expressing nucleotide sequence isolated from the Sargasso Sea
tatgtctatttctctaaaaagcaaaaatgatattgaaaaaatgaaaattgccggcaactatgccgcaaaagttttggaatatttagaagattttgtacaagttggaattagtaccgaagaaattgataatcttgcatataaatacataacggaagaattaaaatgtattcctgcaaatgttggatataacgattatcccaaaacactttgtacttcgataaatgaagtcatttgtcatggaattccctctgacaaagagattcttaaagacggagatattgtcaatattgatattaccgtaatagtcgatggctggcatggtgacacttcaaaaatgtttttaatcggcaagtcgcaacctcatgtaaagagacttgtagacattacgagagaatgcatgtttaaaggaatagaagtatgtaggcctggggctttcactggagatattggatacgccattcagacacatgcagagaaaaaccactactctgttgttaaaaattactgcggtcacggaattggtaagatttatcacgaggatcctcaaattactcattttggaaataaaggagaaggcataaaacttgaagaaggtatggtttttacaattgagccaatgattaacttaggctcccataaaacaaaactactgaaggatgggtggacggttgtaacagaggatggaaaactgtcagcacaatgggaacacacaatagctataacagaacaaggttatgaaattcttactttaagagaagaagaaaaataa

SEQ ID NO: 262194 - DNA, 817 bp, Unknown
  Bacterial polypeptide expressing nucleotide sequence isolated from the Sargasso Sea
atggctattacgctcaaaaacgaacacgatatcgccgagatgcgcgtcgcctgccgtctcgcgagcgaagtgctcgacttcatcacgccgcacgtcgtcgcgggcgtcacgaccgccgaactcgaccgcctctgtcacgagttcatgctcaacgaacagggcacgatcccggcgccgctgaactaccagccgcccggctatccgccgtacccgaaagccacctgcatttcggtcaacgacgtgatctgccacggcattccgggcgagaaggtgatcaagaacggcgatgcgctgaacatcgacatcaccgtgatcaagaacggctacttcggcgacacgagccgcatgttcatcgtcggcgagggttcgatcctcgcgaagcgcctcgtgcagaccacctacgaatgcatgtggctcggcatcgaccaggtcaagccgggcgcgcacctcggcgacatcggctacgcgatccagaagcacgcggaagcgcagggctacagcgtcgtgcgcgaatactgcggccacggcatcggcacggtgttccacgaagatccgcaggtcgttcactatggccgcccgggcaccggcatcgaactgaaggccgggatgatcttcacgatcgagccgatgatcaacgccggcaagcgcgacattcgcacgatgcccgaccagtggacggtcaagacgcgcgaccgcagcctgtcggcgcagtgggagcacacggtgctcgtcaccgaaaccggctacgaggtgctgaccgtgtcggccggcacgccggcgcgccccgtgttcgcacaaccggccgccgccgtctgag

SEQ ID NO: 262195 - DNA, 613 bp, Unknown
  Bacterial polypeptide expressing nucleotide sequence isolated from the Sargasso Sea
atgaatagtaattattctgaaaaatttgaaaaaatgagaatagcaggaaagcttgcttcaaaaacattggatatgattacagattttatcaaaccaggtatatccacaaataaaatagatcaattatgtcatgaatttattaaggacaaaggtggatattctgcgccactttattatagaggttatactaaatctttatgtacatctttaaaccatgtagtttgtcatggtattccttctgacagagttttaaatgagggtgattttttaaatattgatattacagcaattgttaatgattatcatggtgataccagtagaatgtttaatgttggaaacattccagtaaaagcagaaaatttaattaatgttacttacgattcaatgatgaacgcaataaaaattttaaaaccaggaataaagttaggcgatataggacatgaaatacaatcttatgtagaagaaaaaggtttttcagttgtaagagatttttgtggtcatgggataagcaatgtttttcatgaacaacctaatattcttcactacggtaaaaaaaatgaaggattagaattaaaaccaggaatgactttcactattgagccaatgataaatt

SEQ ID NO: 262196 - DNA, 772 bp, Unknown
  Bacterial polypeptide expressing nucleotide sequence isolated from the Sargasso Sea
aatgaaaatatcagtaaaatctaaaagtgatatatctaaaatgagagttgctggaaagttggcagccgaagttttagaaataatttcacctcatgttgttccaggtatatctactggagaattagatgagatatgcttcaaccatattgtaaatattcaaaaagcaattccagctaatgttggttataacggttatgagaaaactatatgtgctagcttgaatcaagtgatatgtcacggcattcctagtaataaaaaagtattaaaaagtggagacatattaaatatagatgtgaccgttgtaaaagatggatggcatggtgatacctcaaaaatgtttcttgttggaaagtgtgcacctcataatgaaagattagtaagagttactcaagagtgtctttacaaaggtattgaagtagttaaacctggtgccttccttggtgatattggacacgcaattcaaacacatgctgaaaaaaatcattacagcgttgttgaagattattgtggtcatggaattgggactgtatatcatgaagagcctcaagttctgcattacggaaaagctggcacaggaatagaattaagggaaggcatgtgtttcacaatagaacctatgattaatcaaggaagaaagttttcaaaggtgcttaacgatggctggactgttgagacaaaagatggaagaaattctgcacaatgggagcataccatttcagttacaaaagatggttatgaaattctcacaaaaagaagtgatgaacatgtatga

SEQ ID NO: 262197 - DNA, 772 bp, Unknown
  Bacterial polypeptide expressing nucleotide sequence isolated from the Sargasso Sea
gatgattgattataaagaaaaatttgaaaagatgagagctgctggaaagcttgcatctaaaactttagacatgcttacagattatattaaaccaggtgtatcaacagataaaattgataaattaggttacgaatttataaaagataatggaggttattcagctccattattttatcgagggtttgaaaaatcactttgtacatctttaaatcatgtagtttgtcatggaataccttctaatagaattttggaagatggtgacgcagttaatgttgatgtaacagcagtagttgataattattatggagatacaagtagaatgtatgaaattggaaatgttccagttaaggcaaaaaatttaattgaagcaacgtataactcattaatgaaagcaatatcaattttacaaccaggtaaaaaacttggtgatataggatttgaaattcaatcttatgttgaaagcaaaggttattcagttgtaagagatttttgtggtcacggaataagtaatgtttttcatgaacctcctaatatacttcattatggatctaaaaatactggtaaagaactaatccctggcatgacttttactattgaaccaatgataaattatggaaaatatgacacaaaagttttaaatgatgggtggactgcggtaactaaagataaatcattatcagcacaatttgagcatactgttggtattactgaagattcatatgaaattttcacagaatctgttaaaggttacaagaggcccccttataattaa

SEQ ID NO: 262198 - DNA, 796 bp, Unknown
  Bacterial polypeptide expressing nucleotide sequence isolated from the Sargasso Sea
aatgcaatcaaataacattccaatttatcataaaaatgacttccaaaagatgcatcaagctggaagattggctgcctctgtattggataaattatatgaattaattaaaccgggtatttctactttagaaattaatgatttttgtcacaatttaataattaaaaataatgctgtacctgctccacttaactataaaggcttcccaaaatctgtatgtacatcagttaatcatgttgtctgtcacggtattcctaatgaaaagaaattactaaataatggtgatatcattaatgttgatgttacagttatcttagatggatggtatggagatagttccagaatgtttgttgcaggtaaaacaaataaaaaaaattatgattttttaaagacaacatatgaatgtcttcatgttggaataaaagaggctatgcctggaaaaacttttggagatataggacacaaaattcaagaatatgctgaagccaaaaactattctgttgttagagatttttgcggacatgggattggaaaagaatttcatactcctccaagtgtacttcattatggcaaagtcggtgaaggccctgagcttaaacctggaatgttctttactatagaacctatgattaatcttggtgactggagagtaaaaatacttaatgatggttggacagctgtaacaaaagataaatctttatcagctcaatttgaacacacgattggaattacaaaagatggtaatgaaattttcactctttcagaaaataatacagattttccaataaatgatttataa

SEQ ID NO: 262199 - DNA, 772 bp, Unknown
  Bacterial polypeptide expressing nucleotide sequence isolated from the Sargasso Sea
aatgaaaatttctatcaaaaatagttctgagattgaaaaaatgagagttgcggggaaacttgccgctgaagtgcttgaaatgataacgccgtatgtgattcctggtgtatcaactggagagttagacaaaatatgttttgatcacattgttaacaatcagaatgccatacctgcaaatgttggatataaaggatatgaaaaaacaatatgtaccagcgttaatcaagttatatgtcatggaataccgaataatcaaaaaattttaaaagatggtgatattttaaatattgacgttacagtaattaaggatggttggcatggcgacacgtcaaagatgtttttagttgggaaatgcgctcctcataacgagcgtcttgttagaatcactcaagagtgtctttataagggtataaaggctgttaagccaggggcatatttgggcgatattggaaatgctattcaaaaacatgctgaaagtaattattacagtgttgttgaggactactgcggtcatggaattggaacaatttaccacgaagaacctcaggttcttcattatggaaaatctggatcaggtattcaacttaaagaaggtatgtgcttcacaatagagccaatgattaatcaaggcacaaaatttagcaaaattcttagtgatggctggaccgttgagaccagagatggaagaaactcagcccaatgggaacatacaattgcggtaacaaaagatggttcagaaattttaacgaagagaaatgaagaatttcaatga

SEQ ID NO: 262200 - DNA, 769 bp, Unknown
  Bacterial polypeptide expressing nucleotide sequence isolated from the Sargasso Sea
aatggaaaaattaataaaaacaactgaggatatccaaaaaatgagagttgctgggagattggcagcagaagttctagaagtgattactcctaaagttgttccaggaatatcaacaggagagttagataaattatgctacgaacatattataaatgttcaaaatgcaattcctgcaaatgttggatacaagggttatgaaaaaacaatctgctctagcattaaccaagtaatatgccacggcattccaagtaatgaaaaaattcttaaagatggagacatcttaaacattgacgttactgtcataaaagatggatggcacggggatacttcaaagatgtttcttgttggtaagtgcgctccgcataatgaaagattagttaaaattactcaagaatgtctttataaaggtattgaagttgtcaaacctggagcatatcttggagatataggaagtgctatacaaaaacatgctgaaagcaattactacagtgttgttgaagattattgtggtcatggtattggtgctgtctatcatgaggagcctcaagttcttcattatggaaaatctggaagtggcatacagcttaaggaaggaatgtgctttaccatagaacctatgattaatcagggtacaaaatattgcaaaactcttaaagatggatggacggttgaaaccaaagatggaagaaattctgctcaatgggaacatactattgtagttacgagagatggttcagagatccttactaaaagaaatgaagagctttaa

SEQ ID NO: 262201 - DNA, 621 bp, Unknown
  Bacterial polypeptide expressing nucleotide sequence isolated from the Sargasso Sea
aatggaaaaattaattaaaacaactgaggatatccaaaaaatgagagttgctgggagattagcagcagaagttctggaagtgattactcctaaagttgttccgggaatatcaacaggagagttagataaattatgctacgagcatattataaatgttcaaaatgcaattcctgcaaatgtcggatataagggttatgaaaaaacaatctgctctagcattaaccaagtaatatgccacggcattccaagtaatgaaaaaatccttaaagatggagacatcttaaacattgacgtaactgtgataaaagatggatggcacggggatacttcaaagatgtttcttgttggtaagtgcgctccgcataatgaaagattagttaaaattactcaagaatgtctttataaaggtattgaagttgtcaaacctggagcatatcttggagatataggaagtgctatacaaaaacatgctgaaagcaattactacagtgttgttgaagattattgtggtcatggtattggtgctgtctatcatgaggagcctcaagttcttcattatggaaaatctggaagtggcatacagcttaaggaaggaatgtgctttaccatagaacctagatt

SEQ ID NO: 262202 - DNA, 748 bp, Unknown
  Bacterial polypeptide expressing nucleotide sequence isolated from the Sargasso Sea
atgagtaattatactgaaaaatttgagaagatgcgtgctgctggaaatttggcagctaaaactttagatatgttaactgatcatattaaacctggaatatcaacggatgaaatagataatcttggatatgagtttataaaagatcatggagcgtattcagcaccacaatattatagaggatttaaaaaatctttatgtacttctttaaatcatgttgtttgtcatggaataccatcagatagagttttgaatgaaggagatgctgtaaatattgacgtaactgcaatattaaatggccattatggtgacacaagtaggatgtataatgttggtgaaatttcaattaaatctaagaatttaattgatgcaacttacgattcaatgatgaaagctattaatattttaaaaccaggtttaagtttgggagacattggtcatgagatccaaacatatgtcgaagaaaaaggttttagtgttgtaagagatttttgtggtcatggaataagtactacatttcatgaacctccaaatattttgcactacggtaaaaaaaatactggaataaaagtttatcctggaatgacttttacgattgagccaatgattaattctggaaaatatgaagtaaaactattaaatgatggatggacagctgttaccaaggataaatcactatcagcacaatttgaacacaccgtaagaattactgaaaatggatatgaaatctttacagaatctgctaaaggta

SEQ ID NO: 262203 - DNA, 799 bp, Unknown
  Bacterial polypeptide expressing nucleotide sequence isolated from the Sargasso Sea
aatgagtatagtcattaagacagcagaagaaatcgagaaaatgcgcgcagcaggtaagctggccgcacaagtattagaaatgatcgccccctatgttaaggccggcgtgagcactaatgaactcaacgatatctgcgccaaatataccgaagagcaaggcgcgatttctgccccgctcaactaccatggttttcctaagtcgatttgtacttcgctaaataacgtgatttgccatggtattccgagcgaccgcgttcttaaagatggcgatattctcaatatcgatatcacagtcattaaagacggttaccacggcgatacctctaaaatgttcttaatcggtgaagtcagccctaaggacaagcgcctgtgccgtatcgcgcaggagagtttatacctcgccattcgtaaggttcgcccggggttaaaactgggtgaaatcggcaatactatcgaaaaattcatcaaagccagcaaaacaggtcttgagaaatattccatcgtgcaagattattgtggtcacggtattggtgccggtttccatgaagagccgcaagtcatgcactaccgtaatggcgataacaccattttacgcccaggcatgtgttttactattgagccgatgatcaacgccggtcgccacaccacagtgttagaccgtgacgataagtggactgtcaccacctccgatggtaaaaactcggcccaatgggaacacacattattagtgaccgaaaccggtgtagaagtcctgactctgcgtgatgaggaagacttcccgcgtatcattaatcactaa

SEQ ID NO: 262204 - DNA, 769 bp, Unknown
  Bacterial polypeptide expressing nucleotide sequence isolated from the Sargasso Sea
aatgaatatttcgataaaaaattttgaggacattgaaaaaatgagaatagctggcaaattagcggctgaagttcttgaaatgattactccctttgtcaaacctggagtttctactggtgagcttgataagctttgttatgatcatattgttaatgttcaaaacgccataccagcaaatgttgggtacaaaggatatgagaaaactatttgctcgagcataaatcaggttatttgtcatggcatacctaacaatgagaaatttcttaaagatggagatattcttaatgttgatgtgacagttataaaagatgggtggcatggagatacatcaaagatgtttcttgttggtaagtgtgctccacataaccaacgattagttcaaatcactcaagaatgtctttacaaaggtatcgaggctgtaaaaccaggcgcatatcttggagacattggaaatgccatccaaaaacatgccgaaagaaattactatagtgttgttgaggactactgcggtcacggtatcggaaaaatttatcatgaagaacctcagatccttcactatggaaagcctggaacaggtatacagctaaaagaaggcatgtgtttcactatagaaccaatgattaatcaaggtaaaaaatactgcaaaactctcaatgatggatggacggtagaaactaaagatggaagaaactctgctcaatgggagcataccattgcagtgaccaaaaccggttccgaaattttaacaaaaagaaatgacgaattttaa

SEQ ID NO: 262205 - DNA, 856 bp, Unknown
  Bacterial polypeptide expressing nucleotide sequence isolated from the Sargasso Sea
gatgaaaaaagggccggagtcgtccaaagagctttcccggaatgatccctgctggtgtggaagcgggaagaagttcaagaaatgccatctgggcagggaacaacctcctccccggccaaaggcatctgtttctcaaaacccacgccggatcttgatcaaaactgaggaacagctggaaggaatccgcaaaagcagtcgtctcactcgagatctattggatatgatagagaatcgaatcgagtcgggggtcagcaccaaccagatcaataaatgggttcacgaggaaactctcgcgcagggagcaattcctgctcccctcaattatggcagaggcaaaggcccacgaggaagaccctttcccaaaagcgtctgcacctcgatcaacgaagtcatctgtcacggcattcccaatgaacaaattcttgtcgacggggacatcatcaatgttgatgtgacctgtatcgtcgatggttactttggagatgcgagcaggatgtttatcatcggagaggtcccggatgcgacccagaagttggtacaagaaaccaggaaatgcctggagcttggaattgcccaggttcgtccgggtggaaaaaccggcgacatcggacatgcaatccagacccatgctgaaagtttgggatactcagtagtccgcgatttctgcggacatggagtcggagtggaatttcatgaagcaccccaaatcctccactacgggacaccgggtactggagatctcatgcaggagaatatggttttcaccatcgaaccgatgatcaacatgggaagacctgaaagcaggattcttggagacggctggactgcggtaacggtggatggttctctttcggcg

SEQ ID NO: 262206 - DNA, 772 bp, Unknown
  Bacterial polypeptide expressing nucleotide sequence isolated from the Sargasso Sea
tatgagaatttcaataaaatcaaacaaagaaatagaaaaaatgaggattgctggcagtttagctgcagaagttcttgaaatgatttcaccttttgttgtaccaggaatatctactggtgagttagataagatttgttatgaacatattgtaaataagcaaaatgctattccagcaaatgttggctataaaggttatgaaaagactatatgttccagcatcaatcaagtaatttgtcacggcatcccgaataatgaaaaattcttaaaagaaggtgacatattaaatattgatgtaactgtcattaaggatggttggcatggcgatacttctaaaatgttcttagttggaaaatgtgcacctcataatgaaagattggtaaagattactcaagagtgtctttataagggaattaatgaagttaagcctggagcattccttggtgatattggatacgcaatacaaaaacatgctgaagaaaattactacagtgttgttgaggactattgcggtcatggtattggatctgtttaccacgaagaacctcaggttcttcactatggcaaacgaggaactggtattcagcttaaagagggaatgtgcttcacaattgagcctatgattaatcagggaacaaaatactccaagatattaaaggatggctggaccgttgaaacaaaagatggaagaaattccgcgcaatgggaacacaccattgttgttacagaacatggctctgaaatcctaacaaaaagagatgaagaatttatttaa

SEQ ID NO: 262207 - DNA, 772 bp, Unknown
  Bacterial polypeptide expressing nucleotide sequence isolated from the Sargasso Sea
atgagtgattataaagaaaaatttgaaaagatgagagttgctggaaagcttgcatctaaaactttagacatgcttacagattatattaaaccaggagtatcaacagataagatcgataaattaggttatgaatttataaaagataatggtggctattcagctccattattttatagaggttttgaaaaatcactctgcacatcattaaaccatgtagtttgtcatggaataccctctgagagaattttagaagatggtgatgcagttaatgttgatgtgacagcggtcattgataatcattatggagatacaagtagaatgtatgaagttggaaatgttccagttaaggcaaaaaatttaatcgaagcaacctacgactcattgatgaaagcaatatctattttacaaccaggtaaaaaacttggtgatataggatttgaaattcaatcttatgttgaaagcaaaggttattcagttgtaagagatttttgtggacatggaataagtaatgtatttcatgaacctcctaatatacttcattatggatctaaaaatactggcaaagaactaatacctggtatgacttttactattgaaccaatgataaattacggaaaatatgacacaaaagttttaaatgatgggtggacagctgtaactaaagataaatctttatcagcacaatttgagcatactgttggtatcacagaagattcatatgaaattttcacagaatctgttaaaggttatacgaggcccccatataattaat

SEQ ID NO: 262208 - DNA, 760 bp, Unknown
  Bacterial polypeptide expressing nucleotide sequence isolated from the Sargasso Sea
aatggttaaaaatcaatcagaaatagaaaaaatgagagtagctgggaaattagctgcagaagtactaatcatgcttggtgattttgtgaaaccaggtataactacggacgatattaatagtatttgccataattttatagtaaatgaactagaatgcattcctgctcccttaaactacaaaggattcccaaaatctgtctgcacttcagtaaaccatcaagtttgtcatggaattccaggaagcagaaaattaaaaaaaggtgacatagtaaatgttgacattactgttataaaagacggataccatggtgacactagtaaaatgttttatattggtaaaccctctgtgcaagctaaaagattgacagaaattacttacgaagccttgaaaattggaataaaaacagtaaagccgggcaacactttaggcgatatcggtttcaacattcagaaatatgtagaagaaaataatttttctgttgtgagggaattttgcggtcatggtattggaaaagaatttcatgaagagcctcaagttttacattacggcaaccaaggtgaaggtgaggtcctaagagaaggaatgacctttacaatagagccaatggtgaactttggcaaaaaggaagtaaaaattttaccagaccaatggactgtcgtaacaaaagatcatagtctttcagcacaatgggaacacacaattcttgtgacgaaaaatggatatgaagttttaaccataaggcctgatgaaaacatatag

SEQ ID NO: 262209 - DNA, 778 bp, Unknown
  Bacterial polypeptide expressing nucleotide sequence isolated from the Sargasso Sea
aatggaaaataattatacagaggcctttgaaggaacaagaaatgctggatcaattgcggctgctgcactcgatgaagtgggtaaaataataaaacctggtattactaccgaaaaaattgacaagctttgttttgagtttattaatgactttaaagcttactcagctccactttattatagaggttatcctaaatcatgttgtacatctgtgaatcatacagtttgccatggcataccaagtaataaaattttaaaagagggtgatattgtaaatgttgatgtaactgcattaaaagatgggtggcatggggatacgagcaggatgttctatgccggacaagtctcagtaaaatcaaaaaatttaacaaaggttacatatgatgcaatgatggcagcaataaaaatattgaggcagggtattaatatcggagatataggttttacaattcaaaaacatgttgaggcaaaaggcttttcagtagtaagagatttttgtggacacggtttaggaagaaattttcatgaacttcctaatattctgcattatggagagcaaggaactggggataaactaaaaacaggaatgatttttactattgaaccaatgataaatgagggaaaatatgagactaatgtacttaaagacggatggactgcggttactaaagataaaatgctttctgcacaatttgaacatactgttggtataaaaaatgaaggatacgaaatatttactctttccaaaaagggattagattttcctccagatacaaaatga

SEQ ID NO: 262210 - DNA, 778 bp, Unknown
  Bacterial polypeptide expressing nucleotide sequence isolated from the Sargasso Sea
atgaagattaaatcatattcaaatgctgaagtagactcttgtagaaaggcaggtaaaataactgcaactattttagacgagcttaataatataattaaagagggaattacaacttctgagattgatgaattctgtttaactagaattcaagaattaggtggcactcctgcccctttgttttatagaggttttccaaaatctacatgtacttctttaaaccatgtaatttgtcatggaattccaaattataatcgaaatcttcaaaagggtgatattttgaatgtagatgttacaacaataattgatggttggcatggagactcatcaagaatgtataaagtaggtgaagtctctataaaagcaaacaacctatgtaaagttactcacgattgtttaatagaaagtattgatgaaataaaagttggcgagcctattagtcgtattggaaaaaaaattgaagatatagcaacatcaaataattttagtgttgttagagacttttgtggacatggtgttggtttgaaatttcatgaaaatccaagtattttgcattactacgatagcgaatatgataatattaaatttatagatggaatgatttttacgattgaacccatgatcaatgctggaaaatatcaatctaaaatacttagtgatggttggacagctgtgactaaagataaaacacttagcgctcagtacgaacatacgatatatattaatggtgataatgttgagattctaacagagtctccaaataaggctttttataattgat

SEQ ID NO: 262211 - DNA, 772 bp, Unknown
  Bacterial polypeptide expressing nucleotide sequence isolated from the Sargasso Sea
gatgagtgattatactgaaaaatttgaaaagatgcgtgctgccggaaatttggctgcaagaactttagatatgctaacggatcacataaaacctggtgtatcaacagatgaaatagataatcttggatatgaatttataaaagatcatggagcttattcagcgccacaattttatagaggttttaaaaaatctctatgtacttcattaaatcatgttgtttgtcatggaataccatctgatagagttttaaacgaaggtgatgctgtaaacattgatgtaactgcaatattggatggccattatggtgacacaagtagaatgtatactattggagaggtttcaattaaatctaagaatttaatcgatgcaacttataattcaatgatgaaagccattaatattttaaaaccaggattaagtttgggtgacattggtaatgaaattcaatcatacatcgaagaaaaaggttttagtgtagtaagagacttttgtggacatggaataagtactacatttcatgaacctccaaatattttgcattatggaaaaaaaaatactggaaccaagatttatccaggaatgacttttacaatagaaccaatggttaattttggaaaatatgacgtaaaagtgttaaatgatggttggacagcagttacaaaagataagtcgctatcagcacaatttgaacatactataggaattactgaaaatggatatgaaatctttacagaatctgctaaaggttattctaagcctccatacaaataa

SEQ ID NO: 262212 - DNA, 772 bp, Unknown
  Bacterial polypeptide expressing nucleotide sequence isolated from the Sargasso Sea
atgagtgattatactgaaaaatttgaaaagatgcgtgccgcaggaagtcttgctgctaaaactttagacatgttaactggtcatataaaaccaggcatatcaacagatgagttagataatcttggatatgaatttataaaggatcatggagcatattctgcaccgcaatattatagaggttttaaaaaatctttgtgtacttcacttaatcatgtcgtttgccatggtataccttctgatagagttttggatgaaggagattctataaatattgatgtaactgcaatactagatggccattatggtgacacaagtcgaatgtatactgttggtgaagttccaattaaatcaaaaaatttaatcgatgtgacttacgattctatgatgaaagcaataaatattttaaaaccaggtttgagcctaggagatatcggaaatgaaatccaatcatatgttgaagaaaaaggttttagtgttgtaagagatttttgtgggcatggtataggtactacttttcacgaacctccaaatattttacactatggaaaaaaaaatactggaattaagatttatccaggaatgacttttacaatagaaccaatgattaactttggaaaatatgatgtaaaagtgttaaatgatggatggacagctgttaccaaggataaatcactatcagcacagtttgaacatacaataggaattactgaaaatggatatgaaatctttacagaatctgctaaaggttattctaagcctccatacaaataat

SEQ ID NO: 262213 - DNA, 769 bp, Unknown
  Bacterial polypeptide expressing nucleotide sequence isolated from the Sargasso Sea
aatgaatatttcgataaaaaattttgagggcattgaaaaaatgagaatagctggcaaattagcagctgaagttcttgaaatgattacccccttcgtcaaaccaggagtttctactggtgagcttgataagctttgttatgatcacattgttaatgttcaaaacgccataccagcaaatgttggatacaaaggatatgagaaaactatttgttcgagcataaatcaggttatttgtcatggtatacctaacagtgaaaaattccttaaagatggagatattcttaatattgatgtgacagttataaaagatgggtggcatggagatacatcaaagatgtttcttgttggtaaatgtgctccacataaccaaagattagttcaaatcactcaagaatgtctttacaaaggtatcgaggctgtaaaaccaggcgcatatcttggagacattggaaatgccatccaaaaacatgctgaaaaaaattactatagtgttgttgaggactactgcggtcacggtatcggaaaaatttatcatgaagaacctcagatccttcactatggaaagcctggaacaggtatacagctaaaagaaggcatgtgtttcactatagaaccaatgattaatcaaggtacaaaatactgcaaaactcttaatgatggatggacggtggaaactaaagatggaagaaactctgctcaatgggagcatactattgcagtgactaaaactggttcagaaattttaacaaaaagaaatgacgaattttaa

SEQ ID NO: 262214 - DNA, 772 bp, Unknown
  Bacterial polypeptide expressing nucleotide sequence isolated from the Sargasso Sea
atgaatatttcaataaaaaataaaaatgatatagaaaaactgagaagtgctggtcaacttgctgcaaatgtcctcaatatgattactgaacatgttaaacctggaatatcaacaggggaactagatgatatttgtcatgactttattgttaatgagcaaaaagcgattcctgctaatattggttacaacggctatgaaaaaacatcatgcataagcgttaatcaagttatttgtcatggcatacctaatcaaaacaaaatcctcaaagacaacgatattgtaaatattgatgttacagtccttaaagatggttggtatggagatacctcaaaaatgtttttagttggtaagacacaacctcacaatgagaaattagtctcagtcactcaagaatgtttgtacaaagctattgaaattgcaaaacctggtatcaccttaggcgacataggccatgttattcagtctcacgctgaaaagaatcactatagcgttgttgaggactattgtggtcatggaattggtaaggtctatcatgaagatcctcaagtgttgcattttggaaaaccaggcacaggaatcgagcttgttgaaggaatgtgttttactattgagcctatgattaatcaaggtacaaaatatactaaaatactttcggatggttggacggtagaaacaaaggatggaagaaattcagcacagtgggaacatacaattgccattacatcaaatggatgtgatgtccttactaaaagagatgaagagagattttagt

SEQ ID NO: 262215 - DNA, 649 bp, Unknown
  Bacterial polypeptide expressing nucleotide sequence isolated from the Sargasso Sea
aatgaaattgataaattatgttacgaatatatcaatgaccataaagcttattcagcgccattattatatagaggctttcctaaatcatgctgtacatcggtaaatcatgtggtgtgtcatggaataccttcaaataaagttttaaaggatggagatatattaaatgttgacgttacagctttaaaagatggatggcatggagatactagtcgaatgtttgagattggaaatgtttcagtaaaagcaaaaaaattaattgaaactacttatcaatctatgatgaaagcaattagtattttaaaagaagatattcatttaggggatattggttcaactattcaaaaatatgtcgaagctaacggttgttcggttgttcaagatttttgtgggcatggaataggacaatcgtttcatctcgaaccaaatattttacactacggcaaaaaaggaacaggtgaaaaaattaaagctggaatgatctttactattgaaccaatgataaacctaggaaaatacgaaactaaggtgcttagtgatggttggactgcggtaacaagggataaaactttatcagcacaatttgaacatactgttggtataacaaaagatggctacgaaatatttacggagtcaaagatattaaattaat

SEQ ID NO: 262216 - DNA, 425 bp, Unknown
  Bacterial polypeptide expressing nucleotide sequence isolated from the Sargasso Sea
aagcaaaaaattaattgaaacgacttacgaatctatgatgagaggaattaaaatattaaaaccaggagttaaattaggagacattggccatgaaattcaatcctttgttgaagaaagaggtttttcagtagtaagagatttttgtggacatggtattagtaatacttttcatgaacctcctaatatacttcattatggtaagaaaaatactggtcatgaattaacacctggcatgacatttacaatagagccaatgataaatgtgggtaaattagatgttaaagtgctaaatgatggatggaccgcagttacaaaggataagtctttatcagcacaatttgagcatacaatagggattacagaagactcttatgaaatttttacagaatctgttaaaggttataagaggcctccatataattaat

SEQ ID NO: 262217 - DNA, 467 bp, Unknown
  Bacterial polypeptide expressing nucleotide sequence isolated from the Sargasso Sea
tactagcaggatgtttactgttggtgaaatttctgtaaaagcaaaaaatttaattgatgccacttataactcactaatgaatgcaacaaaaattcttaagccaggtataaaattaggagacattggatacgaaatccaatcctatgttgaggcaaaaggctttagtgttgtaagagatttttgtggacatggaattagtaatatatttcacgaagcaccaaatgttctgcattatggaaaaaaaaatacaggaagtgaattacaacctgggatgacttttacaattgagcctatgataaattcaggaaaatatgatgctaaagttcttaaagatggatggacagctgttacaaaagataaatctttatctgcacaatttgagcatacagtaggaataaccgaaaatggttatgaaatttttacagaatctgttaaaggttataaaaagcccccatatattaaatgat

SEQ ID NO: 262218 - DNA, 680 bp, Unknown
  Bacterial polypeptide expressing nucleotide sequence isolated from the Sargasso Sea
cataaccacagaagatttagatagattgtgccatagcttcattttggacaataatgctatccctgctccattgaactataaaggttttccaaaatccatctgtacttcgattaatcatgtcgtttgccacggaattcccggaggccgaacattagatgagggagacattcttaatattgatgtaacggttatcttagatggctggtatggcgatacgagcagaatgtttggggttggtaaagtagcggttaaggccgcccgcttaatggatgttacttacgagtgccttatgaaggggatagaagttgttaaaccaggatcaaccctaggcgatatagggcatgctattcaagaatatgcagaaaaagaaaggttttcagtcgtacgagacttttgtggacacgggttaggtcgtgtattccattcggccccaagtattttgcattatggaactgctggcatgggagcagttctacaaaaaggaatgttcttcacaatagaaccgatgataaatgcgggcaagtatgccgtcaaaatactaccagacggatggaccgcagtgactcgagataggtctttatcggcacaattcgaacactctcttggggtcactgaagatgggtgcgaactattcacggtatcgcccttaggcttacacaagccaccctatgatgtttaga

SEQ ID NO: 262219 - DNA, 799 bp, Unknown
  Bacterial polypeptide expressing nucleotide sequence isolated from the Sargasso Sea
atgagtatagtcattaagacagcagaagaaatcgagaaaatgcgcgcggcaggtaaactggctgcacaagtattagaagtgatcgccccttatgttaaggcgggggtcaccactaatgaattaaacgatatctgcgccaaatataccgaagagcaaggcgcgatttctgccccgctcaactaccatggttttcctaagtcgatttgtacttcgttaaacaacgtcatttgccacggcattccgagcgatcgcgttctcaaggatggcgatattctcaatatcgatatcaccgtcattaaagacggttaccacggcgatacctctaaaatgttcttaatcggtgaagtcagccctaaggacaaacgtctgtgccgcatcgctcaagaaagtctctatcttgcaatccgtaaagtgcgtccgggattaaaattaggtgaaatcggcaatactattgaaaaattcatcaaagccagcaaaacaggccttgagaaatattccatcgtgcaagattattgtggccacggtattggcgcgggtttccatgaagaaccccaagtgatgcactaccgtaatggtgacaacaccattttacgcccaggtatgtgctttaccattgaaccgatgatcaacgccggtcgccacaccactgtgctagatcgcgatgataattggacggtgaccacttccgatggtaaaaactcagcccagtgggaacacacattattagtgaccgaaaccggtgttgaagtgctgacgctgcgcgatgaggaagattttccgcggatcattaatcactaat

SEQ ID NO: 262220 - DNA, 736 bp, Unknown
  Bacterial polypeptide expressing nucleotide sequence isolated from the Sargasso Sea
atgaataaaaattattcagaaaaatttgaaaaaatgagtgttgctggtaagttggctgcacaaaccttagatatgatcacagaacatattaaaccaggtgtatcaactaataaaattgatcaactttgctatgaatttataagagacaacaaagcttactctgccccactatattacaggggatttaaaaaatctctatgcacctcattgaatcatgttgtgtgtcatggaataccttctgatagaattttagatgaaggagatataattaatattgatgtaaccacaattgttgataattatcatggtgatacaagtagaatgttttgtgtaggtaaaacttcaattaaagcaaataatcttatcaatgctacatatgaatcgatgatgaaggccataaatatattaaaaccaggtataaaattaggagatataggttatgaaatacaatcttatgtggagagtaaaggattttcaattgtaaaagatttttgtggacacggaattagcaacgtttttcatgaatatccaaatattctccattacggaaaaaaaaatactggtattgaattaaaaacgggtatgactttcactatagaacctatgataaattatggaaaacatgatgtaaaaattttagatgatggatggacagctgtgacaaaagataaatctttatcagcacaatttgaacatactgttggaattacagaaaatggttatgaaatattacaaa

SEQ ID NO: 262221 - DNA, 727 bp, Unknown
  Bacterial polypeptide expressing nucleotide sequence isolated from the Sargasso Sea
gagtttagcttcaaaaactttggatatgcttactatgaaaattaaagagggtatatctacaaacaaaatagataagcttgggtttgagtttataagagacaatggaggatactccgcccctttgtattacagaggatttgaaaaatctttatgcacatcattaaatcatgttatttgtcatggaatacctggagaaagaattcttgaagaaggtgatattgttaacgttgatgtgactacaattgttgatggttactatggtgatacaagcaggatgtattcgataggaaaaatatcagttaaagctcaaaacttaattgatgctacttatgaatctttaatgagatctattaaaattttaaaacctggagttaagcttggagatataggaaatgaaattcaaacttatgttgaagctaaaggtttttctgtcgtcagagatttctgtggtcatggtattggtgataaatttcatgagccacctaatattcttcattatggaaaaaaaaatacgggtgcggaattaaaaccaggaatgactttcactatagagccaatgattaattcaggaaaatttgaggtaaaaattttagacgatggttggactgcagtttcaaaagataagtctttatctgcacaatttgaacatactgttggaataaaagataatggttatgaaatttttacagaatctgctaaaggttatttaaagcctccttataattaa

SEQ ID NO: 262222 - DNA, 669 bp, Unknown
  Bacterial polypeptide expressing nucleotide sequence isolated from the Sargasso Sea
aaattaatactttttgtcatgatttaattttaaaaaataatgctactcctgcgccattaaactataaaggttttccaaagtcaatttgtacttctgttaatcatgtggtttgtcatggcattcctagtgaaaaaaaaatacttcaagaaggagatattgtaaatgtagatgttacagtaatattagatggatggcatggagacagttctcgaatgttctcagcaggtaagattaataaaaaaacagaattacttcttaaaactacctatgagtgtttacttatgggaattcaagaagcaaaaccaggaaaatattttggagatattggatttgtaattcaagaatatgctgagtctaaaaatttttcagttgttagagatttttgtggtcatggtataggtaagaaatttcatactcctccaagtgtacttcattatggcaatatcggtgagggaccccaaataaagccaggcatgctatttacaatagagccaatgataaatatcggagattggcatgtgaaaatattgaatgatggttggacagccgttacaaaagataagtctctatctgctcaatttgaacatacaataggtattaatgaaaacggtaatgagatatttactctttctcaaaataattccgattttccaataaatacactataaa

SEQ ID NO: 262223 - DNA, 699 bp, Unknown
  Bacterial polypeptide expressing nucleotide sequence isolated from the Sargasso Sea
aatgaagataaatttaaaaaatcaagatcaaatatctcagatgagaattgctggtcaattagcagctgaggttttagaaatgattaccccatatgtagtgcctggagtgagtactgaagagttggataaaaggtgttatgactttatcgtgaatgagcaaaaagctatacctgcgaatgtgggttacaacggttttgaaaaaacgatttgttcaagtgttaatcaagtaatctgtcatggaattccctcggataaaaaaatactcaaggatggagatattttaaatatagatgttacagttattcgtgatggatggcatggagatacatcgaaaatgttcttggttggtaagacccagccacacaatgaaagacttgttaaagtcactcaagaatgtttatacaaagcaatagaggttgtgaaaccgggagctcatctaggtgatataggcgctgctatccaagagcatgcagaaaaaaatcattactcagtcgtggaggactattgcggtcatggaattgggcaggtgtaccatgaagaacctcaagtactccattatggcaaagcaggtcaaggcatagaaattaaagaaggcatgtgttttacgattgagccaatgattaatcaaggatcaaaatacacaaaactcttaagcgacggatggactgtagaaaccaaaagatggaagaaattcagcgc

SEQ ID NO: 262224 - DNA, 306 bp, Unknown
  Bacterial polypeptide expressing nucleotide sequence isolated from the Sargasso Sea
gttttagtgttgtaagagatttttgtggacatggcataggagatgtatttcaccaaagtccaaatgtattacattatggaaaaaaaaatacaggaccagaattacaacctgggatgacattcaccatagagccaatgattaatgctggtaaatatgaagttaaaattttaaatgatggatggacagctgtaactaaagataagactttatctgcacaattcgaacatacagttggtataaccgataatggatatgaaatttttacagaatctgttaaaaacttaaagaggcctccttataattaat

SEQ ID NO: 262225 - DNA, 319 bp, Unknown
  Bacterial polypeptide expressing nucleotide sequence isolated from the Sargasso Sea
gtcgaggaaaaaggttttagtgttgtaagagatttttgtggtcacggaattagcaatacatttcatgaaccaccaaatattctacactacggaaaaaaagatactggacaagaattaaaacctggtatgacatttacaattgagcccatgataaatgctggaaaatatgaatctaagctattaaatgatgggtggaccgctgttactaaagataaatctctatctgcacaatatgaacatacgttaggaataacggaaaatggttatgaaatattcacagaatctgttaaaggttattcaaagcctccatataattaat

SEQ ID NO: 262226 - DNA, 772 bp, Unknown
  Bacterial polypeptide expressing nucleotide sequence isolated from the Sargasso Sea
atgagtattaatttaaaaaattctgatcaaatatctaagatgcaaattgctggtcaattagcagctgaagtaatagaaatgattggacctttcgtagtgcctggagtaagcactgcagagcttgataaaagatgttatgactttattgtaactgaacaaaaagctacgccagcaaatataggttacaacggatttgagaaaactatttgctcaagtgttaatcaagtaatttgccatggtattccaactgaaaagaaaattcttaaagacggagatatcatcaatatcgatgtaacagttatttgtgatggatggcatggagatacatcaaaaatgttcttagtcggaaaagcgcaaccccataatgagagattggtaaaagtagcacaagagtgtttatataaagcaattgatattgttaaaccaggggctcatctcggtgatataggagcagtcattcaagaacatgctgaaaaaaatcactattcagtagttgaagactattgtggtcatggaattgggagggtatatcatgaggatcctcaaatccttcattatggaaaatttggaagaggaattgaaatccaagaaggcatgtgttttacgattgagcctatgatcaaccaaggatctaaatatacaaaaattctaagcgatggctggaccgttgaaacaaaagatggaagaaattccgctcaatgggagcatacccttgcagttacctcatctggcgttgaaattcttactaagcgcagtgaagaacacttttgat

SEQ ID NO: 262227 - DNA, 541 bp, Unknown
  Bacterial polypeptide expressing nucleotide sequence isolated from the Sargasso Sea
cctgggtgacagaacacttcaagatggagatattgttaatatagatgtaaccgccatagttaatgatcactacggggacacgagtcgaatgtatactgttggtgatatctctgtaaaatcaaaaaaacttattaacgttacttatgagtctcttaacagagcaattaaaatattaaagcctggaagaagaattggcgatattggtcacgagatacaatcttttgtagaaaaaaatggattttcagttgtaagagatttttgtggtcacggaataggtacaaactttcatcaagaaccaaatattcttcactatggttcaaaggataccggtgacgaattaaaaccaggaatgacttttactattgaacctatgataaatgcaggaaaatatcatactaaagttttaagtgatggttggacagcagttacaaaagataaaacattatcagcgcaatttgagcatactgtaggaataactgaaaatggttatgtaatttttacagaatctgctaaaggttataaggagcctccttacaattaa

SEQ ID NO: 262228 - DNA, 634 bp, Unknown
  Bacterial polypeptide expressing nucleotide sequence isolated from the Sargasso Sea
gatgagtaattattcagaaaaatttgagaaaatgagaattgctgggaaacttgcatcaaaaactttagatatgttaacagatgaggtaaaggaaggtgttactacagatagaatagatcaattaggttatgagtttataagagacaatggtgggcactctgctccactatattacagaggttttaaaaaatctttgtgcacatctttaaaccatgttgtttgtcacggtattccctctgatagagttttaaatgaaggcgatgcaattaatattgatgtcacagcaatagttaatgagtactacggagataccagcagaatgtttaccattggggacataccagtaaaagctaaaaacttaattgagacaacttacgattctatgatgaaaggaataggaattttaaaaccaggattaaaattaggagatattggctatgaaattcaatcctttgttgaagaaagaggtttttcagtagttagagatttttgtggccacggtattagtaatacttttcatgaacaacctaatattcttcattatggtaagaaaaatacaggtcacgaactaacacctggtatgacatttacaatagaacctatgataaatgttggtaaattagatgtaaaagta

SEQ ID NO: 262229 - DNA, 766 bp, Unknown
  Bacterial polypeptide expressing nucleotide sequence isolated from the Sargasso Sea
atgattaaaagttctgacgaaatagccaaaatgaagcttgcaggaaagcttgcagctcaaactttggaaatgattgaacaacacgttcaaccaggggtatctacaggagagttggatagaatctgtcacgattacattgtcaatgaaattgactgtattcctgctcccctaaattacaatggttttccaaaatctatttgcacttctataaatcaagtggtttgtcacggaatacctgatgacaatagagtcctaaaaaacggagatattatcaatattgatgtaactgtgattaaagacggttaccacggagatacaagtaaaatgttttttgttggaaaaaaacaacctcatgcagaaaggctggtaagtattactcaagaatgtctctataaagccatagcaatatgcaaaccaggaataaaactaggcgacataggttatgtgattcaaaaacatgcagaagaaaatcactactctgttgtcagagattattgcgggcatggtattggcaaagttttccatgaagacccacaaattcttcactatggaaatccaggaactggaatggaattaaaagcaggtatgtgttttaccattgaacctatgattaatcttgggactcataaaaccaaattatctaaaaatgatggctggacagtagaaactattgatggaagattgtcagcccaatgggagcatacgttggctataaccgatgatggctgcgaagttcttactgctagatcagaagaaactctatgaa

SEQ ID NO: 262230 - DNA, 241 bp, Unknown
  Bacterial polypeptide expressing nucleotide sequence isolated from the Sargasso Sea
tatttttcattatggaaaaaaaaatactggtgctgagttaagaccgggaatgacttttacaatagaaccaatgataaactcaggcaaatacgatgttaaaattttagatgatggatggacagcggtttctaaagataaatcattgtctgcacaatttgaacatactgttggtataaaagataatggatatgaaatattcacagaatctgttaatggttatatgaagcccccttataattaa

SEQ ID NO: 262231 - DNA, 769 bp, Unknown
  Bacterial polypeptide expressing nucleotide sequence isolated from the Sargasso Sea
atgattaaatataaagaaaaatttgaaaaaatgagggttgctggaaagcttgcatctagaacattagatatgttaactgattttattagacctggaatttctacaaataaagttgatcagttagcttatgacttcataagagatcatggaggctattcagcgcctcaattctacagaggttttaaaaaatctctttgcacttcattaaatcatgtagtttgtcacggaataccgtctgatcgtattttagaggacggcgatgtcttaaatgtagatgttactgctgttgttaatgaatattatggtgatacgagtagaatgtttgcaataggaaattcaactataaaagcaaacaatttgattgatgctacctacgagtcgatgatgagggcaattaaaattttaaaacctggcattaagttaggggatataggtaatgaaattcaaacatttgttgaagaaaagggttattcagttgttagagacttttgtggtcatggaattagtaacacatttcacgagtctcctaatatattgcactatggaaaaaaaaatactggtcttgaaatctattcaggtatgactttcacaatagagccaatgataaatgttggaaaatttgatgttaaaattttaaatgacggctggactgcagttacgaaagataagtcattatctgcacaatttgaacatacagttggaattactgaaaatggatatgaaattttcacagaatctgttaaaggatataataaacctccatattaat

SEQ ID NO: 262232 - DNA, 397 bp, Unknown
  Bacterial polypeptide expressing nucleotide sequence isolated from the Sargasso Sea
tatgaagcaatgatgaaagcaattaaaatattaaaacccggagtaaagttaggagatattggtaatgctattcaatctcatgttgaaaacaaaggatattcagttgtaagagatttttgcggacatggaattagcaatacatttcatgagtcacctaatatacttcattatggcaaaaaaaatactggtatagaagtttacccaggaatgacatttacaatagagccaatgatcaatgctggtaaatatggtgttaaaattttaaacgatggatggacttctgtaactaaagataggtctttatctgcacaatttgaacatactgtaggaataactgaaaatggatatgaaatttttacagaatctgctaaaggatataataaacctccttattaat

SEQ ID NO: 262233 - DNA, 898 bp, Unknown
  Bacterial polypeptide expressing nucleotide sequence isolated from the Sargasso Sea
aaatcggtgccgttaggcatagcgcgcccggactacgccgaaagcggcgttccacaaattacggcgcccagcgacctccgtaaggaccccgcgactatcgaacgaatgcgtctcgccgggtcagcggcaagaagagtgcttcggagagtagccagcgaaataagcccaggagtaactaccgattatcttgatcaggtatgccatcaagcttgtattgaagagggcggttacccaagtccgctgaattacaacggataccccaaatcactttgtacctctgtcaacgaaattatttgccacggaattccagatgaccgtccgcttggagagggtgacattatcaactgtgacgtcacaatctttctggacggagttcacggtgaccacagcgaaactttcgctgtcggcagcattgatcaaccgtcaactgaccttattcggataacccgagagtgcctatatctagggataggcgcagtgcgcgccggtggggtcgtgaacgaaatcggcaaagctattcaaactcacgccgaggcagcagggctgggtgtggtgagggaatttatcggtcacggcgttggcgaagtgtttcatcacctaccaaatatcccgcattattacgagccctcagcccgctttgagttcgcgcctggaatgactttcacaattgaacccatgatcaccattgggtcaccgtcggccaatctatgggaagacggttggacggcagccaccaacgatttaagtcgcacggctcagttcgaacatacgatcttggtcagagacgacggagttgagattctgacgctggaagacgacgaacctcagcctttcttaaccagtggggatggcgccacctggccgcaaacgatccccaccggttctcaaaattcgtagg

SEQ ID NO: 262234 - DNA, 796 bp, Unknown
  Bacterial polypeptide expressing nucleotide sequence isolated from the Sargasso Sea
gatgcagtctaacaatatacctatttatacatataaagattttgaaggtatgagaaaagctggttctcttgctgcaaaaatattagatcaattaaaatcacttattaaaccaggtatatctacgttagaaattaatgatttttgtcatgaattaattgttaaaaatgaagctattcctgcacctttaaattataaaggttttcccaaatcaatctgtacatctgttaatcatgttgtgtgtcatggtattcctaatgagcagaaaatattaaaagataatgatataattaatgttgatgtcacggttattttagatggctggtatggtgatagctcaagaatgtatgttgctggaccaataaacaataaaatttattcattattaaaaacaacatatgagtgtctacttataggcatagaaaatgccttaccagggaaacacttaggagatatagggtatgcaatacaaaatcatgcagaaaaaaatcattactcagttgtaagagatttttgtggacatggaataggaaaagagtttcacactcctcccagtgttttgcattatggcaatattggagaggggccaatattaaaaccaggaatgttttttacaatagagccaatgataaacctaggagattggagaacaaaaatattaaacgatggttggacagctgttacaaaagataaatctttgtcagctcaatttgaacatacaattggtattactgaaaaaggtaatgaaatatttactctttcttataataattccgattttccaataaatcctttataa

SEQ ID NO: 262235 - DNA, 808 bp, Unknown
  Bacterial polypeptide expressing nucleotide sequence isolated from the Sargasso Sea
atggcgaaacgagagatcccgatccgcggtgccgcggaaatcgccaagtcgcgcgaagccgcgaagctcgcgtcgcaggtgctgacgatgatcaccgagcacgtgaagccgggtgtcaccaccgacgaactggacgtgctctgccgcgaatacatcgtcgacgtgcttggcgcgatcccggcgaacatcggctaccacggctatccgaagacgctgtgcacgtcggtcaaccacgtggtgtgccacggcattccgacgtcgcggccactgcgcgacggcgacatcgtgaacctcgacatcgcggtgatcaaggacggctggttcggcgatacgagccgcatgtatttcgtcggcgaaccgaacgagctcgcacgacgcctcgtcgcgacgacctatgaggcgatgcacgcgggcattcgcgcggtgcgtccgggtgcgacgctcggcgacgtcggctacgcgatccagcaggtcgcgcatcgcgaaggcttcagcgtggttcgcgaatactgcgggcacggcatcggcgatgtctatcacgacgaaccgcaggtgcttcactacggccgtccgggcaccggcgtgccgcttcggccggggatgatcttcacgatcgagccgatgctcaacgcgggcaagcgcgacacgcgcatgctggcggacggctggacggtcgtcacgaaggaccattcgctgtcggcccagtgggagcacatggtcgtcgtgacggaaacgggcttcgaggtgctgaccgaagacgcgaagccgcaggcgttcccggcgctgtcgggcacgcacgccgcctgat

SEQ ID NO: 262236 - DNA, 796 bp, Unknown
  Bacterial polypeptide expressing nucleotide sequence isolated from the Sargasso Sea
atgcagtctaataatatccctatttataagaaaaatgactttcaaaaaatgcaaaaagctggaagattagctgcctatatcttagatcaactatatgaattaatacagccaggaatttctactttagaaattaatgatttttgtcatgatcttataattaaaaataatgcaatacctgcgccattaaattataaaggatttccaaaatcagtttgcacatctgtaaatcatgttgtctgtcacggtatacctaatgataaaaaaatattaaatattggcgatataataaatgttgatgtaactgtcattttagatgactggtatggtgatagttcaagaatgtatgttgctggtaaaactaataaaaaaaatttagatttactgaaaactacctatgagtgtcttcatattggcataaaagaagctcaacctggaaaaaattttggtgatattggttttaaaatacaagaatacgctgagtctaaaaattattcagttgtaagagatttctgtggtcatggtattggaaaacaatttcatactcctcctagtgtattgcattatggtaatttaggtgagggaccagagctaaagccaggaatgttttttacaatagagccaatgataaatttaggtgactggcaaataaaaatacttaatgatggttggacagcagtaactaaagataaatctttatcagctcagtttgagcacactattggtatcactgaagatggaaatgaaatttttacattatcagaaaacaatacagattttccaataaatgatttataaa

SEQ ID NO: 262237 - DNA, 715 bp, Unknown
  Bacterial polypeptide expressing nucleotide sequence isolated from the Sargasso Sea
ctcaactttagatatgctaacagattatgttaaaccaggaatttcaacagataaaattgatcagctaggttatgaatttataaatgataatggtggacactcagcacctctttattataggggatttaaaaaatctttatgtacatcattaaatcacgttgtgtgtcatggtattccatcagatagaatattaaatgatggtgatgctgtaaatatagacgttaccgcaattgtgaatgagtattacggcgatactagtagaatgtattctgttggtgaaatttctattaaagcaaaaaatttaattgatgcgacttatgaatcaatgatgaaagcaatcaaaattttaaaacctggaattacacttggagatatagggtttgaaattcaatcatatgttgaagaaaaaggtttttcagtagtaagagatttttgcggtcatggaattagcaatacctttcatgaaccaccaaatattttgcactacggaaaaaaaaatactggcactgaattaaagcccggtatgacctttacaattgaaccaatgataaatgcaggaaaattagatgttaaagttttaaatgatggttggacagcagttacaaaagataaatctttatctgcacaatttgagcacacattgggaataacagaagattcttatgaaattttcacagaatctgttaaagattatagaaagcctccatataagtaa

SEQ ID NO: 262238 - DNA, 579 bp, Unknown
  Bacterial polypeptide expressing nucleotide sequence isolated from the Sargasso Sea
tatgtacatctttaaaccatgttgtgtgccatggaataccctctgatagaattttacaagaaggtgacgctgtaaacgtagatgtaacagcaattgttgatgaacattatggtgatacaagcagaatgttttgtattggaaaaacgcctgtaaaattaaacaatcttatagatgctacttacgaatctatgatgagagcaattaaaattttaaaacctggaattaaattaggagatattggttatgaaattcaatcttatgtagaagaaaaaggattttcagtcgtcagagatttttgtggtcacggaattagtacaacttttcatgaaccaccaaatattctacattatggaaataaaaatactggcatggaacttagacctggaatgacatttactatagaaccaatgattaattcaggtaaatatgatgttaaaatgttgaatgatgggtggacagctgttacaaaagacaaatctttatctgcacaatttgaacatacgctaggaattactgaaaatggttatgaaatctttacagaatctgctaaaggttattcaaagcccccatacttataat

SEQ ID NO: 262239 - DNA, 610 bp, Unknown
  Bacterial polypeptide expressing nucleotide sequence isolated from the Sargasso Sea
tccacttttttatcgtgggtttaagaaatctttatgcacttctttaaatcatgttgtttgtcacggagttccttctgatagaattgtaaatgatggggatattttaaacgttgatgttactgcaatagttgatggatattatggcgacactagcaggatgtttgctgttggaaaaacttctgtgaaagcaaataatttaattaatgcaacctatgaatctatgattaaagctatcagtatcttgaaaccaggaataaaacttggcgatattggttatgaaattcaaaattatgtcgaagaaaaaggtttttctgttgttaaagacttttgcggacatggtataagtaatatttttcatgaacctccaaatgtgcttcattatggtaaaaaaaatactggtgtagatttaactcctggtatgacttttacaattgaaccaatgattaacgctggaaaatatgatgttaaagtattaactgatggttggaccgcagtaactaaagataaatctttatcagctcaatttgaacatacaattggaattacagaaaatggttatgaagtttttacagaatctgttaaaggttattcaaggcctccgtataattaa

SEQ ID NO: 262240 - DNA, 607 bp, Unknown
  Bacterial polypeptide expressing nucleotide sequence isolated from the Sargasso Sea
ctctattatagagggtttacaaaatctttatgcacatctttaaatcatgtaatatgccatggaataccctcagatagaattttacaagaaggtgatgctgtaaacgttgatgttacggcaatcgttgatgaacattatggtgacacgagtagaatgttttgtatcggaaaaactccagttaagttaaataatcttatagatgctacttatgaatctatgatgaaagcaattaaaattttaaaaccaggaattaaattgggagatatcggttatgagatacaatcttttgtggaagaaaaaggtttttcagtcgttagagatttttgtggtcacggaataagtacaacttttcatgagccgccaaatattctgcattatggtagaaaaaatacagggatggaattaagacctggtatgacatttactatagagcctatgataaatgctggtaaatatgatgtgaaaatgttgaatgatggctggacagctgttacaaaagataaatctttatctgcacaatttgaacatacgttgggaattactgaaaatggttatgaaatctttacagaatctgctaaaggttattcaaagcctccatacttataat

SEQ ID NO: 262241 - DNA, 674 bp, Unknown
  Bacterial polypeptide expressing nucleotide sequence isolated from the Sargasso Sea
ggtttccactgaaaaaattgatcagttaggttatgaatttataaaggataataatgggtattctgcaccacagttttatagaggatttaaaaaatccttatgtacatcattaaatcatgtcgtttgccatggtattcctggtgacagaattttagatgaaggtgatattgttaatgttgatgtaacagccatcataaatggtcattacggggacactagtagaatgttttgtgttggagaagtttctgttaaagcaaaaaacttaattgagactacttataattcaatgatgaaagcaatagaaattcttaaaccaggtataaaacttggagatattggttatacaattcaatcttatgttgaggaaaaaggtttctcagtcgtaaaagatttttgtggtcatgggataagtacaaaatttcatgaaccaccaaacatactacactatggaaaaaaaaataccggtattgaaatacaaccaggaatgactttcacaatagaaccaatgataaatgcaggcaaatatgatgttaaagtacttgatgatggttggacagctgtaacaaaagataaaacactatcagcacagtttgaacatacattgggtataactgaaaatggatatgaaatttttacagaatctgttaaaggttataaaaagcctccatattaat

SEQ ID NO: 262242 - DNA, 523 bp, Unknown
  Bacterial polypeptide expressing nucleotide sequence isolated from the Sargasso Sea
tgcagatggggacgctttaaatgtagatgtgactgcaattgttgatgaatattatggtgatacaagtagaatgttttgtattggaaagacaccaattaagttaaacaaccttattaataccacttatgagtcaatgatgagagctgttaaaattttaaagcctggaattaaattaggagatattggttatgaaattcaatcttttgtagaagaaaaaggtttttcagttgttagagatttttgtggtcacggaattagtaaaacatttcacgaaccaccaaatattttacactatggaaacaaaaattctggaatggaactcatacctggaatgacatttactattgagccaatgataaatgcaggtaaatatgatacaaaaatgttaaatgatggctggacagctgttacaaaagacaaatctttatctgcacaatttgaacatacgttaggaattacggaaaatggttatgaaatctttacagaatctgctaaaggttattcaaagcccccatatttataa

SEQ ID NO: 262243 - DNA, 831 bp, Unknown
  Bacterial polypeptide expressing nucleotide sequence isolated from the Sargasso Sea
tatgctaacagattatattaagcctggcatcacaacagaaaaaatagacctgctaggctatgaatatataaaagataacggaggctactcagcaccacaattttatagaggtttcaaaaaatcactttgtacatcacttaatcatgtagtttgtcatgggataccctctgatagagttttggaagatggggatataattaatgtagatataaccgcaatcgttaatgaatattatggcgatacaagtagaatgtttatgattggaaatccttctgttaaagcgaaaaatttaattgaaacaacttatgactcactaatgaaagcaattaaaattttaaaaccaggaattaaattaggagacattggaaatgaaattcaatcgcatgttgaagaaaaaggatattctgttgttagagacttttgtggtcatggaattagcaacacatttcatgaagctccaaacattcttcactacggtaaaaaaaatacaggtttagaactttaccctggcatgacgttcacaatagaaccaatgattaatgctggaaagtatgatgttaaaattttaaatgatggatggacagctgtaactaaagataagtctttatctgcacaatttgaacatactgtaggaataaccgaaaatggatatgaaattttcacagaatctgttaaaggatatagtaaaacccccttattaataatgattgatagatactccagaaaagaattaaaagccatttggtctgaagaaaataaatacaaaatctggttggatattgaagttgctgcagctgaagcaatggaaagtataaaattatcccaaaaggt

SEQ ID NO: 262244 - DNA, 560 bp, Unknown
  Bacterial polypeptide expressing nucleotide sequence isolated from the Sargasso Sea
agtttgtcatggtataccttcagaaaatagattcttggaagaaggagacgcggttaatgtcgacataactgcaattattaatgatcattatggtgataccagtagaatgttttgtattggaaaaaccggaataaaattaaataatctaatagatgccacttatgactctatgatgaaagcaattaaaattttaaaacctggaattaaacttggagatattgggcatgaaattcaatcttatgttgaagaaaagggtttttcagttgtaagagacttttgcggccatggaataagtacaacttttcatgaaccacctaatattttacattatggatctaaaaatacagggatggaaataaagccaggaatgacttttacaattgaacctatgatcaatgcaggtaaatttggaactaaaatgctaaatgatggatggactgcagtaacaaaagataaatctttatctgcacaatttgaacatacgataggaatcacagaaaatggttatgaaatctttacagaatctgataaaggttattcaaagcccccttatttataat

SEQ ID NO: 262245 - DNA, 580 bp, Unknown
  Bacterial polypeptide expressing nucleotide sequence isolated from the Sargasso Sea
tatgtacatctttaatcatgttgtttgtcacggtgtaccttctaaagataggattttagaagagggagacgcagtgaatgttgatgttaccgcaattgttaatgaatattatggagatactagtagaatgttttgtattggaaaaacttctgtgaagttaaataatctgattgacactacttatgattctatgatgaaagcaattaagattttaaaacctggaataaaactaggagatattggctatgaaattcaatcttatgttgaagaaaaaggattttcagtcgtaagagatttttgtggtcatggtataagcacaacattccatgagccaccaaatgtattacattacggaaacaaaaatacaggtaaagaattaacaccaggtatgacttttacaattgaaccaatgatcaatgctggaaaatatgatgttaaaatgcttaatgatggttggacagcagtaacaaaagataaatctttatcagcacaatttgaacatacaataggaattacagaaaatggttatgaaatctttacagaatctgctaaaggttatttaaagcccccatacttataa

SEQ ID NO: 262246 - DNA, 363 bp, Unknown
  Bacterial polypeptide expressing nucleotide sequence isolated from the Sargasso Sea
ctggaataaaactaggagatattggtcatgaaatacaatcatatgttgagaaagaaggtttttcagttgtaagagatttttgcggacacggtataagcactacctttcatgaaccgccaaatatattacactatggaaataaaaatactggcatggaattaaaacctggaatgacatttactattgaacctatgattaacgctggaaaatttagtgtcaaaatgcttaatgatgggtggacagcagtaacaaaagataaatctttatctgcacaatttgagcatacattaggaattacagaaaatggttatgaaatctttacagaatctgctaaaggttattctaaacctccgtacttataat

SEQ ID NO: 262247 - DNA, 769 bp, Unknown
  Bacterial polypeptide expressing nucleotide sequence isolated from the Sargasso Sea
atgactaaatataaagagaagtttgaaaaaatgagaattgccggaaatcttgcgtccagaactttagatatgttaacaggctttattaagcctggaatatcaactgataaaattgatcaactgggttttgaatttataaaggataacggcggacactcagctcctcagttttacagaggtttcaaaaaatcactctgtacatcattaaatcatgttgtttgtcatggaataccatctgatagaattgtggaagatggagatataataaatgtagatgttacagcaattgttaatgaatattatggtgatactagcagaatgtttatgattggaaatccctctgtaaaagcaaaaaatttaattgaaacaacatacaactcaatgatgaaagcaattcaaattttaaaacctggaattaaattaggagatattggaaatacaattcaatcatgtgttgaggaaaaaggttattcagttgtaagagatttttgtggtcatggaatcagtaacacatttcacgagtctccaaatattttgcattatggaaaaaaaaatacaggattagaagtttacactggaatgacatttacaatagaaccaatgataaatgctggaaaatatgatgttaaaattctaaaagatggctggactgccgttactaaagataggtctttatctgcacaatttgagcatacggtaggaataactgaaaatggatatgaaatttttacaaaatctgctaaagaatataacaaacccccttattaat

SEQ ID NO: 262248 - DNA, 671 bp, Unknown
  Bacterial polypeptide expressing nucleotide sequence isolated from the Sargasso Sea
tgctcatattgataaactaggatatgaattcattcgtgataatggaggatattctgctcctttatattatcgtggttttagtaaatctctttgtacttctctcaatcatgttgtgtgtcatggtattcccaccgaagatagaattttagaagaaggagatgcagtcaatgttgatattacagtaattaaaaatgagtatcatggagatactagtagaatgttttgtattggtaaaacaccggttaaactaaacaacttaattgatgctacatacgagtcgatgatgagagcgattaaaattttaaaacctggaataaagctaggagatattggatatgaaattcagtcatatgttgaggaaaaaggattttcagttgttagagatttttgtggtcatgggataggcaaagtttttcatcaacaaccaaacattttacattatggaaacaaaaatactggtgaacaattaattcctggaatgacttttacgattgagccaatgattaatgcaggaaaatatcataccaaaatgcttaatgatggttggaccgctgtaaccaaagacaaatctttatctgcacaatttgagcatacgataggaattacagaaaatggttatgaaatttttacagaatctgctaaaggttatttaaagcccccatatttataat

SEQ ID NO: 262249 - DNA, 583 bp, Unknown
  Bacterial polypeptide expressing nucleotide sequence isolated from the Sargasso Sea
tttatgtacatctcttaatcatgttgtatgtcatggtgtaccctcagaggacagaattttagttgatggtgatgctttaaatgttgatgtgactgctataattgatgatcattatggagatacaagtagaatgttttgtattggaaaaacatctgtaaaattaaataatctaattgatgcaacctaccaatcaatgatgaaagcaataaaaatcctgaaacctggaatcaaattaggtgatataggacatgagatacaatcttttattgaagaaaaaggattctctgtggtaaaagatttttgtggtcatggtataagtacccaatttcatgaaccaccaaacattttacactatggaacaaaaaacacaggtatggaattaaaacctggaatgacattcacaatagaaccaatgattaatgctggtaaatttaacgtaaaaatgcttaatgatgggtggactgcagttacaaaagacaaatctttatctgcacaatttgagcatacagttggaattactgaaaatggttatgaaatatttacagaatctgctaaaggttattcaaagcctccgtacttataa

SEQ ID NO: 262250 - DNA, 718 bp, Unknown
  Bacterial polypeptide expressing nucleotide sequence isolated from the Sargasso Sea
atgagtaattattcagaaaaatttgaaaaaatgagaattgctgggaaacttgcatctagaactttagatatgttaacagatgaagtaaaggcaggtatcacaacagataaaattgatcaattaggttatgagtttataagagacaatggtggacactctgctccactatactacagaggttttaaaaaatctttatgtacatctttaaaccatgttgtttgtcatggtattccttctgatagagttttgaatgagggagatgctgttaatatagatgtaacagcaataattaatgagtactacggtgacacaagtagaatgtttaccattggggaaataccagtaaaagctaaaaacttaatagaaacaacttacgagtctatgatgaaaggaattgaaattctaaaaccaggaataaaattaggagacataggctatgaaattcaatcctttgttgaacaaagaggtttttcagttgttagagacttttgtggtcacggtattagcaatacttttcatgaacaacctaatattcttcattatggtaagaaaaatacaggtcatgaagtaacacctggtatgacatttacaatagaacctatgataaatgttggtaaattagatgtaaaagtccttaatgatggatggacagcagtaacaaaggacaagtctttatctgcacaatttgagcatacaataggaataacagaagactctt

SEQ ID NO: 262251 - DNA, 717 bp, Unknown
  Bacterial polypeptide expressing nucleotide sequence isolated from the Sargasso Sea
gatgaataaaaattatttagaaaaatttgaaaaaatgaaagttgctggaaaattagcttcaagcacacttgatatgttaactaattatataaaacctggagtttccactgaaaaaattgatcagttaggttatgaatttataaaggataataatgggtattctgcaccacagttttatagaggattcaaaaaatctttatgtacatcattaaatcatgtcgtttgccatggtattcctggtgacagaattttagatgaaggtgatattgttaatgttgatgtaacagccatcataaatggtcattacggggacactagtagaatgttttgtattggagaagtttctgttaaagcaaaaaacttgattgagaccacttacaactcaatgatgaaagcaatagaaattcttaaaccaggtataaaacttggagatattggctatacaattcaatcttatgttgaggaaaaaggtttctcagttgtaaaagatttttgtggtcatgggataagtacaaaatttcatgaaccgccaaacatactacactatggaaaaaaaaataccggtattgaaatacaaccaggaatgactttcacaatagaaccaatgataaatgcaggcaaatatgatgttaaagtacttgatgatggttggacagctgtaacaaaagataaaacactatcagcacagtttgaacatacattgggtataactgaaaa

SEQ ID NO: 262252 - DNA, 739 bp, Unknown
  Bacterial polypeptide expressing nucleotide sequence isolated from the Sargasso Sea
gatgagtaattatttagaaaaatttgaaaagatgagggttgcaggaaaacttgcatctcaaactttagatatgcttacaggttttgtaaaacctggtatatcaacagataaaattgatcaattaggttacgaatttataaacgacaatggtggacattcagctccactttattatagaggtttcaaaaaatctttatgtacatctttaaaccatgttgtttgtcacggaataccatctgacagagtattaattgatggagacatagtaaatatagatgttacagcaatagttaatgaatattatggtgatacaagtagaatgttcaccatcggtgagatctcaataaaagctaaaaacttaattgatgctacttacgaatcaatgatgaaatctataaatattcttaaacctgggattaaacttggtgatataggatttgaaattcaatcttatgttgaaagcaaaggtttttcagttgttagagatttttgtggacatggaattagtaatacttttcatgagtctcctaatgttcttcattatggaaaaaaaaatactggtattgaattaaaacctggaatgacttttacaatagagcctatgataaatgccggtaaacttgatgtaaaagttctaaatgatgggtggacagctgttacaaaagacaaatcattatcagcacaatttgagcatactataggaataacagaagattcttatgaaatttttacagaatct

SEQ ID NO: 262253 - DNA, 652 bp, Unknown
  Bacterial polypeptide expressing nucleotide sequence isolated from the Sargasso Sea
actttgctatgaattcataagagataatggtggatactctgcgcctcaattctatagaggatttgaaaaatcaatttgcacttcgcttaatcatgttgtttgtcacggtatacctggtgacagaacacttcaagatggagatattgttaatatagatgtaaccgctataattaatgatcactatggggacacgagtagaatgtatactgttggggatatttctataaaatcaaaaaaactgattaatgttacttatgaatctcttaacagggcaattaagatattaaagcctggaaaaagaattggtgatattggtcatgagatacaatcttttgtagaaaaaaatggtttttcagttgtaagagatttttgtggtcacggaataggtacaaactttcatcaagaaccaaatattcttcactatggttcgaaagatactggggatgaattaaaaccaggtatgacttttactattgagccaatgataaatgctggaaagtatcacactaaagttttaaatgatggttggacagcagttacaaaagataaaacattatctgcacaatttgagcatactgtaggaattactgaaaatggttatgaaatttttacagaatctgctaaaggttataaggagcctccttacaattaa

SEQ ID NO: 262254 - DNA, 706 bp, Unknown
  Bacterial polypeptide expressing nucleotide sequence isolated from the Sargasso Sea
gatatgttaacagaaaatattaaaccaggcatttctacagattatatcgacaaattatcatatgaatttataagagataatggtggttactcagccccattattttataggggatttaaaaaatcattgtgcacttctttaaatcatgtcgtatgccatggtgtaccttctgatcgggttttaaatgagggagatgctttaaatatagatgtaacagcaattatcaatgattactatggagatacaagtagaatgttctgcgttggcaaaacaccagtaaaactaaataatttaattaatacaacttatgaagctatgataagagcaattaaaattttaaaaccaggtataaaattaggagatataggttttgaaattcaatcttttgtagaaaaaaatggtttctcagttgttagggatttttgtggtcatggaattagcaatacttttcatgagcttccaaatgttttacattatggtaaaaaaaatactggaatggagttaagaccaggaatgacttttacaatagaaccaatgattaatgctggaaaatatgatgttaaagttcttgccgatggatggacagcagtaacaaaagataaatcattatctgcacaatttgaacatacaataggaattactgaaaatggttatgaaatctttacagaatctgttaaaggttattctaagcctccttacttataat

SEQ ID NO: 262255 - DNA, 775 bp, Unknown
  Bacterial polypeptide expressing nucleotide sequence isolated from the Sargasso Sea
aatgagtaactattcagaaaaatttgaaaaaatgagagttgcaggaaaacttgccgctcgaacattagatatgcttactgaaaatattaaagagggaatttcaaccgcttatattgataaacttggatatgagtttattcgtgataacggaggatattcagctcctttatattatcggggttttcaaaagtctctatgtacatctttaaatcatgtcgtctgccatggtattccatctgaggatagaattttagaagaaggagatgctgttaatgttgatgtgactgcaataattaatgaacattatggagatactagtagaatgttttgtatcgggaaaacttcaattaaattaaataatcttattgaaacaacatatgagtctatgatgagagctataaaaatattaaaacctggaattaaacttggtgatattggacacacaattcaatcttatgttgaagaaagaggtttttctgtagtgagagatttttgtggtcatggaataagtacaacttttcatgagcctccaaatattttacattatggagccaaaaatactggaatggaattaaaacctggaatgacttttacaattgagccaatgattaatgctggaaaattcgaagtaaaaatgcttaatgatggttggacagcagtcacaaaagataaatctttgtctgcgcaatttgaacatacaataggaattacagaaaatggttatgaaatctttacagaatctgctaaaggttattctaagcctccatacttataa

SEQ ID NO: 262256 - DNA, 580 bp, Unknown
  Bacterial polypeptide expressing nucleotide sequence isolated from the Sargasso Sea
ttatgtacttcattaaatcatgttgtgtgtcatggaattccttcggatagagttttaagagatggtgatgccgtaaatgttgatgtcactgcaattgtagatgaacattatggtgataccagtagaatgttttgcattggcaaaacaccaattaaattaaataatctaatagatgcaacatatgagtctatgatgagagcaattaaaattttaaaaccaggaattaaattaggtgatattggttacgtaattcaatcatttgctgaagaaaaaggatactctgttgttagagatttttgtggtcacggtataagtacaacatttcatgaaccaccaaacattttacattatggaaataaaaactcaggactagagttaaaacctggaatgacttttacaatagagcctatgataaattcaggtaaatatgatgttaaaatgttaaatgatggttggactgctgtcacaaaagataaatctttatcagctcaatttgaacatacgttaggaattactgaaaatggttatgaaatctttacagaatctgctaaaggttattcaaagcctccatacttataac

SEQ ID NO: 262257 - DNA, 642 bp, Unknown
  Bacterial polypeptide expressing nucleotide sequence isolated from the Sargasso Sea
aatttataagagataacggcggatactctgcgcctctttattatagaggttataaaaaatctttgtgcacatctttaaaccatactgtttgtcatggaataccatccgaaagaattttaaatagtagtgatgttttaaacattgatgttacagcgattgtaaatgaatatcatggtgatactagtagaatgttttacgtaggtgaagcacctataaaagctaaaaacttaattgaagctacttatcagtcaatgatgagggcaataaaaattctaaagcctggaataaaaattggtgacattggaaatgaaatacagtcatatgtggaaaccaaggggtactcagttgtaagagatttttgtggacatggtataagtaatgtttttcatgaagcacccaatatattgcactatggtaaaaaaaataccggcatagatttatttcctggaatgacatttacaatagaaccaatgattaatgcgggaaaatttgatgttaaaattcttaatgatggttggacagctgtaactaaggacaaatctttatctgcacaatttgaacatacagttggtataactgaaaatggttatgaaatttttacagaatctgttaaaggcttgcataagcctccttataactaat

SEQ ID NO: 262258 - DNA, 778 bp, Unknown
  Bacterial polypeptide expressing nucleotide sequence isolated from the Sargasso Sea
gatgaaaaaaaattattctgaaaaatttgaaaaaatgaggctagcaggaaatcttgcctcaaaaactttagatatgattactgaccacgtaaaaccaaatatagatacaaataaaattgataaattatgctatgaatttattagagataatggtggatattcagcacctctattttatcgtggatttacaaaatcgttatgtacttctttaaaccatgtagtttgtcatggcattccttcagaaagaattttggatgacggagacattttaaacatagatgttactgcaatagtagaaggttaccacggggacacgagtagaatgttctatgttggtgaagtacccgttaaagcaaaaaaattagttgatactacctatcaatcgatgatgaacgcaattaaaatattgaaacctgggataaagcttggtgatataggttatgaaattcaaagccacgttgaaaaaaatggattttctgtagtaagagatttttgtggacatggtgtaagtaacgtttttcatgaaccaccaaacattttgcattatgggaaaaaaaacactggtcaagaaattcaacctggtatgacttttacaattgaacctatgattaatgctggaaagtatgatgtaaaagttttgaatgatgggtggacagcagtaacaaaagacaaatctttatctgcacaatttgaacatacaattggtatttctgaagatggttatgaaatatttacagaatctgttaaaggttataataaacctccttataataattaa

SEQ ID NO: 262259 - DNA, 739 bp, Unknown
  Bacterial polypeptide expressing nucleotide sequence isolated from the Sargasso Sea
gatgagtaattataaagaaaaatttgaaaaaatgagagttgctggtgatttagcagcaaggacacttgatatgttaactgataacattaaggaaggtatctccacagactatatagataaattgggatatgagtttataagagataacggaggacactctgctccactttactatagaggttttacaaaatctttatgtacttcattaaatcatgttgtatgtcatggaattccttcagatagagttttaagagatggtgatgcggtaaatgttgatattactgcaattgtagatgaacattatggtgataccagtagaatgttttgcatcggtaaaacacctattaaattaaacaacctaatagatactacttacgagtcaatgatgagagcaattagaattttaaagccaggaattaaattaggtgatattggttacgaaattcaatcatttgttgaagaaaaaggatactctgttgttagagatttttgtgggcacggtattagtacaacatttcatgaaccaccaaacattttacattatggcagtaaaaactcaggaccagagttaaaacctggaatgacttttacaatagagcctatgataaattcaggtaaatatgatgttaaaatgttaaatgatggttggactgctgtcacaaaagataaatctttatcagctcaatttgaacatacgttaggaattactgaaaatggttatgaaatctttacagaatct

SEQ ID NO: 262260 - DNA, 589 bp, Unknown
  Bacterial polypeptide expressing nucleotide sequence isolated from the Sargasso Sea
tacaaaatccttatgcacatctttaaatcatgttgtgtgtcatggaataccttctgatagaattttacaagaaggtgatgcaattaatgtagatgtaacagcaattgtggatgagcactacggggatactagcaggatgttttgtattggaaaaaccccagtaaagttaaacaatcttatagatgccacttatgaatctatgatgaaggcaattaaaattttaaaacctggaattaaattaggagatattggtcatgaaattcaaacttttatagaagaaaaaggtttttcagtcgttagagatttttgtggtcacggaataagtactacatttcatgaggcaccaaatattcttcactacggtagaaaaaatactggtatggaactaagacctggtatgacatttactatagagcctatgataaatgctggtaaatatgatgttaaaatgttgaatgatggttggacagctgttacaaaagataaatctttatctgcacaatttgaacatacgttaggaattactgaaaatggttatgaaatctttacagaatctgctaaaggttattcaaagcctccatatttataa

SEQ ID NO: 262261 - DNA, 637 bp, Unknown
  Bacterial polypeptide expressing nucleotide sequence isolated from the Sargasso Sea
gatgaataattattccgaaaaatttgaaaaaatgagagatgcaggaaatcttgcgtctagaactttagatatgttaactgaatatattaaggctggaatacaaacaaagaaaatagatcagctagcttatgaatttataaaagataatgacggatactcagcaccacagttttatagaggttttaaaaaatccctttgtacttcattaaatcatgttgtttgtcatgggattccttctgatcgagttttagaagacggtgatgtaataaatgttgatgtaactgcggttgttagtgaatactatggtgatacaagtagaatgtatattattggaaatacttcggttaaagcaagaaatttgatcgagacaacgtatgagtcaatgatgagagcaattaaaatcttaaagcctggaataaaattaggagatattggaaatgaaattcaaacttatgttgaaaaaaatggttattctgttgtaagagatttttgcggacatggaattagcaatacatttcatgagtcaccgaatattcttcattatggaaagaaaaatacaggtttggaattatgcccaggaatgacttttacaattgaaccaatgataaatgcaggaaagtacgacgtaaagatttaa

SEQ ID NO: 262262 - DNA, 658 bp, Unknown
  Bacterial polypeptide expressing nucleotide sequence isolated from the Sargasso Sea
cgacaactaggttatgaatttataagagacaatggaggctactctgcgccactatattatagagggtttgcaaaatctttatgtacttctttaaaccatgttgtatgtcatggaataccctctgatagaattttacaagaaggtgatgctataaacgttgatgtgactgcaattgttgatgagcattatggggatacaagcagaatgttttgtattggaaaaactccagttaagttaaacaatcttatagatactacttacgagtctatgatgagagctattaaaattttaaagcctggaattaaattgggtgacattgggtttgaaattcaatcttttgtagaagaaaaaggtttttcagttgttagagacttttgtggtcacggaataagcacaacatttcatgagccaccaaatattttacactacggtaaaaaaaatacaggcatggaattaagacctggtatgacatttacgatagaaccaatgataaatgctggtaaatatgatgtaaaaatgttgaatgatggttggacagctgttacaaaagataaatctttatctgcacaatttgaacatacgttaggaattactgaaaatggttatgaaatctttacagaatctgctaaaggttatttaaagcctccatacttataat

SEQ ID NO: 262263 - DNA, 547 bp, Unknown
  Bacterial polypeptide expressing nucleotide sequence isolated from the Sargasso Sea
ggaatactttctgaaagaattttaaatgatggagatattttaaatattgatgttacggccattgttgatggttattacggggatactagtagaatgttttctgcaggaaaggttccagttaaagctatgaatctaatagaagcaacatatcaatcaatgatgaatgcaattaaaatattgaaaccaggaattaaacttggagatataggttttgaaatacaatcttatgtcgaaaataaaggttattcagttgtaagagatttttgtggccacggtataagtaatgtttttcacgaggcgccaaatatattgcactatggaaaaaaaaatactggtatagaattagttccaggaatgacatttacaattgaaccaatgattaatgcaggtaaatttgaaacaaaagttcttaatgatggatggacagcagttactaaagataaatcattatctgcacagtttgaacatacattaggtataactgaaaatggttatgaaatttttacagaatctgttaaaagtttacataaacctccttataattaat

SEQ ID NO: 262264 - DNA, 434 bp, Unknown
  Bacterial polypeptide expressing nucleotide sequence isolated from the Sargasso Sea
ttctgtcaaacttaataatcttataaatactacatacgaatctatgatgagagcaattaaaattttaaaacctggaattaagttaggtgatattggatatgaaattcaatcttatgttgaggaaaaaggtttttcagttgtaaaagatttttgtggccatggagttagtacaaaatttcatgaaccaccaaatatattgcactatggaactaaaaatactggtatggaactaaaacctggtatgacttttacaattgaaccaatgatcaatgctggaaaatttgatgtaaaaatgcttaatgatggttggactgcagttacaaaagataaatctttatctgcacaatttgagcacacaataggaattacagaaaatggttatgaaatctttacaaaatctgttaaaggttattcaaagcctccatacttataat

SEQ ID NO: 262265 - DNA, 606 bp, Unknown
  Bacterial polypeptide expressing nucleotide sequence isolated from the Sargasso Sea
tatattataggggatttgaaaaatctctatgtacatctttaaatcatgtgatttgccatggaattccaggagaaagaatacttgaggagggtgatattttaaatgttgatgtaactgctgttgttgatggtttctacggcgacacaagcagaatgtattcaattggaaaaatatcggtcaaagctcaaaaccttattgatgcaacttatgagtctttgatgagatctatcaaaattttaaaacctggaattaaactcggagatataggaaatgaaatacaaacttatgttgaagacaaaggtttttccgttgtaagagatttttgtggtcatggtattagtgataaatttcacgaaccaccaaatattcttcattatggaaaaaagaatattggtaccacattaacacctgggatgacttttacaatagagccaatgattaattcaggcaaattcgatgtgaaaattttagatgatggttggactgcagtttcaaaagataagtctttatctgcacaatttgaacatactgttggtataaaagataatggttatgaaatttttacagaatctgttaaaggttatttaaagcctccatataattaat

SEQ ID NO: 262266 - DNA, 645 bp, Unknown
  Bacterial polypeptide expressing nucleotide sequence isolated from the Sargasso Sea
aatatattaaagataatggtggatattctgctcccctatattacaggggatttgaaaaatcttcgtgtacatccttaaatcatgtaatttgtcacggtattccatcagatagagaacttgaggaaaatgatattttaaatattgatgttacatcaatagtggatgattattatggtgatacaagcaggatgtttactgttggtgaaatttctataaaagcaaaaaatttgatagatgttacttatgattcattaatgaatgctacaaaaattctaaagccaggtatcaaattaggagatattggacatgaaattcaatcttatgttgaggcaaaaggttttagtgttgtaagagatttttgtggacatggaattagtaatatatttcacgaaccaccaaatgttcttcattatggaaaaaaaaatactggaagtgaattacaacctgggatgacttttacaattgagcctatgataaattcaggaaaatatgatgccaaagttcttaaagatggatggacagctgttacaaaagataaatctttatctgcacaatttgagcatacagtaggaataaccgaaaatggttatgaaattttcacagaatctgttaaaggttataaaaagcccccatataataaatgat

SEQ ID NO: 262267 - DNA, 548 bp, Unknown
  Bacterial polypeptide expressing nucleotide sequence isolated from the Sargasso Sea
cggaataccctcagatagaattttacatgaaggtgatgctgtaaatgttgatgtcacagcaattgttgatgagcattacggagatacaagtagaatgttttgcattggaaaaactcctgttaagttaaacaatcttatagatgctacttatgaatctatgatgagagcaattaaaattttaaaacctggaattaaattaggagatattggttatgaaattcaatcttttgtagaagaaaaaggattttcagtcgtcagagatttttgtggtcacggaataagtacaacatttcatgagccaccaaatattttacactatggtaaaaaaaatacaggcatggaattaagacctggtatgacatttacaatagaaccaatgataaacgcaggtaaatacgatgtaaaaatgctaaatgatggatggacagctgttacaaaagacaaatctttatctgcacaatttgaacatacactaggaattactgaaaatggttatgaaatctttacagaatctgctaaaggttactcaaagcccccatacttataat

SEQ ID NO: 262268 - DNA, 769 bp, Unknown
  Bacterial polypeptide expressing nucleotide sequence isolated from the Sargasso Sea
catgattaaatataaagaaaaatttgagaagatgagagttgcgggagaacttgcatctaaaacactagatatgttaactgaatatataaaacctggaatttctacagataaaatagatcaactagcttttagtttcattaaagacaatggtggatattcagccccacaattctaccgtggttttaaaaaatcactttgtacatctttaaaccatgtagtctgtcatgggataccatctgaccgagttttagaagatggcgatgttattaacatagatgtgactgcagtagttaacgaatattatggagacacaagtagaatgtttgtgattggaaattcctctattaaagcaaataatttggttgatgctacttatgaggccatgatgaaagctataaaaattttaaaacctggcatcaaattaggagatataggctatgaaattcaaactttcgttgaaggaaaaggatattcagttgttagggatttttgtggtcatggaataagcaatacatttcatgagtcacctaatatcttacattatggaaaaaaaaatacaggtttagaaatttaccctggtatgacatttacaattgaaccaatgatcaatgctggaaaatttgacgtaaaaattttaaatgatggatggacagctgttactaaagataagtctttatcagcacaatttgaacatactgtaggaattactgaaaatggatatgaaatttttacagaatctggtaaaggatataataaacccccctattaa

SEQ ID NO: 262269 - DNA, 775 bp, Unknown
  Bacterial polypeptide expressing nucleotide sequence isolated from the Sargasso Sea
atgagtgagtattctgaaaaatttgaaaaaatgcgggtagctggaaaactggctgctcaaaccttagatatgttaactgaatatattaaagaaggtatttcaactaattacatagataaacttggttacgaatatattagagataatggaggctactctgccccacttttttaccggggatttaaaaaatctttgtgtacatcactaaatcatgttgtatgtcacggaattcccactgaagatagaattttagaagaaggtgatgcacttaatgtagatgtcactgctattatcaatgaacattatggtgatacaagtagaatgttttgtattggtaaaacttctgtaaaactaaataacttaatagaaacaacttatgaatcaatgatgagagcaatcaaaatattgaaaccgggtattaaacttggggatataggtaatgaaattcaaacgtatgttgaagaaaaaggtttttcggttgtaagagatttttgcggccatggaattagcacaacttttcatgagtcaccaaatatattacactatggaagtaaaaatactggaattgagcttaaaccaggaatgacttttacaattgaacctatgatcaatgcaggaaaatttgatgttaaaatgttaaatgatggttggactgctgtaactaaagataaatctttatcagcgcaatttgaacatactttaggaattacggaaaatggttatgaaatctttacagaatctgctaaaggatattctaaaccaccatataattaat

SEQ ID NO: 262270 - DNA, 772 bp, Unknown
  Bacterial polypeptide expressing nucleotide sequence isolated from the Sargasso Sea
atgactgactacaaagaaaaatttgaaaaaatgagaattgcaggaaatttggctgcaagaactttagacatgttaactgataacttaaaagaaggtgtctctacagattatatagataaaataggttatgagtttataagagataatggcggttactctgcaccactttattatagaggttttaataaatctttatgtacatctttgaatcatgttgtgtgtcacggaattccatcagacagaattttaagagatggggatgctgtcaatgttgatgttacagctattgtagacgaacattatggagacactagcagaatgttttgtattggaaaaacttcagtaaaattacaaaatcttattgatgcaacttatgagtcaatgattagagcaataaaaatattaagacctggaattaaattaggagatattggttatgaaattcaatcttttgttgaagaaaaaggtttttctgtagtaagagatttttgtggacatggcataagtacttcatttcatgaaccaccaaatattctacattatggaaaaaaaaatacaggcatggatttaaagcctggtatgacatttactattgaacccatgattaatgcgggtaaatatgatgttaaaatgttaaatgatggttggacagctgttacaaaagataaatctttatcagcacaatttgagcatactttgggaattactgaaaatggttatgaaatctttacagaatctgctaaaggttattcaaagcctccatacttataat

SEQ ID NO: 262271 - DNA, 775 bp, Unknown
  Bacterial polypeptide expressing nucleotide sequence isolated from the Sargasso Sea
aatggttagtaattattcagaaaaatttgaaaagatgagaattgcaggaaaattagctgccaaaactttggatatgttaacagattttataaaacctggaataacaactgataaaatagatcaattaagttacgaatttataaaagataacggaggttactcagctccacaatattacagagggtttaaaaaatctctttgcacatctttaaatcatgtagtttgtcatggcataccctcggaaagaatactagaggatggcgatgctgttaatgttgacgttacagcaattgttaatgaattttacggtgatacaagcagaatgttttatgttggtgatatatctataaaagctaaaaatttgattgatgtaacatatgaatctatgatgaaaggtattaaaattttaaaaccaggaataaaacttggtgatattggttatgaaatccaatcatatgtcgaagaaaaaggcttttctgttgttaaagatttttgtggacacggtataagtaacaaatttcatgaatctcctaatattttacattatggaaaaaaaaatacgggtcttgaattaaaaccaggcatgacctttactatagaacctatgataaatgctggaaaatttgatgtaaaaattttaaatgacggatggacagcagttacaaaagataaatctttatctgcacaatttgagcatacattaggtataacagaagattcttatgaaatttttaccgaatctgataaagaatatagaaagcctccatataattaa

SEQ ID NO: 262272 - DNA, 772 bp, Unknown
  Bacterial polypeptide expressing nucleotide sequence isolated from the Sargasso Sea
atgactgattataaagaaaaatttgaaaaaatgagaattgcaggaaacttagctgccagaactttagatatgttgactgaaaatattaaagaaggtgtttcaactgatcatatcgataaattaggttatgaatttataaaagacaatggaggttactcggcgccactctactatagaggatttacaaaatctttatgtacttctttaaatcatgttgtgtgtcatggcataccatctgatagaattttacaagaaggtgatgcagtaaacgtagatgtaacagcaattgttgataaacattatggtgatacaagcaggatgttttgtattggaaaaaccccagtaaagttaaacaatcttatagatgctacatacgagtctatgatgagagcaattaaaattttaaaacctggaattaaattaggggatattggttatgaaattcaatcttatgtagaagaaaaaggattttcagttgtcagagatttttgtggtcacggaattagtacaacttttcatgaaccaccaaatattttacattatggaaataaaaatactggcatggaacttaggcctggaatgacatttactatagaaccaatgattaattcaggtaaatatgatgttaaaatgttaaatgatgggtggacagctgttacaaaagataaatctttatctgcacaatttgaacatacgttaggaattacggaaaatggttatgaaatctttacagaatctgctaaaggttattcaaagcctccatacttataat

SEQ ID NO: 262273 - DNA, 745 bp, Unknown
  Bacterial polypeptide expressing nucleotide sequence isolated from the Sargasso Sea
atgactgattataaagagaaatttgaaaaaatgagagttgcaggaaatttagctgcaagaactttagatatgttaactgaaaatattaaagaaggtatctcaactgattatattgataagctaggatacgaatttataagagataatggtggttactcagctccactatattatagaggattttcaaaatctttatgcacatctttaaaccatgtagtgtgtcatggaataccttctgatagaattttacaagaaggtgacgctgtaaatgttgatgtgacagcaatcgttgataaacattatggtgatacaagtagaatgttttgtataggaaaaactcctgtgaagttaaataatcttattgaaacaacttacgaatctatgatgaaagctattagtattttaaaacctggaataaaattaggagatattggttatgagatacaatcttttgtggaagaaaaaggtttttcagttgtaagagatttttgtggtcatggaataagtacaacatttcacgagtcaccaaatattttacattacggtcaaaaaaatacaggcatggaattaaaacctggtatgacatttacaatagaaccaatgattaattcaggtaaatatgatgtaaaaatgttgaatgatggttggacagctgttacaaaagataaatctttatctgcacaatttgaacatacgttaggaattactgaaaatggttatgaaatctttacagaatctgctaaag

SEQ ID NO: 262274 - DNA, 772 bp, Unknown
  Bacterial polypeptide expressing nucleotide sequence isolated from the Sargasso Sea
atgactgattacaaagaaaaatttgaaaaaatgagaattgcaggaaatttagctgcaagaactttggacatgttaactgataacataaaagaaggcgtctctacagattatatagataaaataggttatgagtttataagagataacggtggtcactctgcaccactttattatagaggttttaataaatctttatgtacttcattgaatcatgtggtgtgccacggaattccgtcagacagaattttaagagatggtgatgctgtcaatgttgatgttacagctattgtaaacgaacattatggagatactagtagaatgttttctataggaaaaactccagtaaaattacaaaatctcattgatgcaacttatgagtcaatgattagagcaataaaaatattaaagccaggaattaagttgggagatattggttatgaaattcaatcttttgttgaagaaaaaggtttttctgtagtaagggatttttgtggacatggtatcagtacaacatttcatgaaccgccaaatattttacattatggaaaaaaaaatacaggcatggatttaaagcctggtatgacatttactattgaacccatgattaatgcaggcaaatatgatgttaaaatgttaaatgatggttggacagctgttacaaaagataaatctttatcagcacaatttgagcatacgttaggaattactgaaaatggttatgaaatctttacagaatctgctaaaggttattcaaagcctccatacttataat

SEQ ID NO: 262275 - DNA, 775 bp, Unknown
  Bacterial polypeptide expressing nucleotide sequence isolated from the Sargasso Sea
atgagtgattattcagaaaaatttgaaaaaatgaaaattgctgggagacttgcagcacaaactttggatatgcttactgataatattaaggagggtatttcaacagctgctatagataaattaggttatgagtttattagagataatggtggctactctgctccactatattatagaggatttaaaaaatctttatgcacatctcttaatcatgttgtttgccacggtattccatctaaggaaagaattttagaagatggagatgctgtgaatgttgatgtaactgcaattattaatgatcattatggtgatactagtagaatgttttgtattggaaaaacttctgtgaaattgaataatttagttaatgctacatatgagtccatgataaaagcaattaagattttaagacccggaaaaaagcttggagacattggttatgaaattcaatcatatgtggaggagagaggtttttcagtagtaagagatttttgtggacatggtataggaaatgtttttcatgagtctccgaatattttacattacggcaaaaaaaatacaggaattgaactaaagcctgggatgacatttactatagaaccaatgatcaatgcaggtaaatttgatactaaagtacttaatgatggttggacggcagtcactaaggacaaatctttatcagcacaatttgaacatacagtaggaattacggaaaatggttatgaaatttttacagaatctgataagggttatacaaagcctccatatatataat

SEQ ID NO: 262276 - DNA, 775 bp, Unknown
  Bacterial polypeptide expressing nucleotide sequence isolated from the Sargasso Sea
gatgaataattattctgaaaaatttgaaaaaatgagaatagctggaaatttagctgctcgtactttagatatgttaacagatttcataaaacctggaatcaaaacagattatatagataagctagcttacgaatttataaaagatagtggaggatattcggcacctcttttttacagagggtttaaaaaatctttgtgcacatctctaaatcatgttgtgtgtcatggaattccatctgatagaactttagaggatggcgatatagtgaatattgatgtaacagcaattattaataatcattacggagatacaagtagaatgttttgtattggaaagacacctgtaaaagcaaataatttaatagaaataacttataactctatgatgagggcaattagaattttgaaacctggaataaaacttggagatataggcaatgaaatccaaacttatgtagaagaaaatggtttttctgttgttaaagatttttgtggtcatggaataagcactgtatttcatgaagcgccaaatattcttcattatggtaaaaaaaataccggaagtgagcttgaaactggtatgacttttacaattgagcccatgattaatgcaggaaagtatgatgtgaaagttttagccgatggatggaccgctgttacaaaagataaatctttatctgcacaatttgaacataccgtgggaattacagaaaatggttatgaaatttttacagaatctgctaaaggttattctaagcctccatataataattaa

SEQ ID NO: 262277 - DNA, 772 bp, Unknown
  Bacterial polypeptide expressing nucleotide sequence isolated from the Sargasso Sea
atgagtgattataaagaaaaattcgaaaaaatgaaagttgcaggtaatctcgcggctagaactctagatatgttaactgaaaatataaaagaaggtgtaagtacagattatattgataaattgggttatgagtttataagagataatggaggctactccgctccgctatattatagaggtttcacaaaatcactatgtacatctctaaatcatgttgtctgccatggtataccttctgatagaattttaagagatggtgatgcagtgaatgttgatataactgcaattgttgatgaacattatggtgacactagtagaatgttttgcattggcaaaactcctgtaaaactaaataacttaatcgaaacaacttacgagtcgatgatgagagcaattaaaattttaaaaccaggaataaaattaggtgatattggatatacaattcagtcatttgttgaagaaaaaggtttttctgtagtaagagatttttgtggtcatggaattagcacaacatttcatgagtcaccaaatattttacattatggaagtaaaaatacaggtatggaacttagacctggtatgacatttactattgaacctatgatcaattcaggaaaatatgatgtaaagatgttaaatgatggctggacagcagttacaaaagataaatctttatctgctcaatttgaacataccctaggaattactgaaaatggttatgaaatctttacagaatctgctaaaggttatttaaagcctccatacttataat

SEQ ID NO: 262278 - DNA, 772 bp, Unknown
  Bacterial polypeptide expressing nucleotide sequence isolated from the Sargasso Sea
atgagtaattattctgaaaaatttgaaaaaatgcgaattgcagggaaacttgcatctaaaaccttagatatgttaactgatgaagtgaaagaaggcatatcaacagataaaatagatcaattaggatacgaatttataagagacaatggtggtcactctgctccactttattatcgtggttttaaaaaatcactatgtacatctttaaaccatgttgtttgccacggtattccatctgatagagttttaattgaaggtgatgctgtaaatattgatgtcactgcagtagtcaatgaatactatggtgacactagtcgtatgtttactataggagatataccagtaaaggcaaaaaatttaattgatacaacttacgagtccatgatgagaggaattgaaatattaaaaccagggataaaattaggtgacattggatatgaaattcaatcctatgttgaacaaagaggtttttcagtagtaagagatttttgtggacatggtattagtaatacttttcatgaacctcctaatattcttcattatggtaagaaaaatactggtcatgaattaacacctggcatgacatttacaatagagccaatgataaatgtgggtaaattagatgttaaagtgctaaatgatggatggaccgcagttacaaaggataagtctttatcagcacaatttgagcatacaataggaattacagaagactcttatgaaatttttacagaatctgttaaaggttataagaggcccccatataattaat

SEQ ID NO: 262279 - DNA, 772 bp, Unknown
  Bacterial polypeptide expressing nucleotide sequence isolated from the Sargasso Sea
gatgaataaaaattatttagaaaaatttgaaaaaatgaaagttgctggaaaattagtttcaagtacacttgatatgctaactgattatataaaacctggagtctctactgaaaaaatagatcaattaggttatgaatttataaaggacaataatgggtattctgcaccacagttttacaggggatttaaaaaatctttatgtacatcattaaatcatgtcgtttgtcacggtattcctggtgaaagaattttagatgaaggtgatattattaatgtcgatgtaacggctatcataaatggtcattacggggatactagtagaatgttttctattggagaagtttctgttaaagcaaaaaacttaattgagactacttataattcaatgatgagagctatagaaattttaaagcctggaattaaacttggggatataggtcacacaatacaatcttatgtcgaggaaaaaggtttttcagttgtaaaagatttttgtggtcatggaattagtactagatttcatgaggcaccaaatatattgcactatggaaaaaaaaatacaggtattgaattacaaccaggtatgacttttacaatagaaccgatgataaatgttggcaaatatgacgttaaagtccttgatgatggttggactgctgttacaaaagataaaactttatctgcacagtttgaacataccttgggtataactgaaaatggatatgaaatttttacagaatctgttaaaggttatagtaagcctccatattaa

SEQ ID NO: 262280 - DNA, 772 bp, Unknown
  Bacterial polypeptide expressing nucleotide sequence isolated from the Sargasso Sea
atgagtgattataaagaaaaattcgaaaagatgaaagtcgcaggtaatcttgcagcaagaaccttggatatgttaacggaaaatattaaagaaggtgtaagcacagactatattgataaattgggatatgagttcataagagataatggaggctactccgctccactttattatagaggattcacaaaatcactatgtacatctctaaatcatgttgtctgtcatggtataccttccgatagaattttgagagatggtgatgcagtcaatgtggatgtaactgcaattgttgatgagcattatggtgacaccagtagaatgttttgcattggcaaaactccagtgaaactaaataacttaatcgaaacaacttacgagtcgatgatgagagcaattaaaattttaaaaccaggaattaaattaggtgatattggatacacaattcagtcatttgttgaagaaaaaggtttttctgtagtaagagatttttgtggtcatggaattagcacaacatttcatgagtcaccaaatattttacattatggaagtaaaaatacaggcatggaactgagacctggaatgacttttactattgaacctatgatcaattcaggaaaatatgatgtaaagatgttaaacgacggctggactgcagttacaaaagataaatcattatctgctcaatttgaacataccctaggaattactgaaaatggttatgaaatctttacagaatctgctaaaggttactcaaagcctccatacttataat

SEQ ID NO: 262281 - DNA, 737 bp, Unknown
  Bacterial polypeptide expressing nucleotide sequence isolated from the Sargasso Sea
aatagctggaaaattagcttctcaaactttatatatgttaacagaccatgtaaaacctggtgtctcaacagataaaattgatcagttaggttatgagtttataaatgataatggaggacattctgcgcctctttactatagaggatttaaaaaatctttatgtacatcattaaatcatgttgtgtgtcatggcataccatcagaaagaattttaaatgaaggagatgttgtaaacatagatgtaacagctattgtaaatgaatactatggcgacaccagtagaatgtatacagttggtgaaatttcgattaaggcaaaaaatttaattgatgtaacttatgagtctatgatgaatgcaataaaaattttaaaaccaggagttaagcttggtgatataggatttgaaattcaatcatatgttgaagaaaaaggtttttctgttgtacgagatttttgcggccatggaattagcaatacttttcatgaaccaccaaatattttgcactatggaaaaaaaaatactggtattgaattaaagcctggtatgacatttacaattgagcctatgataaatgcaggaaaattagatgttaaagttttaaatgacggatggactgctgttacaaaagataaatccttatctgcacaatttgagcacacattaggaataactgaagattcttatgaaatttttacagaatctgttaaaggttatagaaagcctccatataagtaat

SEQ ID NO: 262282 - DNA, 769 bp, Unknown
  Bacterial polypeptide expressing nucleotide sequence isolated from the Sargasso Sea
gatgagtaattatttggaaaaatttgaaaaaatgagaattgccggttctttggcatctaaaactttagacatgattacagattatgtgaaagaaggaacggcaacaaatcatattgataaactttgttatgaatttataagagataacggtggatattctgcccctcaattctatagaggatttgaaaaatcaatttgcacttcacttaatcatgttgtttgtcacggtatacctggcgacagaacacttcaagatggagatattgttaatatagatgtaaccgctgtaattaatgatcactacggggacacgagtcgaatgtatactgttggtgatatttctgttaaatcaaaaaaactcattaatgtaacgtacgagtcccttaataaggcaattcaaatattaaaacctggaaaaagaattggtgacattggttacgagatacaatcatttgtagaaaaaaatggtttttcagtcgtacgagatttttgtggtcacgggataggaacaaactttcatcaggaaccaaatatacttcactatggatcaaagaatacgggggatgaattaaaaccaggtatgacttttactatcgagcctatgataaatgctggtaagtataacacaaaggttttaaatgatggttggacagctgttacaaaagacaaaacattgtctgcgcaattcgaacatactgttgggattacagaaaatggttatgaaatttttacagaatctgctaaaggttataaggagcctccttacaac

SEQ ID NO: 262283 - DNA, 772 bp, Unknown
  Bacterial polypeptide expressing nucleotide sequence isolated from the Sargasso Sea
atgaataaaaattatttagaaaaatttgaaaaaatgaaagttgctggaaaattagcttcaagcacacttgatatgttaactaattatataaaacctggggtttccactgaaaaaattgatcagttaggttatgaatttataaaggataataatgggtattctgcaccacagttttatagaggatttaaaaaatccttatgtacatcattaaatcatgtcgtttgccatggtattcctggtgacagaattttagatgaaggtgatattgttaatgttgatgtaacagccatcataaatggtcattacggggacactagtagaatgttttgtgttggagaagtttctgttaaagcaaaaaacttaattgagactacttataactcaatgatgaaagcaatagaaattcttaaaccaggtataaaacttggagatattggctatacaattcaatcttatgttgaggaaaaaggtttctcagtcgtaaaagatttttgtggtcatgggataagtacaaaatttcatgaaccgccaaacatactacactatggaaaaaaaaataccggtattgaaatacaaccaggaatgactttcacaatagaaccaatgataaatgcaggcaaatatgatgttaaagtacttgatgatggttggacagctgtaacaaaagataaaacactatcagcacagtttgaacatacattaggtataactgaaaatggatatgaaatttttacagaatctgttaaaggttatacgaagcctccatattaat

SEQ ID NO: 262284 - DNA, 772 bp, Unknown
  Bacterial polypeptide expressing nucleotide sequence isolated from the Sargasso Sea
atgactgattataaagaaaaatttgaaaaaatgagaattgcaggaaacttggctgcaagaactttagatatgttaactgaaaatattaaagaaggtatatccactgaccatatcgataaacttggttatgaatttattagagacaatggtggctactcagctccattgtattatagaggttttacaaaatctttatgcacgtctttaaatcacgtaatatgtcatggtataccctctgatagaattttacaggaaggtgatgctgtaaacgttgatgtgacagcaattgttgatgaacattatggtgatacaagtagaatgttttgtattggaaaaaccccagtaaagttaaacaatcttatagatgctacttatgaatctatgatgagagcaattaaaattttaaaaccaggaattaaattgggagatatcggttatgaaattcaatcttttgtagaagaaaaaggattttcagttgtcagagatttttgtggtcacggaataagtacaacatttcatgagccaccaaacattttacactacggtaaaaaaaatacaggtatggaattaagacctggtatgacatttactatagaaccaatgataaacgcaggtaaatacgatgtaaaaatgttgaatgatggttggacagctgttacaaaagataaatctttatctgcacaatttgaacatacgttaggaattactgaaaatggttatgaaatctttacagaatctgctaaaggttattcgaagcctccatacttataat

SEQ ID NO: 262285 - DNA, 703 bp, Unknown
  Bacterial polypeptide expressing nucleotide sequence isolated from the Sargasso Sea
gatgagtaattattttgaaaaatttgaaaaaatgcgagttgcaggaaaacttgcatcgaatactttagatatgataactgattatgttaaaccaggtgtaagtactgataagctagatcaactttgttatgaatatattaaagatcatgggggatactcagcccctcaatattacagaggttttaaaaaatctttatgtacttcccttaatcacgtagtttgtcatggtattccatcagatagaattttaaacgatggtgatatcttaaatattgatataaccgccattgtaaacaaccattatggtgataccagtagaatgttttcaattggagatatcccaatcaaagctaaaaatcttattgatgaaacctatacgtcgatgatgaaatcaataaaaattcttaaacctggaattaaactgggagatattggcaatgaaatccaatctcatgttgaaagtaaaggtttttcagtagttagggatttctgtggtcacggcattggtgatgtatttcatcaacctcctaatattttacactatggggaaaaaaataccggctctacaatcaccccgggtatgacttttacaattgaaccaatgataaatgcaggaaaatataatgtgaaagttttaaacgatggttggacagctgttacaaaagataaatcattatcagcgcaattgagcataccgtggaat

SEQ ID NO: 262286 - DNA, 649 bp, Unknown
  Bacterial polypeptide expressing nucleotide sequence isolated from the Sargasso Sea
ttagcttataattttattaaagataatggtggttactcagcaccgcaattttatagaggttttaaaaaatcactgtgtacttctttaaatcacgtagtttgccatggaataccatctgatcgtattctagaagatggtgatgtggtaaacatagatgttactgctgttgttaatgaatattacggtgatacaagcagaatgtttacaataggaaattcatctataaaagcaaacaatttgattgatgctacctacgagtcaatgatgaaagcaattaagattttaaaacctggagttaagttaggagatataggtaatgaaatccaaaattttgttgaagaaaaaggatattctgttgttagagatttctgtggccatggtatcagtaatacatttcatgaatctcctaatattttgcactatggaaaaaaaaatactggtccaaaaatttatccaggtatgacctttacaattgaaccaatgataaatgctggaaaatatgatgtaaaaattttaaatgatggatggacagctgtgactaaagataagtctttatctgcacaatttgaacatacagttggaattaccgaaaatggatatgaaattttcacagaatctggtaaaggatataataaacctccttattaat

SEQ ID NO: 262287 - DNA, 873 bp, Unknown
  Bacterial polypeptide expressing nucleotide sequence isolated from the Sargasso Sea
cgaatcggctgacgctcgacgaatgtatgcgtgcttcgagcaaccttttctgaaggcgaccttccaattgacggtcacggcaccggatcactggcaagtgatcagtaatgcacccacgcccgatcccgagccgaccggccccgggatggccgtgtggaacttcgacgcctctccccgcatgtccacctacatcacggcacttgtcgcgggcccgtattacgtcgtgcgcgactcctacaccggtcctcatggcacctacccgctcggtgtcttctgccgtgcatcactggccgaacacttggacgctgatgacattttcgaactgaccaagcagggcttcgcgttcttcgaggagcagtttcagattccgtatgcctttggaaagtacgaccaactcttcgtccctgagttcaacgcgggggccatggagaacgcgggctgcgtcactttcctggaagatttcgtcttccgttcccgtgtcacccaagcggcctacgaacagcgcgccaacaccatcctgcacgagatggctcatatgtggttcggcgatctcgtcaccatgaagtggtgggacgatctgtggctgaacgagtccttcgccgagtgggcggcgcaccatgccaacgtgcatgcgactcgattctccgaggcatggaccaccttcgccaacctccgcaaggcttgggcctaccggcaagaccaacttccctccactcacccgatcgcggcggacatggtcgacctcgacgcggtgcgggtgaacttcgacggcatcacctacgcgaagggcgcctcggctctccgacaactcgtggcatgggtgggcgagcacgagttcctcgacggacttcacgagtacttcaccaagcacgc

SEQ ID NO: 262288 - DNA, 2629 bp, Unknown
  Bacterial polypeptide expressing nucleotide sequence isolated from the Sargasso Sea
tttgtttaaagctagcctagtcgccctcacctgctctgcattaatgtcgtgcgccgttaaaagtcctttaaatacaggaccaagggacgccagtccctatatcagccagtatcaggcaagcctacgttcacaggtaatatcggatgtgcattatgagttggattttcaactgacaggtgacacgcaattcagcgcaacaactaagatccacttcaatcttagcgaggttcctaagcaactgagcttggatctaagcaaagcacaaattaagcgttttttgattaacggaaccgccatttaccccaattacaatggtgcctatatcagcttaaacacccgcttactgacctcgggagataacacggttgaagtgcaatttacccgagcgcacagcactaatggcgaaggcttgcatcgcttccaagatcccgtcgatggcaaggtctacctctactctcactttgagcctgccgctgcgcaacagatgtttgcagtatttgatcaacccgatttaaaagccaattacaaaatcagtgtgaccgcgccgaaggattggcaagtgatcagtaccatgcgcgagtcctctgtcacacctgcggggaccattaatcgttgggagtttcctgaaacgcctaaattaagcccttacaatttctctatgcatgcaggcccgtaccatatgtggcaggataattccggccgctatcctatgcgattatttgcacgacaatccgttgctcaccaagtgaccccacaggactggtttacctatacaaaacaggggttaaccttctttgacgcctattttggtattccttatccctttaaaaaatacgaccaaatcctagtgccagactttctctatggcgcaatggaaaacgcagcagcagtgacctttgccgaagatcatttcctccacaaagctgaaatgaccgccgagcaaaaacaaagcttggcgggtgttattatgcacgaaatggcccaccagtggtttggcgatttggtcacgatgaagtggtggaatggcctctggttaaacgaaagttttgcttcttttatgggtacactcgcgacccaagaagccaccgaatttacgaatgcttggcgcagtttttatgctcaaggcaaacagcgtgcctatgagcaagacagcttagtcactacccatccgattgaagtgcctgtagctaccacccaaaatgccttcgacaatatcgatgctattacctatcaaaaaggcgcctcgacgctcaagcagctacgccatttacttggtgatctggtgttccgccgcggcgtgagcaactacctcaaacaatacagctaccaaaatgccgagctggatgactttatcaatagcctcgctaaagctgcgggcagagacttaagcgcatggacacaggaatggctatacagcgctggggtaaacaccattaaagccgaataccgctgcgacggtaaccgcattagcgaatttagcctattgcaatatcccgctagcagcgaactaccgacactgagggagcaaaaagtccaaattgcactgtttactaaaggacgtttcgatttaaggcatgagaccacagtaccagtaacctacaagggcgagcgtaccgaggtgaaacaattagtcggtgagcgttgtcccgatctggtttaccccaactatgatgattggggctttgtgaaggtgcaactcgatgaaaaatccttcgataccgccaagcaacagttaagccgagttacagatccgctattgcgctcaatgttatggcaaagcttgtgggacagtgtacgtgagggcaacctgagtttagatcaatacctcagcacagtattcgtcaacgccccagcggagaatgactacactgtagtcggccaaattatttctagcttgctacgcagtaaagaatacctcgcgcagatcgcgcctattcagcaaaactatgctgaaaatgcagtcaaaggcttagcgcaaatgagccttcgtaagaccatggagagtcgaggggacaatgacttccagcgccgctggttcgatgcctatatccaattagccagcgatcgtgacagtttacgtcatttagcgcaattgctagacggcacaactaaaatcaaagggctaactttagatcaagatctgcgctgggctatcataatccagcttaatcgctacgacttcccgaatgcgcagcaacgtataacacgggaaatagcacgtgataactcagattctggggaaaaagcggcattagccgctcaagtgatccgtcctgaagctgccgcaaaacgtcgctggttgagtaaagtccacgccgatgtcctaccgtttgctaaacagcgcatcatcatggaaaacctttatcctgcggagcaaaaactcttaagcgcagccacagctgaagagcgcctcgcaaacttagccgatatggacaaaaagggcccagtgtttatgcgtagctacagccgtaacttgatcccaaccgactgtaattacaatagtattaccgccttggataaagtattagacagccaaacaggcttatctaatcttagccgtcgtactttattagaaacgcgtcaagcagagcagcgttgcgtgctaatcaaaaataaaatgacccactga

SEQ ID NO: 262289 - DNA, 2629 bp, Unknown
  Bacterial polypeptide expressing nucleotide sequence isolated from the Sargasso Sea
tttgtttaaagccagcctagttgccctcacctgctcggccctgatgtcgtgcgccgtccaaagtccgttaaatacgggcccgagggatgccagcccctatatcagccaatatcaggcgagcttacgttcacaggtgatttcgaatgtgcattatgagctggattttcaactgactggcgacactgagtttagcgccaccactaaggtccatttcaatctcagcgaagtgcctaagcaattgagcctcgatttgaacaaggcacaaattaagcgctttttgattaacggcaccgcggtttaccctaattacaatggcgcctatatcagtctgaacacccgtttactgtcgtcgggcgacaacacggtcgaagtgcaatttactcgcccccacagcaccaacggtgaaggcttgcaccgtttccaagacccagtcgatggtaaggtctacctgtactcgcacttcgaacctgctgcggcgcagcaaatgtttgcagtgttcgaccaacccgatttaaaagccaactataaaatcagcgtgactgcgccgaaggattggcaagtgatcagcaccatgcgcgagtcttcagtcactcctgcgggggcaataaatcgttgggagtttcctgaaacacctaagttaagcccctataacttctcgatgcacgcagggccataccatatgtggcaggataattctggccgctatccgatgcgcctgttcgcgcgccaatcggtggctaaccaagtcacgcctgaggattggtttacctatactaaacaaggcttaaacttctttgatgcctattttggtatcccttacccctttaaaaagtacgatcaactcttagtaccagatttcctctatggtgcgatggaaaacgctggcgctgtgacctttgccgaagatcatttcctccacaaagcggcaatgaccgccgagcaaaaacaaagcttagccggcgttatcatgcatgagatggcgcaccaatggtttggcgatctagtcaccatgaagtggtggaatggcctgtggttaaacgagagttttgcttcttttatgggcacactcgccacccaagaagccacagaatttaccaatgcttggcgcagtttttacgcccaaggcaaacagcgcgcctatgagcaagatagcctagtgaccacgcatcctatcgaagtgcccgtggcaaccacgcaaaatgccttcgataatatcgatgccatcacctatcaaaaaggcgcctcgaccctcaagcagttgcgccatttactaggcgatctggtgttccagcgaggcgtgagtaactacttaaagcaatacagctatcaaaatgccgagctggacgactttatcaatagcctagccaaagctgctggccgcgacttaagcgcctggacgaaggactggctctacagtgcgggggtcaacaccattaaggccgagtatcgctgcgacggcaaccgcatcagcgaatttagcctgttgcagtatcctgccagcagcgaactgccgacgctcagggagcagaaagtccaaatcgccctgttcactaaggggcgcttcgatttaagacatgagaccacagtaccaaccacctacaagggcgaacgcactgaggtgaagcaattagtcggtgagcgttgtccagatttggtttaccccaactacgatgactggggctttgtgaaagtacaactcgatgacaaatccttcgacaccgcgaagcaacagttaagccgtgttacagatccgctgctgcgttctatgctgtggcaaagcctgtgggacagtgtgcgtgaaggcaacctgagcctagatcaatacttaagcacagtattcgtcaacgcccctgcggagaatgactacactgtggtcggccagattatttcgagcttgctacgcagtaaagaatacctcgcgcaaatcgcgccgattcagcaaaactatgctgaaaatgcggtcaaaggcttagcgcaaatgagccttcgtaagaccatggagagtcgaggcgacaatgacttccagcgccgctggttcaatgcctatatccagttggctggcgatcgcgacagtctgcgtcacttagcgcaattactggatggcacaaccaaaatcaagggcttaactttagaccaagatctacgctgggccatcatcactcagctgaatcgctacgactttccgaatgcgcagcaacgtattacccaggaagccgcccgcgataactcagattcgggtgaaaaagccgcattggccgcccaagttatccgtccagaagctgccgcaaaacgtcgctggttgagtaaagtccacgccgacgccctgccgtttgctaaacagcgcatcattatggaaaacctctatcctgcggagcaaaaactcttaagcgccgcgaccgccgaagagcgcctcgccaacttaggggatatggataaaaaaggcccagtatttatgcgtagctatagccgtaacttgatcccaaccgactgtaactacaccagtattgccgccttggataaagtgctagatagccaaactggattatcgaatcttgcccgccgcaccctgttagaaactcgccaagccgagcagcgctgcgtactgattaagaataaaatgacccattga

SEQ ID NO: 262290 - DNA, 946 bp, Unknown
  Bacterial polypeptide expressing nucleotide sequence isolated from the Sargasso Sea
ttgggcaacaaaaggcaatgaatctcaaggagaatttgcattagacacatctataaagctacttgatttctataactcatattttggcataccatttcctttgcctaaattagatcatattgccatccctgattttgcggcaggggctatggaaaactggggggcaataacttatcgtgaagtcgctctactagtagacccccaaaacacttccgcttctacaaagcaaaccgttgctgcaataatttctcatgaaatggcccacatgtggtttggagatttagtaactatgaaatggtggaacgacttatggcttaacgaaagttttgcttcttggatgggggacaaagctgtagacgccgtattccctgaatgggaaatgtggacacaattcttaacatctgacactgcatcagcatttagtctagatggtctctccaattcacatccaattgaacaagaagttaggaatcctgctgaaataggtcaattatttgatgctattagctatagcaaaggtgggtccactttaagaatgcttgaggcgtatataggtgcaaaagatttccaaaaaggaataactgaatacttaaatactcatgcatacaataatgctgaaacttcagatttatgggatgccctaggaaaaagctcaggtaagccagtcgcacaagtgatgaattcatgggtaaaacaaactggatttccagttgtatctgttgaaagaacaaaaaacaaattaaatctgtctcaaaagagatttttatatgaaaatattaattatgaaaatgattatgatgatcaaagcatatggtacatcccaataaatatacaaacgtctgataaaaaagatctaatatcagaactaatggatacaaattctaaaagtattacaatagacagtccaaatgatagttggctaaaaataaatccggatcaaacagga

SEQ ID NO: 262291 - DNA, 775 bp, Unknown
  Bacterial polypeptide expressing nucleotide sequence isolated from the Sargasso Sea
attgatacttcattcaaactagatgcaaaaaaagaaactctttcactatccacaaaatcaaatgtcactgggaaaattaagttatgtatcgagtatactggaattcttaatgatcgcttattgggcttttacagaagtaaatacactgactctaaaggaaaaacaaaatacttggctaccactcaatttgaggctgctgatgcaagaagggcatttccttgttgggatgatcctgcaacaaaagccacatttgacgtgtctcttcttgttgagaaacatcacatggcaatatctaacatgcctataatgaagaaacaaaattttggttccaaaataatctatgaatttgaacgtactccaataatgtctacatatcttctctatcttggagtaggtgaatttgaattcattgaggataaattacgaaatatccaaattcgcgtattaactacaaaaggaaacaaaaataaagcaaaactttcacttgaactaaccaagaaatttctaggtgaatatgaaaaatattttggaataaaatacccactacctaaacttgacatgttagcaattcctgattttgctgcaggtgcaatggaaaattggggggcaataacattccgcgaaacaattttactatatgatccaaaaacatcctctacaagaaccaaacaattcatcgctgaagttatttctcatgaattggcacatcagtggtttggtaatctagttactatgaagtggtggaatgatttgtggttaaatgagagttttgcaa

SEQ ID NO: 262292 - DNA, 2497 bp, Unknown
  Bacterial polypeptide expressing nucleotide sequence isolated from the Sargasso Sea
atgggaatatctgaaataaattacgatatacagtttgaacctcttttttccaactttactttcaaaggaatggaaattttatcgtttaaaacaaccccttcaaacaaatttgtattaaattgtgctgagataaaaataaaaaaatgctacatactctctaaaaataaaacaattgatgtcaattttaaactcaatgcaaaaaatgaatctctttctattgtttctaaaagtaaagtttcaggaaaaattaaactctgtattgaatatgctggaattctaaatgatcgtttactaggattttacagaagtaagtacactgatccttctggtaaaaccaaatacatggctaccactcaatttgaagcagctgatgcacgaagagcatttccatgttgggatgaacctgccacaaaagctacttttgatgtttcacttttagtagagaaaaattacatggcaatctcaaacatgcctgtaagaaaaaaacaaaactttggctcaaaaatcatttatgaatttgagcgtactccgataatgtctacttatcttctatatcttggagttggtgaatttgaatatgtagaaaccaaattaaggaatatccaaattcgtgtactaacgacaaaaggtaacaagaataaagcaaaactatctttggaattaacaaaaaaattccttggtgaatatgaaaaatattttggaataaaatacccattacctaaacttgacatgcttgcaatacctgattttgctgcaggtgcaatggagaattggggtgcaattaccttccgtgaaactattttgctgtatgatccaaagacatcttctactaaaactaagcaattcattgctgaagttatatcacatgaattggcacatcagtggtttggcaatctagttactatgaaatggtggaatgatttgtggctaaatgagagttttgctaccttcatggcaacaaaaattgtagataaattctatcctgaatgggatttgtgggaccaattcttagaggatgcaatgaatactgcaatgtctcttgatgcattaaaaacctctcatcctattgatgttaaagtaaatcatccttctgaaataagggagatttttgattctatttcttatgataaaggaggatgtgttttacgaatgctagaaaattttgtaactgataagaactttcaaaaaggtctacaaaaatatctcaaaaaatatgcatactcaaatgcagaaggtcgtgatttgtggaaatcaataggtgaggtagcaaaaaaaccaattgacaaaataatgagcacttggattgatcaggttggttttcctattgtttcagtaaatcgaaagggctcgcaactttctctaaagcaatctcgttatcttttagaagaaacaaaaaccagtaaaaaaggaatctggaaaatacctttgattgtagatgaaggtgatgtatccacttctcacataatggataaaaaatcacaatcaattaaactgaaaaacaaagaacgaaatttcataatcaattcaggtcgaaccggattttataggatggattatgattctgaaaccttggataatctctctcttctaattgatgaaaaaatactaaattatgtggatagatggagtattcaaaatgactattattcacaatgtgtgactggaaagaagaaagtacaggactatcttgatttcacaaatgcgtattttgatgaggataactacatttcatctctaaatttggctcaacatctctattcattatactcattaactcataaggaaaaattttcagatgagattaagcaatattcatttaatttccttagaaccatttttgaccgtttaggctgggatgcaaaaaagaatgagcctcacaccaatgcacttttgagaagctttgcaatttctggattgggaaaacttggtgatgaagaaatattgaaagaatcaaaaagaagatttgataaatttttgaaaaaccaaaatagcttatcagctgatcttcaagaaacagtttttgttttagttgcatggaatggaaatgaaactatatacaaaaaatttgcatccttatacaaaaaggcaaaatcacaagaggaaaaacttagatttttagccgcaatgtgtaatttccaacaaaaaaatctcttactaaaaacattagaatttactttaggtcctgatgttcgttcacaaaacatccaaatgccaattatgagaattgcaacaaatcttcatggtaaagaattcttatgggtatggctaaaaaagaactggaaaaaaattgtcaaaaaggcaggaattggtaatccattattaaatagagttgttgcaagtattggtcaggttgttgaagcaaaacaagaaaaagaaattcgtaaattcttcaaagataatcctttgcgtggaactgaaatgacattggaacaaaccatggaacgagtacgcgtttcttctaaattcctaaattccataaaaaaggaattttcataat

SEQ ID NO: 262293 - DNA, 2011 bp, Unknown
  Bacterial polypeptide expressing nucleotide sequence isolated from the Sargasso Sea
aaaaaattttggctccaaaataatctatgaatttgaacgtactccaatcatgtctacgtatcttctatatcttggagtaggtgaatttgagtatattgaggataaattacgaaatatccaaatccgtgtattaactacaaaaggaaacaaaagtaaggcaaaactttcacttgaattaaccaagaaattcctaggtgaatatgaaaaatactttggaataaagtaccctttaccaaaacttgacatgttagcaattccagattttgctgcaggtgcaatggaaaactggggtgcaataacattccgtgaaacaatcctgttgtatgatccaaaaacatcttctacgcgaaccaaacaattcatcgctgaggttatctctcatgagttggcacatcaatggtttggtaatcttgtaactatgaagtggtggaatgatttatggttaaacgaaagttttgcaaccttcatggcaacaaaaatcgttgataagttctatccggaatgggatttgtgggatcaattccttgaggatgcaatgaataccgccatgtcacttgatgcactaaaaacatctcatcctatagatgtaaaggtaaaccatccttctgaaatcagagaaatttttgattcaatctcatatgacaaaggtggatgtatacttcgaatgcttgaacattttgtaactgagaaaaactttcaaaagggactgcaaaaatatcttaaaaaacacgaatactctaatgcagaaggaaaagatttgtggaaatcaattggggaagtggcaaaaaaaccaattgataaaatgatgaaaacctggattaaccaagttggatttccaatcttaagtgttaaaagaaaaggccaagaaatttcattaaaacaaagtaggtatttgcttgaagaaacaaagtcaagtcaaaaaggaatttggaaaatacctcttattgtggatgaaggaaatgtttcaacatctcatatcttggaaaagaaatctggttcattaaaactaaaaaacaaagatcgtaatttcataatcaattctggacgaaccggcttttacagaatggattatgattctgaaactttagataatctctctcttctcatagatgaaaaaattctaaactatgtggaccgttggagtattcaaaatgactattattctcaatgtgtgactggaaaaaagaaattacaagaatatcttgatttcacaaacgcatattttgacgaggataactacatttcttctctaaatctcggtcagcatctttattctttatactcgttaactcataaggaaaaattctctgatgagataaagcaatatgcaattaatttcctaagaactatttttgagcgtctaggttgggattcaaaaaaaggtgaacctcatactaatgctttattgagaagttttgcaatttctggattgggaaaattaggcgaccaggaaattcttgaagaatctaagaaacgatttaataaatttcttaaaaatccaaacagcctttctgcggatttacaagaaactgtatttgtcttagttgcatggcaaggcaatgaatctacatacaagaaatttttatcattgtacaaaaaggcaaattcacaagaagaaaaacttcgctttttagccgcaatgtgtaatttccaacaaaagaatctgttactcaaaacacttgagtttacattgagttctgatgttcgctctcaaaacatccaaatgccgataatgagaattgcagcaaatatacacggaaaagatttcttatggggctggctaaaaaagaactggaaaaaaattgttaaaaaagcaggaattggaaatcctctactaaatagggtagtcgcaagtattggtcaggttatcgatgcaaaacaagaaaaagaaatacgccaattcttcaaagcaaatcctctaagaggtactgaaatgactcttgaacaaactatggaacgcgttcgtgtttccagcaaattccgaaattcaattaaaaaagagttctcataa

SEQ ID NO: 262294 - DNA, 315 bp, Unknown
  Bacterial polypeptide expressing nucleotide sequence isolated from the Sargasso Sea
tctgtagcgccagaaggtactgtatccacagaaattattgccggttctgcgttattgcagcagggctgggtaggtattcatgcggtagggcgtggcagcgatcgtgacccagccatgttagtactggattacaacccaacaggcaaagccgatgcgcctgtgtttgccgctttagtgggtaaaggcattacttttgattctggcggttattcgattaaagccagcgaaggcatggtgaccatgaagtgcgatatgggtggtgcagctactgtcactgctgcattagctttggcgattttgcagggtttaaacaaa

SEQ ID NO: 262295 - DNA, 810 bp, Unknown
  Bacterial polypeptide expressing nucleotide sequence isolated from the Sargasso Sea
aaagacaacgttaattacaccatgacggtaggcgaagagctgaaaaacgagggttgggtaggcatttataatgtgggtagagggagcgagcgtccgccggcgatgcttgtgcttgactacaacccaacaggcaacgccgatgcacccatagatgctgtattagtcggtaagggtattacttttgatagcggtggttacagcataaaatcaagtgaaggtatgcttgatatgaaatgcgatatgggcggtgctgcaacggtaacaggagcacttggtttagccattacacaagggattgaaaagcgtattcaactgatattgtgttgcgctgaaaaccttatcagtggtcacgcttacaagttgggtgatgtgctaacttataaaaatggtgtgacggtagaagtagtgaataccgatgctgaaggacgactggtactggctgatggtctaatggcggctacagacactggcgcgccattaattattgatgctgcaacactgaccggagccgcaatggttgcgttaggttcagattatcacgctgtattttcgatggatgataatgcaaaagagcagatgctcaatgctgctaaagcagaaaacgagcgtttttgggcattaccactagagcctttccacgcagatcgctgtccatcggcctttgctgataccgcaaacagtcgtccaatgaaaggcggcggtggtggcggtgcgtcgaacgcggcaggatttttatcgcgctttgtaaagcctgaaggctggattcatttagatttggccgccagcgtatcacggtggtgcgactgctga

SEQ ID NO: 262296 - DNA, 136 bp, Unknown
  Bacterial polypeptide expressing nucleotide sequence isolated from the Sargasso Sea
tttttgtggaaactatcagcaaggctggctgcatatcgactgctctgcaacctatcgcaaagcgccggttgagcagtggtctgcgggcgcaactggtctgggtgtgcgcacgattgcgaatctgctgaccgcgtaa

SEQ ID NO: 262297 - DNA, 563 bp, Unknown
  Bacterial polypeptide expressing nucleotide sequence isolated from the Sargasso Sea
tttatgctgtgccgaaaacctgatctcaggtggtgcctttaaactgggtgatatcctgacctataaaaatggcgtcactgtcgaaatcgtcaataccgatgctgaaggccgtttagtactggctgatggtctgcaaaaagctgcagaagctaagccagaactcattattgatgccgcgactttaacaggcgctgcgatgaatgctttaggttctgaatacaatgcagtttttgctttggataaggccttagcacaacgtgtgttaggttatgccgaacaagtgcaggaaggtgcatggcaactaccgctggaaaaatggcatcagggtcagtgcccttcaccttatgctgatacagccaatagccgtcctgtcaaaggtgggggcacaggtggagccagcaatgcggcaggttttttaagccgttttgtgcctaatgatggcaaaggttgggtccatttagatttagctgcagctttccataattcagccaatggcttttgggccgccggtgcaacaggtatgggcattcgtttagtggctcaaactctgactcaggaataat

SEQ ID NO: 262298 - DNA, 943 bp, Unknown
  Bacterial polypeptide expressing nucleotide sequence isolated from the Sargasso Sea
gatggcagaatttaccgttagcctttctagaaacagtgctgaagcagtgtggggcgagagtgctaagctttctttcactgaatcaggtgcagttattcacctgcctgacgacaagcttaatgagcgtttaattcagcaagcggcaagaaagctagatggcttaagcctgccagcagttacgctaagcggcgattggcacaaagagcagcagtgggcttttgcacttagcttcacgcgtgcccgcaaaccagcgtcaataaaatgggccgaaacggctgacaaagaagcgctagagcaagaatatgcggcgttactatttacccgtcagctggtaaacgaaacacctgaagatctaagccctgaaaccttagcaacccgagcagcacagtggcttaagtcactgggtggtgacaaggtaacctactcaatgacggtaggtgaagatcttaaagagcagggctggattggcatttataatgtgggccgcggtagtgaacgtccgcctgcaatgctggtacttgattacaacccaacaggtaatacggatgcgccagttgatgccgtgctagttggaaaaggcatcaccttcgacagcggtggctacagcattaaatcaagcgaaggcatgttagatatgaaatgtgacatgggcggcgcagcgacggtaacaggggcattagggctatctatttctcaaggcagtgaaaagcgtattcagcttattttgtgctgtgcagaaaaccttattagcggtcacgcttataagttaggtgatgtacttacctataaaaatggggtaaccgttgaagtggttaataccgatgctgaaggacgtttagtgttggctgatggccttatggcggcaacagagacgggcgcaccgctaattattgatgcagcaacactaaccggtgctgctgtggttgcactgggttctgactac

SEQ ID NO: 262299 - DNA, 927 bp, Unknown
  Bacterial polypeptide expressing nucleotide sequence isolated from the Sargasso Sea
gttgagtgggccgctctggatgaggcgcagcgcaaagagctggataaccgcctgaaaattattgactgggtgcgcgataccattaacgccccggcagaagagctgggcccggaacagctggcgcaacgcgcagtagacctgctgtgctctgttgcctgcgataacgtctcttaccgcatcactaaaggcgaagatctgcgcgagcagaactacatgggattgcataccgtaggtcgtggctccgaacgtcctccggtactgctggcgctggattacaatccaactggcgataaagaagccccggtttatgcctgcctggtgggtaagggaattacttttgactccggcggttacagcatcaagcaaagcgcatttatggactcgatgaagtctgatatgggcggcgcggcaacggtgaccggcgcgctggcgttcgccatcacccgtggtctgaacaagcgcgtgaagctgtatctgtgctgcgcggataacctgattagcggcaacgcctttaaactcggcgatattattcactatcgcaacggtaaaaaagttgaagtgatgaataccgatgccgaagggcgtctggtactggccgatggactgattgacgccagcgcgcaaaaaccagaattgatcattgatgctgcgacgctgaccggcgcggcgaaaactgcgctgggcaacgattaccatgcgctgtttagctttgacgatcaactggctgcccgtctactggcaagtgcggcgcaagaaaacgagccgttctggcgtctgccgttggcagagttccaccgtagccaactgccgtctaactttgccgagctgaataataccggcagtgcggcctatccggcgggtgctagcaccgcggcgggtttcctgtcccatttcgtggaaaactatcagcaaggctggttgcacatc

SEQ ID NO: 262300 - DNA, 1294 bp, Unknown
  Bacterial polypeptide expressing nucleotide sequence isolated from the Sargasso Sea
catgagtgaacttaaagtgactgaagtgatgagagttgagttaaccaaagatacccccgccgcccactggggcaaagctgatgtgaccttcaatgccgaaggcgcattagtccacttaggtggcggtgatgagctgcgccaaattcaaatggcggcgcgtaaattacgtaatcaagggatcagcacggttgccttagcgggcgctctttgggatctgaatagccaatgggtcttcgcccaaggttttgctaccgctaaacccggctataagatccaatggtgcggcgatgacgctgtgcaagcagaattacaacgtcgtttagaagtggcgacatttgcccgtcaactgatcaacgatactcctgaaaatctgtcgccagtgaaattggcgcagcaagcggctaaatggttagccgatatcggtggtgctaaggtgagctaccgtattattgaaggtgaagcattattagaagagcagtggattgggatccatgccgtaggccgtggcagtgagcgtcctccagcgatgttagagctggactttaacccgctgtcagccgatgccccagtatctgttgccttggtaggtaaagggattaccttcgactcaggcggttacagtattaaagcctctgaaggcatgctggggatgaagtgcgatatgggcggcgcggccactgtgaccgccgctttaggtttagcaattaaatcgggtctgaacaaacgcgttaagttattcctctgctgcgctgaaaacctgatcagcggccgtgcctataagttgggtgatatcctcacctacaaaaatggcgtgacagttgaagtggttaacacagatgccgaaggacgcttagtgctggccgatggtctgcaagcggcttctgcgacgggggctccttttattatcgatgcggcaaccttaaccggcgcagctgtgatggcggtaggctctaactacaacgcgattttctcgccacagactgaagtgttacaactggcgcagcaaaaggcctcgactgtggccgagcgtgtatggccattgccactggatccttggcacaaagacatgtgtccatctgcctatgctgacacggcaaacagccgtccagtgaaaggcggtggtgcaggcggcgcttcgaatgcggcgggtttcctatggcgtttcgtttcacctgaagccaagtggttacacgtggatttagcggcggccttcgaagattcggcttctgcactatggggcgctggcgcgaccacccatggcgtgctgaccatcagtgagctgattaaaggctaa

SEQ ID NO: 262301 - DNA, 1294 bp, Unknown
  Bacterial polypeptide expressing nucleotide sequence isolated from the Sargasso Sea
catgagtgaacgtaaagtgactgaagtgatgagagttgagttaaccaaagataccccagcagcccattggggcaaagccgatgtgaccttcaatggcgaaggcgcattagtccacttaggtggcggcgatgagttacgccaaattcaaatggcggcgcgtaaattacgtaatcaagggattaataccgtcgcattggtgggttctctttgggatctaaatagccaatgggtcttcgcccaaggttttgccacagccaaacccggttacaagatccaatggtgcggcgatgaagttgtgcaagccgagttacaatgtcgcttagaagtcgcgacatttgcccgtcaactgatcaacgatactcctgaaaatctgtcgccagtgaaattggcgcagcaagcggccaaatggttagccgaactcggtggtgccaaggtcagttaccgtattattgaaggtgaagcattattagcagagcaatggattggtattcatgctgtaggtcgcggcagtgagcgtccacctgcgatgttagagctagactttaacccgctgtcagccgatgctccagtatctgttgccttggtcggtaaagggattaccttcgactcaggcggttacagcattaaagcttctgaaggcatgctgggcatgaagtgtgatatgggcggcgccgccactgttactgccgctttaggtttggcgattaaatcgggcctgaataaacgcgttaagttattcctctgctgcgctgaaaacctgatcagcggccgtgcctataagctgggtgatatcctcacctacaaaaatggcgtcacagttgaagtggttaacaccgatgccgaagggcgtttagtgctggccgatggtctgcaagcggcttctgcgacgggtgctccttttattatcgatgcagcaaccttaactggcgcagctgtgatggcggtgggctctaactacaacgcgattttttcgccacagacagaagtgttacaactggcgcaacaaaaagcctcgacagtagctgagcgtgtatggccattgccactggatccttggcataaagatatgtgtccatcggcctatgctgacacggcaaacagccgcccagtgaaaggtggtggtgcgggcggtgcctcgaatgcggccggcttcctgtggcgttttgtttcgccagaagccaagtggttacacgtggatttagcggccgccttcgaagattctgcttctgcactatggggcgctggcgcgaccacccacggcgtgctgaccatcagcgagctgattaaaggctaa

SEQ ID NO: 262302 - DNA, 1303 bp, Unknown
  Bacterial polypeptide expressing nucleotide sequence isolated from the Sargasso Sea
catggctgacatgatgaacgtacggttgtcttcacaggctgccgccgcccactggggcgagggtgccctgctcagtttcaacggcgacgaagcccatctccatctgggcagtggccaggagaaggaggcgctgcgcgccatccagcgcgctgccagacgcctcgaatcgagcggtatcaagcgcgtcaagctggtgggtgagggctggaatggggagcgtcgctacgcctttgcccagggcttctatgccgccaagggggttcgcgagctcgatttcggcgaacagagcgaccaggaggctgccgagctggcggccttgctcaaagcgacccgctgggtgcgtgaagtgaccaacggctgcccgcaggagatctatcccatgagcctggcggaatccgccctgctgctcatccgcagtctcgccggtgacaaggtgaccgcccgcattactgccggggaggcgctgcaggaggccggtcacatcgggatctggtcggtgggccgcggcagcgagcgcgagccggtgctgctggagctcgactacaacccgaccggggatgccaatgcccccgtgctggcggcgctggtgggcaaggggatcaccttcgattccggcggttactccatgaagtcttccgacaacatgctgccgatgaagtccgacatgggcggcgctgccatggtgaccggcgcgctggcgctggccatcagccgcggcctgaacaaacgggtcaagctgatcctctgctgcgccgaaaacctggtctccggccatgccttcaagctcggcgacatcctcacctatcgcaacggcatctcggtcgagatccagaacaccgacgcggaaggtcgcctagtactggctgacggcctgctggccgccagcgaaagcggggctgcctacatcctcgacgccgccaccctgaccggcgctgccaagaccgcgctgggtcgcgactacaacgccgtgtttgccctcgatgaggccgagcaggcacgtgcgctggctgccgccaaagccgaaaacgagcaggcctgggcgctgccgctggagccctggcatgcgggccagctcacctccgcctttgccgagcttggcaacgtggcgtccgccgaaggcaccgcaggtgcgaccacggcggcggccttcctgtcgcgcttcgtgcgtgacgaaggcaagggctgggtgcacctggatctggccgcttcctatcagaagtcgggcaatgatctgtgggcgaccggggccaagggccacggcctgcgtaccatcgctcgctggttgcaggaggtgagtgaatga

SEQ ID NO: 262303 - DNA, 625 bp, Unknown
  Bacterial polypeptide expressing nucleotide sequence isolated from the Sargasso Sea
catggtgaccggcgcgctggcgctggccatcagccgcggcctgaacaagcgggtgaaactcatcctttgctgcgccgagaacctggtctccggccatgccttcaagctcggcgacatcctcacctatcgcaacggcatctcggtcgagatccagaacaccgacgcggaaggtcgcctggtactggctgacggcctgctggccgccagcgaaagcggggctgcctatatcctcgacgccgctaccctcaccggcgccgccaagaccgcgctgggccgcgactacaacgccgtatttgccttcgatgaggccgagcaggaccgcgcgctggctgccgccaaagccgaaaacgagcaggcctgggcgctgccgctggagccctggcatgcgggccagcttacctccgcctttgccgagctgggcaacgtggcgtctgccgaaggcaccgccggtgcgactacggcggcggctttcctgtcgcgcttcgtacgtgacgaaggcaagggctgggtgcacctggatctggccgcttcctatcaaaaatcgggcaatgacctgtgggcgaccggtgccaagggccacggtctgcgcacgattgcccgttggctgcaggaggtgagtgcatga

SEQ ID NO: 262304 - DNA, 802 bp, Unknown
  Bacterial polypeptide expressing nucleotide sequence isolated from the Sargasso Sea
tacagatagttcagcagctactacaagcgcactagaatcaataacactaaatagtgttggtgttgctaatactttagcagctcttacaacatcaggtgtattaacaagttcacttcatgttacaggttcaacaaaacttacaattactggtgcacttgattcagcaattacgacaattgatgcttcaggaagtactggtggtttagaattaacaggagcacctggtgctgctgttctttctgttactggtagttcaaaagctgatacattaacagctgttggtgctggtacaactactttatcaatgggtggcggtaatgatactgctgactttaatgcaaactggactggcgctgatacatatgatggtggcgacggaacagatacattaagaatagatggtgatgtttctaactcaggtttaagctcaactgtttttggtggtctttcaaatgttgaagtacttgctgttgatacggcacatacaataacattagatagtaacactccatttacaactattgatatttctgaaactgctgatcagacattaaatcttaatgatgggtatacacaagctactcttgttaaaattggaagtgacttaactgataacattaataacaattctaatgttcaattaacacttcaagcaaatagtggtgcgattacaactaacctagatatcgttggttcagttggaacatctgataccttaaatattgtgaacgcagcaactggaactaatacatttgatgcgaataacgatgtctttgaaacaattaacttagtagcgtattct

SEQ ID NO: 262305 - DNA, 425 bp, Unknown
  Bacterial polypeptide expressing nucleotide sequence isolated from the Sargasso Sea
aaaaattctaggggttgtttcacccgtggatggcgctgtactcgtcccgccaagaggagctgactccagatatggtgcgctttgtgaagaatttgtagagatgccccacacaggtcacattggatctttctgtgtgaccaatgttcctatacctggacgagatttggaattaccctacatttcagcatggatattcctcgacggagctgacattgggtttctaaaccttgttgctgaatgcccaccagaagaatgccggatcgggatgagagtcgaagcagtttggaaaccagacgaggaaattgggatgacggccgaaaatattttgtattggcggcccacgggagagccagacataccctttggctccgcaggtgtccgaggatggcacgctcaaggaaaaggcagcgaaactaatgcgtaaa

SEQ ID NO: 262306 - DNA, 905 bp, Unknown
  Bacterial polypeptide expressing nucleotide sequence isolated from the Sargasso Sea
ggacagactgcggacacaaaagcacaacgtcttcactacagcggtggggatttgtgtctgaaccaggagctaaaaatttatctgcgcgaaagtgattttccagaactgaaaaattatatcggtgatgacctgctggtgacggatggtaccagtctgttgggggcagatgataaagccgccatcgccgcgattatgaatgccctggagtaccttgtcgcacatccggagattaagcatgggccagtgaaggtcggttttgttcctgatgaagagcagggattacgaggtgcaaaagcatttgatgttgcggcgtttggggctgattttggctataccctggactgctgcggcattggagaatttgtctatgagaactggaacgcgggtgatgcggaaatcatctttaccggccagtccgcacaccctatgtcggccaaaggtaagctgaagaactctctgctgatggcgcataagtttattgcgatgctgcccggaggagaggcgcctgagtatacggaaggacgcgaagggtattactgggtaaaacaacttcagggtaacagcgcccgtacggtacttaagctggatatccgggattttaccgaagaggggtataaggcgcgtatggcatatatccgccagctggccgtcggcacctgcgcgctgtggggagaaaacagcgtggtctgccatttaaccgatcgctatgccaatgtgttcaatagcttgcagggcgatgctcactacccgattgatattgcgttacgcgcgtatcagaagtgtggcattaccccgcaacctgtcgccatgcgtggtggatatgatggcgcagtgttatcgcagaaaggactaccttgcccgaatatttttaccggtgcccataactttcattcgatttatgaata

SEQ ID NO: 262307 - DNA, 214 bp, Unknown
  Bacterial polypeptide expressing nucleotide sequence isolated from the Sargasso Sea
gttgcttattgataatgttgtcacaaaaagtgagggtgactgcatggataaactacttgagcgttttttacactacgtgtcgctggacacccaatcaaaatcgggcgtgcggcaggtacccagcaccgaaggacagtggaaattattacaactgctcaaacaacagctcgaagagatgggactggttaatatttcactgagcgaaaaaggcacg

SEQ ID NO: 262308 - DNA, 787 bp, Unknown
  Bacterial polypeptide expressing nucleotide sequence isolated from the Sargasso Sea
ttcatagtgtcaaatctagaccaaaaccatagtgaaataagaatagcatttacaactgatgaagaaattggcaggggagttcataaagatcttcctaatgatttaagtgttaaatttgcatatacatttgatggagggaaagttggtgaaattgacaatgagactttttcagcagattcagcggaagttattataaaaggagtatcaattcatcctggagaggcaaaaaatgaaatggtaaatgcaacacatctggcatcagaaattattaaaagtttacctttaaaaactatgacaccagaagttacagaaaaacgagaaggttttattcatgctacggaaatgaatggtaattcttcggaaatgaaaattaaattcattataagagattttgaaataaaaggattagagaataaaaaagaaatcttgaaagatatatgcaaaaaaatacaaaatttagagcagagagccaaaattaatatttcatttaaacgccagtatagaaatatgcgctactggcttgatgaaaacaaaatccctctagaaatcgcagaaaatgcacttattaataaaaatatcaagcctattaaaaagcctataagaggtggaaccgacggctcactactaactgaaaatggagttcctactccaaatattttcactggaatgcaaaatgttcacggaccactcgagtggatatcttctacagatatgtcgttagcaactgagataatgcttgagattatcaagcttaattcaaatctcgaagcaaaaaataattcataaa

SEQ ID NO: 262309 - DNA, 766 bp, Unknown
  Bacterial polypeptide expressing nucleotide sequence isolated from the Sargasso Sea
aaggcgaaaaacattcctcacggcgatattcgcgtggccttcacgcctgatgaagaggtcgggaaaggggcgaagcactttgatgtcgccgcgtttgacgcccgctgggcctataccgttgacggcggcggagtgggcgagctggagtttgaaaacttcaacgccgcgtcggtgaccattaagatcgtgggcaacaatgtccatccgggcaccgcaaaaggggtgatggtgaatgcgctgtcgctggcggcacggattcatgcggaaatccctgccgatgaggtgccggagatgaccgaaggctacgaaggattttaccatctggcgagcatgaaaggcagcgttgaccgggcagaaatgcactacatcattcgcgactttgaccgtaagcagttcgaggcccgcaagcgcaaaatgatggaaattgccaaaaaggtcggtaaggggctgcatccggattgctatattgagctggtgattgaagacagctattacaatatgcatgaaaaagtgatgtcgcacccgcacgtcgtggagattgctcgccaggcgatggtggattgcgatattgaaccgcaaatgaagccgattcgcggcggcaccgacggcgctcagctctcctttatggggctaccctgtccgaatctgtttaccggcggctataactatcacggcaagcatgaattcgtcacgctggaagggatggagaaggcggtacaggtgattgtgcggattgcggagctaacggcaaaacgcggcgcctgat

SEQ ID NO: 262310 - DNA, 307 bp, Unknown
  Bacterial polypeptide expressing nucleotide sequence isolated from the Sargasso Sea
ggactgctacatcgagctggtgattgaagacagttattacaatatgcgcgagaagatagtcgatcatccgcatattatcgatattgcctgtcaggccatgcgcgattgtgatatcgaaccgcagatgaaagcgattcgcggcggtaccgatggcgcgcagctatcatttatggggctgccctgtcctaacctgttcaccggcggttataactaccacggcaaacatgagttcgtgacgcttgaagggatggaaaaagcggtacaggtaatcgtgcgtatcgccgagctgacagcgaaacaggaataa

SEQ ID NO: 262311 - DNA, 1243 bp, Unknown
  Bacterial polypeptide expressing nucleotide sequence isolated from the Sargasso Sea
atggaaaatggatttaaagacgagctaacagaaaggttaatacggtatactgctatagacagccagagtgatgaactttcccataaatcgcccagtacggatcaacagcttgatatgctgaatttattgaaggaagagcttcttgctttaggagttgaagacgttaagctcacggactatggagtagtattagcgacagtgcccggaaatatatcagcaccatctgttggatttttagcgcatgtggatacagcaccacaattcaatgcttcaggtgttaagccgaggctaattaaaggctataatgggggagatatcacatttcctgatgatccggagttgaccctttctccaaatgagttcgaatacctaaatgataaaaagggtgatgatatcattaccgcgtccggaactacattacttggagctgatgataaagctggtgtgtcgataataatgacagcaattaatcatctgttacaaaattctgaactaaagcatggtcccatcagggtggcatttaccccagatgaagaaataggtcgtggtgtaaaaaaacaactggccactgatctcggcgtagacacggcatacacctttgatgggggtaaaatcggagacttagaatatgaaaccttctctgcagataaagcggaggtaaagattaaaggtatatcgatacaccctggtttagctaaagataagttggtaaatgctatccatattgcagcaaagcttattagtactttgcctcaaaccactattaccccagaaactacggaagacaacgaaggttttattcatgccacagatatggttggagggtcctctgaaatgacgcttcgctttattttacgtgattttgagcttgcaggcttaaaagagaaaggtgatcttttgaagcaggtatgtgaggtggttaacttttcagaacccagagcagaaattacctgcgaaattataccacaatacagaaacatgcgttattggcttgagaagaatatgaggcctgttgagatagctaagagagctatggaaaacctaggcattgttcctttatcaaaacctataagaggtggcacagacggatcatttttaactgagttaggtatacctacgccaaacctattcacgggcatgcaaaacattcatggccctctagagtggatttccgctcaagatatggaaaaagctacacatttatgtttggaaatcataaaggagttttcaaaagaaaattagc

SEQ ID NO: 262312 - DNA, 1225 bp, Unknown
  Bacterial polypeptide expressing nucleotide sequence isolated from the Sargasso Sea
aatggataccttgcttgagcgttttctgcgttacgtgacttttcatacccgctccgatgcgaccaatcccgcctgtcccagcagcgagggacagctcgtcttcgcccgcgccctgtgcgacgagatgcagcagatgggactgagccgggtcaccctggaccaatacggctacctcaccgcctgcctgccgggcaaccagccggacgcgccggccatcggcctcatcgcccacatggataccgccgactacgaggcggcgcacgtggtgccccagatcatcgaaaactatcagggcggcgacatctgtctgggcaagggggacgaggtgctggccattcgcgattaccgcttcctgaaaaactacctggggcaggatcttatcaccaccgacggcagcaccctgctgggggccgacgacaaggcgggcatcgccgagatcctcaccgccatcgaccacctgctggcccaccccgagatcccccgtggcgatgtctgggtcggttttaccccggacgaggagataggccgcggtgccgaccgcttcccgctggaccgcttcccggccaagtgggcctatacggtagacggcggcgagctgggcgagctcgaatacgagaacttcaacgccgccggtgccaccgtgcgttttatcggcaacaacgtgcaccccggcaccgccaagggcagcatgatcaacagccagactctggccgcccgcttccacgccgccatgcccgccgagcagaccccggaggcgaccgacggctatcagggcttcttccacctggcccagatgaacggcacagtggaagagaccagcctgcactacatcatccgcgacttcgacgacgagggcttcgccgcccgcaaggcccagctcaaggagcgggtcgcctcgctgcagctggaggcccccagggcgcgcatcgagctcaccctgaccgacagctatcgcaacatgcgcagccagatcgagccgcacatgcacatcgtcgagctggccaaggccgccatgctggccgccgacgtcaccccgaggatcaaacccattcgcggcggtaccgacggggcgcggctctcctttatgggtctgccctgccccaacctgtttaccggtggtcacaacttccacggcaagcacgagttcatcccgctgcaatccatggagaaagcggtcaccaccctggtggcgctggtgcgcctgacttcggcctggcgcggctaa

SEQ ID NO: 262313 - DNA, 530 bp, Unknown
  Bacterial polypeptide expressing nucleotide sequence isolated from the Sargasso Sea
gatgaaattctttaataaagaaaataaattatatccaccaatcgaagcttatgattctggctatataaagcaaggaatccatgaaatttattatgagcaatgcgggaatcccaaaggtaaacctgcagtattccttcatggtgggcctggtggaggtgctggaagtttttctagaagattttttaatcctaagaaatatcgcatagttcttttcgatcagagaggatgtggaaaaagtaaaccccacacttgtcttgaaaataatactacttggcatttagttgaagacattgagtcaataagaaaaaaattaagcatagataagtggcttgtttttggtggttcttggggtagtacactcgcattggcttatgcgcagagtcatcctcaaaacgtaacagagcttgttttaaggcgtatctttatgttgagacataaagaaatccaatggttctatcaatatggagcaagcgaattatatccagaggcatggcaggggtttttgaacgaaattccaaaagaaaagagaa

SEQ ID NO: 262314 - DNA, 838 bp, Unknown
  Bacterial polypeptide expressing nucleotide sequence isolated from the Sargasso Sea
catgtctataacctaccacaccctttttgcacctctggagccgtttgattatggatacctagatgttggcgatggccatagtatttactatgaacaatgcggaaatcctaatggcaaggtggctttgtttgtacatggaggtccaggtggtggcggagacatcgcggccaggcgcttttttaatccctcacattatcgactcgtattatttgatcaaagaggagcgggtagaagtacaccgagagcgtctttggaaggtaataccacgtggcatcttgtggaagatatggagcttttgcgtaataagctcaacattaaagaatggcttgtttttggtgggtcttggggtagcacactttcacttgcctatgctcagacttatccggaggtagtcactgaactgattttaagaggcatattccttttgagggagcaggaaattcattggttctatcagtctggtgcaagtgaattgtaccctgatcaatgggagctttttattgagcagataccagaaaatgagcggcatgatttattgtctgcatactatcgtcggttgatcagtgatgatgccaaggtcaagctcgcagcagctaaagcatggtcgatgtgggaaggggcgacgagttttttagattttgatcctaatagaaccaagcaatttggggcaccagatttcgctattgcattagctcggatagaaactcattattttattaacaatggtttttttatggacgacaatcagttactgaaaggaatagaacttatacgccatgttccagctgttattgtccaaggtcgttatgatgttgtatgccctatgaggagtgcgtgg

SEQ ID NO: 262315 - DNA, 964 bp, Unknown
  Bacterial polypeptide expressing nucleotide sequence isolated from the Sargasso Sea
gatgaagttctttaataaagaaaataaattatatccatcaatcgaaccttatgattctggctatataaaacaaggaatccatgaaatttattatgaacaatgcgggaatcccaaaggtaaacctgcagtattccttcatggtgggcctggtggaggtgctggaagtttttctagaagattttttaatcctaagaaatatcgcatagttcttttcgatcagagaggatgtggaaaaagtaaaccccacacatgtcttgaaaataatactacttggcatttagttgaagacattgagtcaataagaaaaaaattaagcatagataagtggcttgtttttggtggttcttggggtagtactcttgctttggcctatgcgcagagtcatcctcaaaacgtaacggaactggttttaaggggtatctttatgttgagacataaagaaattcaatggttctatcaatatggagcaagcgaactttatcctgaagcatggcagggatttttgaacgaaattccaaaagaaaagagaaacaatttggttgatgcctatagggaaatctttaatggagacgatgaagaaaaaaaattatcagctgcaaaagcctggtctaaatgggaggcatctactagttttattaatcataatcccgaagctgtaaaagattctgtggacagcaaatttgcattagcttttgctcttattgaaaaccattactttgtgaataatggtttcttggaaaatgaaaatcaacttctcgataatatcgataaaatcagggatatccctgctgtaataattcaaggaagatacgatgttgtatgccctcctacgactgcttatgagctacattcgagatggccagaatctgaactaaaaatagctcctttttcaggtcattctgcattcgaaaaggaaataacacacctactaatagaaaccacagatagattttcaaaaacctaa

SEQ ID NO: 262316 - DNA, 913 bp, Unknown
  Bacterial polypeptide expressing nucleotide sequence isolated from the Sargasso Sea
atgaattctgggttcattaaaaaaggaattcatgaaatttattatgaacaaagtggtaatcccaaaggcaaaccggctatctttcttcatggtggtccaggaggcggtgctggaagcttctcgagaagattctttaatccaaagaagtacaggatagtcctttttgatcaaagaggatgtggcaaaagtaaaccgcatgcctccttagaaggcaatactacttggcatttggtagaagatatcgaatctataagagaacaattagatattgaaaaatggctagtctttggcgggtcttggggaagtaccttagctttagcttacgcacaaagtcatcctcagcgcgtcagtgagctcgtgctaaggggaatattcatgctcagagaaaaagaacttcaatggttttatcagtatggtgcaagtgaaatatatcctgaggcgtggcaaggatttttagaagagatccctcaagagaagagaaataatcttatcgaagcttatagagaaatctttggtggtgatgatgaagaaaaaaagctatctgcagcaaaagcatggtcgaaatgggaggcttctaccagcttcattaaccacaatccagaagcagttaaagaatctatcaatagtcaatttgctttagctttcgcacttattgaaaatcattattttgttaataaaggcttcttagatcatgaaaatcagcttttagataatattgataaaattagacatataccggcagttattgtccaaggtagatatgatgttgtatgccctccaacaacagcttatgaattacatcaaagatggcctgaatcagaattgaagatagcccctttctcgggtcattcagcatttgaagaggaaatcacggatttgctcatagagactacaaataatttcagcaaataaa

SEQ ID NO: 262317 - DNA, 964 bp, Unknown
  Bacterial polypeptide expressing nucleotide sequence isolated from the Sargasso Sea
gatgaaattctttaataagaaaaataaattatttccggcgatagagccatttgattcagggtacattactaaaggaattcacgaaatatattatgagcaatgcggtaatcccaagggaaagccacttatcttcttgcatggaggccctggtggaggagctggaagcttttcaaggcgattctttgatcctaaaaagtatcgtattgttctctttgatcaacgaggttgtggcaagagcaaaccacacacttgtcttgaagataatacaacgtggcacctagtagaagacattgagtctattagagataaacttaatatcgataaatggttagtttttgggggctcctggggtagtactcttgccctggcctatgcccaaagctatcctgatgtagtctctgaacttattcttagaggtatttttatgctcagagaaaaggaactccaatggttctaccaatacggagctagtgagatttatcctgaggcatggagagggtttttgaaagagatccctctagaaaaacgatcaaatcttataggtgcatatagggaaatatttaatggtaaagatgaagaaaagaaactttcagctgccaaagcctggtctaaatgggaagcatcaacaagttttatcaatcataatccagaggcggtaaaggattctgttaacagtgaatttgctttggcatttgccttaatagaaaatcattattttgtgaataaggggtttctagaagatgaaaatcaacttctagataatatcgacaagataagaaatatacctacagtaatagttcaaggaagatatgatgtagtttgccctcctactactgcttacgagttacattcaagatggcctgaagcagaattgaagatagcacctttttctggtcactcagcttttgaagaagaaattactcacttactgatagaagctactaataaatttgcgaacagttag

SEQ ID NO: 262318 - DNA, 400 bp, Unknown
  Bacterial polypeptide expressing nucleotide sequence isolated from the Sargasso Sea
aatgaaactttttaataaaaaaaacaaattatttccagccatagaaccttttgacaatggatatcttgaaagaggagttcatgaaatatactatgaacagtgcggtaatccagaaggtaaacctataatttttttacatggaggtccaggaggaggagctggaagcttttcaagaaggttcttcgaccctaagaaatatcgaattgttctctttgatcaaagaggttgtggcaagagcaaacctcatacttgtttagaagataatactacttggcatctcgtagaagacattgagtctataagaaaagaattagagatagaaaaatggcttgtttttggaggttcatggggaagtactcttgccctagcctatgcacagagtcatcctgatgttgtctca

SEQ ID NO: 262319 - DNA, 724 bp, Unknown
  Bacterial polypeptide expressing nucleotide sequence isolated from the Sargasso Sea
atgaccgcacatgtacttatgctaagtagctcacgtcaaggcgacgaggcttacttagagcacgctagagcgcttatttttgcacacttaggcgaaattcgcgaccttctatttgttccttatgccgccgtcactcaaacgtacgatagctatgtagacgccgttactagcgccttgccagagtgcaaggttactgggctacataccgttgaagatccggttgccgctgtaaataacgcgaagaaaaacggccaagccattgttgtaggcggtggaaacacctttcacctgctttctaccctttatgcaaacgcgcttattgtgccaataaagcacgccatcgccgattgtacgccttatattggctggagtgcgggttcgaatatttgtggtcaatcaattagaaccactaacgacatgcccattatcgagccgccgagttttgatgcgctagatatcgtgccgtttcagttaaacccgcactacaccgattatcagccgccgggccacaatggcgaaacccgcgaccaacgtctggcagagttcaccacgcttaatccaaccacaccagtagttgctattcgcgaaggtacagcgctgcgccttactaataatcaacttagcctagtgggtgaaaaagacggctttatctttctaggtgaagaaaaaacgccaatcagttcaggtgatgatttaacttatttgcttgatagcggcgaatagc

SEQ ID NO: 262320 - DNA, 712 bp, Unknown
  Bacterial polypeptide expressing nucleotide sequence isolated from the Sargasso Sea
atgacagtcaatgccctactactgagcagttctcgcgtcggtgatacgccttacctttcccatgcgattccctttatcaaaccgctgaccactaacgcccaaaaatggatctttatcccctatgctggtgtcagcatgagttacgacacttatttggcctcagtcgtggcgggattaagcgaactcaggctcgatatcagcggcattcaccagcatcctgatccgcgccaagcgattaaagatgccgacggcattttgatcggtggcggcaacaccttccatttactacacgagctctataagtacgatttagtgcatcttatccgtgaagaagtactgaatggtaaaccttatattggttggagcgcgggctctaacgtctctggattgagcattcgcaccaccaacgatatgccgattatcgagccgccttcatttaccgcgttaaatatagtgccgtttcagttaaatccacattattcgaactaccgcgctccgggacataacggcgaaacccgcgcccaacgtttgctcgaattcactcgtgtcgaccccatcacgccagttgtgggtattgtcgaaggcagcgcactttggcgtcagggagacaccttatctctgctaggtgacaatcctgcctatttattctgtggtgagcagcaagaaatcccgatccctgtcggcagcgatttatcccatatgctgaaataag

SEQ ID NO: 262321 - DNA, 736 bp, Unknown
  Bacterial polypeptide expressing nucleotide sequence isolated from the Sargasso Sea
tatgtccgaacctgcggtaagggtgctactaggcagcgggggaatctccacggaagataggagggaggtctacaggaacctcgtcggcgaccacttctcagactccgatacggtcctattcgtaccttatgcatctgatgactatgactcctacacctcaaggatgaacgactttatgggccccaatgggccaagtcttgttggaatacacacgttagaagacgagctgtctgcagtcaatgaagcagaggggatttacgtgggaggggggaactcgttcctcctcatcagagacctccatgagagaggcctgattggtccaattagggaaagttgcttgggaggggtcccatacctgggggtgagtgcggggtccaacgtggcatgccccaccatgatgactaccaacgacatgccaatcgttctgcccccgtccttcgagtcctttggcatcgtcccattccagatcaatccccactaccatccgggcaaggtcctgttcatggatggggatgaggttacgaatcactacggtgagtcgagggctcagagaatagccgagttccataggtaccaggacactccggtgctagggttgtgggagggttcgttcgtccagtgggacggatcgaggggaagactgactggcagagcaacggcgttcctccccggagccgagccctgtgatttccatgatggttcggaattcgactccgaactgagattcagagactag

SEQ ID NO: 262322 - DNA, 712 bp, Unknown
  Bacterial polypeptide expressing nucleotide sequence isolated from the Sargasso Sea
aatgaccgttaatgccctactgctaagcagttcacgtgttggtgacacgccttatctttcccatgcgctgccttttatcaaaccactcaccgctcacgcacaaaaatggatttttattccttatgcaggggtaagcatgagctacgacacctacttagcctctgtagtgacgggactcagtgagcttaaactcgatattagtggtattcatcaacaccctgatccgcgccaagcgattaaagatgccgacggtattttaattggtggcggcaacacttttcatcttttgcatgagttgtataagtacgatcttgtgcagcttattcgtaatgaagtccttagcggtaagccttacattggttggagcgcagggtcaaatgtatctggattaagcattcgtacaactaacgatatgccgatcattgaaccgccatcattcgcggccctaaacatagtgccttttcaggtaaatccacattattcaaactaccgtgctccaggacataacggtgaaactcgggctcagcgattactcgaatttacccgtgtcgatccgaacacgcccgtcattggcattgttgaaggcagtgcgctatggcgacagggagacactttatcaatgttgggtgataatcctgcctatttattctgtggcgaacagcaggagctccctattcccgtaggtagcgatttatctcatttgctaaaataa

SEQ ID NO: 262323 - DNA, 643 bp, Unknown
  Bacterial polypeptide expressing nucleotide sequence isolated from the Sargasso Sea
gctgaggcgcgagggagagaaggagggaaaaagcgaaagcggcgggggggacgcgtcttcggacgcgtcttcgtcgggactgttcgacgctttggcgtcgctcgcggcgtgcgcgggtcggtgcgcgtcgcactcgctctccgcgcggcggttccgcggggcgattcgaaccgtcttggacccccgcgtgggcgtccgtgggaggcggctgctgttgggggcgctccgcgaggcggcgacgcgggacggccccgcggcgtatttcgatttcgcggggccccgaacgcgcgcgccgacgccgcgaaacccgcgaacgcttcgaaacccttcgggtggttcttcgagcgcgtccgacggtcccgggtcgttggcgcttcggcgcgtcccgttcgcgttccccgcggggcgcggggggtacgcgttcgcggcgtggctgagggtggaggcgtttccgcgggagggcgccggtcgcgcggcgctgttcgcgctccgcgcaaccaacggtctcggcgtcgccgccgagctcgggcccgggggggtggagctcagcgtgttttccggcgcgagccaaagcggtcaaggcggcgggggtcacgcggcgtgctcggaggtggcgtctctggacgcgccgattcgggagaaa

SEQ ID NO: 262324 - DNA, 524 bp, Unknown
  Bacterial polypeptide expressing nucleotide sequence isolated from the Sargasso Sea
gctgccctgtgtatttggtgaggccctgacggcgctgtatgcggcgctggatgagtatcaaccgctgttaacgatagcggtcgggcaggcgggggggcgtgtcgatattaccgtcgaacgtgtagcgataaatgttgatgatgcgcgtattgccgataataaaggccaacagccggttgacgtgccggtggtggccggcggtccggcggcctggttcagcagtctgccggtgaaagcgatcgtcgcggcgctgcgcgagcagggcataccggcatcggtgtcgcaaacggcggggacattcgtctgcaaccacgtgatgtatggtctgctgcatgcattaaacgggagaaccggggcgaaaggcggctttatccatattccgtacctcccggagcaggcggccgcccatccgggtgaggcgagtatggcgctccaaaccgtccgtgcggcgctggagacggcgattgccatctccctgcgccaggagggggatgtgaaaattgtcggcggtgcaacgcactaac

SEQ ID NO: 262325 - DNA, 1013 bp, Unknown
  Bacterial polypeptide expressing nucleotide sequence isolated from the Sargasso Sea
tatggctgtagacacagtctggaatgacttcggactagacggaacaggctccgtaatcgcaattctcgataccggagttcgtggcgatcacgagggtcttaacgacatggacgatgacccctttacctgtatcgatgaccctcccgatccggatccgcttgatccagagccacagccaatcccctcggactgcgatccgaagattattgctttctttgatgcggttttcactgatgaagaacaagacccctccacgtcatatgattcgggcacccatggcacccacgtcgcaggaattgccgcgggttccggtggggggcagacagatcctggaactggtttgaggtatgtcggtgccgcgcccggagcttacctcatcaacatcctgggttgttgcgatggcgatatcgaggatgtcatgcaaggcgcccagtgggccatagaaaacagggacaagtacggtatcgacgttgtcacctcgtccttgggggaacagcagttcgaggttcacatcgacaatgacgggagctccgcttggagccgtcagatggatatggtcgtcgaggctggaatcataaccaccctctctgcgggtaacgaattcggtggagcgacccttgctgggtgcaacacaatcgacagcccaggcgacgcagagctaccagtcacagtggccagccttgacaaggacctaggcctcgcgatttacagtagtcggggttacacctcggacttccgagtcaagccagatgtggctacgataggttccagcatcatggctccagatgcagcgactcaggacgggtacacgagcaagtcaggaactagcatggccacgccacttatggccggaatcgctgcactgatggttcaagcgaaccccgatttgaccccgacagagttcaaggacatcatctccgctcactctatagagagagacatccaactcttgaacgaccccggattcaacgactgcagcgtacttgaaactcgtcctgacaacgagttcggtt

SEQ ID NO: 262326 - DNA, 643 bp, Unknown
  Bacterial polypeptide expressing nucleotide sequence isolated from the Sargasso Sea
atgttaaaacgaagtctcttctgtcgtgttgctggatggggagtcacaaatacttctgatcaatcttatcagcttcaaattgcatctgttcaatacgagccatcatgcggaaaattgaatcagcgaagcaaaataacagaagacatgacctgctttaaaggaagacctggcgtcgatgcatgtcaaggtgattcaggtggcccgctcatgtgtcatgtcgatggatattatcttgttcttggaattgtctcctggggagtcggatgcgcccagtctggatatccaggagtttatcaacggccagcatacagtgcgcattggattaaagaaaccattgccggttacaaaaggctcaaaccacatttatctcaatatgaatggcggaaacgagctcaatgtttaaaacggagagaaggtcgaagttacgagtcttccgctgatggaccaagtgactggcaatccctgatcgacgatatatcccaagaacaacgatcggaagaattaccaaaagctcctgaacctgatttttctggaagtggctctaccaacggaaaagaagaagatgaaaaggcatctatccacattacaacaactggtggaagaccgatttcaaaaaattgtagttggtttcgaaataactaat

SEQ ID NO: 262327 - DNA, 951 bp, Unknown
  Bacterial polypeptide expressing nucleotide sequence isolated from the Sargasso Sea
gccgctagtccgcacacccggaacacctttacccgctccgggccgcgctgcccgtccccgtgttcgctcgcgtgcggtggcgttcatcgccgcggtaacggctttgtgtctcgccgcgatacccgttgccagcgcgactagtgccgccgcgggcaacgccgcgggagaacgtcagccgcgtctgatggccgccggggatgcctctggcactccattcgtcaccgcgttgatctccgttcgcggtaactcctacggcgtctgcagtgccggtgtctggaagccaaccgtgctgctcaccgccgcgcactgtgtcatcgatgaaacaaccggtgggcccatcgatccttcatcgttcttcgtcgtcaacccgggaacggcctttcggatcaccagcggcggtgttcaaggcgccacaccggcccgcgtggtgcaggcattcgtcgcggatgattttcaactgcgcggcaccgatgttcccggcgatgacattgcattcgtcgttctcgatcaaggtgtgggcgacgtcaccttctcccgcctggcgacaacagcggagcttgggcgctggttgaacaaccgaacccccgtgtccgcgctggggtatggctttccgtcaccctccagccccaccaccgatattccgcggggagcggcgctgccgctgttgcgtgtgctcgatgacttccggaattccgacggtctggcaatcttgtcctcgaagcagtcggggatcgacgcgtgctccggcgacagtggcggtccacgcttcgtcatcgagaacgacgctcccctccttctcggcaatatcgccggcggctcgtgcaacgggcttccaggcgctggggtgatcgggttcaccggcatgagttaccggacacttgccaacgccgccttagcgaccgccgggctttccctgatccgagccggccgcagaaggtccagtcctcccgg

SEQ ID NO: 262328 - DNA, 907 bp, Unknown
  Bacterial polypeptide expressing nucleotide sequence isolated from the Sargasso Sea
ctattcatcatacagtggtaccagtatggcaactcctcatgtggctggagctgccgcgcttgccttggcagttgatcctacactgacagtgtctcaactcaggactgggcttttaggaacagtagattcagtagcaagtttgtccggtaaaaccgtgacaggaggaaggcttaatgttggtcggcttgttgaaagtctttcaagtgaaccaacaatcccgttgccaccttccgggctgaatgcgagtgacggtacgacaattggttcagtacaagtctcttggggatcgtcgctatttgctgatagctacacattatggagaagtcggatagatgatgcttctactgcagtggtcatcgcagatagtctttccaccacaagctatcaggatctagagacggatgtgaatgaaagttattactactgggtgtctgcaacaaataatcttggtacaagtccattaagtgattctgaccgtggatttcattcgccaagccgatcaccaaacgatgctttcgtagacagaatagttcttgagggcgttctagcgaatgcctcaggaacaaacctggatgccacagaagagtctggtgagccaacacatgccggtgttgggggtggaaagagcgtttggtggacgtggacatcaccagcttctggaagtgttgaaataaatactgttggaagtggttttgatactgtgcttgctgtttatcaaggatcacgcgtagatgagctgtctcgaattgtcagcaacgacgatatcgattacggagttgtgctccaaagtcgtgttacatttgaagccgcagctgggcaggcatatcagattgcagtcgatggatggagcggagcaacgggatctattgaattagctttgactctcgacgctccagtcccaccctga

SEQ ID NO: 262329 - DNA, 671 bp, Unknown
  Bacterial polypeptide expressing nucleotide sequence isolated from the Sargasso Sea
catgtgggtgaatggtggcgagatccctggtaacggtatcgacgatgacggcaacggcgtgatcgacgatgttcacggttacagcgcggtcaataataacggtaatcctatggacggtaacggccacggtacccatgtttccggtacgattggcgctaaaggcaataacggtgtgggcgtagttggggtgaactgggatgttaaaatcgccgcctgtcagttcctcgatgccgatggttatggttctaccgcaggcgcgattgcctgtctggactactttaccgatcttaaggttaatcatggcgttgatatcaaagccactaacaactcttggggcggtggcagctttagccaagccttaaaagatgcgattgaagcgggtggtgaagcgggcattttgtttgtggccgccgcgggtaacgatgcggtggacaatgatgccagcccacattatccctcaagctacgactcggatgtggtgttgtctattgccagtaccgaccgtaatgaccgtatgtcagatttctcccagtggggcttaaccagcgtcgatatgggcgcgccaggtactgcaattctctcgacagtaccaggtggtggttatgccagctattctggtacctcaatggcgacaccccatgtgacaggtgcggcggcactggtgtggtcgt

SEQ ID NO: 262330 - DNA, 971 bp, Unknown
  Bacterial polypeptide expressing nucleotide sequence isolated from the Sargasso Sea
atcaagtggtcatggaactcattgtgcaggcacagttggaggtaacggagatgcttcagcaggaagtagacttggaattgcaccaaattcatggctaattggactttcaatgggagaattagcatttactattgatgaatactcagcattagaacatgtatatgaattatcaaaacctggttcatctacacaacaagcttggaatattagggttgttacaaattcttggggacctggtttcccatttgactccattgatgcaaatgatttaactgtacaaattattgaaaaaataacatatgaaaataatgttgctgtaatttttgctaatggaaacgatggaggagatggtgaagaagatcaatcaaatatttttgccaaggttccagtttctatcggcgttgctgcctctaatagagatggtgtcggcatgtctgatttttctagcagaggagatatgactaatcgagatacatggccagatgttagtgctccaggtgtagatatttggtctgctgctgctcgagctacaatgattgggggaggtactggagccgcagacataggttctggcgaattagactactattatcttgcaataagtggcacaagtatggcaactccacatgttgcggggttagcagcattattatggcaagctgcgccatctatgaaaatgagtgattacgatgaagatcttgattccattggaaatccaacattacatgatccttcaggaattgctccaccccaagaagcagaaaggaaaattcacgaacttgaagtgattttgaaattgacttcagattatattacaaaaggagataatcttgcagaaaacaatagtattggattaaataaccacactctagattatgctcaaggatatggcatcgttaatgcagataatgccgtagcattagcattaacattacaacgattaagagatacgaatggtgatggattagtag

SEQ ID NO: 262331 - DNA, 487 bp, Unknown
  Bacterial polypeptide expressing nucleotide sequence isolated from the Sargasso Sea
gtctgctaccgcttttccatctggtgtgaaaaatactcctgttgaaataaatgaaacaatagctcccatacggatatggaaaaaagaatatcgtaccgattcgggtggtcctggaaagtatcgaggtggactgggccaagttatggaaataggtagcacggagggcgctccatttgctttatcttctatgtttgacagggcgtatcatccggctcgcggaagaggcggcgggcatccaggcgctgcagggagagtaagtctctcctctggtgaggtgctcccgcccaaaggtaggacttctgtagcgagtggccagcgagtgattctagaaatgcctgggggtggtggaaggggtaagccagaagaacgagatacctctatgatcgaagaggatcttaagaatggttttataagcgttaaaaaggctaaatcagagtatggtgtaattgtttcggaggctgagtcgcttgtcgttcggaaggactaa

SEQ ID NO: 262332 - DNA, 715 bp, Unknown
  Bacterial polypeptide expressing nucleotide sequence isolated from the Sargasso Sea
gtggctgctcggcatgccatagggcagatgctgcctgatgttgtgcttggctgtctggatcaagcctgccctgatgtagtgccggctgagggaacgtcttgtctatggaattttgtgttgtatggcggtcatggcatcagcgggggagaatttggaaactctactcctttcactgttactatgtttcataatggtggtacaggcgctagggttgctatggatggattgtctgcgacctcatttccgtccggtgtgaaaaatacccctgttgagattaatgaaaccatagctcccatacggatatggaaaaaagaatatcgtgctgattcaggtggtccggggaagtatcggggtggattgggccaagttatggaaataggtagtacagagggtgctccatttgccttatcttctatgtttgatagagcgtaccatcccgctcgtggaagaggtggggggcggtcaggggctgcagggagagtcagcctctcctctggtgaggtgcttccacccaaaggtagaacctcggtcccgagtggggaacgggttattttggaaatgcctgggggtggtggaaggggtaaaccagaagaaagagatatttctatgatccaagaggacctcaggaacggttttataagtgcggagaaggctaggtcagagtatggtttagctgtttcggatgcagatttgttcgtttcccggaaagattaac

SEQ ID NO: 262333 - DNA, 588 bp, Unknown
  Bacterial polypeptide expressing nucleotide sequence isolated from the Sargasso Sea
actggatacttactataaggtcgacagtgtatttgtgcataagaagtatcagccaggcattagccatgacattgcgttaatcaaattagtcgaccccgtaacagacgtgacgcctgctcgactctacaaacgctccgatgaattaggcaaaaacatctggtttatcggggcgggtggcaccggaaatggtttaacggggcaaaccgtggataatggcgccaatgcaggagtgctgcgcaaagcgcaaaatagcgtcgaatttgcccaagggccattattaacatttacattcgattcgggggatgaggcgctacccttggaaggggtttctggcggcggtgatagtggtggtccagcctatctcacgcttgagggcatacattacttacttgggatcagctccagagtgggtggaggcgaaataggcaagtatggcgtggtggaagtgtattccagagtgtctttctttagcgcttggattgaggatatcaccagtggcgacgccaaactgcagcagcaattcgccctgccaaaactggataaactgccagcaggaatgacggcagaaatgttagccgaagtctgtgc

SEQ ID NO: 262334 - DNA, 813 bp, Unknown
  Bacterial polypeptide expressing nucleotide sequence isolated from the Sargasso Sea
ggcgccgatggcacaggctctacagcaggggctatagagtgtattgattactttaccgacttaaaagaaaaccgcggcataaacattaaagcgaccaataatagctggggtggcggcggctacagtgaagcgctagaaactgccattgaagtctctgggcaggcaggcatactattcgttgctgcagcgggtaacgcggggtcaaacaacgacaacgtcgataactacccgtctaattatgtgacgacgactaacagcttgatggctgttgccagtatcacacgtaacgacagcgatagtggctattcatacggcattgaaaccgtagatattgccgcgccgggttcggcaattttatcaacaattccaggcgatagttatgcggcttattcaggtacgtcgatggcaacgcctcacgttgctggtgccgctgcgttagtatggtcgctaaatccggagcttacgccttcagaaatgaaagagttattgatggcaaccggtgaaaccagcctatgggctgacggccgcacagtgtcgggcaaccggttgaatgtgctaaatgcccttgaagaagctgatccaactccaggttttaaactgggcattacacctggttcagctgaaattgaagcgggtgaaacttataccttcaccatcgaagtcggttctattgctggctacgaggaagaagttcagctatctcttgctgaagagagcgacattgcttccctaagtgctaacactgcgatgcctggcgatactgtattacttatggttgaaaccgctgaagacacgccgtggggacagtacagc

SEQ ID NO: 262335 - DNA, 791 bp, Unknown
  Bacterial polypeptide expressing nucleotide sequence isolated from the Sargasso Sea
aagacgcttgggcactgccaagggcgcaactatagtagcacttggaactggagatggggcctcaatttttgcagccgttcaaggtcttgaatggacataccagcacagcaggcccggattaaatgagtacaatatcagagtagtgtcgaactcttggggtacaaatggggactacaatccctcaaacgccgtgactttgcttacggacatgctgacatacgaaaataaggtagcggtaatttttgccgcttctaatagcggtggcaatggtgacgaggcagaaaacgacctcagaaccaacatctatgcaaacacaccatccgctatatcagttgcagcacttgtccacgagggtgacgcagtcacatctttttctagcaggggttggaagactcaacaacatacttggcctgatattggagcacctggaaggaatatttgggcaactgctccaagggcaacctatatcgatgcttcaactaggacccaaggggatttgtattacatggctatctccggaacgagtatggctacacctcacataggtggaatagcaactcttttgttagcagccgccccatcgctcggtgtagcatcataccaagttgaagatcatgaccatttggatagtatgtacttcaacgagactgcaaagggaatccagtttgatgattggagtgataggaacgagtccaaggttcatgaagtcgaattaatacttgaactgacttcacattatggcttcttgaggaactcttgcgaagatgggaatgatgacgatatcctgtgac

SEQ ID NO: 262336 - DNA, 691 bp, Unknown
  Bacterial polypeptide expressing nucleotide sequence isolated from the Sargasso Sea
tctgatcgcgtcgctctcgaacactggcaccaccagtgccggttcccccggctactcgggcgaagccggtacttcgatggccacgccacatgtggcaggcgttgctgctttgatgctgtcggtcaacagtgccctgacgccggatcagattgcgaccgttctcaaacaatcggctcgcccgttcccagcgggcacgtactgcgcaacgcatacgggcgtctgcggcgccggtatgctggatgcgggtgccgccgttgccctggcgaagggcaatccgactgtgcacgcgtcgacgtcggcaagcacggtggttacaaacaatgcggtcacgctcacagcgaccggcagtgcaggcctcgtcaacaccatcacgagcgtgcagtgggcgcagacttctgggccatccgtcagccttacgactgccggccccgatagcaacggcaattacaccgccacattcacgccgtccgcggcaggcacctacgccttcaacgtcacgttgacgagcaacaccggcgcgaccgccacggataccacgaacgtgaccgtcactgcagcagccagcaccggcaccaccaccccgcctgctgcgacctccagcggcggcggtggcggtggcgccatcggtctggccggcgcagcattgctgctggccgccggtttggccggtcgtcggcgtcgcgctaagtaa

SEQ ID NO: 262337 - DNA, 685 bp, Unknown
  Bacterial polypeptide expressing nucleotide sequence isolated from the Sargasso Sea
ataattaataagtctgatattccgaatattttatcaagggttgaattgtcaacagacattaattcatttgcatcatgtgatttggtaattgaagcaattaaagaagatttaaacttaaaaaaaaatatattcaatcagttagataaaatttgtaaaactgattgtatattagctactaacacatcatcaatttcgattaatagattggcagaatcaacattacgctctgataaagtcattggtatgcattttatgaaccctgtccctgtaatgaagttagttgaagttattaagggtcgaaacacatcctctgaaacattaaatttgattttatctgtttctaaaaaattagataaaattcctgttcaatgtaacgattcacccgggtttgtatcaaacagaatattaatgccaatgataaatgaggctgcacattgttacagcgaaggagttgctgacgccttatcaattgattctattatgaagttaggaatggggcatccaatgggtcctttgaagttagcagatttaattggagtggatgtatgtgtatttatattaaatgtattatttgatgaactaaaggatgtaaaatacaaaccatctgatattttattaaaaatggttgataataatgaactaggaaaaaaaacaggtaaaggtttttataattatgaattttgaa

SEQ ID NO: 262338 - DNA, 527 bp, Unknown
  Bacterial polypeptide expressing nucleotide sequence isolated from the Sargasso Sea
actggatacttactataaggtcgacagtgtatttgtgcataagaagtatcagccaggcattagccatgacattgcgttaatcaaattagtcgaccccgtaacagacgtgacgcctgctcgactctacaaacgctccgatgaattaggcaaaaacatctggtttatcggggcgggtggcaccggaaatggtttaacggggcaaaccgtggataatggcgccaatgcaggagtgctgcgcaaagcgcaaaatagcgtcgaatttgcccaagggccattattaacatttacattcgattcgggggatgaggcgctacccttggaaggggtttctggcggcggtgatagtggtggtccagcctatctcacgcttgagggcatacattacttacttgggatcagctccagagtgggtggaggcgaaataggcaagtatggcgtggtggaagtgtattccagagtgtctttctttagcgcttggattgaggatatcaccagtggcgacgccaaactgcagcagcaattcgccc

SEQ ID NO: 262339 - DNA, 190 bp, Unknown
  Bacterial polypeptide expressing nucleotide sequence isolated from the Sargasso Sea
gatgctgtgcgccggagtgccagaggggggtaaagacagctgccaaggcgacagcggtggaccccttgtaaccagcatggcgcctggtaacagcagcagcaatgacggggcccaggtccaggtggtgggggtcactagctggggcagggggtgtgcccggccaaactatcccggggtgtactcacggtaa

SEQ ID NO: 262340 - DNA, 722 bp, Unknown
  Bacterial polypeptide expressing nucleotide sequence isolated from the Sargasso Sea
tgttgctccgggcgaatactctttgcgctcaagtgactttcctcaggtctttttcctcgaacaacaaggtatgagaaaagtatgtggagcaactttagtttcagatctttgggctctcactgcggcgcattgcgttggagagacatcacttggctccgttattcaaagaggagaggaatttgaggtaaagatagcaaacactgagcgaagcattgatcttgtggtcttgcatccagattttgtatcccctaatgcccctgaagtcgaccttgcgctcttacgattttcgcaagaggtaaactatccagaaccaattcctgtgaatactcagccgaatgagttgggagaagttgttaccttggtcggctggggttattttggtctcggaactacaggcaggcaatatgatgatggcacgaaacgccaagccgaaaatagaattagtcaagcagatcaacaactgcactccttttttgatgaccctcgtctttcgggaagtgcagctttgccactcgaagggaccctcagcttgggggatagtggcggtccagcttttttagacacacctgaagggttgcttcttgctggagtttccgtgggtcaaatcgagggaccccggttttctgaagaaactcagggacaatacggctctgttgctgtttttgagcgtttatcctcgcacatcgaatggataaacagtgtgatcaattccgactattaag

SEQ ID NO: 262341 - DNA, 838 bp, Unknown
  Bacterial polypeptide expressing nucleotide sequence isolated from the Sargasso Sea
ctagagccacagccaatcccatcggactgcgatccgaagattattgctttctttgatgctgttttcaccgatgaagaacaagacccttccacgtcatatgattcgggcacccatggcacccacgtcgcaggaattgccgctggttccgggggtggacagacagatcctggaaccggtttgcggtatgtcggtgcggctcccggagcctaccttatcaacatccttggttgttgcgatggcgatatcgaggatgtgatgcaaggtgcccagtgggccatagacaacagggacaagtacggtatcgatatagtcacctcctccttgggggaacagcagttcgaggttcacatcgacaatgacgggagctccgcttggagccgtcagatggatatggtcgttgaggccggaatcattactactctctcggcgggtaacgaattcggtggagcaacccttgctgggtgcaacacaatcgacagcccaggcgacgcagagctaccagtcacagtggccagtcttgacaaggacctaggtctcgccatttacagtagtcgtgggtacacctcggacttccgagtcaagccggatgtcgctacgataggctccagcatcatggctcccgatgcagcgactcaggatgggtacacgagtaagtcaggaactagcatggccacgccacttatggccggaatcgctgcactgatggttcaagcgaaccccgatttgactccgacagagttcaaggacatcatctccgctcactctatcgagagagacatccaactcttgaacgacccaggattcaacgactgcagcgtactagaaacccgtcctgaca

SEQ ID NO: 262342 - DNA, 874 bp, Unknown
  Bacterial polypeptide expressing nucleotide sequence isolated from the Sargasso Sea
gcagggagtcatagcgacagcagctggcacggcaccttcgtgaccggccagatcgtcgcgcaacacaactcggtgggcattgccggcatcgcacccaatgtgaccatccagatggcgcgggcgcttggcaagtgcggcggcaccacgtcggacatcatggacgcactggcctgggtaacgggcgagagtggcgtacctggtgccagcggtgttgcgctgccggtcaacgcgccgatggcgcaggtggtcaacatgagcctgggtggtgcgggggcttgctccagggccgaacaagcaaccattaccgcagcaagagcgcgtggcgcaaccatcgtggtggcaaccgggaacgacggtgctccgaccatcggctcaccagccaactgcagcggcgtagtcgcggtcacggcgcacaccatcggcggcgacaacgccaactacgccaacgtcggcaccggcacaaccctcagcgcgccgggcggtggctcaggcacggtcatcgcgggtagcggcatcaaaatccgttcaatctccaatgccagcctaaccaccccgggcactgacaccaatacgtataagagcgaaatgggcacctcgatggccacgccgcatgtggcgggcgttgccgcgctgctgctggcctacaaacccactctgagcgtaaacgacatcaaagcgatcctgacgcagtcggcacgccccttcccggcaggaacctactgcgcacagaatgtcggggcatgcggggcaggcatgctggatgcgggcgccgccattgccctggcggtcggcaacccgacggcgagcgtatcgagttcggccagtaccatcgttgccaacagtccggtaaccctcacggccaccgttggcgcag

SEQ ID NO: 262343 - DNA, 616 bp, Unknown
  Bacterial polypeptide expressing nucleotide sequence isolated from the Sargasso Sea
tgcggcgccaggtagtgcagttcagtctacttatcctactaacacctatgcatcgctaagcggtacctcaatggctactccgcacgttgctggtggtgcagcgctggtatggagctacttcccgcagtgttcaaataaccaaattcgtagtgcacttaatgcaacggcagaagataaaggcagtgcggggcgtgataacttctacggttatggcttaatgcagcttgctgatgcctacaactaccttaacaccaacggttgtgcgggtggcggtactggtggcggtggcggtggcggttctgagcctggtgtagagccagtatcaggtcagctaactggtctttcaggttctcgtggtaactgggatcgttacacatggactattccagagggcgtaacgcaaatgaccattagtactgctggtggctcaggcgacgcagacctttatgtgaagtttggctcacagccagaaacgaatagctatgattgtcgtccttatcaaaatggcaacagcgaagtatgtacattcgacgcgccagcgtcaggcacgtggcacattggtattcgcgcttattcgtcatacagcggtgtgacgctatcatactcgtatgagtaa

SEQ ID NO: 262344 - DNA, 650 bp, Unknown
  Bacterial polypeptide expressing nucleotide sequence isolated from the Sargasso Sea
catggctcttttcctcgcactcagcgctgcggctgcaccacccatcggcaaggatgcttccgagcttgtgtacaatggcagtcccaccgaccctcatgagtacacctggttcgtctcgttcatcgatgtctcgaagagggatccgagccgagtgaaggacgtgtggtgtggcggctcgctcatctcgccgcaggtggtcctcacagccgcgcactgcttggaggacttgaaaaatgcttcggatacgctgagggtggccacgcaccgccaccgccgctttaagcaggaccacgaatgcgcggtgaatctcgaggtggcttcttgggtgatgcacccaaagtatcacacaaagacgcttcacaacgacattgctctcgtctttctcaagaaggcgccgccgtgcatcggccgcgagacggagatggtccatttggacaagggaccccaaacggcgtgggtcgacgtgccgatgaaggcgattgggtacggccggaccccgaatgtggcgatgaccatgctggaagtcgtcgtgaagggcgtcgatcacgccacgtgcgatgcggcgctcaagcacgagggcggagtgttcgaggacaaggtgtgtgcgggcggtcgtggcaaggacgtgtgcaaaagcgacagcggtggcc

SEQ ID NO: 262345 - DNA, 907 bp, Unknown
  Bacterial polypeptide expressing nucleotide sequence isolated from the Sargasso Sea
gacaacgaacaccgctctctgaacgactttgacgatgtcgacgacgctccagatgaggattcaacgtcttacaacgaccagaaatgggttgctggattcgacgcaacctctcccaatcctaattctgatggcacaaccgacccagatgacggtaacggacacggcacccacgtagcaggttcagcacttgggactggcgatgcgtcacgagaacacagaggtacagcccctggagctgctcttgtcgacatcaaagtcctcaccgatggaggaggtacaaactcgcaagcaagtttggctggaattcagtggatgatcaacaacaaagataccgactggggcgtgaattccacctatcggggcatacaagtcgcatcgatgtcctacggctcagtcggaacccctcttaattcaggagaccagggggacaacggcacaagtgcggaagcatcgctgatcaatcaagccactgaagaaggcatcatatgcgttgttgcaatcggtaatgacggcagcaatcgagtgccatccccagggagtgccgatggggccataaccgttggttctgtcaacgacaagaatacgattttgcgggacgacgatgagcattcagatttctcaaattgggggcctcgtctaagtgacggcgacgatgatgattgggacgagctcaagccagatatcacctcgtacggtcacaatattatctcagcaacgtacgctgcgtctgtcccaataacgggcgagggcgctcttgcggatgaccaatacgattcaaaatccggtacgagtatggcgacacccattgcctctggagttgtcgcacttatgcttgaagccgattccacgttaacaccccaagaggtcaaggacatcctgagaaacagctcagaagagcgaggagatc

SEQ ID NO: 262346 - DNA, 805 bp, Unknown
  Bacterial polypeptide expressing nucleotide sequence isolated from the Sargasso Sea
tcagggcacccagattttgactacctagaaccatggactggtgagaaagtaatttactctgctaaatggactggtgtttggaccgagacaagaaactctgacacctcttcaggacacggaacacacgttggtggcacaattgccggtaatggtgacgcctcagctggacgtcgagcaggtgttgctaaaggcggacaaatggtcgctttaggcaccggtgacggagcctctattttcgctgcagagcaaggacttgaatggacatatgaacactcaataccttctcagaaccaatatcatattcgagttgtctccaactcttgggggacggatggtgattacgacccaaacggtgctattgccacagttacagacaaactaacatttgacaatggcgttgcagttatctttgcagcatctaattctggtggctccggtggtgggggcgagtgcagtggtgacttgcgaaccaatgtttatgccaacactccttcagccatttcggttgcagccttaacgcacgatgggacacaagtaacatctttctcctcacgtggttgcatgaatcagcaacacacttggccagatgttggtgccccaggccgtgacatttgggctacagcaccgcgcggtactgcaatcgatgcaagtaccagaactcaaggtgatctatactacatggccatttctggaacttcgatggctactccacacgttggtggtatggcaggagtaattcttgacatcgctccttctttgggtgttgctgattatcatcgagaagatcatgatgagagcgacagtc

SEQ ID NO: 262347 - DNA, 751 bp, Unknown
  Bacterial polypeptide expressing nucleotide sequence isolated from the Sargasso Sea
ctggcagctcgatgggcgccatacaagatccgtgaaatggtgcacagcacgaccgtctcaccccgctggatcaaggatactgagactttttggtacgaatgggaaaacgcggatgggacgttcttctatctagtgaacccggaacgtggaacccgaaaccaactcttcgacaatgacgtgatggccgccgagctgaccaggatcacgagagacccctgggatgggcagcatctccctatcactaatatccgcttcctcaacgacaatatcttccaatttgacgtcgagtcatctcaggacgaggagacacaggaggagtccggccaggataacgaggagcgacatgatgaagatgatcgtgagcgaacacaaaagcgtgtccatcactttgagttcacggtctccacgcaaactttacgagagctaaaagacttcgaggagcccgatgatcaccctgcatgggcgagtgtctctcccgatggccaaacaatcatcttcgtccgtaactacaacctatggatgatgtcgggttcggattatgggcgaatccttgacgctcgtcgtggcaaagatggcgacgccgcggaaaaagctgaaaatgaaacggacgtcgaagagattcagctcaccaccgacggggaggagtactactcctatgccgcaaacggcactgggcggggtgaaaccaacatctctcaagatgagaacaaagacgatcgcaagcgggccaatcttacttggtcacaggact

SEQ ID NO: 262348 - DNA, 843 bp, Unknown
  Bacterial polypeptide expressing nucleotide sequence isolated from the Sargasso Sea
gttggaagctgatgttctcttttatccaagtttagataatagcatagattctatagggacaaatgtgatttggaatcaatttggtttacgtggtgaagatactactattgcaatattagatacgggtgttgattttgatcatgagtcattagatgatttagatgatgatccagatacagatgatccaaaaatagctgtagattcaaatggtatgttaggtttttacaatgcaaatacagatcaggaatatccagatgagcagcctcatgattcaggaagtcatggtactcattgtgcagggattgcagcaggaactggaggttcaagtggaacatacgccggtgttgctccccaagcaaatttagtaggagttattgctttagatggaggctcaggagatgagggtgatttgctgagggctgttgattggactatagcaaataaagatagattttcgatagatgtgatgtcattatctttaggaggtccaattgttattccaggatttaccaacaatggggaatcttctatctctcaagctcttgatattgctgtagaggcaggaatagttactgtagttgcaatcggtaacggtaacttaggtattgcagcacacccaggttcagcctcttatcctggtgatagtgttaaggcaataacagttggttcggttaatgatgaccataatagagaaatttattcatcaagaggtcctactggagatggaaggctgaaaccagatttaatggcaccagggggcgctataatgtccgcaagtgcaggttcaggtgacggctatgtttcatattcaggaacttctatggctacaccgcacgtagcagg

SEQ ID NO: 262349 - DNA, 2464 bp, Unknown
  Bacterial polypeptide expressing nucleotide sequence isolated from the Sargasso Sea
gatgacattgtcagccgtgcctgctatggcaaaagatgcccctgtctatgaaaaagatgccattctcgtggtgtataaagacaatgcgacgaaagcggagcgctcggcggctcagcgtttaattcgtggcaccttaaccgatgccaatgcggacggtgtcgatgataagtttcagcatttactcaatggcaaattggcacgtttagccctgcgcaaaggcgccaatattgaggatgcgattaaggtgattagccgtcatccggcggtgaaatatgccgaacctaactacattctcaaggcgataggcacaccagatgatccaagctttgctagcctgtggggcatgcataacacggggcaaaacggtggcaccgccgatgcggatatcgatgcgcctgaagcttgggaaatcaccaccggcagctcggatgtggtgattggggtgattgacactggggtggattacaatcatcccgatctacaggccaacatgtgggtgaatggtggcgagatccctggtaacggtatcgacgatgacggcaacggcgtgatcgacgatgttcacggttacagcgcggtcaataataacggtaatcctatggacggtaacggccacggtacccatgtttccggtacgattggcgctaaaggcaataacggtgtgggcgtagttggggtgaactgggatgttaaaatcgccgcctgtcagttcctcgatgccgatggttatggttctaccgcaggcgcgattgcctgtctggactactttaccgatcttaaggttaatcatggcgttgatatcaaagccactaacaactcttggggcggtggcagctttagccaagccttaaaagatgcgattgaagcgggtggtgaagcgggcattttgtttgtggccgccgcgggtaacgatgcggtggacaatgatgccagcccacattatccctcaagctacgactcggatgtggtgttgtctattgccagtaccgaccgtaatgaccgtatgtcagatttctcccagtggggcttaaccagcgtcgatatgggcgcgccaggtactgcaattctctcgacagtaccaggtggtggttatgccagctattctggtacctcaatggcgacaccccatgtgacaggtgcggcggcactggtgtggtcgttaaatcccgatctctcaccagtagaaatgaaaaccttactgatggcatcgggtgatgcgaatgcggacctcaccggtaaaaccgtagcagggactcgcctcaatgtggcaaatgctttagagcaggctaacccatcacctagttataagtttaccgtatcgccagcatcgcaatcggtcgaagcgggtaacacggctagttataactttactgtcggcagtgtggcagggtgggaaggtgatgtggcgcttagcgtagccgtatctccggcgcttgaaggcgtatccttatcagcctcaacagttgcagctggtggttcatttaccttagatgtagcgacaacggcgcaaacagcttggggtgattacagcattacagtaacaggtagcgatggcaccattgaaaagtctaaagtcgtttcactgaatgtgttcccacagggattaaatgactttagctatggcaatgaaaacgctgttgctatccctgataacaacgctaatggcgtggtgagcactatcgacgttgccgacgatgtgcagatttttggtgtgaccgccgatgtgaatatcagtcacacttggattggtgatttacgtgttgtgctaacctctccagcgggcaccgaagtggttctgcataaccgtgagggaggcagtgccgacaacatcgttaagagctgggacttaagcgcgtttgacggtgaaaatgcccgaggtacttggtcattatctgtggacgacaatgcgggcgcggatacgggtaccctgaataactggggcttagtgatcagcggcttaggtgaagcctctcctgcggcacctgttgcaggtttcgagtatactgttgaaggcttaagcgttgcctttactaacaccagtaccgatgcaaacgatgatatcgtgagctatagctgggacttcggtgacgacactaactctagcgaaatgaatccaagccatgtgtttgctgccgctggcacctacagagtgtcgcttaccgtgactgacgccatggagcatagcaacactgtgaccatggaagtgcaagtgtatgagcatagcatcagtgccgctgtgactcgtgcgttagtctctcgccgtggcagtgctatggtcgacctcacatgggatagcgccttaggtgaaagcgtggccctgtaccgcgatggcgagttagtggccacgactgaaaacgatggtaactaccgcgatcgctttacaacgacggcatcgagtgtgacgtaccaagtgtgtgaaactacgggctcactctgttctgcggcggttgtcgcgcagttctaa

SEQ ID NO: 262350 - DNA, 2464 bp, Unknown
  Bacterial polypeptide expressing nucleotide sequence isolated from the Sargasso Sea
atgacgttgtcagcggtgcctgcaatggcaaaagatgcaccagtctatgaaaaagacgccatccttgtggtgtacaaagataatgtgactaaagccgaacgtgcagcagcacagcgtttaattcgcggcaccttaaccgatgcaaatgctgatggcgtagacgataaattccagcatctacttaatggtaaacttgcccgtttagccctgcgtaaaggcgctaatattgaagatgcgataaaggtgattagtcgtcatccagcggtaaaatatgcagaacccaactacattcttaaggcgataggcacacccgatgacccaagctttgctagcctgtggggaatgaacaacactggccaaaatggcggtagtgccgatgcagatatcgacgcgccagaggcttgggaaatcaccacgggtagctcggatgtggtgattggggttatcgatactggggttgattacaatcacccagatttgcaagccaacatgtgggttaacgctggcgaaattccaggtaatggtatcgatgacgatggtaacggcgtgatcgatgatattcacggttacagtgcggtaaatgataacggtaacccaatggatggtaatggtcacggtactcacgtatcaggcactattggtgctaaaggcaacaatggtgtgggtgtcgttggggtgaactgggacgttaaaattgccgcctgtcagttccttgatgccgatggttatggttctaccgctggcgctattgcatgtttagattactttacggatctgaaggttaaccatggcgtggatatcaaagccaccaacaactcttggggcggcggtagctttagccaagccttaaaagatgcgattgaagcgggtggtgaagcaggcattttattcgttgcagcagcgggtaatgacgcggtcgataacgatgcgagcccacattatccctcaagctacgattctgacgttgtcctctcgattgcaagtacggatcgtaatgaccgtatgtcagacttctcacaatggggtttaactagcgtcgatatgggagcaccaggctccgcgattctctctactgttccaggtggtggttacgcgacgtattctggtacctctatggctactccacatgtcacgggcgccgcagctctggtgtggtcattaaatccagatctctcaccagtagaaatgaaatccttactgatggcatcaggtgatgctaatgcagatttaacgggtaaaaccgtggctggtactcgcctcaatgtggctaacgcactcgagcaggctaacccatctcctagctacaagtttaccgtatcgccagtatcacaatctgtcgaagcgggtagcactgcaagctataactttagtgttggtagcgttgcaggatgggaaggcgatgtagctctttctgtctcggtttctccagcgctagaaggtgtgtccttatcagcctcaactgtttcagctggtggttcatttaccttagatgttgcgacaacggcgcaaacagcttggggtgattacagcattacagtaacaggtaccgatggcaccattgaaaaggctaaagtcgtttcactgaatgtgttccctcaaggattaaatgactttacctatggcaatgagaatgctgttgctatccctgataacaatgctagtggtattgtgagcacgattgaagttactgatgatgtgcagatttttggcgtgaccgccgatgtcaatatcagccacacttggattggtgacttacgcgttgtgttaacttcaccagcaggtactgaagtggttctacataaccgtgatggcggcagcgctgacaacattgttaagagctgggacttaagcgcgtttgatggtgaaaacgcacggggtacttggtcattatcagtagatgacaatgcagcggctgacactggtactcttaataactggggcttagtgatcagcggcttaggcgaagcatctccagcggcaccagtggcgggcttcgagtatgcagttgaaggtttaagtgtcgcctttactaacactagtaccgatgcgaacgatgatatcgtgagctacagctgggattttggtgatggttcaacttcaactgaaatgaaccctagccatgtatttgctgcggcaggtacttacactgtgtccctcactgtgactgactcaatggaacacagcaatactgtgaccatggaagttcaagtttatgagcatagtatcaacgcatccgtcactcgcgcattggtatcacgccgtggtagcgctatggtagatattgaatgggatagtgcattaggcgaaagtgttgctctataccgtgacggtcagttagtggtgacaactgagaacgatggcaactatcgtgatcgcttcactacgtctgcatcaagtgtgacttatcaagtatgtgaaaccactggaaccttatgttctgcaccagtagtagcacaattctaat

SEQ ID NO: 262351 - DNA, 871 bp, Unknown
  Bacterial polypeptide expressing nucleotide sequence isolated from the Sargasso Sea
tctgggttatcgcgacaccccgaacgcctcggatgtggccctgctgcaccttgccacgcccgttacccaggcaccgatcgccatcgccgaccccgtcatcaaggatacctggcagcagaacacgaccatgctgcatgccctggggtacggtggcatcgaccccagcgcgaccaaagccagcccgcagctgctggcggtggatctcgcctatcggggagaccgggacttctggtacggtgacccgaccacgacccatatcttcgccggcaagctggccggtcaggacacctgcaaaggcgacagcggtggtccgctcacttatggtggacaactggtcggcgtgaccagctacggggccttcccctgcgccaccggtagcgccggtggctatgtctacgcccccgccttcagtgactggatcgccgagcagcagcaaggcatcaccctgaccacggtccgcggcctgatcctgccttcaggcaccagtggctgggccgactacctgctggccaaccgcagcaaccaggcagtcaccctgagcggcatctacagcgacgcccccgccatgagcaacggctgcgccgcccgtctggaagcgggtcaaacctgcaccctgcgccttcgcgccgatggcaacaatactgtcggtacccttcgcgtgcagggcgttgaactcaccgccaccaatgaacagggggcgagccagcgtcttgaaggggccctgatcagtctcaccagcgagcccaccaagactccggataccagcacgaccaccaccacgacgaccacttcaagcagtggcggtggtggcgccaccggattcgcagccctgttgctgctgccgctggcctggttgcgccggcgccgctga

SEQ ID NO: 262352 - DNA, 700 bp, Unknown
  Bacterial polypeptide expressing nucleotide sequence isolated from the Sargasso Sea
cttgcgagcaagtgacttttctcaggtattttatttagaactacaaggtcagaggaaagtatgcggcgcaacgttaatatcaaatcggtgggctctcactgccgcacattgcgttagtgagacctcgctcggatctgttatcggaaacggagacgaatttctggtagagattgctaatgttccaagaagtattgatcgtgtcatgctccatccagattttacttccctgaaaacccctgaggttgatctcgctctccttcggtttgttcaagaggtaaattacccaacaccaatttctgtgaacaccaaagcagatgaactcggagaaattgttaccttggttggttggggctattttggattaggtactacaggcaggcagtatgatgacgggacaaagcgtcaagccaagaatagaattacccaagctgatcaaaggctgttctctttttttgacgatccccgtcagctaaatagcgccgcgctgccactcgaaggaacgctaagtctaggtgacagcggtggtccagcttttcttgagacatcagagggattactccttgctggtgtttctgtgggccaggtagagggtcctgacttttctgaggaaactcagggacaatacggttccgttgcagtttatgaacgtgtgtctttacatgtcgaatggataaatagtgtacttaattccgactattaa

SEQ ID NO: 262353 - DNA, 616 bp, Unknown
  Bacterial polypeptide expressing nucleotide sequence isolated from the Sargasso Sea
ctggatacttactataaggtcgacagtgtatttgtgcataagaagtatcagccaggcattagccatgacattgcgttaatcaaattagtcgaccccgtaacagacgtgacgcctgctcgactctacaaacgctccgatgaattaggcaaaaacatctggtttatcggggcgggtggcaccggaaatggtttaacggggcaaaccgtggataatggcgccaatgcaggagtgctgcgcaaagcgcaaaatagcgtcgaatttgcccaagggccattattaacatttacattcgattcgggggatgaggcgctacccttggaaggggtttctggcggcggtgatagtggtggtccagcctatctcacgcttgagggcatacattacttacttgggatcagctccagagtgggtggaggcgaaataggcaagtatggcgtggtggaagtgtattccagagtgtctttctttagcgcttggattgaggatatcaccagtggcgacgccaaactgcagcagcaattcgccctgccaaaactggataaactgccagcaggaatgacggcagaaatgttagccgaagtctgtgctgatatagggttaaaaccatctctttaat

SEQ ID NO: 262354 - DNA, 1580 bp, Unknown
  Bacterial polypeptide expressing nucleotide sequence isolated from the Sargasso Sea
gatgctggtttccaaggacttcgtagaatggatcgagccaaaatatcctgcttctctggacaatgaggtagcggcgaccattaatggcgccgagtgggtcagtactccctcaaacatggcaggcaatgggggcgcactatctggcgacggagtgattgtcgctgtgatggactctggtctcgataatgctgctgagtgcgacggagtttcacattgcaacagtgtgaactcaggaataaacgctgactttgcagggagaatcaggggagtggtatcctacgcaggatccacatgcgcaactaacggaggttgcggacctgatgacaacaatggccatggcactcacgttgcagggtcggtcctcggcgatgggagtaactctcctgtgggatgggataattccggaatggctcccggggcccagctattcatgcagtcagttggctggaaatcaactgacggttccctcgctcctccatcttacggagatggattcgaggaggcatataatgccggtgcgagggtccataccaattcttggggaacccctccggactgcgccacggagggggatcttaactctggcttatggtgcttacaactctacagtgccaccactgagtcgctggatacagcagcacatcagtatcaggacctcactgttcttttctcgatgggcaatgacggtagggactgcgttggatcctccttcgccactgatgagtctgacccggatggagacggaactcaccagttcccggcgcatccctattgtgctgcagggaagaatggcgagataaacttgggagtactgaaccagcaggcttcggccaagaacattatctctgtaggagcttctgagactcaacggcaggggacaggactgaatgtcttcgacacatattacggaggggcattctatggtgctcccattctcaacgaatacgactcagatgacccagatggggtgtgggggcgttctaaccgagggccgacttcagatgggaggataaaaccggatctggtctctcccggttcttccatcgtctcggtgaaatcctcacagaagacccatccgaatgacctagcagacgggtactacacagtcaaatctggtacttctatggcaactccaatcacagctggatcagtggccctcctcatcgagtatctgaataaccatggatacgattgcaaccttggaaatagtccgactagcaacaattgccccgattcggccctgatcaagggcatcctaagtgcttcatcacatgacatggtggggcaatactccagtggaggagatggtgaaaatggagctgttgagaaggcaccgaacaaccatgagggttgggggagggtggatctcgagagagcggtaggcagtgcgttcactagcgggatagacatcaccacctcggatagtcactcgttcaaacttagtgtaccggattctggcattgacttactcagggttgttctttcctggaatgaggcctcgaacggcgcttccgctggaacgcaactgaggaatgaccttgatatccatctaaagagcccgacaggagttctacagacat

SEQ ID NO: 262355 - DNA, 1674 bp, Unknown
  Bacterial polypeptide expressing nucleotide sequence isolated from the Sargasso Sea
aagctaccaacaacagctggggtggcggcggctatagtgaagcgctagaaaccgctattgaagaagctggccaagcaggtatattgtttgttgctgcggcaggtaactctggttcaaacaacgacaacgtagataactacccgtctaactatgtcactacaacaaacagtctggttgcagttgctagccacactcgtactgacggagacagcggcttctcatacggtattgaaactgtagacatcgcggcgccgggtacagctatcctatctacaataccaggtgacggctatgcgacatactcgggcacatcaatggcaacgccacatgttacgggtgcagcagcacttgtgtggtcgctaaacccagaacttacgccatctgaaatgaaagagctgttaatgtctacaggtgaaactagcctatgggctgatggtcgcaccgtgtctggcaaccgcctaaatgtacttaacgcacttgaagaagctgatcctactccaggttttaaactgggcataacacctggttcagctgaaattgaagcgggtgagacctacgccttcactattgaagttggttcaattgctggctacgaagaagaagtacagctatcgcttgcagagccaagtgatatcgcgtctttaagtgcaagctcggcaatgcctggcgatacggtaacactgaccgtagagacatctgaagatacgccttggggtccgtacagctttacggttaacggtgtaagcggtgatattgagaaatctaaatcagcgaacctttatgtttaccctcaagggctaaacgaattcccttacgcgtattctggtgatgcagtacctacgttaccgaatgaagaagatcctgacgatgtcggcgttgacctagtgattaacgttcctgacgacttaacagtattcggtatgcaggcgtcggtagatatcacacacacctatagcggtgacctcgtactatcactgacttctcctcagggtacaaccaccgttcttcgtcagaaccaaggtggcggtacagatgatatcgttgagagctataactctgatgccttcaacggcgaagtagcaacaggcgattggaccttgaacgtgcttgatacgttcaacggtgacaacggcactgtaaacacatggagccttgtggtgaccggtattggtgaagtaggtccaacaccgcctaactctgcgtttacctatgacgcttcaggcttatcagtaagctttactaataacagtaacgacgttaatgacgacattgtcagctatagctgggactttggcgatggctctacttcaacggaagagaacccaacgcatgtttacgcgagcactggcgcctatgacgtaacccttacggttaccgactctgaaggtcaaactggcgtatcaacagaaaccgtatcagtttcagatagcaccattgttgccgagattgaccgcgctatgctgtctcgattcggttcgttacgcgtagatttatcatatagtggctcgatggccgatactgtaatgatttatcgcaacggtgagctacttgaagaagtaagcaacactggacgttatcgcgacagaagcagaggcgttcaacctggtgagtatacttatatggtttgtgatgaaacctctgcatgctctgcaccagtgtctgtaaacctttaat

SEQ ID NO: 262356 - DNA, 622 bp, Unknown
  Bacterial polypeptide expressing nucleotide sequence isolated from the Sargasso Sea
tttggtgactaatggattaatagaaaaagccttctctgacaatgactttgccatcatcaagctggcaacacctgtcacctttagtgacagagtcaagcccatttgtctcccctccctcctgaccgactatgacaacaaggtggccactgtctcaggctggggcagaactataggtggaggacccgtgtcagacatcctgcaaaaggtaaactatgtctgtttgccaaaacatccttttccttctatagaatttgtttcaattttccagattgatctgaacaccatgaccaatgcccagtgcagcagtcctcctaatctctgggaacccaatttaatctccaacaacatgatatgtgcttatgacagtgggaagtctgtatgcaatggagacagcgggggccccctggtcactaatgaggggaaatactactctgtgattggtaaaaacattgtatatgaatttaattttacttgtaggtgttttgtaggtgttgtctcctggggcaggggtggatgtcccgtaggaaccaactaccccaatgtgtacgcccgtgtcacaagtcaactcctctggatcaagaagtatatcagtggaactacttgtcctaaacctattttataa

SEQ ID NO: 262357 - DNA, 480 bp, Unknown
  Bacterial polypeptide expressing nucleotide sequence isolated from the Sargasso Sea
ccctatcgtctggaggagaccttgtggctcatctccaagaggtcgatgtcactgtctttgctgacggtgactgtggcatgatggactcctacatgacctccgacatgatgtgcgctggtgtcaaggagggcggaaaagactcctgccaaggcgacagtggcggccctctcttcacaacggaccctgccaacaacaacgccgagactctgatcggagttgtcagttggggctttggatgcgctgctgcgggacagttgggggtgtacgcagaggtgagccacttcagagactggatcgacgcacagctgactggcgcaaacacctgctctcctcctggatccactggatcgtcaacatcttctccgactacgactacttctggcagcggttctggaagtggatctggcagttcttgtggcaactgcgtcttccccttcttcttcatggtgagttctagagtaaagtttttgttaatttgat

SEQ ID NO: 262358 - DNA, 1327 bp, Unknown
  Bacterial polypeptide expressing nucleotide sequence isolated from the Sargasso Sea
ttagtcgcttacaacgacgatgaatccttgttgagcttggattcccaactcaactacaccgcagaaagcagcggcacgcactacctcgatgtgggcgcctaccaagacgtttatgcagggacctacacactcagagcatccgaactcacccctccggaccccgggttcaacagcaccgatggctacggccatgtcagtgctcaacgcgccttcgagcaattgctcaacatctctctcgaccctgtcgacgcccttggcggcaatctctggggagttgacaatgtcgatgctcccgaagtgtggaacgggggcagcggttttgcaggcgccacaggaagcggaaccaccatcgcggtgatcgacacaggggtcgatctggatcaccccgaatttctgggtcgaattgtcgccggctacgactttgttgatgatgactcgattgcggatgacggcaatggccatggcacccatgtcgctggcaccatcgccggtgccaacgacggcacaggcatcaccggggtcgcctatgacgccgcgatcatgcccctgcgtgtgctgggcaacgacggttacggctggaccagcgacatcatctctgccgtgcgctgggccgccgacaacggcgcccatgtgatcaatctttccctcggtgttagcggttacagccaagccatggccgatgccatcagctatgcctccggacgcggcagcgttgtcgtgatggccgccggcaattccggaggcatggcacccgaataccccgcggcccatgcgattgatcacggcatcgccgttggtgttgtggacagcaatcgttccttcgccgggttctccaaccgggccggctccacgcaactcgattacgtgacagcaccaggagtcaacatttattcggctgtgccaggaggtggttacgacactttcaacggcacgtccatggcaacacctcacgtcgctggtgtcgccggactgctcaaaagtcatgacggaagtttgtccgcatccgccatcgaagatctgctgacgggctctggcagcaacaacagcatcagcgacagcaccgcctggaacaccacgtcatccatcccatggagcacaagggatgtgatcacgatgcaaacgctggacagcttcagcgacaaacaactcagcggcaccctgatcgccagcgttgacggcaatggtcgggaacgacgctccaccctccgcggcctcaagcaaggcattcgctccaacgacgcctcctacgacgggctggaggcggtgaaaacgattgaggccagccgcaacagctttgccgtgctggagatctccaacgatcacgcca

SEQ ID NO: 262359 - DNA, 627 bp, Unknown
  Bacterial polypeptide expressing nucleotide sequence isolated from the Sargasso Sea
tatacattagtcgaattgatggtcacccggaatttgatgctgcaacatttgaatttgacgtcgccgtgcttacgctcgaacgggccgtgaatgtcgaattgtttaagcctgtttcgctttcttggactgagcactcagcgtatatcggggacttcgcgcaggtcgccggatgggggacacaagatgacaacgccctgagctccgtcttgctcgtaggccatgtgcctgttcaatcgtttgaggtttgcacagctagttcttcgtatagcccattcgatattttatcatcaaatatttgcgccggctttgtgtcaggcggcactgatgcatgccaaggagatagtggcggtccgttgcttgtttccggaaaacaaattggaattgtgagctggggcgaagggtgcgcgcttccaaacaaatatggagtatattttgccgtaagccatgcgcaaggttttcttgccatggccacggacgatttggtgtacacgttctcgcctcagagtggttcaccaccgccatcaccttcaccttcaccggtgcctccgcctacaccgacgccaccgccgacgccaccggtcgtgttgcctccatttttaagctttttatcgtggctctccgcatgaa

SEQ ID NO: 262360 - DNA, 2431 bp, Unknown
  Bacterial polypeptide expressing nucleotide sequence isolated from the Sargasso Sea
catgacaatcaatcgaaccactaagatagccctgagtttatctagcttagctattgcgatctcggcaggtgttaatgctgcccccgacgcaccgggttttgccgcagccaaacaagcacagacctcgccactgccaaagcgctatatcgttaaatttaaaaatgccgatgcgccagccctgatgtctgaaagcagcctgcagagcagcgatcagctcgctaccacaatgaattatcagcctcaagtggctgaaattagcgcccagcacagtgtgttaaacaaggcgcaagccaaagaaatgaagcgtatcggacgcagtaacagctactcagttaagctggataacaatggcattaaggcattaagagcccgcgccgatgtggaatatgtggaagaagacatgccacgccacctgctaagcgaaacaacgccttggggacaaacctttgtaggtgcaacccaattaagcgacagccaagcgggtaaccgtaccatctgtattatcgactcaggttatgaccgtggtcacagcgacttaagcggtaacaatgtcacgggcaccaacaactcaggtacaggtaactggtacgaaccgggcaataacaacgcgcatggtacccacgttgcaggtactatcgcggcaattgccaacaacgatggcgtgattggcgtactgccaaatcaaaatgccaacatccatgtgattaaagtctttaacgaggctggctggggttactcctcatccctcgtatcggccgtagatacctgtgtggcaaatggcgcaaacgtcgtcaccatgagcttaggcggcgcaggttcgagcactaccgagcgtaacgcgttagcggctcactacaataacggcgtgctgttgattgccgctgccggtaacgatggtaacaatacccacagctaccccgcttcgtacgatgcggtgatgtcagtggcatcagtcgataatcataaagaccactctgctttctctcagtacaccaaccaagttgagatctcgggtcctggtgaagccattctctctaccgttacccgcggtgagggtcgcttagccgatattactatcggtggtcagtcttacttcaactcaggcgttgtgccgcacaatcgctttacgccatcgggcaccaactacgcgccaaatccatacaatggcaccgcaaccgcaaccttagccgaatgtacggttagcggctcaaccttcaactgtggcaacatggccaacaaggtatgtttagttgagcgtgtgggtaaccaaggcacttcgtaccctgaaatcaatgcagtaaaagcctgtaagaatgcaggtgccagcgccgttatcgtgtacagtaacagtgccttaccagggttacaaaaccccttcttggtcgatgctaacagcgaaatcaacatggtgtcagtgtctgttgaccgtgcaaccggtttagcactgcgtaaccagttaggcgcaacagtgaccgtaagcaaccaaggcaataaggactacgagtattacaacggtacgtcaatggcgactccacacgtttctggtgtggcgacgctagtgtggagctaccatccagaatgtagcgctgctcaggtacgtaacgcgctcaaacaaactgctgaagacttaggcactgcaggccgtgatgactactatggctatggtctggtcaatgccgttgcagcgaaaaccttcttagatgcttcctgtaatggtcctacagatccggttgaccctactccaactgacagtgtgttagttaacggtgtgccgaaaaccggtctaagcggcgccgccagtgaagaactgcatttctcgtttgaagtgccacagggtgccactaacttaggctttgtgatgaacggtggcacgggtgatgctgatctgtacgtacagtacggcgcagcacctacgacctcaaactatgattgccgtccatacaagggtggtaacagtgaatcttgcccaatcagcaatgttcaatctggtacttactacgctatggtgaaaggctattctgcctttagcggtgtatcgttaaccgcaagctacacagcccaaagcggtggtggcactccgaccacgccagcaagctacaccaacactgataactacaatattcctgataacaagaccacaggtatcactagcccaatcactgtcactcgcacgggtaactcaggcactgtgactgccgtggtgaatattgttcacccttacattggtgacttaaaagtgcagctcatcagcccaacaggccaaactgcaacactgcataacaacactggcgctggcgcagacaatatcaacaagagctacacagttgatatgactggcgttgagtcgagcggtgtgtggaaactcaaagcggttgatagcggccgtggcgacgtaggctatatcgatagctgggaactgaaattccaataa

SEQ ID NO: 262361 - DNA, 1516 bp, Unknown
  Bacterial polypeptide expressing nucleotide sequence isolated from the Sargasso Sea
ttgactgtcgatcgtcttgtcaccattgaccaagagcgttacatcatcaagttcaaagatgagatgaccagtgaaacggttgaagtgagtgcattaaaaggtaaaggtcaaatctcaagtgccaaagtaaaaggtaaaaagcctttcgatatcgcgtctgctaaatcagaagttagaaaagcaggtggtgcaattaagaaagagcttaagaagcataaaatggtagcggctacaatgagtaagtcagcgctgaacaagcttcgtaaaaatccaaacgtagaaagtattgaagtggatgttcgtcgtaagcctatggcgcagaccactccttacggctacaccatggttcaggctaatcaatttgcacagtcagatactacggctcgcaaagtatgtatcatcgatacaggttacaacctgggtcacccagatttgcctggaacaaacgatggcgttacaggtcaggcaaataatagtgctgtaggtaattggtataacgatggtaacggtcacggtacccacgtagcgggcaccattgcagcatacgataataacgaaggtgtagttggtgtgtatcctggcgtggatatgcatatcgttaaaatctttaacgacaatggccaatggacttacgcatctgaccttatcgatgctatcacccaatgtcaggatgccggctcgaatgttgttaacatgagcttaggtggcggcagttcgtcaactaccgagcgaaatgcaatgcagagcttcacagatgcaggcatgttgttagttgcggcggcaggtaacgatggcaacagtgcgaagtcttaccctgcttcatatgatgcagtaatgtcagttgcggcagtagactcaaacgaaaatcgtgcaagctacagccaatataacgatcaggttgaaattgccgcgccaggcagtgcagttcagtctacctatccaacaaatacctacgcttcactcagcggtacatctatggcgacgccacacgtagctggtggtgcagcactagtgtggagttacttcccgcagtgttcaaacaaccaaattcgtagtgcacttaatgcaacggcagaagataaaggcagtgcgggtcgtgataacttctacggttatggcttaatgcagcttgctgatgcctacaattaccttaacaccaacggttgtgccggtggcggtactggtggcggtggcggctctgagcctggcgtagaaccagtatcaggtcagctaaccggcctttcaggtacgcgcagaaactgggaccgctacacttggacgattcctgaaggtgtaacgcagatgactattcgtacctctggtggttcaggcgatgctgatctatacgtgaagtttggctcacagccagaaacgaatagctatgattgtcgtccttatcaaaatggcaacagcgaagtatgtacattcgacgcgccagcgtcaggcacatggcacattggtattcgcgcttattcgtcatacagcggtgtgacactatcatactcatatgagtaag

SEQ ID NO: 262362 - DNA, 1567 bp, Unknown
  Bacterial polypeptide expressing nucleotide sequence isolated from the Sargasso Sea
aatgaaattaaccaaaatcgccagtgccgttattgccttatctgtgggcgttattgcccaagcccatgccgacgacaatcgttatgtcattcaagtcgaagcgggtcataaaggcatagttaaagcactggccaaaaaattgggcgcagaaatcaaccttgaaggggatgaatttatcgctgcgacttttactggcaaagatctcgcccaagtaaaaggcctgctaaacaacccacatatcaccctgattgaagaagacgttcgccgtcatccaatggcgctatttaacgacgatgcgggcaatccaatgacccagcaagtcacgccctatgcgatatatcaatcccatgccaacgaagtgacctttaacccaaatgcgggcatgaaggtgtgtattattgactctggtttagatagctcaaacccagactttaactggaacaacatcactggcgataacgactcaggtacgggtaactggaatcagaacggtggcccacacggcacccacgtagcgggtaccattggcgcggcggacaacaatatcggtgtcgtcggtatggcgcctggcgtacctatgcatatcgtaaaagtattcaacgcctcgggttggggttactcctctgacttagcctatgcagccaacaaatgtagcaatgctggcgctaagatcatcagcatgagcttaggtggcggcgcagccaacaatactgaaaagaatgccttcgacgcctttactgcggcgggaggtttagtggtcgcggctgcgggtaacgacggtaactcagtacgctcttatccagcaggttatccatcggtgatgatgatcggtgctaacgatgctaacaataagattgccgacttctcccaatacccaagctgcgtgagcggtcgtggtaaaaaagccgtcaacgatgatggcatctgtgttgaagtgaccgcaggcggtgtcgataccctatcaacctacccagcaggcatggcaacggcctcaaccttaactgccgatggcgcgacagtcgcctcatcagcaatggaaaacccaggttcagccacgggtaacacctactttatgggtacggctcaggctgtggattcgggcgcgaacggtaagatttgtgttatcgatcgcggcgtgatttccttccacgataaagtgcttaactgtgaaaactcaggcggtgtgggcgcaatcgttatcaacaacgtggcgggcatgctctacggcactttgggtgataccaacgccacaactattcctgctgttggcgcggcgtttgaagatagagcaagcctaatcgctgcccaaaacacaacggtttcaatcgattcggttgactacggctttatgagcggtacttcaatggccacaccagcagtatcgggcatggcggcattggtatggtctaaccattcacaatgtaccggcacacaaatccgtaacgcactcaaagcaacggcaatggatgcgggtactgtgggtaaggataactacttcggttatggtatcgtcaacgcgaaagcggccgatgcatacctcaccacctatggctgctctggcaaatag

SEQ ID NO: 262363 - DNA, 2431 bp, Unknown
  Bacterial polypeptide expressing nucleotide sequence isolated from the Sargasso Sea
atgacaatcaaccgaaccactaaaatagccctgagtttatccagcttagctattgcaatttcagcaagtgttcatgctgcccccgacgtaccgggtttcaacgcggcgatgcaagcacagacctctcctttacctaagcgctatatcgttaaatttaaaaatgccgatgctcccgctctgatgtctgtcgatagtgctcaagtcagcgaccaattacccaccaccatgaactaccagcctaaagtggctgaaattagcgcccagcacagtgtgctgaacaaggcgcaagccaaagaaatgaagcgtattggccgcagtaacagctactcagttaagctggataacaatggcattaaggcattaagagcccgcgccgatgtggaatatgtggaagaagacatgccacgtagactcttaagcgaaacaacgccttggggacaaacctttgtgggtgcgacccaattaagcgatagccaagcgggtaaccgcaccatctgtattatcgactcaggttatgaccgtggtcacagcgacttaagcggtaacaatgtcacaggcaccaataactccggcaccggtaattggtttgaacctggcaataacaatgcccatggtacccacgttgctggtactatcgcggcgatcgccaacaacgacggcgtgattggcgtgatgccaaatcaaaatgccaatatccatgtgattaaagtatttaatgaagctggctggggttactcatcttcactcgtatctgcggtcgatacctgcgtgaataatggcgccaatgtggtcaccatgagtttaggtggcgcaggctcaagtacaaccgagcgcaatgccttagctgcccactacaataacggcgtactcttgattgcagccgcgggtaacgatggtaacaatacccatagctaccccgcttcgtacgatgcggtaatgtcagtagcgtctgttgataatcacaaagaccactcagccttctcgcaatacaccaaccaagtcgagatctcgggtcctggtgaagcaattctctctaccgttacacgcggtgaaggacgtttagccgatattactatcggtggtcagtcatactttaactccggcgttgtgccacacaatcgctttacgccatcaggcactaactatgcgcccaatccatacaatggcacggcaaccgcaaccttagccgaatgtacggttagcggctcaaccttcaactgcggcaatatgaccaacaaagtctgtctagttgagcgtgtgggtaaccaaggcacttcttatccagaaatcaatgcggtaaaagcctgtaagaatgcgggcgctagcgctgttatcgtgtacagtaacaccgccttacctggactacaaaaccccttcttgatcgatgctaacagcgaaatcaacatggtgtcagtgtctgttgaccgtgcaaccggtctagcactgcgtaaccagttaggcgcaaccgttaccgtaagcaaccaaggtaataaagactacgagtactacaacggtacatcgatggcgactccacatgtgtcaggcgtggcaaccttagtgtggagctatcacccagaatgtagcgctgctcaggtgcgtaacgcactcaagcaaacggctgaagacttaggcacagctggccgtgatgattactatggttatggtctggtcaatgccgttgcagcgaaaaccttcttagatgcgtcctgtaatggtcctacggatccggttgaccctacaccaactgacagcgtgttagtgaacggtgtgccaaaaactggtctaagcggcgccgccagtgaagaactgcatttctcttttgaagtaccacaaggtgcaactaacttaggctttgtgatgaacggtggcacgggtgatgcggatctgtacgtacagtacggcgcagcgccaacgacctcaaactacgattgccgtccatacaaaggtggtaacagtgaatcttgcccaatcagcaacgttcaatcaggtacttactacgcgatggtgaaaggctattcagcctttagcggtgtatcgttaaccgcaagctacacagcccaaagcggtggtggtactcctaccacgccagcaagctacaccaacaccgataactacaatattcctgataacaagaccacaggtatcacgagcccaatcacagttactcgcacgggtaactcaggcacagtgactgccgtggtgaatattgttcacccttatattggtgacttaaaagtgcagcttatcagccctacaggccaaacggcaacactgcatagcaacactggcgcaggcgcagacaatatcaataagagctacacagtggatatgactggcgttgagtcaagcggtgtgtggaaacttaaagcagtagatagcggccgtggtgacgtaggctatatcgatagctgggaattgaaattccaataat

SEQ ID NO: 262364 - DNA, 1360 bp, Unknown
  Bacterial polypeptide expressing nucleotide sequence isolated from the Sargasso Sea
atgaaaactcaagtcgtgttttggaaagcaagtaccgcgctggccctgattctggcaatgagcctgggcggctgcagcagcggtggtggcgggcataaatccagcgtggcggcgtcatcgccggatgctggtgcaggtgccggaggcggtactggtggcggtgatggcggtacaggcggtggtaccggtggtggcacaggcggcggtgacggcggtactggtggtggaaccggtggtggcacaggcggcggtgacggcggtactggtggcggaaccggcggtggcacgggcggtggtactggcggcggcaccggcggcggtactggcggcggcaccggcggcggcactggcggcggtactggcggcggcaccggcggcggcaccggcggcggcactggcggtggtactggcggcggtactggcggcggcaccggcggcggcaccggcggcggtactggcggcggtactggcggtggaactggcggtggaactggcggcggaacaggtggcggaacaggttcgacaaccaccccactggtcaccggccagattgccggcacccttggcaccactgtgggcaatgtcggtacagcggtcggtaacctgggttcgacgttgaatggcgtacccatcgtcggcgcaaccgctggcggcctggtcacctcggcaggcaccgccgttaacagcatcggcactggcgtaaccgccggcttgggctcactgggcaccaacaccaactccttgggcaccacggtggcaggcgtaggtaacggcgtggccgacctgggcggcggcctctcgaccaccggccaaacactctcaaccactctcggcggaatacctgtggtcggcggcgcgacaggcggagtgggcactgcggtaggtggcgtcgtggataaagtcggcaccaccgtcaccatgctcggcgataccctcagtacggccagcaccaccggcccgctgggttcgttgaccaacaccttgggcagcaaagtcgtggtgcctgtggtgtcgctggtggaaaacaccaccggcaacctgggtaacgcaaccggcctgggcactccactcaatggcgtactggataaggtcggctcgaccgtcaccagcttgggtactcaagtcgccagcacgggcggcacgggtaacccggtcaccggcgttgtcggcaccgtactcactggcgtcggtggcacactggataaatcaggtggttatgtcgccccaaccggtggcacctcggctcccggcattccggaactggtgggtggcctggtggctaacgtgggtaccggcctgaacgtgggcaataccaacggcacagtcagtgcaacgggtgtgaccggtggtgcagtcggcg

SEQ ID NO: 262365 - DNA, 957 bp, Unknown
  Bacterial polypeptide expressing nucleotide sequence isolated from the Sargasso Sea
aattccacatctggaaatgaactctatttaataaatcacttagatgaaaatccacaaattaaaactataaatgacgatctttctatcgatgtttatttattggatagtctagatgacgaactttttttagtgactaacaataatgctgataatcaaaaaattatttcagttcaagccacaaaaccttctttatataactccaaagatttaatcccagaacaggattctgtaatgagtccaagctcttcaggaggatatatatttgtagagttaatgcagaatgcaatttcaaagacttttcaatatgatttttctggaaagctcattagagaagtcgatcttccgggtataggtagtgtttctccaatctcagggaaaagagaggatgatgaacttttctattctttctccaactaccatacacctcccacaatctacagcatcaatcccaagagcggtaaatcaaaaatttatttcaagccaaagataaattttgatcctgaaaaatatatatcagagcaggttttttatacctccaaagatggaacaaaagttccaatgatcatcacatataaaaaaggtttgagtaaaaatggtaaaaatccaacaattctttatggatatggaggttttaacatttccctcactccaaatttcagcagcattatggcttattggttagaaaaaggcggagtttatgcggttccaaatatcagaggaggcggagaatatgggaagaaatggcatctatctgggacaaaaatgaacaagcaaaatgtatttgatgattttatctatgccgcaagatttcttttttcagagggctatacaaaatcagaaaacttaattttgagaggaggttcaaatggaggtcttttagttggtgctgttatgacacaagagcctcagcttgctagagttgctctccctgcagttggtgtactagatatgctcagg

SEQ ID NO: 262366 - DNA, 622 bp, Unknown
  Bacterial polypeptide expressing nucleotide sequence isolated from the Sargasso Sea
aggtatctatgcggttcctaatattagaggtggtggggaatatggaaaaaaatggcataatgcaggaacaaaaatgaataagcaaaatgtttttgatgattttatatctgctgcagaatacctcataaaaaacaattatacttcgaatgattatttagctatcagaggaggatctaatggtggactgctggttggcgcggttatgacccaaagacccgatttaatcaaagttgcgttaccagctgttggtgttttagatatgctccgatatcatcaatttacctctggggcaggatggtcatatgactatggtaccgcagatgattctaaggaaatgtttgaatatctaaaaaaatattcacctgtccatgcgctaaaaagcaatactaaatatcctgcaaccttggtaacaacatctgaccatgatgacagagtagtaccagcgcattcatataaatttattgctggactacaaaaagttcaagaaggcaacaaccccaccctaataagaatacagacaaaggccggccatgggagtgtaactttagaccaaaggattgaacttgaatctgatatacttggttttgtctggcacaatatgggtctaaaacctgatttataa

SEQ ID NO: 262367 - DNA, 825 bp, Unknown
  Bacterial polypeptide expressing nucleotide sequence isolated from the Sargasso Sea
atactagtggacgccaaattgtatattcaagatttaacagttcccggttctaagccgataaagatacaaggagattattttgccagagcgagcgtcattactaataaaaataaaacattttatttatacacaaatattgaagcaccaaatggtcgcattgtttcagtagatctatcgaggcctaatatttggaaagacatcgtctctgaaactgaaaatgtgatgtatccaagttcgggtggtggaaatttgtttgtacgttatttagtagatgctaaatctcaaattatgcaattcgaccttaacgggaaaattattcgtgagattgagttgccagcaattgggtccgcatatggatttagtgcaaaagaggatgaagacgatctgtattattctttcagttcttatacttatccatcaacaatatttaattataatattgaatctggtgaatcaaacctctatcgacaacctgaaatagattttgagccaagtgactatattactgagcaggttttttttaaaagtaaagatcaaactacagttcctatgttcattacttataaaaaaggtgtagacaggaatagtgctaatccaacaattctttatggctatgggggatttaacataagccagactccaggttttagcgctaccaatatcgcttggctagaaaatgggggcgtgtatgcagtcgctaacattagaggtggtggagagtatggcaagaaatggcataaagctggaacccagatgaacaagcagaatgtttttgatgattttattgctgctgcagaatacttgatatcagaaaattatacctct

SEQ ID NO: 262368 - DNA, 667 bp, Unknown
  Bacterial polypeptide expressing nucleotide sequence isolated from the Sargasso Sea
agtagaaaaaccttattttagtaaagtaaattcaattttgcttgaaaatgaaggtgtatatgcattagctaacctaaggggtgggggtgaatacggacaaaactggcatgaagctggtatgttgcttaacaaacaaaatgtttttgatgatttcatagctgccgctgagtacttggagacaagtggtataacatctcccaattatttagcaattcgtggaggttctaatggtggacttttagttggagcagttttaaatcaacgaccagatatttgcaaggttgcattccctgaggtaggggtaatggatatgttgcgatatgaaaaatttactattggtcatgcatgggctattgaatatggttccgtagaagaccaaatgcattttaataatttagtaagctattcaccattgcatacgataaaaggcggcgccaattatccttcagtactagtttatactgcagatcatgatgatagagtggtaccagctcattctttcaagtatactgctacattgcaggcaggacaaggtggtacaaatccaattctcgtacggataggccaaagtgctgggcatggcgcaggaaaacccacaaaaaaaattattaaagaatatgctgaaaaatgggcttttatgttttatgaaatgggcgtagggtattga

SEQ ID NO: 262369 - DNA, 700 bp, Unknown
  Bacterial polypeptide expressing nucleotide sequence isolated from the Sargasso Sea
atgggcaagattgaacttccaggtcccgggacagcatatggatggaatggtaaaaaacacgatcaggttttatattatacatttacaaactatcattcacctggagtaatatattcatatgaccctagaactaaaatttctactcgatattggaaaccaaaaattgactttgacccagacgcttatctttcagaacaaattttttatacttcttctgatggcacaaaagtgccaatgattattactcgtaaaaaaggagttaaatatgatggtaaaaatccaacaatactctatggatatggagggtttaatataagtattagaccttcatttagtattgctaatgcagtttggatggaacaaggtggtatatatgcagtagcaaatttaaggggtggtggtgaatatggaaaaacttggcacaaagcagggataaaacttctgaaacaaaatgtatttgatgattttattgctgctgctgagtatctgattgataacaatataacaagtccagaatttctagctattagaggaggttctaatggtggtcttctagtaggggcaacaatgactcagcgacctgaactattcaaggttgcattaccggcagttggtgtattagatatgttgcgttatcataaatttacatctggtgcaggatgggcttatgattatggtacttcgaaagattcaaaagaaa

SEQ ID NO: 262370 - DNA, 865 bp, Unknown
  Bacterial polypeptide expressing nucleotide sequence isolated from the Sargasso Sea
agcgagtgggttacaataataccggaaaataaaaatgtccttacttcagtgaatatgattgatggaaagttagttgctcattatatgattgatattatttcagagtgggtgatttttgatataaatggcaaaatgattaaaaaagttgacctgcctggtctaggtatttcatatggttttggtggtgataatgaacaatcgctatcatggtataggtttgagtcacttgttcatccacctacagtgttttcatttgattttgatgattattcatcaaaagtatactatgaatcaaaagccaaatttgataatgagagttttgtgatgaaacaagagttttattcctcaaaagatggaacaaagataccaatttttattgctcatgataaaaatatagtgttagatggtaataggccgactctcatgtatggctatggtggctttaatatctcgcagaagccatattttaataaaaccattccaataatacttgagaatggtggtgtatatgcaatcgcatgtataaggggcggaggtgaatatggacaggaatggcatgaagctggaatgctagataacaaacaaaatgtatttgatgattttattgcaggcggtgaattcttaattactgagggttatacatctcctgatagattagctattagaggtggatccaatggaggaactttagtcggcgctgtaattaatcaaaagcctaatttatttcgcgtggcgtttccagaagtgggggtgatggatatgttaaggtatgaacaatttacaattggttgggcttgggctgttgaatatggtactgttaaagaaaagaatgactttgaaaacctactttcctactctccattac

SEQ ID NO: 262371 - DNA, 735 bp, Unknown
  Bacterial polypeptide expressing nucleotide sequence isolated from the Sargasso Sea
agtggggagtcaattgtatattaaagatctagctgtatctgattctaaacctataaagatacaaggagattattttgctagagcaagcgtcattaccaataaaaagaaaacattttatttatacacaaatattgaagcaccaaatggtcgcattgtttcagtagatctttcgagacctaatgattggaaagatgttgtccctgaaactgaaaatgtgatgtatccaagttcggggggtggaaatttgtttgtacgttatttagtagatgctaaatctcaaattatgcaatacgaccttaatgggaaaattattcgtgaaattgagctgccagcaattggttccgcatatggatttagtgcaaaagaggatgaagacgatctgtattattctttcagttcttatacctatccatcaacaatatttaattataatattgaatctggtgaatcaagcctttatcgacaacctgaaatagatttcgagccaagtgactatattactgagcaggttttctataaaagcaaagatcaaactacagttcctatgttcattacatataaaaaaggtgtagataggaatagcgctaatccaacaatactttatggctatggtggatttaacataagccagactccaggttttagcgctaccaatatcgcttggctagaaaatgggggcgtgtatgcagtcgctaatattagaggtggtggagagtatggcaagaaatggcataa

SEQ ID NO: 262372 - DNA, 793 bp, Unknown
  Bacterial polypeptide expressing nucleotide sequence isolated from the Sargasso Sea
acactaaaagaattaaatcaaaaatattggaaagatgttattcctgagagtaaaaatgttttttcagttagtagtgggagtggatacttttttgctgagtatttagttgatgcaatttccaaagtttatcaatatgattatgatggagatttaataagagagatagagttgccaggtataggtagttctagcggattctatggagaaaaagaccaaaaagaattatatttttcattttcaaactattatactccgggtaatatatattcatttaacccagaaaatggagattatgatttatattggaaaccagaaattgaatttaattcttctgaatatgtttcaaagcaaattttttataaatctaaagatggtactaaagtacctatgatcataactcataaaaaagatttaatattaaatggaaaaaacccaactattctttatgggtatggtggttttaatattagcagaactcctggttttagtgttactaatgcagtatggatggatcttggaggtgtatatgccgtcccaaatattagaggtggaggtgaatatggaaaagaatggcataattcaggaacaaaacttaataaacaaaatgtttttgatgactttattgctgctggtgaatatctaatctcttcaaattatacatcctctgattatttagcattgagaggaggttcaaatggtggtttgcttgtaggtgcagtaatgactcaaagacctgatttaatgaaagttgctttacctgcagttggagttcttgatatgttgagataccata

SEQ ID NO: 262373 - DNA, 2101 bp, Unknown
  Bacterial polypeptide expressing nucleotide sequence isolated from the Sargasso Sea
tatgtataaattatgtctaaatatatttttaatattaattatcatatcttgttcaaatcagaaaacatctggttatcctgaaactaaaaaagaagaatttactgaaactattcatggatacgaaatatcagattcctacagatggcttgaagattttacaagcaatgattctcttgattgggtcaagagacaaaataaatttactaaaacatttataagtaaaaataattataaaaaggatatagcaaactatcttgagcaaatttgggagaatgaatctatttctatcccttacaagaagggaggcaagactttttactatttcaacgatggatctttccaacagagtaaattaatgatcaaggattgtgacaagtgtgatgagcgtgtcttaattgatccaaatactttttcagatgatgggaccatatctttaggcggcactagtgttaataattcagctgatatgattgctttttcaatttctgatggaggatcagactggagagtttggaaagtgttagatattgaaaccggcgaagtgcttgaagacgaaattaaatgggctaaattttcaggtgcatcctgggagaatgatgattcaggttttttctatcaaaaatatgatgagccacagggagagcttttaaaggaagtaaatgagtctccaaaattaatgtttcataaaattggtacagatcaatctgaagactatgttgtatatgaaaatccagatcaaccaagatggggttggggcataaatgtaatagaagattctaatattaagattttatctatatccgaaggaacagatgagagaaataggctatatatacagttaaatgctggtgaaaaattcattcctttaattgatgaattgataggggcatatagttttatagacagcaaagatggcattttatggttttatactacagaaggtgctccaaatgggaaaattgttaatttagaaataaaaaatggctcctttgtatggaatgacgttatacaagaatcaaaaaattctattcggtctgtaaatgttataaataattcatttgtaataaattatttagtcgatactttttccagtataaaaatttttgatttgtcaggaaactttgttcaagatcttgagttacctaaaaatggaaccattggaggatttggtggagagatcgatgacactgaaacttatttttcaatttcaaattacgttactccaagggagatatatgaaattaatttagatacattagatgtgaatcttttttggaaagaagaaattgatggatatgagtcagaggattacgtttcagagctaaaattttatccttcaaaagacggaacaaaaattcctatacatattagttacaaaaaaggtctagaaataaatcaagatactcctttgatgttatacggatatggaggatttaacatttctcttttaccaggttttagaaaaacccatgctgcatggaaaaatttaggtggagtatacgctgtagcaaatttaagaggcggtggagaatatggcagtgaatggcatgaagctggaatgttattaaacaaacaaaatgtttttgatgattttgcatttgctgcaaaatttcttcatgagaataatattggatctgaaaaaactactgcaattattggtggttcaaatggaggacttcttgttgcagctaccatgttacaaaatccggatttattcaaagttgctattccacaagttggagttcttgatatgttgaggttcagtaaatttacgattggttgggcatgggaaagtgattacggatccgtagataaaaaagatgagttcgaaaatcttttagcttatagtccacttcataacattgaaaaagataaatgttatccaactacattggtaactacagcaagtcgtgatgatcgagttgttccttctcattcatataaatttgcagccaaacttcaagaatatcaggggtgcgaaaatccaatattaattcgaattgaagatagagcggggcatggagctggtactccaaaagataaaataataaatcagatttcagagatttatggttacgctttaaaagaaatatctaattaa

SEQ ID NO: 262374 - DNA, 1093 bp, Unknown
  Bacterial polypeptide expressing nucleotide sequence isolated from the Sargasso Sea
gaatctgagtatgccataagatcagtaaatgttattaataatttttttgtaattaattatttggtcgacactttttcaactattaaagtatttaatcttgagggagaatttatttctgaaattgaattacccaaaaaaggaaatataagtgggttcggcggagataaagaagataccaaatcttattattcaataactaattatgttactccaagagaaatatatgaatttgattttaatacttttacatcaaagttattttggaaagaggaacttgatggatataaatcagatgattatgtatcgagtctaaaattttatgaatcaaaagatggaaccaagattcctattcacatcagtcataaaaaatcactagatataaatgagaagacaccgttattaatttatggttatggcggttttaatatttctatccttccaaattttagcaagagtcacactgcttggaaaaatcaaaatggagtctatgctgttgcaaacctaagaggcggtggtgagtatggagatgcatggcatgctgacggtatgttattaaataaacaaaatgtctttgatgattttgcttatgcagcaaaatttttacatgatcagaaaattggctctccagaaacaaccgcaattgatggaagatcaaatggcggtcttttggttgcagcaacgatgttacaaaatcctgatttatataaagttgctattccacaagttggcgtccttgatatgttgcggttcagtaaatttacaataggttgggcatgggaaagcgattatggttcagtagacaaaaaagatgaatttgaaaatctccttgcttatagcccattacataatattaaatcagatgtttgttatccaactactcttatcacaacagccagcagggatgatagagttgtcccatctcattcctttaaatttgcagcgaaacttcaaaaaaaccaatcgtgcaataacccaattttaattcgtattgaagatagagctgggcatggttcaggaacaccaaaagataaaattataaatcaaatatctgaaatatatggatatgccttattaaaaataaatgaggcataat

SEQ ID NO: 262375 - DNA, 782 bp, Unknown
  Bacterial polypeptide expressing nucleotide sequence isolated from the Sargasso Sea
attaaaattttatccttcaaaagatggaacaaaaattcctatacatattagttacaaaaaagggctagaaataaatcaagatactcctttgatgttatatgggtatggtggatttaatatttcacttttaccaggttttagaaaaactcatgctgcttggaaaaatttaggtggggtatacgctgtagcaaatttaagaggtggtggagaatatggcagtgaatggcataaagctggaatgttattaaataaacaaaatgtttttgatgattttgcatttgctgcaaaatttcttcatgaaaataatattggatctgaaaaaactactgcaataattggtggctcaaatggaggacttcttgttgcagctaccatgttacaaaatccagatttattcaaagttgctattccccaagttggagttcttgatatgttgaggtttagtaaatttacaattggttgggcatgggagagtgattacggatctgtagataaaaaagatgagttcgaaaatcttttagcttatagtccacttcataacattgagaaaggtaaatgttatccacctacactgataacaacagcaagtcgtgatgatcgggttgttccatctcattcatataaatttgcagctaaacttcaagaataccagggttgccaaaatccaatattaattcggattgaagatagagcggggcatggagctggcactccaaaagataaaatcataaatcagatttcagagatttatggttacgctttaaaagaaatatctagttaat

SEQ ID NO: 262376 - DNA, 2074 bp, Unknown
  Bacterial polypeptide expressing nucleotide sequence isolated from the Sargasso Sea
atgtcagggaaagcgcgccttcactaccccgtcacccgccagggtgagcaggtggatcactacttcggccaggccgtggccgacccctatcgctggctggaggatgatcgcagccccgagaccgaggcctgggtcaaggcccagaatgccgtgactcagggttatctggctgagatcccgtatcgcgccgccatcaaggagaagctggcctcttcctggaactacgccaaggagggggcgccgtttcgcgaggggcgttaccactacttcttcaagaacgacggcctgcagaaccagaacgtgctgtggcgccagctggagggcaagccggccgaggtgttcctcgatcccaataccctcagccctgacggcaccacggcgctggatcagctgagcttctcccgcgatggccgcatcctggcctactccttgtcgctggccggcagcgactggcgcgagatccacctgatggacgtacagagcaagcagccgctggaggcgcccctcaaggacgtgaagttcagcggcatcagctggcttggcaacgagggcttcttctactcgagctacgacaagccagatggcagcgagctatcggccaggaccgatcagcacaaggtctatttccaccggctcggcacggcgcaggaggatgaccggctggtgttcggcgccatcccggcccagcaccaccgctacgtgggggcgaccgtcaccgaagatgaccgcttcctgctcatctcggcggcgaactccacctccggcaaccgcctctatgtgaaggatctgagccaggagaacgcgccgctgctgacggtgcagggggatctggacgcggacgtgagcctggtggacaaccagggcagcaccctttacctgctgaccaaccgggacgcccccaaccgccggctggtgacggtggatgccgccaacccggggccggcccgctggcgcgatctcatccccgagcgccagcaggtgctgacggtgcacagcggcagcggctacctgttcgccgaatacatggtggatgccaccgcccgggtcgaacagttcgactacgaaggcaagcgggtgcgcgaggtggcgctgcccggccttggcagcgtcagcggcttcaacggcaagcacgatgatcccgccctctacttcggtttcgagaactatgcccagccgcccactctttaccggttcgagccaaagagcggcgccatcagcctctatcgcgcctcggcggcgccgttcaagccggaggattacgtctccgagcagcgcttctaccagagcaaggacggcacccgggtgccgctgatcatcagctaccgcaaggggctgaaactcgatggcagcaacccgaccatcctctacggctacggcggcttcgacgtgagcctgactccgagcttcagcgtgtcggtggccaactggctggatctggggggcgtctatgcggtggccaacctgcgcgggggcggcgagtacggccaggcctggcacctggcgggcaccaggatgaacaagcagaacgtgttcgacgacttcatcgcggcggcggagtatctcaaggccgagggctacacccgcaccgatcggctggcgatccgcggtggctccaacggcggtctgctggtgggggcggtgatgacccagcggccggatctgatgcgggtcgccctgccggcggtgggggtgctcgacatgttgcgctaccacaccttcaccgccggggcaggctgggcctatgactacggcaccagtgccgacagcgaggcgatgttcgactacctgaagggctactcgccgctgcacaacgttcgggccggggtcagctacccctcgacccttgtgaccacggcggatcacgacgatcgggtggtgccggcccactccttcaagtttgccgccaccctgcaggccgacaatgccggcccccatccccagctcatccgcatcgagaccaatgccgggcacggggcgggcacgccggtggcgaagcttatcgagcagagtgcggacatctatgccttcaccctgtacgagatgggctatcagcagttgccgcgtcagccttgat

SEQ ID NO: 262377 - DNA, 712 bp, Unknown
  Bacterial polypeptide expressing nucleotide sequence isolated from the Sargasso Sea
atgttgtacggctacggtggctttaacgtcagcctgactctttcattcagtgtggctaacctggtgtggatggaaatgggcggcgtgtatgctgtgcctaacctgcgtggtggtggcgaatacggtaaagcctggcatgatgccggtatccagctgaaaaaacaaaacgtgtttgatgattttattgccgcaggcgaatacttgattgcacagaaatacacttcaagcgacaaactggctattcgtggtggttctaacggcggtttgttagtgggcgctgtgatgacccaaagacctgatctgatgaaagtggccattccgcaagtgggcgttttggatatgctgcgttaccacactttcactgcaggtgctggttgggcgtacgactatggtacatctgagcaaagcaaagagatgtacgactacatcaaaggctactcgccagtgcataacgtcaaagaaggcgtggcttatccggctactctggtgaccactggcgatcacgatgaccgcgtagtaccagcgcattcctttaagtttgcagctgaactacaggctaaagccagcggtcctaacccacagatgatccgtattgaaaccaatgcaggtcacggtgcaggtgtgcctgtgtccaagcaaattgaattagctgcggatatttttggtttcaccttgtttaatatgggtgtcaaagagttacctaagcagtaat

SEQ ID NO: 262378 - DNA, 1361 bp, Unknown
  Bacterial polypeptide expressing nucleotide sequence isolated from the Sargasso Sea
aagatggggctggggtataagtgtaataaaagatactaacattaagattttatctatatctgaaggaacagatgagagaaataggctatatatacagctaaatactggtgaaaaattcattcccttaattgatgaactgataggcgcatataattttatagacagcaaagatggcattttatggttttacactacagaaggtgctccaaatgggaaaattgttaatttagaaataaaaaatggctcctttgtatggaatgacgttatacaagaatcagaaaattctattcggtctgtaaatgttataaataattcatttgtcataaattatttagtcgatactttttccagtataaaaatttttgatttgtcaggaaattttgttcaagatcttgagttaccaaaaaatggaaccattggaggatttggtggagagatcgatgacactgaaacttatttttcagtttcaaattacgttactccaagagagatatatgaaattaatttggattcattagaagtaaaacttttttggaaagaagaaattgatggatatgagtcagaggattatgtttcagaattaaaattttatccttcaaaagacggaacaaaaattcctatacatattagttacaaaaaagggctagaaataaatcaagatactcctttgatgttatatggatatggtggatttaatatttcacttttaccaggttttagaaaaactcatgctgcttggaaaaatttaggtggagtatacgctgtagcaaatttaagaggtggtggagaatatggcagtgaatggcatgaagctggaatgttattaaacaaacaaaatgtttttgatgattttgcatttgctgcaaaatttcttcatgaaaataatattggatctgaaaaaactactgcaattattggtggttcaaatggaggacttcttgttgcagctaccatgttacaaaatccagatttattcaaagttgctattccccaagttggagttcttgatatgttgaggtttagtaaatttacaattggttgggcatgggagagtgattacggatccgtagataaaaaagatgagttcgaaaatcttttagcttatagcccacttcataacattgagaaagataaatgttatccaactacattggtaacgacagcaagtcgtgatgatcgagttgttccatctcattcatataaatttgcagccaaacttcaagaataccagggttgcgaaaatccaatattaattaggattgaagatagagccggtcatggagccggtactccaaaagataaaatcataaatcaaatttcagagatttatggttacgctttaaaagaaatatccaattaat

SEQ ID NO: 262379 - DNA, 1366 bp, Unknown
  Bacterial polypeptide expressing nucleotide sequence isolated from the Sargasso Sea
gataagtaattacccttcgacaacaaatgatggaagatttctgatgatataccgaactaaaggaacatacggaagatctcttatggtaaaagatctaaaaaaggctaaaagtgaatttataaaaattgttaatgattataagtctgatattagtgtgatagatcacattgatggaaagctgcttgtaataacagaccgaaacgcagccaaaaagaaagtagtgttaattgatttagataatcctggagaaaacgagtgggttacaataataccagaaaataaaaatgtccttacttcagtgaacatgattgatggaaagttagttgctcattacatggttgatattatttcagagtgggtgatttttgatataaatggcaaaatgattaaaaaggttgacctgcctgggccaggtatttcgtatggttttggtggtgataacgaacaatcactatcatggtataggtttgagtcacttgttcatccacctacagtgttttcatttgattttgatgattattcatcaaaagtatattataaatcaaaagccaaatttgatagcgagagttatgtgatgaaacaagagttttattcctcaaaagatggaacaaagataccaatttttattgctcatgataaaaatatagtgctagatggaaataggccgactcttatgtatggctatggtggcttcaatatctcacagaaaccatattttaataaaacaattcctttcattcttgaaaatggtggcgtatatgctattgcgtgtataagaggtggtagtgaatacgggcaggagtggcatgaagcaggtatgctagataacaaacaaaatgtttttgatgattttattgcaggcagtgaattcttaattactgagggttatacctctcctgatagattagctattagaggtggatccaatggtggaactttagtcggcgccgttattaatcaaaagcctaatttatttcgcgtggcgtttccagaagtgggagtgatggatatgttaagatatgagcaatttacaattggttgggcttgggctgttgaatatggtactgttaaagaaaagaatgactttgaaaacctattatcctactcgccactacataatattaaaaatagatcatatccatctgttttagtttatactgctgatcatgatgatagggtagtacctgctcattcctttaaatatgctgctaaattgcagaatcatcagattcatgatgaataccctatactcattagaattggcactagcaccggccacggagctggcaagtccaccaaaaagcgaataaaagaatatgctgaaaaatgggcttttatgttttatgaaatgggagtgaagctctag

SEQ ID NO: 262380 - DNA, 784 bp, Unknown
  Bacterial polypeptide expressing nucleotide sequence isolated from the Sargasso Sea
tctaaagatggaacaaaagttccaatgatcatcacatataaaaaaggtttgagtaaaaatggtaaaaatccaacaattctttatggatatggaggttttaatatttctctcactccaaatttcagcagcattatggcttattggttagaaaaaggtggagtttatgcggttccaaatatcagaggaggtggagaatatggtaagaaatggcatctatctgggacaaaaatgaataagcaaaatgtatttgatgattttatctatgccgcaagatttcttatttcagagggctatacaaaatcagaaaacttaattttgagaggaggttcaaatggaggtcttttagttggcgctgttatgacacaagagcctcagcttgctagagttgctctccctgcagtgggtgtactagatatgctcaggtatcataaatttactgccggtgcaggctgggcttatgattatggaacatcggatgaaagtgaagagatgttcaactatcttttgtcttattcaccattacacaatattaaagacgaagtctcttatcccgccacattgataacaacaggtgatcatgacgatagggtagtcccagctcattcatataagtttgccgcttcactacaggaatcagacagtggagataatcctatcctcattagaattgaaactgaagcaggacatggtgcaggcactccaaccgagataatcttagattcttattcagaaatcttttcattcatcttgggaaatgttgaaaatagattatcaataaaataga

SEQ ID NO: 262381 - DNA, 710 bp, Unknown
  Bacterial polypeptide expressing nucleotide sequence isolated from the Sargasso Sea
cagtggatggagtggaaaaatagaagatgacaccttgtattacagttttacaaactatcattctccagggagaatttattcatattctccaaagacaaaaaattctgatgaattttggaaaccagatataaattttgattctgaccaatatgtttctgaacaaattttctatacctcgacagacggcacaaaaataccgatgattattacacggaaaaaagatgttgagtataatggggaaaacccaacaatactttatggctatggaggatttaatatcagtttgcgcccctcttttagtatagctaatgcagtctggatggaacaaggaggagtttatgcagttccaaatttaagagggggtggtgaatatggaaaagattggcataaagcggggactaaacaacaaaaacagaatgtttttgatgattttattgcagctgctgaatatttgatcgaaaaaaacatcactagtccagactatttagctattcgtggagggtctaatggaggcttactagttggggctacgatgactcaaaggcctgaattaatgaaagttgctcttccagcagtaggggtattggatatgttacgttatcataagtttacagctggagctggatgggcctatgactatgggacatctgaagactcaaaagaaatgtttgaatatctaaaaggttattctccagttcataatgtaataa

SEQ ID NO: 262382 - DNA, 865 bp, Unknown
  Bacterial polypeptide expressing nucleotide sequence isolated from the Sargasso Sea
aatgacaactggagaatcagaaatttatcaatctccttctattgattttattgcagaagactatattactaagcaaatttttcttaaaagcaaggatgatacatccatacctatgtttatcacgcataaaaaagatatggtaatgaatggaacgaatccgaccattttatatggttatggcggattcaatattagcttaacacccagttttagtactacgaatcttgtgtggctagaaaatggtggagtgtatgcagttgctaatttgcgtggcggcggcgaatatggaaaaaaatggcatttagctggaaccaaaatgaataaacagaatgtttttgatgattttatagctgcagccgaatatctaataaatgaaaaatatacatcgagtgattatcttgcaactagaggtggttcgaatggaggattattagttggcgctacaatgcttcaaagacctgaacttatgaaagttactattccagcagtgggagttatggacatgctaagatatcatcaattcactgcaggagcgggttggtcttacgattatggaacagcagaagattcacctgaaatgttccaatacttgaaaacttattctcctgttcatgcaattaaggatggtgtttcatatcctgcaactttagttacaacttctgatcatgacgatagagttgttccagcacactcttacaaatttattgctggtttgcagaaagctcattcaggacctaatccagttttaataagaattcaaaccaatgcagggcatggtagtgtatctatggagcaaaggatggacttagcttctgatatttatgcgtttatatggtacaatatgggtgtaaggccaaatttataa

SEQ ID NO: 262383 - DNA, 796 bp, Unknown
  Bacterial polypeptide expressing nucleotide sequence isolated from the Sargasso Sea
tatggaaattgactgggaagaatggtcacctggaaacttcaccacaccactaccaccaacaactccattcgatacaactcctggtcctcccgcagattgtgtcggtgaccccaacccaacttgggctccagcaactgaaatcgatctaggcctttcttgtcaaaatgaaggctcaaagattgttggaggcacagttgccccacaaggtcgattcccatggcaagtaaactactcatggggatgtggtggtaccatccttaatgatagatggattcttactgctgctcattgttgcgaagctatgcaagaacacgtcgtcaccattggagattatcattttaatgacgccgatgttggtgaattccaactcactgctgaacaagttatcatgcacccagactatggacagcatccagactccggcattgccaacgatgtctgtctcctcaaagttccaagtcttgcagctaatgctccagctgattgcaatggatgctatgcaactgcttgtctcccatcacatgcaccaaatcatggtgaatactgcgttgtttctggttggggtaacactcaaacggacaacccatggccaaacgaacttcatgaagttggcgttttcctctttgaccatcaattctgtcaagactattcccacaccggtatgacaactgttgctgatcttgaactttgtgcaggtcttcctgataacaacggaaactgccttgccgatggtggtaaagatgcttgccaaggtgactctggtggtccattgacttgtgtcaaagacggacaacca

SEQ ID NO: 262384 - DNA, 130 bp, Unknown
  Bacterial polypeptide expressing nucleotide sequence isolated from the Sargasso Sea
ttgtcttcacagggggactccggtgggccactggtgagtgagcgtggcggttcctttgacttggtcggggtggtgagctgggggtacggctgtgctcaggttgcttttttaccatctttggtcatttgat

SEQ ID NO: 262385 - DNA, 847 bp, Unknown
  Bacterial polypeptide expressing nucleotide sequence isolated from the Sargasso Sea
caagcagcatcccgcctacaacccatcaaacatccagaacgacatctcagttctcgaacttgaaacggcagtcgacctgtactcgtatcccaacatcaagcccatctgtctgccagctcaaggagccaccttccccaatggtcaggcaactgtctcaggatggggaaccctggcatcgggaggatcggccccagctacccttcatgaggttgacgtcactgtgtttgccgatggaaactgtggcgagatgaaccagtacatgacacctgacatgctctgtgccggtgttgctgaaggaggaaaggacgcttgccaaggagacagtggtggtcctctcttcatatccgaccctgcgaacaacaacgctcaaagcctcatcggagtggtcagctggggttttggttgtgccaatccaggccagctagggatctacgccgaggtggcctactttagggactggctagattctcagctcacaagtgtcaacacctgcagtcctccctctggaagcgaactcgcagctgctgtcccgtgtgaatcggtaaacgcaagctctacaacagctgagccgtggtacacaacaacaacaaccacctctgcacctggatcaggatcaggatcaggaacatgtggaaactgtgtcttcccgttcacctttggcgggcgaaagcacaccacttgcaccaccatcgatggagactcaccttggtgtgcgacagaagtggattcctctggaacgttcgtccaaggaaaatacgaatactgcactgactcctcctgccctggcctcaaccctccggcaattagtgtcaaccctaataacgccgttggatcatgctgtgagtaa

SEQ ID NO: 262386 - DNA, 895 bp, Unknown
  Bacterial polypeptide expressing nucleotide sequence isolated from the Sargasso Sea
atgataccaatgtcaatggaacaacattcaatgaatccaggagatttaccttggcctatgattgtaggtggagtaccagtaaatcctgcttgtcccaattgtaaatatgactttatggtttcgttacaatatgatggatggtggggtggtcacttttgtggtggttcattggttagagaagattgggttgtaacagctgcacattgtgttcaaggagaatcaccaaataatattgaggtggttattggattacataatgtaaatggaacaaatggttctcaaacaagaaatgtatcagagataatcatacatccaaattatagtaataattcactaaacaatgattatgctctattaagattatcatcaccaattacagattttgaaccaatacaattatgtacagatacagaccacgatgaagaacctgtgatgtcaacaacaatgggttggggtgctacatcaagtggtggaagtagttcagcaatattactagaggttgatgtgccaattgatgattcttgtggtaactattctaattcagatataacaaataatatggtttgtgctggatataataatggtggatatgattcttgtcaaggagatagtggaggcccacttattatgacaaacgatgatggagagtatgagttaattggtatagtcagttggggttatggttgtgctgaacctggatatcctggagtgtattctaaaatacattcaagattaaattggttctttggatacatcggagaacctgaagaagattttgtagtagaattatatggtgatgttaactttgatggagaattaaatataacagatgttataacattgattaactttatattgggaacaacaccaacagaagaggaagcattaactgctg

SEQ ID NO: 262387 - DNA, 424 bp, Unknown
  Bacterial polypeptide expressing nucleotide sequence isolated from the Sargasso Sea
atggaaccaaaagttaaattaccactactacctttaagagatatagttgtctttccaaatatggttatacctttgtttgttggaagagataaatccataactgctttaaatgaagttatgaaagggcaaaaaaaaattattttggttacacaaaaaaactccgagattgacgatcctaaaaaaaacgacatatatacttatggctgcgaaagtaatattttacaattactaaagctacccgatggaactgttaaagttttagtagagggcactaaaagacttaagatattagattttaatgacgaggaaaaatacatatcttgtacttttgagtatttaaaagatcaaatagaacctgctgaggatttacttccactttctatgacggcaattaaaagattagaaaaattgactaatgtaaaca

SEQ ID NO: 262388 - DNA, 774 bp, Unknown
  Bacterial polypeptide expressing nucleotide sequence isolated from the Sargasso Sea
gggacataattgatggatatgccagagaagctggtgtaagaggactggaaaatcaactgaaaaaactgttgagaaaatcagcaagaaaaattgtcgaagaagagtctaaatgcgttaaaattagcaaaatcgatcttcctgaaatgcttggtcgtaaaacatttgcagaagaaactcgttataaaaaaccaaagataggagtaattaccggtcttgcatatacaagtgttggtggagcgactctgttcatcgaggcatcatgcgttgaggcgaagaattctggctttaaacagaccggacaattgggggatgtaatgattgaatctactgaaattgcatacacttatattcgatcaatcgggagcaaagacaaaaaaatacaaaaattctttgcagaaaattttgttcatcttcatgttcctgcaggcgcaacccctaaggatggtccttctgcagggattacaatggcctgtgctctttattcattagtaacacaggttgcagttattcccaatcttgccatgactggtgagcttacattaactggtcttgtaatgcctgtgggaggtattaaagaaaaaactattgcagccagaagatcagggattactcagcttatttttccagcagaaaatcaaaaggattttgatgacttggatgaaagcattaaaaaaggtattaaaccatattttgtcaaaaatttttcagaagttcttcctgttggttttcctgatctttttgtaagtaggaaaaagatcacgacaaaaaaatagt

SEQ ID NO: 262389 - DNA, 301 bp, Unknown
  Bacterial polypeptide expressing nucleotide sequence isolated from the Sargasso Sea
atggaagttaaattaatacagccgttattaccattaagagacatagtggtatttccaagcatggtaattcctctattcgttggaagagataaatctattactgctttaaacgaggtaatgaaaagtgataaaaaaataatattagtcactcaaaaaaattctgaggttgatgatccaaagaagaatgatgtattttcttatggatgtgaaagtaatatattacaacttttaaaacttccagacggcacagttaaggttctagttgaaggaatcaaaagagtaaaaattattgattttaagg

SEQ ID NO: 262390 - DNA, 353 bp, Unknown
  Bacterial polypeptide expressing nucleotide sequence isolated from the Sargasso Sea
catggaaccaaaagttaaattaccactactacctttaagagatatagttgtctttccaaatatggttatacctttgtttgttggaagagataaatccataactgctttaaatgaagttatgaaagggcaaaaaaaaattattttggtcacacaaaaaaactccgagattgatgatcctaaaaaaaacgatatatacacttatggctgcgaaagtaatattttacaattactaaagctacccgatggaactgttaaagttttagttgagggtactaaaagacttaagatattggattttaacgacgaggaaaaatatatatcttgtacttttgagtatttaaaagatcaaatag

SEQ ID NO: 262391 - DNA, 448 bp, Unknown
  Bacterial polypeptide expressing nucleotide sequence isolated from the Sargasso Sea
tatggaaaaaaatttaattcctgttcttccacttagagacatagtggtattccctaacatggtcgctcctctatttgtaggaagagaacaatcagtaaatgcacttaatcatgtgatgaagggtgataaaaaaatttttttaatttctcaaaagaattcaaaagttgataatcctaataaggaaaatttatattcttttggtactgttgctaaaattatacaacttttaaaacttccagatggtaccctcaaggttctagttgaaggaatacaaagagcaaaagctaatcaaataaactttaacaaagaatatatcactgcatccatcactgaaattaataataaaacaaaaaaaaattcaaatataaaggcgcttcaaaaacttattgtagagcagtttatagagtttcaaaaaattaataaaaaagtttccctagatgtaattaat

SEQ ID NO: 262392 - DNA, 583 bp, Unknown
  Bacterial polypeptide expressing nucleotide sequence isolated from the Sargasso Sea
tatgaaagcttcttatttaaaagcattacttccgctaagagatattgttattttcccttcaatggtagtgcctttgtttgtgggtagagaaaagtctattaaagcacttcaagaagttatgaaaaacgataaatcaatagttttagtaactcaaaaaaactctgaaatagatgatccagaggataaagatctatacggatatggatgtttaagcaaggtattacaactgttaaaacttccagatggaactgtaaaagtactagtagagggagaaaaaagagtaaaaatacttaatcataaagaatctgaagatagttttataaagtgtgaagttgaaatttctgaagatgaaaatgttacaaaagagctagacacttttgcagctgggttattaaaaaaatacgaaaagttattagtgttaacaaaaaaagacacaagtgaaggtataaataatttaaaaaacttaaaaaatgcttctcaaatcgcaaataatatttcttctaatctaaatatacaaatattcgagaaacaagagctgttagaaattcttgatttaaaaaagagattagaaaaaatttattct

SEQ ID NO: 262393 - DNA, 597 bp, Unknown
  Bacterial polypeptide expressing nucleotide sequence isolated from the Sargasso Sea
aatggaagttaaagtcacacaacctttattacctttgagagatatagttgtatttccaagcatggttattcctttatttgtcggaagagacaaatcaattacggcattaaatgaagtcatgaaagataataaaaaaatagttcttgtgacacaaaaaaattcagaagtcgacgacccaaagaaaaatgatgttttttcatatggttgcgaaagtaatattcttcaattattaaaattaccagacggaactgtaaaagttttagtagaaggaattaagagaataaaaataatagattttaaagatgatgaaaaatttatatcttgcacatacgaatatcaaaaagaattaatttctaacgatgaagatcttatgcctttagcgctaacagctgttagaaggttagaaaaacttacatcaataaataaaaaaatttcaacagaaacaataaacaatattaaagaacttaaagatccttcaaaaatagcagataatattgcatcacatctaaactctacaatttcagaaaaacaacaaatatttgaaatgttagatgttaaaaaaagattaaacggcgttattaaagttatggaaaacga

SEQ ID NO: 262394 - DNA, 349 bp, Unknown
  Bacterial polypeptide expressing nucleotide sequence isolated from the Sargasso Sea
ggtccatccgcaggtgtcggaatgtttacctctattgtttccctgctttcaggaaagccagttaaaagtaaactagctatgactggagaaattaccttaaggggtaatgttctacctattggaggcgttaaagaaaaagttaccgctgcacatagatctggaataaaaactattattttaccagatcataatcgaaaagatttagaagatattcctgatcatattaagaaagatctagacttccattttgcaaaagaaatgatggatgtaattaaggttgctgttccaaggttaaatttgaaacctacaagaaaaaagacaacctcaaaaaataaaaaagtagcgtaac

SEQ ID NO: 262395 - DNA, 472 bp, Unknown
  Bacterial polypeptide expressing nucleotide sequence isolated from the Sargasso Sea
aatggaagttaaagtcacacaacctttattacctttgagagatatagttgtatttccaagcatggttattcctttatttgtcggaagagacaaatcaattacggcattaaatgaagtcatgaaagataataaaaaaatagttcttgtgacacaaaaaaattcagaagtcgacgacccaaagaaaaatgatgttttttcatatggttgcgaaagtaatattcttcaattattaaaattaccagacggaactgtaaaagttctagtagaaggaattaagagaataaaaataatagattttaaagatgatgaaaaatttatatcttgcacatacgaatatcaaaaagaattaatttctaacgatgaagatcttatgcctttagcgctaacagctgttagaaggttagaaaaacttacatcaataaataaaaaaatttcaacagaaacaataaacaatattaaagaacttaaagat

SEQ ID NO: 262396 - DNA, 517 bp, Unknown
  Bacterial polypeptide expressing nucleotide sequence isolated from the Sargasso Sea
catgttatctgaaaataaaaagcctcttttgccattaagggatatcgttattttcccatcagtagttgttccattatttgtagggcgtaaaaagtctattagtgctttagaagaagtaatgaaatcagataagtcaattgttttagtatcacaaaaaaattccgaggtagatgaccctcaagcaaaggatattttctcatttggatgcctaagtaaagttttgcagctattaaaattacctgacggtaccgttaaagttttggtagaaggtttaaatagagtgaaaattaatgaaataaacaatgaaaacaagaagtatttaagttgtaaaatcgaaaaaatagaaagagataaagagactgaagaaaataagctttacgctttaaatttaataaaaaaattcgaaaaactatctaatgttagcagaaaagactctatggattttgtaaaaactcttaaatcattaaaagattcagaacatattgccgacaacattgcttcaaacttaaatattttc

SEQ ID NO: 262397 - DNA, 712 bp, Unknown
  Bacterial polypeptide expressing nucleotide sequence isolated from the Sargasso Sea
atgggcgatcgagaaacatttacacttccagtacttccacttagggacatcgttgttttccctaacatgattgttaggctctttgttggaagagagaggtccgtcaaagcgttagaaagcgtaatggcgaatgatcagaagataattcttgccactcagaaagatgctacagttgatgatcctagcgttgaccatatacacaaaataggtgttttagcccaagtacttcaaattttgaaactaccagatggcgctgttaaaatacttgttgaaggtactcggagggtacaaattgaggaattcttgccgaacgaacatttttttgaagctcatgccagtgcgtcggaggatgtaaattccaatcaggatgagttggaagctctcaggaggtctgtagtggatgaatttgataaatattccaagttaagtaaaacaattcctgaagaagcaatatcagctgtggcagaagccgatagtgctgagaaactagctgatactgtagcggggcacataggagtttcagtggagaaaaagcaagcgattttggaagaaatggacttaagtaggcggttagaagaactactggcttttatgcagggagagatgagtgttttgagggtcgaaaagaaaataaagtcgcgtgtaaaaaatcaaatggaaaaaacgcaaaaggaatactatttgaatgaacaaatgaaggctatcaaaaaga

SEQ ID NO: 262398 - DNA, 472 bp, Unknown
  Bacterial polypeptide expressing nucleotide sequence isolated from the Sargasso Sea
atgaaagcttcatatttaaaaccactattacctttaagggatatagttatattcccatcgatggtagttcctttatttgttggcagagaaaaatctataaaagctcttcaagaggtaatgaaattagataaatctattgtattggcaacacaaaaaaattccgaattagatgatccaactggtacagacctatatcaattcggatgtttaagtaaagtattacaacttttaaaacttccagatggaacagttaaagttttagttgagggagaaaaaagagtaaagattattaaacatagcgataaaacaaaagaatttttgaattgtgaagtagagatagttaacgatcaaaatatcaccaaagaccttgatcaattagctaatggtttaatcaaaaagtttgagaggttgcaaatattaagcaaaaaagatataagtgatggcacaaacagtttaaagaatcttaaagacc

SEQ ID NO: 262399 - DNA, 401 bp, Unknown
  Bacterial polypeptide expressing nucleotide sequence isolated from the Sargasso Sea
tatgacttctgagaaacaaaagcctttattaccattaagagatatagtcatttttccatcaacagtaatacctctttttgtagggcgaaaaaaatctatcaaagctctagaagaagtaatgaaaactgacaaatctattgttttagttgcacaaaaaaacccggaagttgatgatccaaaaaacgaagatatttactcatttggatgcttaagtaaaattttacaattgttaaaacttccagatggaacagtaaaggttcttgttgaaggtttagaaagagttaaaattaaatctatcaagcaagaagacaaaaaatacttaaattgtgatattgaaattgtcccaagcactgacgatactcaagaaagtaaaactttagcaacaaatttaatcagaaaat

SEQ ID NO: 262400 - DNA, 688 bp, Unknown
  Bacterial polypeptide expressing nucleotide sequence isolated from the Sargasso Sea
catgcaaaagctgaagaacaaaaccaaattggtactacatgtggattggcatggacacaagcagggggagaactccttgttactgaagtaaatatcatgaaaggcacaggaaagttacagttaactgggaagcttggagatgtgatgaaagaatcagcacaggctgcgctgagttatgtacgtacgaatgcaaacaggctgggaatattttcttcagtatttgaaaaaacagatattcacattcacgtaccggcaggagctgtacctaaagacggtccatctgccggggttacaatagctacttctttagtcagtgcatttaccagtatcccggttaggaatgaagttgctatgactggagaaacaactttgcggggcaaggtactggcaataggaggattaaaagaaaaacttcttgctgcaaaacgaggtgttatttccactgtaattattccggataaaaacaagaaagatcttagtgaaattcctgaagaaatccaaaatggacttgaaataatcccggtaaatacagtggaagaagtattaaataaatcacttgagcgattccccagtcctgtaatagatcctgtatctgaagatgaagaaggttccaataaagaaagtccggaagcagccatcttaccagaaactgaatcctcagattcccctagaacttatgatgcataaa

SEQ ID NO: 262401 - DNA, 349 bp, Unknown
  Bacterial polypeptide expressing nucleotide sequence isolated from the Sargasso Sea
catggacgtcacatatacaaaacctttactgccccttagagatatagtcatttttccatcaattgtagttccattgtttgttggcagagaaaagtcaatcaaagccttacaagaagcaatgaaaacagataagtcaataattctagtcgctcagaaaaattcagaaaccgatgacccttccgaaaaagatttattttcttttggatgtttgagcaaagttcttcaacttttaaaattacccgacggaactgtgaaggtgcttgttgaaggacagaagagagtaaaaataacaaatataacaaatgaaaatacttttttaaaatgcaatgttgaaatagctgcagataca

SEQ ID NO: 262402 - DNA, 283 bp, Unknown
  Bacterial polypeptide expressing nucleotide sequence isolated from the Sargasso Sea
aatggatgtaaaaattacacagccgcttttaccattaagagatatagttgtattcccaagtatggtaatcccattgtttgttggtagggataaatcaattactgcactaaatgaagttatgaaaaataataaaaagatagtgcttgtaacccaaaaaaattctgaagtagatgaccctaagaataatgacgtcttttcttacggatgtgagagcaacatattgcagctattaaaattacctgatggtactgtaaaagtattggtggaaggtacaaaaagagta

SEQ ID NO: 262403 - DNA, 229 bp, Unknown
  Bacterial polypeptide expressing nucleotide sequence isolated from the Sargasso Sea
atggcaaaaaatttacttcctgtacttccacttagagatatagttgtttttccaaacatggtagctccattatttgtgggaagagaacaatcagtaaatgctttaaatcacgtaatgacaggtgataaaaaaatttttttactttctcaaaagaattcaaaggttgataatcctgataaagaaaatttatactcttttgggacagttgccaaagttatccagttattaa

SEQ ID NO: 262404 - DNA, 381 bp, Unknown
  Bacterial polypeptide expressing nucleotide sequence isolated from the Sargasso Sea
ttggcatggttacatccattatttccgctatcaccggtgttgaagtgcgacgcgacgttgctatgaccggcgaaattacgttgcgtggacgcgttttgccaattggtggattgaaggaaaaattactggctgctcaacgaggtgggttgaaaaccgtcttgattccgaaagacaatgaaaaagatctcgccgatataccagataatgcgaaatccaatctcacaattatacctgtttcaatggtggatgaagctttgtcagcggctctggtgagagagccgacgccgttggcaatttctggattaccagatattaccgaagaatcggggacaacagtcccagattcaggtgaaaatccctctgacattgtcgcgcattaat

SEQ ID NO: 262405 - DNA, 555 bp, Unknown
  Bacterial polypeptide expressing nucleotide sequence isolated from the Sargasso Sea
catggatataaaaatatcactaccactattacctttaagagatattgttgttttcccaagtatggtgatacctctgtttgttggaagagataaatctatatccgcgttaaatgaggtgatgaaaaaagataaaaaaattattcttgtcactcaaaaaaattcagaaatagatgatccaaataaaactgatgtttttatgtatggttgtgaaggtaatatcttacaattacttaaattacctgatgggactgttaaagttttagttgaaggaatcaaaagagtaaaaattttagattttaaggataatgaaaaatttatcacttgtgactatagtgttttaagcgatgttacaaataaagaggaggacctttatccgttagctgttactgcaataagaagattggaaaaattaacttcaattaataagaagatttctaatgaaactataaactcaattaagcaattaaaagagccgtctcaaatcgctgataatattgcctctcacataacagctactatttcagagaaacagcaaatatttgaaactatagatgt

SEQ ID NO: 262406 - DNA, 583 bp, Unknown
  Bacterial polypeptide expressing nucleotide sequence isolated from the Sargasso Sea
atggacgtcaaaatatcattacctttacttccgttgagagacatagtggtctttccaagtatggtcatccctttatttgtcggaagagacaaatctatttctgcacttaatgaagtgatgaaaaaagacaaaaaaattattttagttactcaaaaaaattcagaaattgatgatcctaagaaaacagatgtttttatgtatggttgtgaaggaagtattttacaattattaaaattaccagatggtacggtaaaagttttagtagaaggtataaaaagagtaaaaattcttgactttaatgataatgaaaaatttattacatgcgattatacgcactatcacgatgttttgtctaaagatgaagatttgtttccattagctgctacagctttaagaagattagaaaaacttacatcaattaacaaaaaaatttcgaatgaaataataaatactattaaacaattgaaagacccttcgcagattgctgataatattgcatctcatataacagctactatttctgaaaaacaacaaatttttgaaatggttgatgtaaaaaagagaattaaatgccattattaaa

SEQ ID NO: 262407 - DNA, 544 bp, Unknown
  Bacterial polypeptide expressing nucleotide sequence isolated from the Sargasso Sea
atgaatttaccgctgttacctctaagagatatagttgtttttccaagcatggtaatacctttgtttgtaggaagagataaatctatcaatgccttaaatgatgtgatgacatcagaaaaaaaaatcttattagtaacccaaaaaaattctgaaacagacgacccaaaaagaaacgatatttttaattatggttgtgagagtagaattctgcaactattaaagttacccgatggaacagttaaagttttagtagagggaattaaaagagtgaaaatcttagattttgttgaaaataccaattttataaaatgtgactatgaaattcaaaaagatgatttcaataaagaagaaaacttaatggccttagcgtctattgctattagaagattagaaaaactaacatcaattaacaaaaagatttcatctgaaatattaaataatattaaagaccttaaagatccatcttcagttgctgatcatatagcttctcacttaaaaaggacaatttctgagaaacaacaaattttgaaacttttaacgtaaa

SEQ ID NO: 262408 - DNA, 550 bp, Unknown
  Bacterial polypeptide expressing nucleotide sequence isolated from the Sargasso Sea
tatggaacttaaagtaaatctaccacttttaccacttagagacatagtggtatttccaagtatggttatacctttgtttgtagggcgagataaatcgataacagctttaaacgaaacaatgaaacaagataaaaaaattattcttgttactcaaaaaaattcagaagtagatgatcctaaaaaaaatgatgtttttatgtacggatgtgaaagtaatatattacaacttttaaaattacctgatggaacagtaaaagttttagttgaaggtaaaagaagagttaaaatagttgattttaaagatgacgaaaaatttattacttgtagttttgaacatattgtagaccaaatcgataaaaatgaagatttgatgcctttagcaacaacagctgttagaagattagaaaaattaacatcaataaacaaaaaaatttctagcgagactattaacagtattaaagaactaaaggattcatcaaaaattgctgataatattgcatcacatttaaatacaactatttctgaaaaacaacaaatgttgaaacagctg

SEQ ID NO: 262409 - DNA, 553 bp, Unknown
  Bacterial polypeptide expressing nucleotide sequence isolated from the Sargasso Sea
ggcaaatgcgttaggaaaaggaggtattatacaaattgaaactatattttatccggctaataactttcttgatttacgtcttacgggtatgcaaggagatgttatgaaagaaagtatgaatgttgcaagaacattagcatggagtttaacatcacaagcaaaacgcactgctcatcttaaaaatttcgaaaaaagtaaattgcaaggattgcacattcattgtccggaaggcgcggttccaaaagatggtccttcggcggggactgccattacagttgcgatgtacagtttatttaataataaaaaaattaaaaataaagttgcaatcactggtgaaatgaatttacaaggacaagtaacggctattggtggattagaattaaaaatattaggaggtattcgtgcgggagttaacgaatttttatttccaaaagaaaacaagaaacattttgaagatatgttagaaaaatatgagggaaaagattattttgacggtattacatttcatcaagtatctacaattaaagaagttctttccttagtttttgtataa

SEQ ID NO: 262410 - DNA, 479 bp, Unknown
  Bacterial polypeptide expressing nucleotide sequence isolated from the Sargasso Sea
tatgattaaatcaatcttacctgttcttcctctaagagacatagttgtatttcctcatatggtggctccgttatttgttggaagaaaacaatctgttaatgcattaaatgcagttatggtaggagataaaaaaatatttttattatcacaaagaaattcagaaattgacagtccaaacgagaaaaatttatattcctatggaaccgttgcaaaggtgctacaattacttaaattacccgacggtactcttaaagttttagttgagggtttatataggtcaaaagttacgaaacttaactttaataaagattatacattagctactatttccgaattaaaaaataataataaaaaaaactcaaatgtaaaagctcttcaaaaattagttgtagaacagtttgaggaatatcaaaaaattaataaaaaagtgcctctggacttagtaaataacattaaaacttttaatgaccctaataaaa

SEQ ID NO: 262411 - DNA, 157 bp, Unknown
  Bacterial polypeptide expressing nucleotide sequence isolated from the Sargasso Sea
aatgagtattcccgaaaattttgttccagtacttcctttaagagatattgttgttttcccttatatgatagttcccttatttgttggaagggaaaagtcaattaaagctcttgaagctgtaatgagagaagataaaaaagtatttctcttggtcaca

SEQ ID NO: 262412 - DNA, 619 bp, Unknown
  Bacterial polypeptide expressing nucleotide sequence isolated from the Sargasso Sea
aatggacattaaatttaacttgccgttattacctttaagagacatagttgtttttccaaacatggttattcctctatttgtgggtagagataaatcaattaatgcccttaacgaggtaatgaaaaaggaaaaaaaaataattcttgtaactcaaaaaaactcggaggttgatgacccaactaaaaatgatgtttttgcatatggttgtgaaagcaacattcttcaacttttaaaattgccagacggtactgtcaaagttctcgttgaaggaattaatcgagttaaaataaccgattatagcgataacaaagattttataacttgctcttatgaaaaggtaagtgatcaatttaacaaagatgaagatttgatgcaaacagctctttcggctgtaaaaaaacttgaaaagctgacttcaattaataaaaaaatttcaagcgaaactattaacaacatcaaagttttgaaagatccttcgaaaattgcagataatatcgcatcgcatttgaatacatctatatcagaaaaacaacaaatttttgagactcaggatgtgaagaaaagattaaatctaataattaagataatggaaaatgaaacaagtatttattggggttga

SEQ ID NO: 262413 - DNA, 517 bp, Unknown
  Bacterial polypeptide expressing nucleotide sequence isolated from the Sargasso Sea
tatggacgtcaaaatttcactgcctttgctcccattgagagatatcgtagtctttccaagtatggtaatccctttatttgtaggaagagataaatcaatttcagcacttaatgaagtgatgaaaaaagataaaaaaattattttagtaactcaaaaaaattcagaaattgatgatcctaagaaaacagatgtatttatgtatggttgcgagggaagtattttacaattgttaaaattaccagatggcacagttaaagttttagttgaaggaattaaaagagtaaaaattttagactttaaggataatgaaaagtttataatatgtgattacacacactacaacgatatttcacctaaagatgaggatttatttcctttagcagctacagccttaagaagattagaaaaattaacatctataaataaaaaaatttctaatgaaactataaacactattaaacaattaaaagacccatcacaaattgcagacaatattgcatctcatataacagcaact

SEQ ID NO: 262414 - DNA, 659 bp, Unknown
  Bacterial polypeptide expressing nucleotide sequence isolated from the Sargasso Sea
tatggatgtaaaaatttctttacctttgttaccactcagagacatagtagtttttccaagtatggtcatacccctttttgttggaagagataagtccatctctgctttaaatgaagtaatgaagaaagataaaaaaattatcttagtaactcaaaaaaattcagagatagacgacccaaaaaaaactgatatttttatgtatggttgtgagggaaatatacttcaattattaaaattacctgatggaactgttaaagttttggttgagggtataaaaagagtaaaaattttagattttaaggatgatgataaatttattacatgtgattttacacctttaaaggatgaattaattgagggagaagacctgtatcctttagctgtaactgcagttagaagattagaaaaattaacatcagttaataaaaaaatatcatctgaaacaataaacactataaagcaacttaaagatccatcacagatagcagacaatatagcatcgcatatagttgcctctatttcagaaaaacaacaaatttttgaaactgcagatgttaaaaaaagattaaattctattataaaaataatggaaaacgaaactagcattattggagttgaaaagagaataagaggcagagttaagaaccaaatggaaaaac

SEQ ID NO: 262415 - DNA, 544 bp, Unknown
  Bacterial polypeptide expressing nucleotide sequence isolated from the Sargasso Sea
atggaagttaaaatttcattaccgttattaccattaagagatattgtggtttttccaagtatggtcatcccattatttgttggaagagataagtctatttcagctttaaatgaagtgatgaaaaaagataaaaagattattttagtaacacaaaagaattctgaaattgatgatccaaaaaaaacagatgtttttatgtatggttgtgaaggaaatattttacaattattaaaactacccgatggtacagtaaaagttttagttgagggtataaaaagagttaagattttagattttaaagataatgaaaaatttataacttgtgaatatacagccttaaatgatgtgttagataaatctgaagatttataccctttagcagttactgctgtgagaagattggaaaaactaacttcaattaataaaaagatatctaatgagacaattaattctattaaacaattaaaaagtccatcagagatcgctgataatattgcctcacatataacagctacaatttctgaaaaacagcaaattttgaaac

SEQ ID NO: 262416 - DNA, 430 bp, Unknown
  Bacterial polypeptide expressing nucleotide sequence isolated from the Sargasso Sea
catggtcaaaaatattttcccagtattacctttaagagacatcgtagtttttccaaatatggtagcacctctatttgtgggtagagaacaatcagtaaatgctctaaataacgttatgacaaatgataaaagaatatttttactctctcaaaaaaattcaaaaattgataatccaaataaagataacctctataactttggaacagtagctaaggtaattcagctattaaaacttccagatggaactctcaaagttttggttgagggtattcatagagcaaaagttacaaagataagtttcaataaagaatttattactgcttcaataatggaaattaatcaaaaaaccaaaaaaaattcaaatataagagctttgcaaaaacttattattgagcaatttatagaatttcaaaaaattaacaaaaaggtt

SEQ ID NO: 262417 - DNA, 303 bp, Unknown
  Bacterial polypeptide expressing nucleotide sequence isolated from the Sargasso Sea
tatgtctaagttagaaaacttttttccaattttacccctccgcgatattgttgtatttccacatatgatagttcctttatttgttggtagagataaatcaatcaaagcacttgagaccgtaatgagtgaggataaaaaagtttttcttattgctcaaaaagatggatcagttgaagaccctagtgaaaaagatttatatagaattggcactttaggaaacatccttcaactgttaaagctacctgacggaacagttaaggttttagttgaaggtatttcaagagctaagataaaaacatttaa

SEQ ID NO: 262418 - DNA, 505 bp, Unknown
  Bacterial polypeptide expressing nucleotide sequence isolated from the Sargasso Sea
ctgcttcctttgcgtgatgtggtggtgttcccgcacatggtggttccgctgtttgtgggccgcgaaaaatccattcaggcgctggaagcggcaatggagggcagcaaggaaatcctgctggtagcccagaaagatgcctccaccgacgagccgggcccgaaggatgtatttgccatgggcaccctggcgacagtgctgcagatgcttcggctgccggatggcaccgtcaaggttctggtcgagggtaattcccgagccagtatttccgacatcgaggaaggcgattacctgtccggccaggccattctgatggatgaggaatccttgccggagcgcgagaaagacgtcctcaccaagactctgatggacgaattcgagaagtacgtgaagctgtccaaaaaggtgccatctgaagtttccaatgctttgaccggtatccaagaacttgagcgtctggtcgataccatggccgcgcatctggagatgcggattcccgagaaacagg

SEQ ID NO: 262419 - DNA, 649 bp, Unknown
  Bacterial polypeptide expressing nucleotide sequence isolated from the Sargasso Sea
atgaaagttgcaccaaatcttacagaagagcactctggaatgttaaagaatatacaaaaaccaaataggttgactgatcgtgctatatcagtaatcacaatttcgaaccaagagaaacaagaaattctagaagaattggatattaaaataagaattgaaaaagctttaaaccttatttctcgtgaaatacagagaataaaactaggagaggaaatacaatcagaagtacatgatgaaataacaaaaactcagagagagtactacttgcgtgagcaaatgaaagcgattaaaaaagaattaggtgaagatgaaagtacggtagagctaaaagagttagaggataagattaaggctgtaaaaatgccagaagaatctcaaaaagtagcaatgaaagagcttgatagattatcaagaataccaactcagtctccagagtacaatgtatcaaggacttatatcgaatggttggtagatctcccatggagtgaaagtaccgatgatcgtattgacctaaaagaggcaatgaaaattttggatgaagatcattatggtcttgagaaagttaaagagagaattgtcgaatatttagctgtaagaaatttgaaacagaaaaaagatcctaatggaacagtaaggggtccgatattgt

SEQ ID NO: 262420 - DNA, 810 bp, Unknown
  Bacterial polypeptide expressing nucleotide sequence isolated from the Sargasso Sea
aaaaatcacagttttccctacctaaagtagttatgagggaaattgtagacggatatgccagagagtctggtgtaagaggactagaaaaccaactgaaaaaacttctcagaaaatcagcaaggaaaattgtcgaagaagggtctgatagtgtaaaaattagtaaacttgaccttcccgaaatgcttggtcgtaaaacatttgcagaagaaactcgttataaaaagccaaagataggagttattactggcctggcatatactagtgttggcggtgcgactttgttcattgaagcttcatctgttgaggcaaagaatcctggatttaaacagaccgggcagttgggagatgtaatgattgaatctactgaaattgcatacacgttcattagatcaatagggagcaaagacaaaaaaataaaaaaattcttttcagaaaattttgtgcaccttcatgtgcctgcaggagcaacccccaaggatggtccttcagcagggattacaatggcttgtgcgcttttttctctagtgacgcgggtagctgttattccaaatcttgctatgactggagagcttacactaactggattagttatgcctgtgggaggtattaaagaaaaaactattgcagccagaagatcaggtattacacagttaatttttccgacagaaaatcagaaggattttgatgacttggacgatagtattaaaaagggaatcaaaccttattttgtcaaaaatttttctgaagttcttcctgtaggcttccctgatctttcagtaagaaagaaaaagatcccgtcaaaaaaatagt

SEQ ID NO: 262421 - DNA, 317 bp, Unknown
  Bacterial polypeptide expressing nucleotide sequence isolated from the Sargasso Sea
attgaccaataataaagttaaaagagatgttgcaatgactggagaaattacgcttagaggacgtgtgcttcctattggtggtttaaaagaaaagatatatgctgctagtagagtgggtataaagaaggtcctcatacctcaggagaattttagagaagtatctgagtttgataaagaagttattaaggggattaaaataatccctgtatctgatgctttttcaattcttgagcatactcttacaaaatcaatcattccgttaaatttaaccgaatctcgaataaaaaataatcaaaatacaacaagtacacattaat

SEQ ID NO: 262422 - DNA, 148 bp, Unknown
  Bacterial polypeptide expressing nucleotide sequence isolated from the Sargasso Sea
ggcattaggtggcataagagatgaagctgaagttagaggtcatagaagaacatatattggatcattgcctggtaaaattattcagggattaaaaaaatctaaatttaataatcctctatttcttttagatgaaattgataagattggt

SEQ ID NO: 262423 - DNA, 954 bp, Unknown
  Bacterial polypeptide expressing nucleotide sequence isolated from the Sargasso Sea
ggagctgctacgcaccaacccactgtatggcgaagaggtgaagcagtacctgtcccgctttggcccggaagacagttcgccgctggcagatttcggcgcttccatgaccagtgccccgggtcgggaattgcaggatgtgctggataccgtgcccctgctccggcgtatggagaaagtcctgctgctcatgcgcaaagagcaggaagtggcgcgcctgcaatccgagatcaatgaagaagtaaacgagaaggtgcagaagcaccagcgggaattcttcctgcgcgagcagctgaaagtcatccagcgggagctgggcattgccaaggacgacaaaaccgccgatgtggagcgctttgaagagcgcatggccaaactgaacccaccggacacggtgcaggaccggttcaaggatgaaatccagaaactacaggtgctggaacagggctccccggaatacggcgttacccgcaactacctggactggattacccaagtgccctggggtgtgcattccgaagaccacttcgacctggccgaagcccgccgcattctggaccgggaccacgacggcctggacgatgtaaaagaccgtatcatcgagttcctggccgaaggcactttcaagggcgaagtgagcggctccatactcttactagtcggccctccgggggtgggcaaaacctccatcggccgttcggtggccgatgcccttggcagggagttttatcggttcagtgtcggcggtatgcgcgatgaagctgaaatcaaaggccaccgccgcacctacatcggcgccatgcccggtaaattcgtgcaggccctgaaagacagcaaggtggccaacccggtgatcatgctggatgagatcgacaagatcggcagctcctatcagggcgacccggcctcggccctgctggaaaccctggatccggaacagaacaaggaattcctgga

SEQ ID NO: 262424 - DNA, 575 bp, Unknown
  Bacterial polypeptide expressing nucleotide sequence isolated from the Sargasso Sea
tatgaacgtaacttatacaaaaccactattacctttgagagacatcgtaatattcccttctatagttgtacctcttttcgttgggcgagacaaatcaatcaaagccctacaagaagcaatgaaaacagataaatcaattattttggtagcacaaaaaaattctgaggttgacgatccaactgagaaagatttattttcatttggatgcatgagtaaagttttacaacttttaaaattacctgatggaacggtaaaagtattggtagaaggtcaaaaaagagttaaaattacaaaaatcaaaaacgagagcagtttcttgaattgtgacctcgaaatagccgaagacactaatatttctaaagatttagatatctttgctcaagggcttgtaaaaaaatttgaaaaattgatagttttgaataaaaaagattttaatgaaaatcttaatatcattaaaaactcaaaagatgcaaaaataattgcagataatatagctgcaaatttaaatttaaaaattttccaaaaacaagaaatattagagattagagatttaagaaaaagattagaaaaaatat

SEQ ID NO: 262425 - DNA, 364 bp, Unknown
  Bacterial polypeptide expressing nucleotide sequence isolated from the Sargasso Sea
tatggaaaatcaaatcattggacctgttttacctttaagggatttagttgtttatccctctataacctcacctttgtttgtaggtcgtgctaaatcaattgatgcaattaattttgctatgaataacaacaataagattatttatttatttacacaaaaagaaccaacgacagatgatccccaagttaacgatgtttatacctatggagtaaaatcaaaaattattcagtttcttaagttgccggataatacatacaaggttcttactgaaggtttagaaatcgtaaagataaagtctgctgttaaggcaagtaataacttccttacagctaaaattgaaccagtagtaattaacaaaaaaaat

SEQ ID NO: 262426 - DNA, 266 bp, Unknown
  Bacterial polypeptide expressing nucleotide sequence isolated from the Sargasso Sea
tatgaataatacaactttaccggttctccctttaagagacatagttatttttccaggcatggtggctccattgtttgttggaagagcacaatctgtaaatgctttaaatcatgcaatgacatcagataaaaaaatttttttactagcacaaaaaaactctgaaattgataatccaaaaaaatcagatctttataagtgcggaacaatagcaaaagtacttcagcttctaaaactacctgatggcacaataaaagttttggttgagg

SEQ ID NO: 262427 - DNA, 691 bp, Unknown
  Bacterial polypeptide expressing nucleotide sequence isolated from the Sargasso Sea
tatggaagttaaatttaacacagcacttttaccattaagagatatcgtcgttttcccatgtatggtcattcctctttttgtgggaagagataaatctataaatgctttaaatgaagtaatgaagaaagataaaaaaattattttagttactcaaaaaaattctgatgttgatgacccaaagagaaacgacatttttaattatggatgtgaaagttctattttacagcttttaaaattacccgatggtaccgtgaaagttttagtagaaggtttaacaagagtaaaaataagtgactttaaagataaagaaaattatctgttttgtgaatatgaaaaagtaaatgacattttaagcagtgatgaggatctgatgtctttagctttaaactccattaaaaaattagaaaaattaacatctataaataaaaaaatatctaatgaaactataaacaatatcaaaactttgaaggatccatcaaagattgcagacaatgttgcatcacacctaagcacaacaatatctgaaaaacaacaagtatttgagacatttgacctaaaaaaaagattaaatcttataaataagattatggataatgaaaccagtattattggtgtagaaaaacgaatacgtggaagagttaaaaccctagatggaaaaaactcaaagagaatattacttaaacgaacaact

SEQ ID NO: 262428 - DNA, 380 bp, Unknown
  Bacterial polypeptide expressing nucleotide sequence isolated from the Sargasso Sea
tatgagatccacttatctaaaaccattactccctttaagagatattgtaatttttccttcaatggtagtccctttatttgtaggaagagaaaaatcaattaaagcacttcaggaggtaatgaagtcagataaatcaattgtacttgttactcaaaaaaattctgaaattgatgacccagttggaaaagacttatttcaatacggatgtctaagtaaagtcttgcaattattaaaactgcctgatgggacagttaaagttttagtagaaggtgaaaaaagagtaaaaattcttaaacacaatgaagataaagaagattttttaacttgcgaggtagaagcaatcgaagatcaaaatatatcaaaagatcttgatcagttag

SEQ ID NO: 262429 - DNA, 349 bp, Unknown
  Bacterial polypeptide expressing nucleotide sequence isolated from the Sargasso Sea
gtaatacccttatttgttggaagagataaatccataactgctttaaatgaagtaatgaaagataataaaaaaattattttagttacccaaaagaattctgaagtagatgaccctaaaaaaaatgacctttttagctttggttgtgaaagtacaatattacaacttttaaaattaccagatggaactgttaaagttttagtagagggtttaaaacgcgtaaaattagttgattttaaggatcaagaaaaattcattaattgtgtttacgaatatcaaaacgatattgttagtacagatgaaaatttatatcctttggcaacaattgcattaagaagattagaaaaactta

SEQ ID NO: 262430 - DNA, 826 bp, Unknown
  Bacterial polypeptide expressing nucleotide sequence isolated from the Sargasso Sea
tggagtgaggacctagaaagggagatcgcaaaaacatgtcgtaaagttgcaacacaactggttaagaagacaaaactcagcaaagtagtggttacatcaaaacgagtacagaaattcttgggagtgccacgttacaaacatgcaaaagctgaagaaaaaaaccaaattggtactacatgtggattggcatggacacaagcaggcggagaactacttgttactgaagtaaatattatgaaaggtacaggaaagttacagttaaccggaaagcttggagatgtgatgaaagaatcagcacaggctgcgctgagttatgtgcgtacgaatgcaaacaggctgggaattttttcttcagtatttgaaaaaacagatattcacattcacgtaccggcaggagctgtacctaaagacggtccatctgccggggttacaatagctacttctttagtcagtgcatttaccagtatcccggttaggaatgaagttgctatgactggagaaacaactttgcggggcaaggtattggcaataggaggattaaaagaaaaacttcttgctgcaaaaagaggtgtcatttacactgtaattattccggataaaaacaagaaagatcttagtgaaattcctgaagaaatccaaaatgggcttgaaataatccccgtaaatacagtggaagaagtattaaataaatcacttgagcggtttcccagtccggtaatagatcctgtatctgaagatgaagaagattcaaataaagaaaatcctgaagctaccatcttaaccgaaactgaatcctcagattcccctagaacttatgatgcataaa

SEQ ID NO: 262431 - DNA, 310 bp, Unknown
  Bacterial polypeptide expressing nucleotide sequence isolated from the Sargasso Sea
atgaaaagtaaaagaaatatacctgttttacctttaagagatattgtagtatttccgcaaatggttgctccattatttgttggaagaaaattatctgttaatgctctcaatcatgtaatgcaaagtgacaaaaagattttgttaattactcaaaaaaaatctgaaattgacagtcctttaccaagtgatctttattcagtagggacattagcaaaaattcttcaattgcttaaattgcctgatggaactattaaagttttggttgaaggaatagatagagttaaggtttcaaacattaaaagtactgaag

SEQ ID NO: 262432 - DNA, 814 bp, Unknown
  Bacterial polypeptide expressing nucleotide sequence isolated from the Sargasso Sea
ataattgactcaataaaagatttggcactaaaaattattgaagaaaatccaagtatccccagtgaagcctcatttgctattaaaaatattcatagtagctcatttctcgtaaactttgtttcttcaaatatgaatatcagtgtggcagaaaaatttaaaatattgtcaattgatgatcttcaaaaaagagccctcaggtgtctaaaatttatggatgttgaatttcaaaaattatctcttaaaaatgatatacaatctaaagttagaaatgatcttgatcagcaacaaagagagtattttttaaatcaacaattaaaaaccatacaagaagagttagggggttcatcaaatcatcaagatattgatgaaatgaaattaaagtcaaactcaaaaaaatggaataaagaagttggaaatcactttaacaaggaattaattaaattacagagaatgaattctcaagctgctgagtattcaattcaaagaaattatcttgatttaatgttagatctgccttggaacgaatattctaaggataattttagtttgaataatgcccaaaaaactttaaataaagatcattacggtttggatgatgtcaaaagacgaataattgagcaaattgctgtaatgaaactcagaggtgatatgaattcaccaatactctgtttttatggacctcctggggttggaaaaacttcgttaggtaaatctattgcagaatcattaggaagggaatatgttaggatatcattaggtggtttaagagatgaggctgaaataagaggacatagaaaaacctatataggagcta

SEQ ID NO: 262433 - DNA, 310 bp, Unknown
  Bacterial polypeptide expressing nucleotide sequence isolated from the Sargasso Sea
atggatataaaagtaacattaccgttattgccattaagagacatagttgttttcccaagtatggttattcctttatttgttggaagagataagtccatcactgcattaaatgaagtaatgaaaggtgataaaaaaattgttcttgtcacacaaaaaaattctgaagttgatgacccaaagaaaaatgacgttttcacctatggatgtgaaagtaacatattacagctacttaagcttccagatggaacagttaaagtattagtagaaggtaccaaaagagtaaaaatagtagatttaaagatgatgaaaa

SEQ ID NO: 262434 - DNA, 565 bp, Unknown
  Bacterial polypeptide expressing nucleotide sequence isolated from the Sargasso Sea
gatgaaaacttcttatctaaaaccattattacccctgagggatatagtgatatttccttcaatggtcgtgcctttatttgtgggtagagaaaaatcaataaaagctcttcaagaggtaatgaaatcagacaagtctatagttttagtaactcaaaaaaattcagaaatagatgatccaataggtaaagatttatttcaatatgggtgcttaagtaaagtcttacaattactcaagcttccagatggaacggttaaagttttagttgagggagaaaaaagagttaagattaataaatacgaggaaaatacaaattacttaacgtgtgaagttgaggttattgaagatcaaaatgttacaaaagatttagaacaattttctattggtttagttaaaaaatttgaaaaactacaaattttgagcaagaaagattttaatgagacctcgaataatttaaaaaatcttaaaaacccatcacatatagcaaataatatttcatctaatttaaatattcaaatatttgaaaaacaagagttattagaaattacagaccttaaaaaaaaatta

SEQ ID NO: 262435 - DNA, 548 bp, Unknown
  Bacterial polypeptide expressing nucleotide sequence isolated from the Sargasso Sea
tatggaagttaaatcaacacagcctttattgccattaagagatatagttgtattcccaagcatggttatcccactctttgttggacgagataagtcaattactgctttaaatgaagtaatgaaaagtgacaaaaagatagttctggttacacaaaaaaattcagaagttgacgaccccaaaaaaaatgatgtgttttcttatggatgtgagagtaatattttacaacttttaaaactaccagatggaacggttaaagttttagtagaaggtattaaaagagtaaaaatagtagattttaaggatgatgaaaaatttatcacttgcacatacgaacatcaaaaagatattttgactaaagatgaggatcttttacctttagctcttacagctgttagaagattagaaaaattaacatctgtaaataagaaaatttcatcagaaactatcaacaacattaaacaattgaaagatccatctaaaattgtagataatattgtttcaaacctaaatgcatcgatatctgagaaacaacaaatattccgaaaca

SEQ ID NO: 262436 - DNA, 439 bp, Unknown
  Bacterial polypeptide expressing nucleotide sequence isolated from the Sargasso Sea
accaaaagacggaccttccgctggagtgacaataaccacatcgttggtgagtgcttttacaggcatccctgtactccgtgaggttgcaatgaccggcgaggtaaccctgcgtggtaaggttttaccgattggcgggttgaaagaaaaactcctcgctgccaaaaggggaatgatgaaaaccgtcctcattccagcaaaaaatgaaaaagatttgactgaagttccggaagaaataaaaactgagcttcaaatcctctcagttgaaaatatggatacagttctagaaagagccttggaatgcgttcctatttccgtaagtgatcctgaggatgataacaaggatgaaaggaaactttctgaggaagaatcgcttgtccctcaacaaaaaggaaacttaactgaacctccttttgaagttcctaattttccccagcactga

SEQ ID NO: 262437 - DNA, 672 bp, Unknown
  Bacterial polypeptide expressing nucleotide sequence isolated from the Sargasso Sea
tatgaaaaaaagtaattctgatgaattagtatttccagttctacccctaagagatgtgattgtgtttcctaatatggtaataccattattcgtgggcagagataagtctataaaatctcttgaggtagctatggataataacaagcagattatgctagtcgcacaaaaaactgctgacctagatgatccgcaagatgatgatatatataggtttggtactttagcaactgtacttcaattattaaaattgccagatgggacaattaaagttttagttgagggtggaagtcgtgcagaaattgaaggtcaaatttatggaaatgattactttgaagctagagtaaatattgtagatgaagaaattgttgatgatagagaaattgaaattttatctagatctgttattgattcattcgatcaatacgtaaagttaaacaaaaagattgctccagaagtaatgacttcattatcagggatagatgatccttccagacttgcagacactattgctgctcacatggttttaaaaatggaagataagcaagcaattttagaaatcagtgacgtgaaaggtcgtatagaaaatataataagtttaattgaaaatgaattagatattcttcaggttgaaaagaaaattagaggaagagtcaaaaatcaaatggaaaaaag

SEQ ID NO: 262438 - DNA, 363 bp, Unknown
  Bacterial polypeptide expressing nucleotide sequence isolated from the Sargasso Sea
tagtctcagtcttgactggcatacctgtaagaaaagatattgccatgacaggcgaagttactctccgtggaaaagcacttggaattggtggtttaaaggaaaaacttttagccgctctaagagctggaacaaaaactgttataattccaaaggaaaatgaaaaggacatggctgatattccagataatgtaaaagatggcctagaattaatatttgttgataatgtagatgaggttctaaaaatagctttgaccaagcctcttctgccaattgagtgggatgaagacgattcacctaagtctactaaagatatatctgaagatgatgctgatcaagatgtggataatcctataacacactgat

SEQ ID NO: 262439 - DNA, 486 bp, Unknown
  Bacterial polypeptide expressing nucleotide sequence isolated from the Sargasso Sea
tatgaataatacaactttacctgttctccctttaagagatatagttgttttcccaagcatggtagctccattatttgttggaagaatacaatctgttaatgccttaaatcatgccatgacatcagataaaaaaatttttttactagcacaaaaaaactctgaaattgataatccaaaaaaatcagatctttatgagtggggaacaatagcgaaagtacttcaacttctaaaacttcctgatggaacaataaaagttttggttgagggaattactagagcaagattaaatactctaaatttatctaatgattttttaacagctaaaataaataaaatagatactaaaattaaaaaaaacaacaatttaaaaacattagtaaaaattgtaattgatcaattccaggattactcaaaagtaaataaaaaaataccatctgatatagttaataatttaatttctattagtgatccgaataaaatagcaga

SEQ ID NO: 262440 - DNA, 392 bp, Unknown
  Bacterial polypeptide expressing nucleotide sequence isolated from the Sargasso Sea
catggaagttaaatctagtctcccgttgttacccttaagagatattgtggtgtttcccagcatgattattcctctttttgtgggtagagataaatcaatttcagctctaagcgaagttatgaaaaatgataaaaaaattattgtagtaactcaaaaaaattctgaagtagatgatccaaaaaaaaccgatgtatttaattatggatgtgaaggtaatatattgcaacttcttaaattacctgatggcactgtaaaagttttagttgaaggcaataaaagagtaaaaattttagattttgtagaaaatgaaaagtttattgcatgcgatttcagttaccataatgatcaaatatcaaaaaatgagaacctattaccattagctttgattgcac

SEQ ID NO: 262441 - DNA, 322 bp, Unknown
  Bacterial polypeptide expressing nucleotide sequence isolated from the Sargasso Sea
tatgacttcagagaattccaaacctttattacctttaagagatatagttatttttccatcaactgtaatacctctttttgttggaagaaaaaagtcaatcaaagctttggaagaggttatgaaaacagacaaatccatagtattagttgctcaaaaaaattctgaagaagatgatcccaacgaagaagatatttattcctttggttgcctaagcaaaattttgcaattacttaaactacctgatggaacggtaaaagtcttagttgaaggaacagaaagagtaaaaatcaaattcataaagaaagaagaaaaaaatatttaa

SEQ ID NO: 262442 - DNA, 738 bp, Unknown
  Bacterial polypeptide expressing nucleotide sequence isolated from the Sargasso Sea
aatttttttgctatctcaaaaaaattcaaaagttgataacccagacaaagagaacctttactcattcggaactgttgcaaaaattattcaattattaaaacttccagatggtacacttaaagttttagtcgaaggcattcaaagagcaaaagttaataaaataagttttaacaaagaatttattactgcatcaattactgagattaatcaaaaagcaaaaaaaaattcaaacataaaagctttacaaaaacttatcattgaacaatttgttgagtttcaaaaaattaataaaaaagtttcacaggatgtagttaataatgtgaaagtattaaatgatcctgataaaattgttgatataatagtatcaaatatttcaatatctttatctcaaaagcaagaaattttagagattataaatacagaagaaagactcaataaaatttacggttatttggtatctgaaattgattcttttcaagttgagaaaaaaataaaaggtcgtgtgaaaagacaaatggagaaaacacagaaagaatattatttaaatgaacaaatgaaagcaattcaaaaagaattaggggaaaatgaggatttggatgaaattgctgagcttgagaaaaaattaaatcaatataatttatctaaagaagctaaagaaaaatgcacctctgagattaaaaaattaaaaaatatgagcccaatgtcagccgaggcaactgtaatcagaaactatttaga

SEQ ID NO: 262443 - DNA, 324 bp, Unknown
  Bacterial polypeptide expressing nucleotide sequence isolated from the Sargasso Sea
tatgtcagttgaaacacaaacactaccagtattgccgctacgtgatgtcgttgtgtatccgcacatggtaataccactttttgtaggacgtgaaaaatcaataaaagctctcgataaagcaatggagggcaacaagcagatattacttatcgcacagaaaagtccaactgatgatgatcctggtgaaaatgaaacctacgatgtagggacaatggcaaatattcttcaattactaaaactaccagacggcaccatcaaagttcttgtcgaaggaacatcgagagcatcagtatcaaattacaaagaaacagacggcatgtgcgt

SEQ ID NO: 262444 - DNA, 378 bp, Unknown
  Bacterial polypeptide expressing nucleotide sequence isolated from the Sargasso Sea
tatggatgtaaaaacttcattaccattattaccgttaagagacattgtagtttttccaagcatggtgatcccattatttgttggaagagataagtctatatctgcattaaacgaggtaatgaagaaagaaaaaaaaattatccttgttacccaaaaaaattctgaaatagatgatccaaaaaaaaccgatatatttatgtatggttgtgaaggaagtattttacaacttttaaaacttccagatggaactgtaaaagtattggttgaagggactaaaagagttaaaattttagattttaaagataatgaaaaatttataacttgtgatttcactccttaccatgacattacaaatgatagtgaagatttatatccttt

SEQ ID NO: 262445 - DNA, 803 bp, Unknown
  Bacterial polypeptide expressing nucleotide sequence isolated from the Sargasso Sea
gcaaaagtacttcaacttctaaaattgcctgatggcacaataaaagttttagttgaaggtatgaccagagcaagattaacaagcttagatctatctaatgattttttaacagtaaaaattaaacaaataactaataagaataaaaataacaacaagttaaaagctttagtaaagattgtaatcgatcaatttcaggattattcaaaagtaaataaaaaaataccttctgacatagtaagcaatttactaactatgagtgatcctaataaaatagcagatgttgtttcaattaatttgaatattaatatggagcaaaaacaagaattgcttgaaatgcatgatctagaaaaacgattaaacaaaatacatatatatttagtttctgaaattgactctttccagatggaaaaaaagatcaaaggaagagttaagcgtcaaatggaaaagactcaaaaagaatattatttaaatgagcaaatgaaagcaatacagaaagagcttggtgataatgatgattctgatgatattgctgaaattgaaaagaaaattaattctattaaactaagtaaagatgcaaatgataagtgtaaatcagagttaaaaaaattaaaaaatatgagtccaatgtctgcagaagcaacggtcataagaaattatttagattggattttgtcaataccttggaattctaaatcagaaatttcaaaaaatgtaaaaaaagcaaaaacaattttagaagaagatcattatgggcttgataaagtaaaagatagaattttagaaatatttagctgttcaaaaaa

SEQ ID NO: 262446 - DNA, 655 bp, Unknown
  Bacterial polypeptide expressing nucleotide sequence isolated from the Sargasso Sea
atggacgttaaaatatctttgccacttttaccattaagagacatagttgtgtttccaagtatggttatacctttatttgttggaagagataaatcaatttcagcattaaatgaggtaatgaagaaagataaaaaaataattttagttacacaaaaaaattctgaaatagatgatccaaaaaaaacagatgtattcatgtatggttgtgagggaagtattcttcaattattaaaacttccagatggaactgttaaagtattagttgaaggtattaaaagagttaagattttagattttactgataatgataaatttatcacttgtgatttcacatatttcaatgatgtattaccaaaagaggaggatttattcccattagcatcaaccgcattaagaagattagaaaaactttcatcaataaacaaaaaaatatctaatgaaacaataaacactataaaacaattaaaagacccatctcaaatagctgataacatagcttctcacataacagcaagtatatcagagaaacaacaaatatttgaaacagtagatgttaaaaaaagattaaacgccataattaaaattatggaaaatgaaacaagcataataggagttgaaaaaagaattagaggaagagtaaaaactcaaatggaga

SEQ ID NO: 262447 - DNA, 577 bp, Unknown
  Bacterial polypeptide expressing nucleotide sequence isolated from the Sargasso Sea
aagttaaatttgacagggaaacttggggatgtgatgaaagaatcagcgcaagccgcactgagttatgtgcgaacaaatgcaaacaggctgggaatattttcttcaatatttgaaaaaaaagatattcacattcacgtaccggcaggggctgttcccaaagatggcccatctgccggtgttacaatagcaacttctttagtcagtgcatttacaagtatccctgttaggaatgaagttgctatgactggggaaacaactttgcggggtaaggtgttagcgataggaggattaaaagaaaaaatccttgctgcaaaacgaggagttatttccactgtaattattccagaaaaaaacaggaaagatcttagtgaaattccggaagagattcaaaatgggcttgaaataatccctgtaaaaacagtggaggaagtattaaatatagcacttgagcggttcccaagtccagtaatagatcctgtatccgaggatgaagaagtttcaaatgaagaaagtcctgaagcaacaattttacccgagactgaatcctctgattctcctagaacttatgatgcttaaa

SEQ ID NO: 262448 - DNA, 464 bp, Unknown
  Bacterial polypeptide expressing nucleotide sequence isolated from the Sargasso Sea
tatggaacttaaagttaatctaccacttttaccgcttagagatatagtggtattcccaagcatggttgtgcctttatttgtaggtagagataaatcaataagtgctttaaatgaagcaatgaaacaagataaaaaaattgttcttgttacgcaaaaaaattctgaagtagatgatccaaaaaaaaatgatatttttatgtatggttgtgaaagtaatattttacagcttttaaagttgccagatggaacagttaaagttttagttgaaggcaataaaagagtgaaaattgttgattttaaggatgatgaaaagtttattacttgcagttttgtacagattacagatcaaattgacaacaatgaagatttgatgccgttagcaacaactgctgttcgtagactggaaaaattaacatcaataaataaaaaaatttctagtgaaactattaatagtattaaagaat

SEQ ID NO: 262449 - DNA, 406 bp, Unknown
  Bacterial polypeptide expressing nucleotide sequence isolated from the Sargasso Sea
tttcacatccacgttccagagggtgcaacaccaaattacggtccttcagctggaattggtatggttacttcaatagtttcatctataacaaatattcctgtcaaaagagatgttgcaatgacaggagaagttacattgactggacaagtattgcctattggaggattaaaagaaaaattaatagcagcacatagagccggaataaaagtagttttaattcctaaagaaaatgagaaagatttggtcgatatgccgaaaaaaatagttgatgaaattaaaattatgccagtagaatatgctgatgaagttttaaagatagcattaactaaagaacttaaaaagacagaatgggttgaggttgatatgactaaaaaagatgacaaatctcaagctagcattcaataaa

SEQ ID NO: 262450 - DNA, 467 bp, Unknown
  Bacterial polypeptide expressing nucleotide sequence isolated from the Sargasso Sea
gatggatataaaagtaacattaccattattgccattaagagacatagttgtatttccgagcatggtaatccctttatttgttggtagagacaagtctataactgctttaaatgaagtaatgaagggtgataaaaaaatcgttcttgttacacaaaaaaattctgaagttgatgacccaaagaaaaatgatgttttcacttatggttgtgaaagtaatatcttgcagttacttaaacttccagatggaactgttaaagtattagttgagggcaccaaaagagttaaaattgttgattttaaagatgatgaaaaatttatcaaatgttcttttgagtatcaaaaagatattatatcaaaagaagatgatctgcttccattaagtttaacggctataaaaagattagaaaaattaactagtgttaacaaaaaaatatcttcagaaacgattaataatattaagcaattaa

SEQ ID NO: 262451 - DNA, 231 bp, Unknown
  Bacterial polypeptide expressing nucleotide sequence isolated from the Sargasso Sea
gactggtgaaataactttgcgaggacgcgtattgccgataggaggtttgaaggaaaaacttttggcggcgcttcggggcgggttgtctacggttttaataccgaaagaaaatgaaaaagacttggcagagatacctgacaacgtaaaaagtggattaaatataataccagtcagtgttgtagatgaggtgatttccaatgcattaacgaccgaacctgttccggtagatat

SEQ ID NO: 262452 - DNA, 562 bp, Unknown
  Bacterial polypeptide expressing nucleotide sequence isolated from the Sargasso Sea
atggaagttaaacacagttcaccattattaccattgagagacattgtcgtatttccaaatatggtaatacctttgtttgttggtagagataaatctatcacagccttaaacgaggttatgaaaaataataagaaaattatattagtgactcaaaaaaattccgaagttgatgatcctaaaaaaactgatgtttttatgtatgggtgtgaaagttcgatactccaactacttaaacttccagatggaacagttaaagttttggttgaaggattaaaaagagtaaaattaattgacttcaatgatgatgaaaagtttattacttgttcataccaatacaataatgatgtttcccctgaaggtgaagatttaatgccattagcaactatagctatcagaagattagagaaattaacttctattaataaaaaaatatcttcagaaataatttcaaatattaaagatttaaaagatccagcgaaaattgctgacaatattgcttctcatttgaattctacaatctctgaaaagcaacaattattgaaactaccgatgttaaaaaaag

SEQ ID NO: 262453 - DNA, 367 bp, Unknown
  Bacterial polypeptide expressing nucleotide sequence isolated from the Sargasso Sea
atggaagttaaacacacatcaccacttttgccattaagagacatagttgtctttccaagcatggtgataccgttattcgtgggaagagataaatcaatcaatgccctaaatgaagtaatgaaagataataaaaaaattatattagttactcaaaaaaattccgaagttgatgatcccaaaaaaacagatgtatttatgtatggatgtgaaagttcaatacttcagttacttaaactaccagatggaacagttaaagttttagtcgaaggcttgaagagagtaaaaataattgactttcaagatgatgaaaaatttattacttgctcatatgaacataataatgatctaatatctaaagatgaagatt

SEQ ID NO: 262454 - DNA, 346 bp, Unknown
  Bacterial polypeptide expressing nucleotide sequence isolated from the Sargasso Sea
tatggaaataaaacattcattaccattattacctctaagagatattgtagtcttccctagtatggttatccctctttttgtaggtagggataaatctatatcagcgcttaatgaagtaatgaaaaatgataaaaaaattattcttgttactcaaaaaaattctgaaatagatgatccaaaaaaaacagatatatttcattatggttgtgaaggaagtattttacaacttttgaaacttccagatggtacagtaaaagttttagttgagggtattaaaagggttaaaattttagattttaaagataacgaaaagtttatagtttgcgactatagtcattatcaggat

SEQ ID NO: 262455 - DNA, 352 bp, Unknown
  Bacterial polypeptide expressing nucleotide sequence isolated from the Sargasso Sea
atgtcaaaaaatattattcatccatcattacccttaagagatatagtggtatttcctagcatgattgttccattatttgttggaagggacaaatctataagagctttaaacgaagccatgaaaagtggaaaaaaaatagtactaattacccaaaagaacgcagaaattgatgatccaggttctgaagatatttattcatatggatgtgaaagtaaaattttacaacttctcaaattaccagacggaactgtaaaggttctagtcgaaggagttaacagagtaaaaattttggaatgtaaaaatgagaaagaatttttatcttgtgaaacaggaaattgtaaacgaatatagt

SEQ ID NO: 262456 - DNA, 540 bp, Unknown
  Bacterial polypeptide expressing nucleotide sequence isolated from the Sargasso Sea
catggaagttaaaatttctttaccattattaccattaagagacattgtggtgtttcctagtatggttgtgccactatttgtgggaagagataaatctatatctgcattaaatgaggtaatgaaaaatgataaaaaaattattttagttacgcaaaaaaattctgaaattgatgacccaacaaaaacagatatttttatgaatggctgcgaaggtaatattcttcaattattgaaattaccagatggcacagtaaaagttttagtagagggaattaaaagagtaaaaatcttagattttaaagataatgacaaatttattatatgtgattatacgccttatgaagatgtcattaataaagaggaagatttatatcctctagcagtaacagctgtaagaaggttggaaaaattaacatcaataaataagaaaatttcaagcgaaacaataaattcaataaaacaactaaaagacccatctcaaatagctgataatatagcttcacatataacagcaacaatatcagaaaaacaacaaatctt

SEQ ID NO: 262457 - DNA, 496 bp, Unknown
  Bacterial polypeptide expressing nucleotide sequence isolated from the Sargasso Sea
atggatataaaagtaacattaccattattgccattaagagacatagttgtatttccgagtatggttatccctttatttgttggaagagacaagtctatcactgctttaaatgaagtaatgaagggtgataaaaaaatcgttctcgttacacaaaaaaattctgaagttgatgacccaaagaaaaatgatgttttcacttatggttgtgagagtaatatcttgcagttacttaaacttccagatggaactgttaaagtactagttgagggtaccaaaagagttaaaattgttgactttaaagatgatgaaaaatttatcaaatgttcatttgaatatcaaaaagatattttattaaaagaagatgatttacttccactaagcttaacagctataaaaagattggaaaagttaactagtgttaataaaaaaatatcttcagagacaataaataatataaagcaattaaaagatccatccaaaatgcagataatataat

SEQ ID NO: 262458 - DNA, 874 bp, Unknown
  Bacterial polypeptide expressing nucleotide sequence isolated from the Sargasso Sea
tcaaaaagatgcttcaaatgaagatccaacttttaaagatatatatcactttggaactgtaagtaacttactccaactcatcaaactgcctgatggcacaatgaaagttttagttgaaggggccaagagatgcaaaatcgataagatctcagaatctaaaggtttaactaaagcggcagtaacagagattgatgatgatattatcaaagtttccgattcaatgaatcttgttaaatttatcaaaacaaagttcaatgattatgtttcatctactaaaaaaattcctcccgagattttatcaactattgacgctatagatgatctttcaaagcttattgataacatcgtaaaccacttaaacattgatacttctcaaaaacaagaaattttagaaatctttgatcttcaaaaaaggtcagaaagtattctgacatttatagagtcgcagctagacgttatagatgttgagaaaagaataagatcaagagttaagaagcaaatggagaagtctcagagggaatactatctaaatgaaaagattaaagctgcccaaaaagagcttggtgaaatgggagaagagggagatgagttcgaggtattaaaaaataaaattgaagattctgggatgtcaaaagaagcaatgaaaaaagctaagagtgagttttcaaaatttaaaatgatgtctccaacttctgccgaagcttcggtagttcgctcatatcttgagtgtttaattgacgttccatggaaaaaaagaggaaaagttaaatcagatatcaaggctgctctagtaactctcaatgatgatcattacggtcttgaagaggttaaagatagaatcttagaataccttgcagttcaaaaaagagtaaaa

SEQ ID NO: 262459 - DNA, 485 bp, Unknown
  Bacterial polypeptide expressing nucleotide sequence isolated from the Sargasso Sea
tatggacgtcaaaatatcactacccttactgcctttaagagacattgtagtctttccaagtatggtaattccattatttgtaggaagagacaagtctatttcagcactcaatgaagtgatgaaaaaagataaaaaaattattttagtaactcaaaaaaattcagaaattgatgatccaaagaaaactgatgtttttatgtacggttgtgaaggaagcattttacaattattaaaattaccagacgggacagtcaaagttttagttgaaggtattaagagagtaaaaattttagactttaaggataatgaaaagttcataacatgtgattacactttctataacgatgtcttacctaaagatgaagatttatttcctttagctgttacagctttaagaagactagaaaaattaacatctataaataaaaaaatttctaatgaaactataagcacgattaaacaattaaaagatccatcaaaaattg

SEQ ID NO: 262460 - DNA, 598 bp, Unknown
  Bacterial polypeptide expressing nucleotide sequence isolated from the Sargasso Sea
atgaaagcttcatatctaaaacctcttcttccgcttagagatatagtgatttttccttctatggtagttccattgtttgttggcagggaaaaatctattaaagctctccaagaagtaatgaaatctgacaagtctattgttctagtaactcaaaaaaattctgaagttgatgatcctgtcggaaaggatttatatcaatatggatgtttaagtaaagtcttacagttacttaaacttccagacggaacagttaaagttttagttgaaggtgaaaagagaattaaaattttaaaacataatgaaagtacaaacaattttttaaattgcgaggtagaaattgtagaggatcaaaatacttcaaaggacttagagcagtttgcttcaggtttaattaaaaaattcgaaagacttcaaacattaagcaaaagagagctcaatgacggttcaataaatattaaaaatttaaaagacccctcacaaatagcaaacaacatatcttcaaatttaaatattcagatatttgaaaaacaagaattgcttgaaattactgatcttaaaaaaagactagaaaaaattcactcaattatagaaaaagaaa

SEQ ID NO: 262461 - DNA, 490 bp, Unknown
  Bacterial polypeptide expressing nucleotide sequence isolated from the Sargasso Sea
ttcggtatttaaggaaaccgatattcatgttcatgtcccggaaggagctgttccaaatgacggtccttccgctggagtgacaataaccacttcgttggtgagtgcttttacgggtatccctgtgctccgtgaggtcgcaatgaccggcgaggtaaccttgcgtgggaaggttttaccaattggcgggttgaaagaaaaactcctcgctgccaaaaggggaatgatgaaaaccgtcctaattccagcaaaaaatgaaaaagatttgactgaagttccggaagaaataaaaaccgagctacaaatcctctcagttgaaaatatggatacggttctggaaaaagccttggaatgtgttcccatttccgtaagtgatcctgaggatgataacaaggatgaaagaaaactttctgaggaagaatcgcttgttcctcaacaaaaagggaacataactgaacctccttttgaagttcctaatttccctcagcactaa

SEQ ID NO: 262462 - DNA, 421 bp, Unknown
  Bacterial polypeptide expressing nucleotide sequence isolated from the Sargasso Sea
catggaagtgaaatttagtttaccattattacctttaagagacatagttgtttttccaaatatggtaattccactatttgtaggtagagataaatcaattaatgctcttaatgagataatgaaaaaagaaaagaaaataatcttagtaactcaaaaaaattcagaggttgatgatccaactaaaaatgatgtttttacttttggatgcgaaagcaacatccttcaacttttaaaattaccagatggtactgttaaggtccttgtcgagggaattaatcgtataaaaataactgattatagtgataacaaagattttataacttgctcttatgaaaaagtaattgatcaaataaataaagaagaggacttgatgccaacagctttatctgcaataaaaaagcttgaaaagttaacttcaatc

SEQ ID NO: 262463 - DNA, 862 bp, Unknown
  Bacterial polypeptide expressing nucleotide sequence isolated from the Sargasso Sea
atttttcttgtagcccaaaaggacgctaatgttgatgagcctggacaaaaagatatttatgattttggaacagtagccaatatacttcaattattaaaattaccagatggaaccgttaaagtattggttgaaggactggagcgagcgaaagtttctcatcatttagaaaacccagatttttttgaagcttatctagataaattagaagtaccaaattatgaaaatgataaagaaacaaatgctcttttgagaacagcaataagtcaatttgaaaattacgttaaattaaatagaaaggttccacctgagatccttgttagtctgaatcaaatttcagatcttaataaattagctgatactatgagcgctcacttaggcatcagactctctgaaaaacaagatctattagagtgtttatctgtcaaaaatagactatcaaaagttatagaatttatggataatgagattggcgttcttcaagttgaaaaaaaaatacgaagcagagttaagcgccaaatggataaaactcaaaaagaatattatcttaatgaacaaattaaagctattcaaaaagaattaggtgagacatctgatcctaaagatgagattacagaaatcgagcaaaaattaaaaaaaataaatctttcagatgaagcaagtgaaaaagttaaagctgaaattaaaaaattaaaacatatgggccctatgtcagctgaagcaactgttgttcgcaactatttagattggataatttcaattccgtggaacaataattctgaaacaaatgtcaatcttaataaagcattaaaagttcttaatgaagatcattttggactttcaaaggttaaggatagaattatcg

SEQ ID NO: 262464 - DNA, 364 bp, Unknown
  Bacterial polypeptide expressing nucleotide sequence isolated from the Sargasso Sea
tatggaagtaaaaattacacaacctttgttaccactgagagatatagtagttttccctagtatggtaattccattatttgtgggaagagataaatcaattactgcgctcaatgaagtaatgaaaggaaataaaaaaattatacttacaacacaaaaaaattctgaggtagatgatcccaaaaaaaatgatatcttttcatatggttgtgaaagtaatattctgcaattactaaaattacccgatggaacagtaaaagttttagtagaaggtattaaaagagttaaaattattgattttaaagatgatgaaaaatttatttcttgtacatttgagtatttaaaggaattatcaactaaagaagaa

SEQ ID NO: 262465 - DNA, 799 bp, Unknown
  Bacterial polypeptide expressing nucleotide sequence isolated from the Sargasso Sea
catggaagagcctcactttgcagcagttgttgagccaattccagaaaatatttcaagtgcacctgaactaattgctcttagcaaaaatgttcgcactgagttcaagcgttatcttaaggatgttaaacgcagaactgagggaattgaaaaactatctgtagatgcagatgagccctatatcctttctgacagaattgccccgttattaaatatggaattgagaaaaaagcaggatttgcttgaaaatgctgatccaaaaaggcgtttggaaatagtttatggaagaatgcttgaggaaaaagagtttaaaaaagtagaaaggaagttgaaggaaagagttcagggacagattggaagaactcaaaaagaatactatctcaatgagcaagtcaaggcaattcaaaaagagttgggacatggagaagatggcaaagcagagatggatgagtatgctaaaaagattgaagaggttaagctttcagttgaagcaaaggaaatggctgaaaaggaattaaagaaactaaaaatgatgccatcaatgtcttctgaagcaaatgttgtacgaaattatctcgattggttgctttgtatgccatgggatgaaaagactgaagataattttgactttgagaaagctgaagaaatattggatgcgcggcattatggtttggaaaaagtaaaagaacgtataattgagtatcttgctgtcgcacagcaggtgggtaaaatgaaaggaccgattatatgtcttgtaggacctccgggagtaggaaaaacctctctagctcgatctgttgca

SEQ ID NO: 262466 - DNA, 403 bp, Unknown
  Bacterial polypeptide expressing nucleotide sequence isolated from the Sargasso Sea
atggatataaaagtgacattaccgttattgccattaagagacatcgtagttttcccaagtatggtaatacctttatttgttggaagagataagtccatcactgcattaaatgaagtaatgaaaggtgacaaaaaaattgttcttgtcacacaaaaaaattctgaagttgatgatcctaaaaaaaatgatgtattcacttatggatgtgaaagtaatattttgcaattactaaaacttcctgatggaacggttaaggtattggttgaaggtaccaagagagttaaaatagttgattttaaagatgatgaaaggtttataaaatgttctttcgagtatcaaaaagacattgtatcaaaagatgatgatcttcttcctttaagcttaacagcaataaaaagataga

SEQ ID NO: 262467 - DNA, 316 bp, Unknown
  Bacterial polypeptide expressing nucleotide sequence isolated from the Sargasso Sea
atgaaagcttcttacttaaaacctttacttcctttaagagatatcgtgatcttcccttcaatggtggtaccattatttgttggacgggaaaaatcaattaaagcccttcaagaggtaatgaaatcagataaatcgatagttttaattactcaaaaaaattctgaagttgatgatccatctagtaaggatctttaccagtatggttgtttaagtaaagttctccaacttttgaaattgccagacggaacagtcaaagttttagttgagggagagaagagaataaaaatcgttaattacaaagaagataacgataatt

SEQ ID NO: 262468 - DNA, 328 bp, Unknown
  Bacterial polypeptide expressing nucleotide sequence isolated from the Sargasso Sea
atggatataaaattttcatcaccattacttccactcagagatatcgttgtatttccaagtatggttatacccctttttgttggtcgagataaatctatttctgcattaaacgaggtaatgaaaaaagataaaaaaattatcatggtaactcaaaaaaattcagaaattgatgatccaaaaaaaaatgatgtatttatttatggctgtgaaggaaatatacttcaacttttaaaattaccagatggaactgttaaagttttggtagaaggtgttaaaagagtaaaaataattgattttaacgacaatgaaaaattcattaattgtgagt

SEQ ID NO: 262469 - DNA, 364 bp, Unknown
  Bacterial polypeptide expressing nucleotide sequence isolated from the Sargasso Sea
tatggaaatcaaaaaaacattacctttgttaccattgagagacattgttgtttttcccaatatggtaatacctttgtttgttggtagagataaatcaattgcagcattaaacgatgtgatgaagcaagataaaaaaattatattaaccactcaaaaaaactcagaaattgacgatcctaaaaactcagatatttattctttcgggtgtgaaagcaacattctacagttactcaaacttccagatggaacagttaaagttttagtagaaggaaataaaagagtaaagattgtaggctttaaagaagaagataaatttatatcatgcaattatgaatatcagactgaaataattaaaacgaagaaa

SEQ ID NO: 262470 - DNA, 436 bp, Unknown
  Bacterial polypeptide expressing nucleotide sequence isolated from the Sargasso Sea
catggaaccaaaagttaaattaccactattaccactgagagatatagttgtttttccaaatatggttattcctttatttgttggaagagataaatccataaccgctttaaatgaggtaatgaaagggcaaaaaaaaattattttggttacacaaaaaaactcagaaatagatgaccctaaaaaaaacgatatatattcttatggctgtgaaagtaatattttacaattactaaaactacccgacggaactgttaaagttttagtagaaggtactaaaagagttaaaatattagattttaatgacgaggaaaaatacatctcttgtacttttgagtatttaaaagatcaaatagagccttcagaagatttacttccactctctatgacagcagttaaaagactagaaaaattgaccaacgttaacaaaaaaatttca

SEQ ID NO: 262471 - DNA, 502 bp, Unknown
  Bacterial polypeptide expressing nucleotide sequence isolated from the Sargasso Sea
atgttagaaaactttcttccaattttacccctgcgagatattgttgtatttccacatatgatagtacctttatttgttggcagagataaatcaatcaaagcacttgaagctgtaatgagcgaggataaaaaagttttccttatcgcgcaaaaagatggatcagttgaagatcctggtgaaaaagatttatataaaattggtactttaggaaacatccttcaattattaaagttacctgacggaaccgttaaggttttagttgaaggtatttctagggcaaaaattaaaacatttaaaaatgacgattttctattagctgacgttaacatcattaatgaaaagtcatctgaaaaaaatgatgatcttatcggaatgctaagagctgtaaaatctcaatttgaaaattattccaaattgaataaaaaaataactccagaggtcttaaattccatcgatgaaaatgatattccgtcaaaagtttcagatataatatgttctaatt

SEQ ID NO: 262472 - DNA, 466 bp, Unknown
  Bacterial polypeptide expressing nucleotide sequence isolated from the Sargasso Sea
tatgaaagtatcaaaaacggttgcttggaatctaatacccaagaatataaagaaaaacatatatgaagaaatgaaagagagtggtaattttggtatacatcttcattgtcccgaaggtgcaacaccaaaggatggaccctcagcaggtggagctataactttatgtataatatccttgctaacaaatatacaggtaaataatgaggttgcattaacaggtgagattgatttaaatggtagtatacataagataggaggattggaatcaaagatagatggaggtaaaaatgcaggtgtaaaattaatattatatccgtcgcagaatcaagaagatatagaattaataaaaaagaataacccagtattattagagaatatagaatgtaggcctatcgataatatatggcagattctagatatttgtttagtaaagaatgaattagaatttaataaatatttaaattaa

SEQ ID NO: 262473 - DNA, 507 bp, Unknown
  Bacterial polypeptide expressing nucleotide sequence isolated from the Sargasso Sea
ttggaggtgatattttatttattgaagcatgtaaaatgccaggtaagggtatgcttaagttaacaggtaaacttggtgatgttatgaaagaatcagcacaagctgctttttcatacataagaacaaatgctaaaaaatatggtattgatccaaatttttataagaaacatgatattcatattcacgttcctgcaggtgctataccaaaggatggtccttcagctggtgtagcaatgattacttctatggtatcattgttaactaataagcctgtgaaaagtatgctaggtatgactggagaaatatctttaagaggaaatgtgcttccaattggaggtttaaaagaaaagtcaacagctgcacatagatctggtctgaaagagattattgctccacatcttaataaaaaggatttagaagaaattccatctaaggttaaaaaagatttaaaaataacctttgtaaaagatgtagaagaagttgttaaattagcacttgatatttaat

SEQ ID NO: 262474 - DNA, 803 bp, Unknown
  Bacterial polypeptide expressing nucleotide sequence isolated from the Sargasso Sea
tatgaataaaagtaaaaatatattagaatcagcaattcatggacatagttccgcgaagcgacaaatcgaaagaatcataggacagtggatatctggtgatttggacggatattgttttggttttgagggacctcctggcgttggtaaaacatcattagcaaaaaaaggtatagcaaattgtctaacagatgaaaataacaatcctagaccgttttcttttattgctgtgggtggttcatctaacggtagtacatttgaaggtcataattatacgtatgttggttcaacatggggtaaaatagtagatgttattatagaaagtaaatgcatgaatcctattatatttatagacgaattagataaaataagtaaaacagaacatggtaaagaaattataggtatattaactcatttaatagacccagcacaaaataataccttccaagatagatatttttcaggaattgaccttgatttatcaaaagcattatttatattttcatacaacgatgctaatattatagataaaattttactggatagaattcatagaatcaagtttaaacacctaacaattgatgaaaaaataataataacaaatgattatatcctacctgaattgtataaaaaaatgggattagaaaacaccttaataatagatgaagatgttattaaatttataatacaagaatatacatatgaagccggtgttagaaatcttaaacaacatttgtttgatataattggagagattaatttaaaattattaactggtaattttactgaaccaataccttttaaag

SEQ ID NO: 262475 - DNA, 263 bp, Unknown
  Bacterial polypeptide expressing nucleotide sequence isolated from the Sargasso Sea
aatggtaaaaaatctacttcctgttcttccacttagggatatagttgtttttccaagcatggtagctccattatttgttggaagagagcaatcagtaaatgctcttaatcatgtaatgacaggtgataaaaaaatttttttactctctcaaaagaattccaaaattgataatccaaataaagataatctttatacttttggaacaattgcaaaaatagttcaacttttaaaacttccggatggaacacttaaagtactggttg

SEQ ID NO: 262476 - DNA, 391 bp, Unknown
  Bacterial polypeptide expressing nucleotide sequence isolated from the Sargasso Sea
atgactacgcagaatcttaaacctttattaccattaagagatatagttattttcccatcaacagtgatacctctttttgtaggaagaaaaaaatctattaaagccctagaagaagtaatgaaaacagacaagtcaatagttttagtagctcaaaagaattccgaagtagatgatcctaaagaaggagatatttactcttttggttgtttaagtaaaattttacagctacttaaacttccagatggtacagtaaaagtattagtagagggcgtagaaagagtaaaaataaaatcaataaataaagaggaaaaaaagtacttaaattgcgagatccaaatagtttcatctactgaagataaccaatcaagcaaaaattggcggcaaatttaat

SEQ ID NO: 262477 - DNA, 487 bp, Unknown
  Bacterial polypeptide expressing nucleotide sequence isolated from the Sargasso Sea
tttaaacagaccggacaattgggagatgtcatgattgaatctacggaaattgcatacacctacgttagatcaatcgggatcaaagacaaaaatatacaaaaattttttgcagaaaattttgtacatcttcacgttcctgcaggtgcaacacctaaggatggtccttctgctggtattaccatggcttgttcactttactctctggttacacaggttcccgttatccccaatcttgccatgactggagaactgacgctaaccggacttgttatgcctgtgggaggtattaaagaaaaaactattgcagccagaagatcagggattaatctgttgattttaccagcagaaaatcaaaaagattttgatgacttggacgaaaacatcaaaggagggatcaaaacttattttgttaaaaattttacagaagtcctccctatttgcttccctgatcgtttggacagaaggaaaaagacttcgtcaaaatagt

SEQ ID NO: 262478 - DNA, 326 bp, Unknown
  Bacterial polypeptide expressing nucleotide sequence isolated from the Sargasso Sea
aatgtcaaataaatctaaatttccagttttacccttaagagatgtaatagtttttcccaatatggtaattccattatttgttggaagatcaaaatctattgccgcacttgatgctgcaatggaagacaataagcagatttttttagtagcacaaaaaaatgcagataatgataatccaagtcaaaaagatgtatataaaaatggaactttatcaaccattctgcagcttttaaaacttcctgatggcacaataaaagttctagttgaaggttctcaaagagcagcaattgatggagatataatagatgataactatttacaagcgt

SEQ ID NO: 262479 - DNA, 640 bp, Unknown
  Bacterial polypeptide expressing nucleotide sequence isolated from the Sargasso Sea
tatgttaaaaaatacaattccagtacttccactcagagatatagttgtatttccaaatatggttgcccctctatttgtaggaagacaacaatcagtaaacgctttaaatcatgtaatgacaggtgacaaaaaaatttttttactttctcaaaaaaattcaaaagttgataatcctaatcaagacaatctctattcttttggaacagttgcaaaaattatacaattgttaaaacttcctgacggtactcttaaggttttagttgagggtatacaaagggcaaaagtaaataaaataaacttctataaagaatatattaccgcaacaatcgtcgagattaatcaaaaaaataaaaaaagttcaaatataaaagctttgcaaaaacttatcatagaacagttttctgaatttcaaaaaattaataaaaaagtttcactagatgtaattaataatgtcagaaccataaatgatcctgataaaattgttgatataattgtctcaaatatatcaatttctttatctcaaaaacaagaaattttagaaatcataaatacagaggataggttaaataaaatttatggttatttagtatctgaaatagattcttttcaagttgagaaaaaaataaaaggtcgtgtaaaa

SEQ ID NO: 262480 - DNA, 364 bp, Unknown
  Bacterial polypeptide expressing nucleotide sequence isolated from the Sargasso Sea
tatagtttcagtactgacaggtataccggttagaaaagatattgctatgacaggcgaagttacgttgcgtggaaaagcacttggaattggtggtttaaaggaaaagctattagccgctctaagagctggaacaaaaactgttataatcccgaaggaaaatgaaaaggatatggccgatattccagataacgtaaaagatgggttagaattaatatttgttgataatgttgatgaagttttaaatatagctttgaccaagcctcttttgcctattgagtgggatgaagacgattcacctaagtctagtaatgatatatctgaagatgatactgaacaagatgtggataatcctataactcactga

SEQ ID NO: 262481 - DNA, 557 bp, Unknown
  Bacterial polypeptide expressing nucleotide sequence isolated from the Sargasso Sea
tgctcgtctggtcgagctggaagaggttgaaggctaccagagcgccgagatcgagctgttggaggagggcgcgctggacgagcgcgaatccgaagtgctggttcgcagtctgatgagccagttcgagcagtttgtgcagctgggtaaaaaggtacccgccgaggtggtgtcttcgctgtccagcattgatgagccgggccgcctggtcgacaccatggtggcgcatctgtcgctcaagctggacgagaagcagaagattctcgagattctgccgctgcgcgaccgcgtggagcatgtgctcggtgtgctggatggcgagatcgatctgctgcaggtcgagaaacgcatccgtgggcgcgtcaaaaagcagatggagcgcagccagcgcgagtactacctgaacgaacagatgaaggccatccagaaggagatgggcaatctggacgaaggcgagggtgagtttgacgagctgcgccgcaagatcgacaacgccggcatgcccgaagaggccctgagcaaggccaatgccgagttgaacaagctgaagatgatgtcac

SEQ ID NO: 262482 - DNA, 355 bp, Unknown
  Bacterial polypeptide expressing nucleotide sequence isolated from the Sargasso Sea
atggaagttaaacaaaatttaccgttattacctcttagagatatagttgtctttccaagtatggttatcccattattcgttggaagagataagtcaattactgcattaaatgaagtaatgaaagacaataagaaaattgttttagttacacaaaaaaattctgaagtagatgaccctaaaagaaatgatctttttagttttggatgcgaaagcacaattcttcagttattgaaactcccagatggaacagtgaaagttttagtagagggtctaaaaagagtaaaaattgttgattttattgagcaagaaaaatttattagtagtgtttatgaatatcagaacgatgtaaattaat

SEQ ID NO: 262483 - DNA, 310 bp, Unknown
  Bacterial polypeptide expressing nucleotide sequence isolated from the Sargasso Sea
gcaaagcaacaaatttttgaaacattggatgttaagaaaagattaaatgcagctattaagatgatggaaagtgaaactagtataattggagtagaaaaaagaattagaggaagagttaaaactcaaatggaaaagactcaaagagagtattatttaaacgagcaattaaaagcaatacaaaaagaattaggtgaaattgaagacggtaaagatgaaactactaacttaaaaaaatcaattcaaaaagctaaaatgccaaaagaagttgagaagaagtgcatgtcagagcttaagaagttaaaaaatatga

SEQ ID NO: 262484 - DNA, 244 bp, Unknown
  Bacterial polypeptide expressing nucleotide sequence isolated from the Sargasso Sea
gttgtttcgtcggcttgatattaaagtaagaggtagcatgtcgaagtcggacaaaagttcaatttttcccgttttgccgttgagggatattgtggtgtttccccatatgattgtgccactatttgtcggtagagagaaatccgttcgagcccttgaagacgttatgaaggatgacaaacagatccttttaatgactcagcggaaacctggtgatgacgatccgaaaccggatgacatgtataaa

SEQ ID NO: 262485 - DNA, 349 bp, Unknown
  Bacterial polypeptide expressing nucleotide sequence isolated from the Sargasso Sea
tcgtcccttactgcaataaaagtaaaaaaagatgtttcgatgactggcgaaatcactttacgtggaagagtgctccctattggcggtttgaaagagaaactgtatgcagcagtaagagcaggcataaaaaccgttattatacctgaagaaaataaaaaagatttgagcgagttagataaagaaatacttaaaaatattaagattttcccaatttctgaagcaaaatctattttacaacatagtctttcaaaaaaaattaaacccatcaatacaagcgaatctgagacaattaaatcgatagaatcttcgattcagagcgataatttaagaaaatctactactcattaat

SEQ ID NO: 262486 - DNA, 877 bp, Unknown
  Bacterial polypeptide expressing nucleotide sequence isolated from the Sargasso Sea
atgtcgaaaaaaaatcaaaaaatacctctactacctcttagagacgtagttatatttccttcagttgtaacacctctttttgttggaagagagaagtcaattactgccttgcaggcggcaatggctggtgataaacaaataatgcttgtagcacaaaaaagtgctcagcaggataatcctaagttaggtgatctctatccaattggcactctctccactattcttcagctaataaaattgccagatggtactttgaaagttttagtagaaggtaatcaaagagcatcaatagagtctctagaagcttctgacgagtatatgtctgtgcaagtttcaacaatagatgaagaagctgagtcgaaagaattagatcattttcttccttctcttaaaaaacaatttcaggaatatgtaaagcttactcgaaaagctactcctgaagtcttaaatacagtcaatgctatcgactctttatctagactcacagacacactagtaggtcatctctctatcgatataagccaaaaacaggaaatactagaaatgatttcattgactgatagggctaaccgtattttggagcatttagattcccaacttgatctttctaaagttgaaaagaagatacgtggcagagtaaaaactcaaatggaaaaaagccagaaggaatattatcttaatgaacagatgaaagccttgaaaaaagaacttggtgagatagatgaagcagaagaagctgaagaactagagactaagatcaaagaggccggtatgacaaaagaagctcaagaaaaagctcttaccgaactccagaaatataaaaagatgtcaccaatgtcagcagaagcttcagttgttcgtggatatattgactgga

SEQ ID NO: 262487 - DNA, 769 bp, Unknown
  Bacterial polypeptide expressing nucleotide sequence isolated from the Sargasso Sea
aaatattcatagtagctcatttcttgtaaactttgtttcttcaaatatgaatattagtgttgtagaaaaatttaaaatattatcaattaatgaccttcaaaaaagagccctcaggtgtctaaaatttatggatgttgaatttcaaaaattgtctctgaaaaatgatatacaatctaaagtcagaaatgatcttgatcagcaacaaagagaatattttttaaatcaacaattaaaaaccatacaagaagagttaggtggttcatcaaatcatcaagatattgatgaaatgaaactaaagtcaaattcaaaaaaatggaataaagaagttagcaatcattttaacaaagaattaatcaaattacagagaatgaactctcaagccgctgagtattcaattcaaagaaattatctcgatttaatgttagatcttccttggaacgaatactcaaaggataatttcagtttgaataatgcccaaaaaactttaaataaggatcattatggtttggatgatgtcaaaagacgaataatagagcaaattgctgtaatgaaacttagaggtgatatgaattcaccaatactctgtttttatgggccacctggagttggaaaaacttcgttaggtaaatctattgcagaatcattaggaagggaatatgttaggatatcattaggtggtttaagagatgaggctgaaataagaggacatagaaaaacctatataggagctatgccaggaagaattgtacaaaatttgaagagagtaaaa

SEQ ID NO: 262488 - DNA, 85 bp, Unknown
  Bacterial polypeptide expressing nucleotide sequence isolated from the Sargasso Sea
tagagttggcgtggtcactggacttgcttggacagaagtaggggggagaacttttaaaaatagaatcagcggtgatgccaggtaa

SEQ ID NO: 262489 - DNA, 160 bp, Unknown
  Bacterial polypeptide expressing nucleotide sequence isolated from the Sargasso Sea
atggtaaaaaattttattcctgtacttcctcttagagacatagttgtctttccaaatatgattgcacctcttttcgttggaagagagcaatctgtaaacgctctaaataatgttatgtcaggtgataaaaaaatctttttactatctcaaaaagaattct

SEQ ID NO: 262490 - DNA, 506 bp, Unknown
  Bacterial polypeptide expressing nucleotide sequence isolated from the Sargasso Sea
aatgaataaaaaaaatatacctgtacttccattaagagatattgttgtctttccatatatggtagctccattatttgtgggaagaaagcaatcagttaatgctctaaataatgtaatgactggtgataagaaaatatttcttttagctcaaaaaaattccgaagttgataatcctactgactcaaatttatataaatatggaactattgctaaaattttacagttgctaaaacttcctgatggcacaattaaagttttagttgagggtgtagaaagagccaaggccgaaaaaatattcattaataaagattttattacagctaatatttcaaatgttgaatctattaataagaataataataatattaaagccttagttaaaatagtaattgaacaatttgaatcttatcataaaattaacaaaaaaatttctactgaggttttgagtaatgttcaaaaatgtacaaattcaaatcaaattgctgatatcattgctgtaaatttga

SEQ ID NO: 262491 - DNA, 538 bp, Unknown
  Bacterial polypeptide expressing nucleotide sequence isolated from the Sargasso Sea
atgacaacggagtctaaaaaacctttattaccccttagagatattgttatatttccatctatagtcgtaccgttatttgttggaagaaagaaatctataaaagctttagaagaggtcatgaaatcagacaaatcggtagttctagttactcaaaaaaattcagaagtagatgaccctggtgaaaaagacatttattcatacggctgtttaagtaaggttttacaattactcaaattaccagacggtacagttaaagttttagttgagggtctagcaagagtaaaaatattagagatagaagacgatgtcaaaaaatatcttagttgtaaaactcaaattatagaggcagataaagagaacgaggaacataaagtttttgcttcaaacttaataaaaaagttcgaaaaactatctagcttaaataaaaaagatgtttctgatttcactaaaggacttaaatctttaaaaaacgctcatcaacttgcagataatatttgttcaaatttaaatattcaaatatttgaaaaacaggctcttc

SEQ ID NO: 262492 - DNA, 352 bp, Unknown
  Bacterial polypeptide expressing nucleotide sequence isolated from the Sargasso Sea
atggtaacatcaattatttcggctataacagaaatacctgtaaataaagatgtagccatgacgggtgagattactttaagaggtttagttctacctatcgggggtttaaaagaaaaattattagcagcccatagagcaggtattaaaaaagtattaattccgttggaaaacaaaaaagatttggttgaagttcctaagactattttagacagtatggaaattattacagtaaaaaatgtagatgaagtcttaaaaattgctctaacaaaatctttaaaaccagttaaatgggttgaagtagagcaactatcagaaaacaaaacaaaaccaggtgtctctagcagacattaat

SEQ ID NO: 262493 - DNA, 349 bp, Unknown
  Bacterial polypeptide expressing nucleotide sequence isolated from the Sargasso Sea
tatgaatttgacatacacaaagccgttattaccattaagagatattgtcatttttccctcaattgtagttcctttattcgttggcagagaaaaatctattaaagctcttcaagaggcaatgaaaaccgacaagtcaataattcttgttgctcaaaaaaattctgagattgatgaccctaaagacaaggatttatatgcttttggctgcttaagtaaagttttacaacttttaaaactgcctgatggaactgttaaagttttagtagagggtcaaaaaagagtaaaaatagtaaaggttcaaaatgaaaaagaatttttaaattgtgaagttgagttagcagaggatact

SEQ ID NO: 262494 - DNA, 364 bp, Unknown
  Bacterial polypeptide expressing nucleotide sequence isolated from the Sargasso Sea
tatggacgttaaaatatcattacctttgctcccacttagagacatcgtagtattcccaagtatggtgatccctctgtttgtaggtagagataaatctatatcagcactaaatgaagtgatgaaaaaagataaaaaaattattttagtaacccaaaaaaattctgagatagatgaccctaagaaaacggatgtttttatgtatggctgtgagggaaatattttacaattgttaaaattaccagatgggactgttaaagtattagtagaaggaattaaaagagtaaaaattttagattttaaggataatgaaaaatttataacatgtgattatactcattataatgatgttcaccaaaagatgagg

SEQ ID NO: 262495 - DNA, 796 bp, Unknown
  Bacterial polypeptide expressing nucleotide sequence isolated from the Sargasso Sea
agataatagtaagtcggcaatagtgcaaggaatctccagagtgaaaatcttagactacacatcagagaaaccttatttcactgctgcggtagagtctataagtgacgagcctattaaggatcatctagaaatagatagactaactaaaaacttaaggcaggcatttgaagatttaatgaaggttgctccaaaccttacagaagagcactcagggatgttaaaaaatattcaaaaacctaataggctgaccgatcgtgcggtatcggtcatcactatatcgaatcaagaaaaacaagatatccttgaagaattaaatataaaaaggcgaattgaaaaagcgttaaacattatctctcgtgaaatacagcgcataaaattaggtgatgaaatccagtctgaggttcatgatgaaataactaaaactcagcgagaatattacttaagagaacaaatgaaggccataaagaaggagcttggggaagatgaggggacagtagagctcaatgagcttgaagataaaatcaaggctgcacagatgccaaaggagtctgaaaaaattgcgcttaaagagctcgacaggttgtcaagaataccaactcaatcccctgagtacaatgtttctaggacctatattgaatggctaactgatcttccatggagtataagatccgaagatcgtattgatctcaaagaagcaaaaaaaatccttgatgaagatcattatggtttagacaaagtcaaagagagaattatcgaatatcttgctgttagaaatcttaagcagaaaaaggatcca

SEQ ID NO: 262496 - DNA, 110 bp, Unknown
  Bacterial polypeptide expressing nucleotide sequence isolated from the Sargasso Sea
gagaataattgaatttttagcagttcaaaaaagaatggaaaaaattaaaggaccaattttatgtttagttggaccgccaggagttggaaaaacatcacttggaaaatcta

SEQ ID NO: 262497 - DNA, 505 bp, Unknown
  Bacterial polypeptide expressing nucleotide sequence isolated from the Sargasso Sea
tatggaagttaaaatatcatcgcctttattgccgttgagggacatagtcgtgtttccgagtatggtaattccgttatttgtaggaagagataagtcaatcactgctttgaacgaggtgatgaaaaaagataaaaaaattattttagtaactcaaaaaaattctgaaatagacgaccctaagaaaacagacgtttttatgtatggttgtgagggtagtattttgcaattattaaaattacctgatggaacagttaaagttttagttgaaggtattaaaagagttaaaattttagattttaaagataatgataagtttattatttgcgattatacttatcataacgatattttaccaaatgaggaagacttgtttcctctagctgctactgctttgagaagattagaaaaactcactacaataaataaaaaaatatctaacgaaacaataaatacgatcaaacagttgaaagacccatcacagattgctgataatattgcttctcat

SEQ ID NO: 262498 - DNA, 922 bp, Unknown
  Bacterial polypeptide expressing nucleotide sequence isolated from the Sargasso Sea
agatgcgtccaacgaagatccaactttcaaagacatctatcattttggaactgttagcaaccttcttcagcttataaagcttcctgatggaaccatgaaagtcttagttgaaggttcaaaaagatgtcaaattgagaaaataaatgaaacaaaaggtgtaacaaaagctgtcgtaactgaaattgatgatgatgttattaaggtttctgactctatgaatctcgttagatttataaaaactaagtttaacgactatgtagcatctacaaaaaaaataccaccggaaatattatctactatcgatgcaattgatgatctttctaaattaatagacaacattgtaaatcacttaaatattgatacctctcaaaaacaagaaattttagaaatctttgatcttcaaaaaagatccgaaagcttattaacttttattgaatctcagctagatgttattgatgttgagaaaaggattagatcaagagtaaaaaaacagatggaaaaatctcaaagagaatattacttaaacgaaaagataaaggcagctcaaaaagaacttggtgagattggtgaggaaggtgatgagtttcaggtacttaaaaacaaaatagaaaaagccggaatgtctaaagaagctcttaaaaaagcaaaaagtgaattctcaaaatttaaaatgatgtccccaacttctgcggaggcatcggtaataagatcttatcttgaatgtctgattgatgttccttggaagaaaagaggtaaagttaagtctgatattaaattagctcttgatacacttaacgatgatcactatggattagaagaggtaaaagatagaatattagaatatctagctgtccaaaaaagagtcaaaaatcttaaagcacctgtgttatgtctagttggacctcccgggagatggaaaaac

SEQ ID NO: 262499 - DNA, 427 bp, Unknown
  Bacterial polypeptide expressing nucleotide sequence isolated from the Sargasso Sea
atggacataaaaataactttaccgctattacctcttagagatattgtggtgttcccaagtatggtaattcctctttttgtaggaagggataaatcaatatcagcactaaatgaggtaatgaagaaagataaaaaaatcattcttgtaactcaaaaaaattctgaaattgatgatccaaaaaaaacagacgtatttatgtatggttgtgaaggaaacattctacaattattaaaattgccagatgggaccgtcaaagttttagttgagggaattaaaagggtaaaaattttagattttaaagacaatgacaaatttataacatgcgattattctcatcaaaatgatattgtagataaagatcaagatctttatccaattgcagcaactgcaataagaaggttagaaaaattgacctcaataaataaaa

SEQ ID NO: 262500 - DNA, 460 bp, Unknown
  Bacterial polypeptide expressing nucleotide sequence isolated from the Sargasso Sea
atgaacatcaattctatacctgttttacctttgagagatattgtagtttttcctcatatgattgcccctttatttgttggaagaaaaccatctgtcaatgctcttaatcatgtaatgataaaagataaaaaaattttacttgttacacaaattaaccctgaagttgattctcctaattcagatcatctttataaagttggcactttagcaaaagtattacaattattaaaacttcctgatggaaccataaaagtattagttgaaggtttagaaagagcaaatattaaagaatttggttcaaaaaatgattttctaattgctaattactcgccacttaagtttaagtccaaaaataattctaatattagagcattagttaaaataatattggagcaatttgaatcttatcaaaaaatgaacaaaaaaatatcttctgaaataataagcaatttaaaaactt

SEQ ID NO: 262501 - DNA, 830 bp, Unknown
  Bacterial polypeptide expressing nucleotide sequence isolated from the Sargasso Sea
tttgctttcgcaaaaagactccaaaattgataatcctaccaaagaaaacttatataaagttggaacaattgccaaagtaattcaattattaaaattacccgatgggactctcaaagtcctagtagaaggtgtacaaagagctacagtttcaaaaattaattttaacaaagaatttattacagcatctattattgagattaataaaaaaacaaagagaaattcaaatataaaagtcttacaaaaacttatcattgaacagtttgtggagttccaaaagataaacaaaaaagtttcgatagatgtggttaataataccaaatctttgaatgatcctgataaagtagtcgacataattgtatcaaatatttcaatttcactagctcaaaaacaagaagttttagagattttaaataccgaagacaggctcaataaagtttacggtcatcttgtgtctgaaattgattcatttcaagttgagaaaaagattaaaggccgtgtaaaaagacaaatggagaagactcaaaaggaatattacttaaatgagcaaatgaaggccatccaaaaagaacttggtgaaaatgaagatatggatgaaattactgagctagaaaacaaacttaacaagtataacctttctaaagaagctaaagataaatgcatatcagaaataaaaaaattaaaaaatatgagtccgatgtcagcggaagcaaccgtcattagaaattatttagattgggtaatgtcaataccatggaataatccagatcaaatttcaaaaaatatcaataaagcctcatcaattttagagaatgatcactacggattagaaa

SEQ ID NO: 262502 - DNA, 874 bp, Unknown
  Bacterial polypeptide expressing nucleotide sequence isolated from the Sargasso Sea
attccgagtgaggcctcatttgccattaaaaatattcatagtagctcatttcttgtaaactttgtttcttcaaatatgaatatcagtgtggcagaaaaatttaaaatattatcaattgatgaccttcaaaaaagagctctcaggtgtctaaaatttatggacgttgaatttcaaaaattatcactgaaaaatgacatacagtctaaagtcagaaatgatcttgatcagcaacaaagagaatattttttaaatcaacaattaaagactatacaagaagagttagggggttcatcaaatcatcaagatattgatgaaatgaaactaaagtcaaattcaaaaaaatggaataaagaagttagcaatcattttaacaaggaattaataaaattgcagagaatgaattctcaagccgccgagtattcaattcaaagaaattatctcgatttaatgttagatcttccttggaacgaatattcaaaggataattttagtttgaataatgcccaaaaaaccttaaacaaggatcattatggtttggatgatgtcaaaagacgaataatagagcaaattgctgttatgaaactaaggggtgatatgaattcaccaatactctgcttttatgggccacctggagttggaaaaacttcgttaggtaaatctattgcagaatcattaggaagggaatatgttaggatatcattaggcggtttaagagatgaggctgaaataagaggacatagaaaaacctacataggagctatgcctggaagaattgtacaaaatttaaagagagtaaaaacatcaaatccagtatttgtattggatgaaattgataagctttcaattggaaatcagggagatccttcttctgcaa

SEQ ID NO: 262503 - DNA, 101 bp, Unknown
  Bacterial polypeptide expressing nucleotide sequence isolated from the Sargasso Sea
cgtaacttttaacgaccattacctagaagtagattatgatctttcagatgtaatgtttgtacaacagcaaacacataaaatattttgcctcctttactaga

SEQ ID NO: 262504 - DNA, 300 bp, Unknown
  Bacterial polypeptide expressing nucleotide sequence isolated from the Sargasso Sea
aggatgttgccatgactggagaaattacattaagaggactagttcttcctattggcggactgaaagaaaaacttttagcagcgcatagagctggtatcaaaaaagttttaataccagtcgaaaataaaaaagatttgatggaagtcccaaaaactattttagaaaatatagaaataattccagttaaaaatgttgatgaagttatcaaaattgctctaacaaaacctttgaaaagagtagaatgggtagaagtagatcaaatatctaaaaaagaaaaagaagaactgagtagacactaag

SEQ ID NO: 262505 - DNA, 373 bp, Unknown
  Bacterial polypeptide expressing nucleotide sequence isolated from the Sargasso Sea
atggatgtaaaaatatcattaccattacttcctttgagagacattgttgtctttcctagcatggttattcctttatttgtaggcagggataaatctatttcagcacttaacgaagtgatgaaaaaagataaaaaaattattttagttactcaaaaaaattcagaaattgatgatcctaaaaaaacagatgtttttatttatggttgcgagggaagcattttacaattattaaaattaccagatggtactgttaaagttttagttgaaggtataaaaagagttaaaatcttagatttcaaagataatgaaaaatttattatgtgtgattacactcatcataatgacattttaactaaagatgaagatttattcc

SEQ ID NO: 262506 - DNA, 472 bp, Unknown
  Bacterial polypeptide expressing nucleotide sequence isolated from the Sargasso Sea
atggaagttaaattaacacagcccttattaccattgagagacatagtagtgtttccaagcatggtcatcccactatttgttggaagagataaatctattactgccttaaatgaggtaatgaaaagtgacaaaaaaataatattagttactcaaaaaaattctgaagttgatgatccaaaaaaaaatgatgtattttcttatggatgtgaaagcaacatattacaacttttaaaacttccagacggcacagtaaaagttttagttgagggaattaaaagagtaaaaattattgatttcaaggatgatgaaaaatttattatctgtacatatgaacatcaaaaagatgtcttaaacaaagatgaagatctattacctctagcactcacagcagtaagaagattggaaaagttgacgtcagttaacaaaaaaatttcatcagaaacgattaacaatataaacaataaaagatccg

SEQ ID NO: 262507 - DNA, 277 bp, Unknown
  Bacterial polypeptide expressing nucleotide sequence isolated from the Sargasso Sea
tacacagaagatgaaaaagtagaaattgtaaaacaacatttagcaccgcagatgttagagaagcatggcttaaagagtggtgagcttatactggatgatagtgcgataactggattaataagatattatactagggaagcaggtgttaggagtttagaaagagaacttgctaaccttgctcgtaaaacagttaaaaaaattgtagcaggtgacattggatcacaaacaataaacgaagataacctgcacgagtttgcaggtgttagaaaatttaaat

SEQ ID NO: 262508 - DNA, 493 bp, Unknown
  Bacterial polypeptide expressing nucleotide sequence isolated from the Sargasso Sea
tatggatgtcaaaatttcattaccgttattaccgctaagagacatcgtagtctttccaagtatggtaattcctttatttgtaggaagagacaaatctatatctgcactaaatgaagtgatgaaaaaagataaaaaaataatcctagtcacacaaaaaaattcagagattgatgatcctaagaaaacagatgtttttatgtacggttgtgaaggaagtattttacaattattaaaattgcctgatggaactgttaaagttttggttgaaggaactaaaagagtaaaaattttagattttaaagacaatgaaaaatttataacttgtgattatactcattatcaagacgttttgcctaaagatgaagatttatttccacttgcagcaacagcattaagaagattagaaaaattaacttctattaataaaaaaatttcaagcgaaacaattaatacaattaagcagcttaaagatccttcacaaattgctgataat

SEQ ID NO: 262509 - DNA, 553 bp, Unknown
  Bacterial polypeptide expressing nucleotide sequence isolated from the Sargasso Sea
atgacaaaagtagtaaacattactcatcctgttttaccattaagagacattgtggtttttcctcatatgattgtgaggcttttcgtaggtcgggaaaagtcagttcgagcgcttgaagaagtgatgaaggacgataaagaaatattattggccagtcagatagatgcaagcgaagacgaaccatcgatagacacaatatataagacaggggttctggccaatgttttacagatattaaaactaccggacggagcagttaaaatacttgttgaaggtaaaaatcgagtaaaaattcaagagtttgtacagactgaggagttttttcaggcgaaagcagaaattgttgaagaagtgcccggcactgcagaggaggtggaggcacttcgtcggtcagtagttgaggattttgagagatatgcaaaattaaacaagaacgttccagaagaagcgtttaatgccattattgaaactgaggaggcggataagctcgctgacacggtagcaggacatttaagcattgcggtagagaaaaagcaagatttactagaaacat

SEQ ID NO: 262510 - DNA, 550 bp, Unknown
  Bacterial polypeptide expressing nucleotide sequence isolated from the Sargasso Sea
atggaagttaaatttacacaaccactgttgccactcagagatatcgtggtatttccaagtatggtcattccgctgtttgttggaagagacaaatctataacagcccttaatgaggttatgaaaggtgataaaaaaattattcttgttacacaaaaaaattctgaagtagatgatccaaaaaaaaatgatattttttcatatggttgtgagagtaatattttacaattattaaaattacccgacggtacagttaaagtgttagtagaaggaattaaaagagtaaaaattttagaattcaaggatgatgaaaaatttatttcatgtacatatgaaagtcaaaaagacttaaccacaaaagatgaagatcttatgccattagctttgactgctattagaagattagaaaaattaaattcagtaaataaaaaaatttcttctgaaactattaatagtattaaacaacttaaagatccttcaaaaattgcagacaatatagcttctcacttaaattctacaatttcagaaaagcaacagatattgaaacattaga

SEQ ID NO: 262511 - DNA, 266 bp, Unknown
  Bacterial polypeptide expressing nucleotide sequence isolated from the Sargasso Sea
gaaaaaccttgcaatgactggagaaattacacttcgaggagatgtgttgcctgttggtggaataaaagaaaagattcttgcagcaaaaagagcgaacattaaagaaattatcttatctgaaaaaaataaatttgacattgatgaaatagatgatcattatttaaaaaacttaaaatttcattttgtaaatagcatgagagaagttcttgaattatctttgtcaaaagaaaaagttaaaaaccctattgatttaaacaaaaattaat

SEQ ID NO: 262512 - DNA, 565 bp, Unknown
  Bacterial polypeptide expressing nucleotide sequence isolated from the Sargasso Sea
tatggatgtaaaaatttcattaccattattacctttaagagacattgttgtttttccaagtatggtaatccctttatttgttggaagagataagtctatttctgctttaaatgaagttatgaaaaaagagaaaaaaattatacttgttactcaaaaaaattcagaaatagatgatccaaaaaaaactgatatctttatgtatggctgtgaaggtaatattttacaattattaaaacttccagatggaactgtaaaagttttagttgaggggattaaaagagtcaaaatcctagattttaaagataatgacaaatttattaattgtgaatacactgcacataatgatgttattaataaagatgaagatttgtatcctttagccgcaacagctataagaagattagaaaagctaacatcaataaataaaaaagtttctaacgaaacaattaattctattaaacaactaaaagatccttcacaaatagctgataatattggttcacatataaatgcgacgatttctgagaaacaacaaatttttgagacagctgatgttaaaaaaaga

SEQ ID NO: 262513 - DNA, 584 bp, Unknown
  Bacterial polypeptide expressing nucleotide sequence isolated from the Sargasso Sea
aatggatgtaaaaaatacattaccgcttttaccactaagagatattgttgtatttcctagtatgatcatacctttgtttgttggtcgagataaatcaatatcagctttaaacgaagtaatgaaaggtaataaaaaaatcgtattggtcactcaaaaaaatgctgaaatagatgatccaaaagaacaagatgttttctcttatggatgcgaaagtaatattttgcaattattaaaattacctgacggcacagtcaaagttttagctgaaggtatgcgaagagttaaaatttcagatttaaaaaacaatgataacttcatgtcttgctcgtttgtttatgtaaatgattatactccaaaagaagataatttattacctttagcattaacagcaattaagaaactagagaaattaacttcaataaataaaaaagtatcaagtgaaataattaataatattaaagaattaaaagaaccatcaaaaatatgtgacaatatagcttcacatttgaactcaactatatcagaaaaacaaaaactctttgaaactttcgatgtgagcaaaagattaaatgaagtaattaaaa

SEQ ID NO: 262514 - DNA, 739 bp, Unknown
  Bacterial polypeptide expressing nucleotide sequence isolated from the Sargasso Sea
tatggttagtagacttctagagttattcctaaaagttgcaatttttattgcaacctttattggcataataatactctcaacatacctttatttattatctgaacttccaagggtagacaatgttgatcaatcaaaacttcaaatacctctaaaaatttatacatctgatgagaaattaattggagaatttggagaaaagaaaaggagaccattaggatttgaagaaatacctgaagatttgaagaatgcatttctagctgcagaggatgacggattttttgagcatagaggtgtttcgtatccaagtttaataagagctttttctcaatatattagagtaggccttgatgcaactggtggtggaacaattacaatgcaagttgttagaaactatcttttaactcgagaaaagaaagtaaggagaaagattaaagaaatctttttagcatttcaccttgaaagtgcattctcaaaggaagagatcttcgagatatatgtaaatacaatctttctaggcaatagatcttatggcattgaggcagctgctaatacttattttggtaaatcggttggcgaattgacggtagctgaatcagctttaatagcctctcttgcccaacttccatcaagagtaaatccgattagaaatccagagagaactaaagctagaaggaattgggttttatacagaatgaaacttttagactttatctctgagcaagactatcaaactgcaaca

SEQ ID NO: 262515 - DNA, 313 bp, Unknown
  Bacterial polypeptide expressing nucleotide sequence isolated from the Sargasso Sea
atgaaattgcttaatttacctattttaccactaagagatattgttgtttttcctcatatggtagctccattatttgttggaagaaaaatgtcaataaatgcactaaataaagtaatgctaagcgaaaaaaaaatcttactcataacacaaaaaagttcagatattgacaatccatcatcaaaaaatttatataattttggaactgttgccaaaatacttcaactcttaaaactaccagatggcactgttaaggtattagttgaaggattagaaagagctaaagtttatgagattctggataacaaagattttt

SEQ ID NO: 262516 - DNA, 769 bp, Unknown
  Bacterial polypeptide expressing nucleotide sequence isolated from the Sargasso Sea
tatgacaaaaagcaggaccaaagatttaccccttttaccactcagagacgtggttatatttccttctgtagtaacgcctctatttgtgggaagagatcaatctatagttgctctacaagcttctatggcctcagataaacagataatgttagttgctcaaaaagattccaataccgaaaacccagaacaagaagatttatatgaggtaggtactatttcttcgatcctgcagttgattaaactacctgacggaactgttaaggttttggtcgaagggagcaagagggctaagattaagagcgttaatgactacaaggactataaagctgttgatgtaactccaataaaggaagaggaagaaacagatgaagctcctactttagttgcaaacctaaagaaagattttcaggaatacgtaaaggtaacaagaaagacaaccccagaagtcctgcatactgttaattcaatagataggctaggtagattaactgatactttagttggccacttatctataaatttagatcaaaaacaagaattacttgaaactaaatctttaatagaaagatcaaaaaaaatcctatctcatctcgatgagcagctcgatttaacaaaagtagaaaagagagtgagaggtagggttaagaagcaaatggaaaaaagccagaaagaatattatctcaatgagcagatgaaggctttgaagaaagaattaggagaaatggatgagtctgatgaggctgaagttttagaaaagcaaataaaagaa

SEQ ID NO: 262517 - DNA, 133 bp, Unknown
  Bacterial polypeptide expressing nucleotide sequence isolated from the Sargasso Sea
aatgattaaaagcagtattccagtactacctttgagagatattgtagtttttcctcaaatggtagcaccattatttgttggtagaaaactatcaataaatgctcttaattatgtaatgagtacagataaaaag

SEQ ID NO: 262518 - DNA, 229 bp, Unknown
  Bacterial polypeptide expressing nucleotide sequence isolated from the Sargasso Sea
tatgaccttagagcgtgaagcgcatatcgaactccccgtgctaccactgagagatgtggtggtctatccccatatggtaattccgttgttcgttggccgagaaaaatcgattcgttgtctcgaaacggcaatggcccaggataagcaaattattttagtcgctcagcgtgacgctgagttagacgagccgaccaaagacgatatcttgaagtcggtactgtggcgtcta

SEQ ID NO: 262519 - DNA, 338 bp, Unknown
  Bacterial polypeptide expressing nucleotide sequence isolated from the Sargasso Sea
tggtgtaggtatgtttacagctatagtttcattgctttcttgtaaacctgtaaaaagtaaggtagccatgactggtgaaattactctaagaggtaatgtcttgccgatcggtggagtaaaagaaaaagttactgcagctcatagatctggtattaaaacaattatattacctgatcataatcgaaaagatcttgaagatattcctgaccatattaaaaaagatttagaatttcattttgctaaagaaatgatggatgtcattgatgtagctattccaggcttaaatggaaagaaaaaatcaaaaaactcttcttcaagaattaaaaaggcagtttaaa

SEQ ID NO: 262520 - DNA, 391 bp, Unknown
  Bacterial polypeptide expressing nucleotide sequence isolated from the Sargasso Sea
agatgggcctagcgcaggtatagcaatatttaattctttggtatcatcccttactacaaataaagttaggaaagatgttgcaatgacaggagaaattactcttagaggtagagtactacctataggtggattaaaagaaaaaatttatgccgcttcaagagcaggtattaaaaaagttttaattcctgaagaaaataaaaacgaagtcacagaatttgacaaagagattctaaagtatgttaaaataatccctataaatgaggctaagtcaatacttgagcatactcttgtaaagcctattactcctcttgatttaaccgaatcagagatactcgaggatcaaaaaaataggtattctgactcaaatttaaaagaaaatttgagacactaa

SEQ ID NO: 262521 - DNA, 373 bp, Unknown
  Bacterial polypeptide expressing nucleotide sequence isolated from the Sargasso Sea
atggaagttaagttatcacaaccacttttgccacttagagatattgttgtatttcctagtatggtaatacctttgtttgttggaagagataaatctataaatgctctaaacgaagtgatgaaaaatgataaaaaaatcattttagttactcaaaaaaattctgaagtagatgatcctaaacaaaatgatattttttcgtatggttgtgaaagcagcattttacaattattaaaattacctgatggaacagttaaagttctagtagaaggaaaaaaaagagtaaaaattttaaagtttgaagataatgaaaaatttattacttgcacttatgaaaatattaacgaattggaatccaaagaagatttatttcctt

SEQ ID NO: 262522 - DNA, 460 bp, Unknown
  Bacterial polypeptide expressing nucleotide sequence isolated from the Sargasso Sea
tatggacgttaaaataacattacctctattacctctcagagatattgtcgtatttccgagcatggtaatacctttgtttgttggccgggataaatctatctctgctttaaacgaggttatgaaaaaagataaaaagattattcttgttactcaaaaaaattctgaaattgatgatcctaaaaaaactgatatttttatgtacggttgtgaaggtaacatacttcaactattaaaattaccagatggaactgttaaagttttagtagaaggaattaaaagaacaaaaattttagattttaaagataatgataagtttattacttgtgattattcgtattataatgacattgtttcaggtgatgaggatttatatccattagctgtaactgctcttagaagattagaaaaacttacttcaattaacaaaaaagtttcaagcgaaatcattaatacaatcaaa

SEQ ID NO: 262523 - DNA, 473 bp, Unknown
  Bacterial polypeptide expressing nucleotide sequence isolated from the Sargasso Sea
tatggatgtaaaaatcacattacccttattgcctttaagagacatcgttgtatttccaagtatggtgatacctttatttgtaggaagagataaatcaatttctgcactaaacgaggtaatgaaaaaagataaaaaaataatactggtaacccaaaagaattcagaggtagatgatcctaaaaatactgatgtctttatgtatggatgtgaaggaaacattttacaacttcttaaattacccgatggaacagttaaagttttagtagagggaaataaaagagttaaaatactcgacttcaaagatgatgaaaaatatatctcatgtgaatttacacatcaaaatgacgagataagtaaaaatgaggatttaatgccgctcgccttaaccgctgttaagaaactagaaaaactaacatcagttaacaaaaaaatttcgcaggacattattaatagcatcaaacaactaaaggacc

SEQ ID NO: 262524 - DNA, 541 bp, Unknown
  Bacterial polypeptide expressing nucleotide sequence isolated from the Sargasso Sea
aatgatatcagaaaattctaaaccacttttacctttaagagacatagtcatttttccatcaatcattacacctcttttcgtaggaagaaaaaaatccattaaagctttagaggaggttatgaagactgataaatccattgttcttgttgcacaaaaaaattctgaagtagacgagccaaaagaggaggatctgtattcatttggatgtttaagcaaggttctacaattattaaaattgccagatggtactgttaaggtattagttgagggtctagaaagggttaagattctggagcttgataatgaaaatgataaatatttcgattgtaaaattgaagttatatctaacaaaaaggaagatgaagacagtaaaatttttgcaaacagcctaattaaaaaatttgaaaaactatcaaacttaagcagaaaagatattaatgaatttactaaaaacttaaaacttttaaataatccttcaaaaattgcggacaatatttgttcaaatttgaatatacaaatttctgacaaacagcattgctga

SEQ ID NO: 262525 - DNA, 208 bp, Unknown
  Bacterial polypeptide expressing nucleotide sequence isolated from the Sargasso Sea
tatggttaaaaatttacttcctgttcttccactcagagatatagtagtatttccaaatatggttgctccattatttgttggtagagagcaatcagtaaatgctcttaactatgtaatgacaactgataaaaaaatttttttgctttctcaaaaaaactcaaaagttgataatcctgataaacaaaacctttattcttttggaaccgtt

SEQ ID NO: 262526 - DNA, 502 bp, Unknown
  Bacterial polypeptide expressing nucleotide sequence isolated from the Sargasso Sea
atggaagttaaagtaaaattaccattattacctttgagagatatagtagtatttccaaatatggtaataccattattcgttggaagagataaatcaatcaatgccctaaatgaagttatgaagggtgataaaaaaataattttagttactcaaaaaaattcagaagtagatgatccaaaaaaaaatgatgttttcatgtatggatgtgaaagtaatattttacaattgttaaaattaccagatggcaccgtaaaagttttagttgaagggcaaaagagagcaaaaattattgattatgaagataatgaaaaatttataaattgcacctacgaaactttaaataatattgttaataaagatgatgacttaaactctttatcttctatggctattagaagacttgagaaattaagcaatataaataaaaaaatacctaatgaaacgataaattccatcaaggaaatgaaagacccaattcaagtagctgataatattgcatctc

SEQ ID NO: 262527 - DNA, 424 bp, Unknown
  Bacterial polypeptide expressing nucleotide sequence isolated from the Sargasso Sea
aaaaaagattttcatatacatgtcccagaaggcgcaacaccaaaagatggtccttccgcaggtatagctatggttacatcaattgtttcttcaattacaaaaaacccggtagataaaaatattgctatgacaggcgaagttacaataacaggtcaagttttaccaattggaggtttaaaagagaaattacttgctgctcatagagctggaataaatcaagttataataccaaaagaaaacgaaaaagatttaatagatataccaaaaaaagtaagagaagatattaaagtaactgttgttgaaaacgtggatgaagtattaaaaatagctctaaaaaaagaattgaaaagagtagaatggactgaagtagaaaatatttcaaaaactgataaagatcaaaaatcacaagccagtattcagtaaa

SEQ ID NO: 262528 - DNA, 529 bp, Unknown
  Bacterial polypeptide expressing nucleotide sequence isolated from the Sargasso Sea
tgtagagtctactaaaatgacaggaaaggggaaattaactctcacaggtcaattaggtgatgtaatgaaagaatctgtgtctgccgcattaacatatgtaagggcacatgctgaagattttggaattgatgtagatttcaatgataaatcagatatacacgttcacgtccctgcaggagcaattccaaaggatggaccttcggcaggagtaagtatggttacctctcttgtttcattattaacaaacgttcctgtcaaagaaaaagttgccatgactggtgaaattactttgaggggaaacgttcttcccattggaggtgtaaaagaaaaagttacagctgcacatcgatcaagaattaaagaaattattcttcctgagcataataggaaggatttggaagatgttcctgaccatgttgctaaagatttaaaatttcactttgctaaggaaataaaagacgttctattagttgcgttacctagtgtatttcaaaaagaaaaaaaatctaaaaaaacggccgagaattaa

SEQ ID NO: 262529 - DNA, 703 bp, Unknown
  Bacterial polypeptide expressing nucleotide sequence isolated from the Sargasso Sea
agaaaaggaagtcaatgtaaataataaaaatttgtctgactttcttggagttgcaaaatttaattttggtgaattagagactgatgataaagtcggtattgttattggacttgcttggacagagtatggtggggagatacttaaaattgaaacagtaactatgcctggtaaaggtagaatgcaaattacaggtaagcttggtgatgtaatgcaagagtcagttaaagctgcaaaatcttttgttagatctaaatgtcttgaatatggaattattcctccattatttgagaagaaagattttcacattcatgtccctgaaggtgccactcctaaagatggtccatcagcaggtgttggaatggttacgtcaattgtatcttcaattacaaatatcccagtaagaaaagatttggcaatgactggagaagttactttaacaggtcaggttttacaaattggtggattaaaagaaaaattattagcagcacatagagctggaatcaaagaagttttaataccaaaagaaaatgaaaaggatcttgtggatatgccgaaaaaaataatggatgatattaaaatcactccagtagagcatgcagatcaagtaattaaaatagctttaacaaaagaattgaaacccactgaatgggttgaagtagacataactaaaaaagatgataaatcacaagctagtattcagtaa

SEQ ID NO: 262530 - DNA, 370 bp, Unknown
  Bacterial polypeptide expressing nucleotide sequence isolated from the Sargasso Sea
tccaaaagatgggccaagcgcaggaatagcaatttttaactctttagtatcttcattaacaaataataaagtgaaaagagatgtagctatgacaggagaaataaccttaagaggaagggttcttcctatcggtggtttaaaagaaaaaatttacgctgctaatagagctgggattaaaaaagtgctcgttcccgagtctaatattagggaaatatctgagtttgatttagatgttattaaaaatataaaaattattggtatttcagatgcattttcaattttggaacattcgttagttaaaccaataattcctcttaatttaaccgaatcagcaataaaaaatactcataatattagaagtacgcattaa

SEQ ID NO: 262531 - DNA, 799 bp, Unknown
  Bacterial polypeptide expressing nucleotide sequence isolated from the Sargasso Sea
aataagaggttacactaaagaatctggagtaagaaatctagaaagagaaatttcgaaaatagcacgaaaagtcgttaagaaaattgttgctggagaagaaaaggaagtcaatgtaaataataaaaatttgtctgactttcttggagttgcaaaatttaattttggtgaactagagactgatgataaagttggtattgttgttggacttgcttggacagagtatggtggggagatacttaaaattgaaacagtaactatgcctggaaaaggtagaatgcaaattacaggtaagcttggtgatgtaatgcaagagtcagttaaagctgcaaaatcttttgttagatctaaatgtcttgaatatggaattattcctcctttatttgagaagaaagattttcacattcacgttcctgaaggtgccactcctaaagatggtccatcagcgggtgtaggaatggttacttcaattgtatcttcaattacaaatattccagtaagaaaagatttggctatgactggagaagttactttaacaggtcaggttttacaaattggtggattaaaagaaaaattattagcagcacatagagctggaattaaagaagtcttaataccaaaagaaaatgaaaaagatcttgtggatatgccgaaaaaaataatggatgatattaaaatcactccagtagagcatgcagatcaagtaattaaaatagctttaacaaaagaattgaaacccactgaatgggttgaagtagacataactaaaaaagacgataaatcacaagctagtattcagtaa

SEQ ID NO: 262532 - DNA, 370 bp, Unknown
  Bacterial polypeptide expressing nucleotide sequence isolated from the Sargasso Sea
atggaaaatgaaacaagtattattggtgttgaaaaaagaataagaggaagagttaaaactcaaatggaaaaaactcaaagagaatattatttaaatgaacaacttaaagcaattcaaaaagaattaggtgaaattgaagaaggaaaagatgagagcacaagtttaaataaagctattcttaaagctaaaatgcctaaagaggtagaaaaaaaatgcctacaagaacttaaaaaattaaaaaatatgagtccaatgtcagctgaagcaacagtcgttagaaattatttagattggatgacagaactaccttggtacaaaaaaagtgctgttgatatagatcttaaaaaaagctttagaggtgttagataaa

SEQ ID NO: 262533 - DNA, 709 bp, Unknown
  Bacterial polypeptide expressing nucleotide sequence isolated from the Sargasso Sea
catggatgttaaaatctcactaccgttacttcctttaagagatatcgtagtctttccaagtatggttattccattatttgtaggcagggataaatcaatttctgcattaaatgaagtaatgaagaaagacaaaaaaatcatactagtaactcaaaaaaattctgaaattgatgacccaagtaaaactgatgtttttatgtatggatgtgaaggaaatattttacaactattaaaattaccagatggtactgttaaggtcttagtagaaggaataaaaagagttaaaattttagattttaaagataatgaaaaatttatatcttgtgactatacttattttaacgatgtcctctctaaggatgaagatctgtttccattagcagcaaccgctttaagaagactagaaaagttaacatctattagtaaaaaaatttctaacgaaacaataaatacaattaagcaactaaaagacccatctcaaattgcagacaatattgcatcacatatagcggcttcgatttctgaaaaacaacaaatttttgaaaccaatgatgttaaaaaaaggttaaacgccataattaaaattatggaaaatgaaactagtataattggtgttgagaaaagaattagaggaagagttaaaactcaaatggaaaaaactcaacgtgagtattatttaaatgagcaactgaaagcaattcaaaaagaa

SEQ ID NO: 262534 - DNA, 466 bp, Unknown
  Bacterial polypeptide expressing nucleotide sequence isolated from the Sargasso Sea
aaagtttgggaaatatggaattatacccctcctacatttgaaaaaaaagatttccacattcatgtacctgaaggcgcaacaccaaaagatggtccatcagcaggtattgcaatggttacctcaatagtttcatctattgtgggtattccagttgatagagaaattgcaatgacaggagaagttactgtaacagggcaagttttgccaataggtggattaaaagaaaaattgttggcagctcatagagcgggagtaaaaaaagttttaataccaaaagaaaatgaaaaagatttaactgatattcctaaaaaggtaagagaagatatcaaaattattcctgtagaaacagcagatgaagttttaaaaatagctttaacgaaagaacttaaaccagttgaatggacagaggtagataaaatatctgacactaaaaaggacgaaaaatctcaagctagtattcaataat

SEQ ID NO: 262535 - DNA, 724 bp, Unknown
  Bacterial polypeptide expressing nucleotide sequence isolated from the Sargasso Sea
aagaaaattgttgctggagaagaaaaagaagtaaatgttaacaacaaaaatttatctgattttcttggtgttgcaaaatttaattttggagaattagaagctgatgataaagttggtattgttgttgggctagcgtggacagagtatggtggagagattttaaaaattgagacggtcactatgccaggtaaaggtagaatgcaaattacaggtaagcttggggatgtaatgcaagagtctgtaaaagctgcaaaatcttttgtgagatccaaatgtttagaatatggtattattcctcctgtatttgaaaagaaagattttcatattcacgttcctgaaggtgctacacctaaagacggtccatcggctggagttggaatggttacatctattgtatcctcaatcacaaacatcccagttagaaaagatttagcaatgacaggtgaagttactttgacaggtcaggttttacaaattggtggattaaaagaaaaattattagcagcacaccgagcgggtattaaagaagttttaataccaaaagaaaacgaaaaagatcttgtggatatgccaaaaaaaataaccgatgatattaaaatcactcctgtagaacatgctgatcaggtaattaagatagcattaacaaaagaattaaaacctactgaatatgttgaggttgatatatcgaaaaaagatgataaatctcaagctagtattcagtaag

SEQ ID NO: 262536 - DNA, 809 bp, Unknown
  Bacterial polypeptide expressing nucleotide sequence isolated from the Sargasso Sea
tatggatgttaaaatatcattgccgttattacctttaagagacattgtcgtcttcccaagcatggtaatccctctgtttgtaggaagagataaatctatttctgcacttaatgaagtaatgaaaaaagataaaaaaatcattcttgttacacaaaaaaattcagagatagatgatcctaaaaaaacagacgtatttatgtacggttgtgaaggaagcatcttacaattattaaagttaccagatggaactgtaaaagttttagtagaaggtattaaaagaattaaaattttagactttaaagataatgagaaatttattacgtgtgactatacatatttcaatgatattttactaaaagaggaagatttatttcctttagcagctactgctctaagaagattggaaaagctaacttctataaataaaaaaatttctaatgaaacaattaatacaattaagcaattaaaagatccttctcaaatagctgataatattgcttcacatataacagctacaatttcagaaaaacaacaaatttttgaaaccgttgatgttaagaagagattaaacaccataattaaaattatggagaatgaaacaagtataattggtgtagagaaaagaattcgaggaagagttaaaactcaaatggagaaaacccagagagaatactatttaaatgagcaacttaaagctattcaaaaagaacttggtgagattgaagacggtaaagatgaaactacaagcttaaataaagctatcacaaaagctaaaatgccaaaagaagttgagaaaaaatgtctacagg

SEQ ID NO: 262537 - DNA, 457 bp, Unknown
  Bacterial polypeptide expressing nucleotide sequence isolated from the Sargasso Sea
tttggagtatggaataattcctccagtttttgaaaaaaaagattttcatattcatgttccagaaggagcaactcctaaagatggtccttccgctggtattgcaatggtcacatcaattgtttcatcaattactaatattccagttgacagagaagtagcaatgaccggtgaagtaactgtgactggccaagttctgccaataggtggtttaaaagaaaaattattagcagcccatagagcaggagtaaaaaaagttttaatacctaaagaaaatgaaaaagatttagcagatataccaaaaaaagtgagggaagatattaaaattattccaattgaaagcgctgatgaagttttaaaaatagctttaacaaaagaactcaagcgtgttgaatggactgaagttgataaattatctgaaagtaaaaaagacgaaaaatcccaagccagcattcagtaa

SEQ ID NO: 262538 - DNA, 424 bp, Unknown
  Bacterial polypeptide expressing nucleotide sequence isolated from the Sargasso Sea
aaaaaagattttcatattcatgttcctgaaggcgcaacaccaaaagatggcccatctgctggaatcgcgatggtcacttcaattgtatcatcaataactaagataccggtaagaagggatttggctatgacgggagaagtaacgataacgggacaagttttacctattggtggattgaaagaaaaactattagcggctcatagagctggaatcaaagaagttttaattccaaaagaaaatgaaaaagatttagcagatattcctaagaaagttaaagaagatattaaaattacctcagttgaaattgtagaagatgttttaaaaattgcacttactaaagaattgaaaagagtagagtgggtagaggtagagaaaatttcttctgaaaagaaaaaagacgaatctcaagcaagtattcaataaa

SEQ ID NO: 262539 - DNA, 844 bp, Unknown
  Bacterial polypeptide expressing nucleotide sequence isolated from the Sargasso Sea
cgccgtagagccgaaatcatgaagacaaccatcgaattgcctctcttgccgttgcgcgatgttgtggtctatccgcacatggtcattccgttattcgtcgggcgtgagaaatccattgaagcgcttgaagctgcaatgacgggcgagaagcagattctgcttctcgctcagagaaatcctgccgacgatgatccagatgaggctggcctctatcgggttggtacagtcgccaccgttttgcagttgctcaagcttccagacggcaccgtcaaggtactggtcgaaggcgagcagcgtggtgagattgagcgttttatcgaggtcgatggtcactgccgtgctgaagtgcagctgatcgacgaagttgatgccgcggagcgtgagtctgaggttttcacccgtagcttactgagccagtttgagcagtatgttcaactcggtaagaaagtacctgccgaggtgttggcatcgctgaacggcattgatgagccgagccgtctagtcgacaccatggcggcacacatggtgctgaagatcgagcagaagcaagaaattctggaaattaccgatctggctgctcgggttgagcatgttttggcgctgctggatgcggaaatcgacctgctgcaggttgagaagcgcattcgcggtcgggtcaagaagcaaatggagcgtagccagcgcgagtactacctgaatgagcagatgaaggccattcagaaagagcttggtgatagcgaagaaggccacaatgaacttgatgagctgagaaagcgcatcgataacgccggcctcacagctgaagcgctgaacaaagccaatgcggagctcaacaagctcaagc

SEQ ID NO: 262540 - DNA, 784 bp, Unknown
  Bacterial polypeptide expressing nucleotide sequence isolated from the Sargasso Sea
ttagtagagggattgcaacgtgcctctattaacatgtttgctgacaaagaaacttatcttgagtcaaatatcgatttaattgaagaaaatatagacacgacggataaaaaaattagagcgcaatctaaatcaattactgagtcgtttgataaatatgtaagcttaaataaaaaaattcctccagaagtaataggaacaataaatgagattgatgacctatccaagttaagcgatacaattgcatctcacttgtcgatcaagctttctgataaacaaggaatattagaggcaatagatctatcagatcgttttgataagattatgaattttattcaagcagaacttgatgtaatgcaagttgaaaagaagatcagaggcagagttaaaaaccaaatggagaaaactcaacgagagtattatttgaatgagcaaatgaaagcgatccagaaagaacttggtgaaggtgaggatggcaaggacgatgttcaagaatatgaagaaaaaattgagacaacaaaattgtcaaaagaggctcgtgagaaatgttacgctgagatgaaaaaattgaagtcgatgagtccgatgtcggctgaatcaagtgtaatacgtaattaccttgattggatcttatccataccttggaacaaaaagacaaaagttaaaaaagatataaattttgcagaaaaagttctaaatgaagatcattatggcttagaaaaagtaaaagaaaggattcttgaatatttagcagttcagcaaagaattaaaaaaagaaagggccaat

SEQ ID NO: 262541 - DNA, 755 bp, Unknown
  Bacterial polypeptide expressing nucleotide sequence isolated from the Sargasso Sea
gatggaagtaaaaattacacaacctttgttgccccttagagatatagttgtttttcctagcatggtcattccattgtttgtaggaagagataaatcaataactgcactcaatgaagtaatgaagggtaataaaaagataattcttacaacacaaaaaaattcagaagtagatgaccccaaaaaaaacgatatcttttcctatggttgcgagagtaatatattacaattattaaaattaccagatggaactgttaaagttctagtagaaggcaccaaaagagttaagattatagactttaaagacgacgaaaaatttatttcttgtacatttgaatacttaaaagaaatttcagtcaaagaagaagatcttttgccattagcattaacagctgtaaggagattagaaaagcttacatctataaacaaaaaaattacatcagaaactataaataatattaaacaactcaaagatccatctaaaattgctgataatattgcatcacacttaaactgtactatttctgaaaaacaacaaatatttgagactttggatattaaaaaaagattaaatagcattattaaaattatggaaaatgaaacaagtataattggagttgaaaaaagaattagaggaagagtaaaaaaccaaatggaaaaaactcaaagagaatactatttaaatgaacagttaaaagcaatccaaaaagaacttggtgaaattgaagatggaaaagatgaaactacaaatttaaaga

SEQ ID NO: 262542 - DNA, 908 bp, Unknown
  Bacterial polypeptide expressing nucleotide sequence isolated from the Sargasso Sea
agacaatatccctcctgcactttatgatcgtatggaaatgattgattttagaggatatattgatgatgaaaaagtacagattgcaaaaaaacatttaattcctaaacagattaaagaaaatggacttacttcaaaacaagtcaagttcaatgatacaggaattaaggaaattatttcgtcatacactagagaatctggtgtaagaagcttggaaagagagatttctaatgtacttcgtaaagtcgcagtagatgtagtgaataaaaaacttaagacagctagtatttctaaaaaatctgtaaatgagtatcttggaattccaaaatttcaatcagatttagcagaaagaaccacaaaacctggtgttgtcaccggaatggcatggacagctgctggtggagatatattatttatcgaatccagtaaaatgaaaggtaagggtgttttaaccttaactggtcagctaggagatgtaatgaaagagtctgcatctgctgcattcacatatgtaaaatcacatactgatattttgaatttaacagatgattttgctgataaaatggatattcatgttcactgtcctgctggtgcaattcctaaggatggtccatcagctggtgttggaatgtttacatctcttgtttcacttctaactaataaaccagttaaaagtaaagtagctatgacaggtgagattactttaagggggaatgtactagctatcggtggagtaaaagaaaaagtaacagctgctcacagatccggtattaaaacaattatccttcctcatgcaaataaaagagatcttgaagaaattccagaacatataaaaaaagatttatcttttcactttgctaaagaagtgatggatgtaattgatgtagcaatccctaatttgaaaaagtagt

SEQ ID NO: 262543 - DNA, 745 bp, Unknown
  Bacterial polypeptide expressing nucleotide sequence isolated from the Sargasso Sea
aagaaaagttgttaaaaaagttgtaaataatgaagaaaagagtgttgaggttaatgaaagaaatatacctgactttcttggtatcaagaaatttaaatttggtgaactagaagcaaatgataaagttggaatagttataggtttagcttggacagaatttgggggtgaaatattaaaagttgaaacagttaatatgccaggcaaaggcagaatgcaaataactggtaagttaggtgatgtgatgcaagagtctgtaaaagctgcaaaatcatatgttagatctaaatgtttggaatttggtgtaacaccacctttgtttgagaaaaaagattttcatatacatgttccagaaggcgcaacaccaaaagatggtccttcagcaggtattgctatggtaacatcaatagtatcctcaattactaaagtcccagttaaaaaagaaattgcaatgacaggtgaagtaacaatcacaggccaggttttaccaattggcggattaaaagaaaaattattagcagctcatagagctggtgttaaaaaagttttgatacctaaagagaatgaaaaagatctagttgacgtaccaaaaaaagtcaaagatgatataaaaattgttcctgttgaaacagctgatgaagttattaaaattgctttaacaaaagagctaaagccaacagaatggtctgaagtagaaaaaataacagataccaaaaaggacgataaatcccaggcaagtattcaatag

SEQ ID NO: 262544 - DNA, 622 bp, Unknown
  Bacterial polypeptide expressing nucleotide sequence isolated from the Sargasso Sea
agttggaattgtaactggattggctggaccgaaattggaggagaaatattaaaaattgaaactgttaacatgcctggaaaaggaagaatgcaaattacagggaaacttggtgatgttatgcaagagtcagtgaaggcggccaaatcctatgtaaggtcaaaaagtttagattttggtattattcctcctatttttgaaaaaaaagattttcatatccatgtacctgaaggtgcaacacctaaagatggaccttctgcaggaatagctatggttacttcaatagtttcatcaataactaaaattcctgttcgtagagatatagcaatgactggggaagtaacaattacaggtcaagttttgccaattggtggattaaaagaaaagttacttgcagctcatagagcaggaattaaagaggtattaattcctaaagataatgaaaaggatctagtagatattccaaagaaagttaaagaagacattaagcttactacagtagaaatagtagatgatgttcttaaaattgcattaacaaaagaactaaaaagaatagaatgggttgaggttgataaattatccgatggaaaaaaagatgataaatctcaagctagtattcagtaat

SEQ ID NO: 262545 - DNA, 595 bp, Unknown
  Bacterial polypeptide expressing nucleotide sequence isolated from the Sargasso Sea
gactgatgataaaattggtattgttgtcgggcttgcttggacagagtatggtggggagatacttaaaattgaaacagtaactatgcctggtaaaggtagaatgcaaattacaggtaagcttggagatgtaatgcaagagtctgttaaagctgcaaaatcttttgttagatctaaatgtcttgaatatgggattattcctcctttatttgagaaaaaagattttcacattcatgttcctgaaggtgccactcctaaagatggtccatcagcgggtgttggaatggttacgtctattgtatcttcaattacaaatatcccggttagaaaagatttagcaatgactggcgaagttactttaacaggtcaggttttgcaaattggtggattaaaagaaaaattattagcagcacatagagctggaattaaagaagttttaataccaaaagaaaatgaaaaagatcttgtggatatgccaaaaaaaataatggacgatattaaaatcactccagtagaacatgcagatcaagtaattaaaatagctttaacaaaagaattaaaacccactgaatgggctgaagtagacatatctaaaagt

SEQ ID NO: 262546 - DNA, 495 bp, Unknown
  Bacterial polypeptide expressing nucleotide sequence isolated from the Sargasso Sea
ccgttaaagcagcgaaatcttttgtaagatctaaaagccttgaatatggaataatacctccgatctttgaaaagaaagattttcatattcatgttcctgaaggagctacacccaaagacggaccatcagctggtgttgctatggtaacatctatagtttcttctattactaaaatacctgtaaacagagaaatagctatgactggcgaagtaactgttacaggtcaagttcttccaattggaggcttgaaagaaaaacttttagccgcgcatagagctggaattaaaacagtacttatacccaaagataatgaaaaagatctagttgaaattccaaaaaaagttaaagaagatattaaactaatacctgtagaaacagcagatcaagttataaaaatagctctaacaaaagagttaaaaaaagttgaatggaatgatgttgaaaacatttcaaaaagcaaaagagacgaaaaaactcaagctagcatccagtaac

SEQ ID NO: 262547 - DNA, 878 bp, Unknown
  Bacterial polypeptide expressing nucleotide sequence isolated from the Sargasso Sea
ggccccactttttgtaggtcgtaaaccatctataaacgccttaaataaagctatggaagaagataaaaaaatattgttaatcactcaaaaaaactctgatgtagatattccaaattctgaagatttgtatactttcggaactttagcaaaagttttacaactattaaaattacctgatggaactattaaagtattggtagaaggccttgaaagagtaaagataaaaaatattaacagtacaagtgattatatactatcttcgtataccgttatttctaacaatgaaaaaactacctctaagattaaagctcttgttaaaataataattgaacaattcgaatcttatcaaaaaataaataaaaaaatttcctctgatgttcttagtaatattagaacttttaataattttaacaaactcgctgatgttgtaattgcaaatttaaatgtagatatttctcaaaaacaagaattattagaatctgttgaattagaaaagagattagataaagtttacggatatttagtttcagaacttgatactcttcaagtagaaaaaaagattaaaggaagagttaaacgacaaatggaaaaaactcaaaaagaatattatttgaatgaacaaatgaaagcaattcagaaagagcttggagataatgatgatattgatgacatcaaagaaattgagaaaaaaattcaagaaatcaagttgtctaaagaagcaaaggacaaatgtcatgctgaattaaaaaaactaaaaaatatgagtcctatgtcagcagaagcaactgttattagaaattatttagattgggtgttaagcataccttggaataatccttcaacaatatcaaaaaatataaataaatctaaagcaatat

SEQ ID NO: 262548 - DNA, 703 bp, Unknown
  Bacterial polypeptide expressing nucleotide sequence isolated from the Sargasso Sea
atggatgtaaaattatcgttaccgttattaccattaagagatattgtggttttcccaagtatggttattcctttatttgttggaagggacaagtctatcacagcacttaacgaggtaatgaaaaaagataaaaaaattattttagttactcaaaaaaattcggaaattgatgatccaaagaaaacagatgtgtttatgtatggatgtgaaggaagtattttacaactgttaaaattaccagatggtacagtaaaagttttagtggaaggtacaaaaagagtaaaaatcttagattttaaggataatgaaaaatttattacttgtgattatacatactaccatgatgtattaacaaaagatgaggacttatttccattagctgctacggctttaagaagattagaaaaacttacttcaattaataaaaaaatctcaagtgaaactattaatacagtaaagcaattaaaagacccttctcaaatagctgataatattgcatctcatataacaactactatttcagaaaaacaacaaatatttgaaactgttgatgtgaagaaaagattaaacgctataattaaaataatggagaatgagacaagtattattggtgtagagaaaaagataagaggaagagttaaaactcaaatggaaaaaactcaaagggagtattatcttaacgagcaattaaaagcaatccaaa

SEQ ID NO: 262549 - DNA, 760 bp, Unknown
  Bacterial polypeptide expressing nucleotide sequence isolated from the Sargasso Sea
tgaaagtgataaggatatacaagcattaagaagaacgatgatttcgcaggtagagagttatgtgcgaataaccaaaaaagtcccagctgaagtagtgaatacgcttgcaagtatcaaagaaagtggaagattggtagataccatagtggcccatatgtcattgaagcttgatgagaagcagaagatcctggaacaaatcaatatcaaagagagacttgagtatgtcattggcctgatagaagttgaaatagacatgattgaagttgagcagaaagtcagaggtcgtgtcaaagatcagatggaaaagagccagaaagaatactatttaaacgaacagatgaaagcgattcaaaaagagcttggtgatttagataatgccaataatgaatttgatgaacttgaagagaagattaagcaatcaggaatgacaaaagaggctgatgaaaaagcatcatcagaactcaaaaaacttcagatgatgtctcccatgtcagcagaagcaactgtggttagaaactttcttgatgttttggtttctgcaccatggaaaaagaaaacaaaagcgaaagtatcattggaccaggcacatgaaattctagatgaggatcattacggactaaaaacggttaaggaaaggattattgagtatctagctgtccaaaaaagagtgaaaaaactcaaagggcctatactctgtttggtgggtcctccaggagtcggaaaaacctcattgggtgcaagtattgcaagagcgactggc

SEQ ID NO: 262550 - DNA, 532 bp, Unknown
  Bacterial polypeptide expressing nucleotide sequence isolated from the Sargasso Sea
gatggcatggactgctgctggtggagatatattattcattgaatctagtaaaatgaaaggtaaaggtgttttaaccttaacgggtcagcttggagaagtaatgaaagaatctgcatcagctgcatttacatatgtaaaatcgcacactgatattttaaatctaaaagatgactttgctgataaaatggatattcatgttcattgtccagctggagcaattccaaaagatggaccatcagcaggtgttggaatgtttacttctcttgtctcattattaactaataagccggttaaaagtaaagtagctatgacaggtgaaattactttgagaggaaatgtattagcaattggtggagtgaaagaaaaagtaactgctgctcacagagctggtattaaaacaattattttgcctcatgcaaataaaagagatcttgaagaaatacctgaacacattaaaaaagatttgtcatttcattttgcaaaagaactgatggatgtaattgacgtagcaatccctaatcttaaaaaatag

SEQ ID NO: 262551 - DNA, 424 bp, Unknown
  Bacterial polypeptide expressing nucleotide sequence isolated from the Sargasso Sea
cttatttgagaaaaaagattttcatatacatgttcctgaaggtgcaacaccaaaagatggcccttcagctggtattggaatggtaacttcaatagtttcctcaataacaaacattccagttaaaagagatgttgcaatgactggcgaggtaactttaactggacaagtgttgcctataggtggtcttaaagaaaaattaattgcagcacatagagctggtattaagcaagtgttaattccaaaagagaatgaaaaagatttagttgatatgccaaaaaaaattattgatgaaatcaagatcatacctgttgagtatgcagatgaagttttgaaaattgcattaacaaaagagctcaaaaagacggaatgggttgaggttgatatttctaaaaaagacgataaatctcaagccagtattcaataa

SEQ ID NO: 262552 - DNA, 112 bp, Unknown
  Bacterial polypeptide expressing nucleotide sequence isolated from the Sargasso Sea
aatgtctttaggtggtgttagagatgaagctgaaatacgaggtcatagaagaacatacattgggatctttaccaggaaaaattattcaaatgatgaaaaaagctggaactaa

SEQ ID NO: 262553 - DNA, 522 bp, Unknown
  Bacterial polypeptide expressing nucleotide sequence isolated from the Sargasso Sea
gtaagttaggtgatgtcatgcaagagtctgtgaaagctgcaaaatcttatgttagatcaaaatgtttagaatttggtgtaacaccaccactatttgaaaaaaaagattttcatatacatgttccagaaggtgcaacaccaaaagatggtccttcagcaggtatagctatggttacttcaatagtttcttcaattacgaaagttccagttaagagagaaattgctatgactggagaggtaacaattacaggtcaagttttacctattggtggacttaaagaaaaactattagcagctcatagggctggtgttaaaaaagttttgatacctaaagagaatgaaaaagatttagtcgatgtaccaaaaaaagtgaaagatgatattgaaatagttccagtagaaactgctgatgaagtaattaaaatagctttaactaaagaattgaagcctactgaatggactgaagtagataaattaacagaaactaaaaaagacgataaatctcaagctagtattcagtaat

SEQ ID NO: 262554 - DNA, 993 bp, Unknown
  Bacterial polypeptide expressing nucleotide sequence isolated from the Sargasso Sea
gctatagcgcgacccaaaggagacatagatgtcagacggagcgatgatcaccctcccgtccttacctcttcgcgatattgtcgtgtccccgcacatgatcgtgccgtgttcgtcggccgcgaaaagtcgatccgcgcgttggaggctgtgatggccgaggacaagcagatcatcctcgtgacccagaaggaagccgataccgaggacccaaacgctgactgtctttacaccatcggtacgctcggatcgatcttgcaactgctgaaattgccagacggcgccgtgaaggtgcttgttgagggtggcgagcgcgtagtgatcgaccagcagtcgctgaactcgaacgacggttttcttgctgtcgacgcggaaatcctcgagcagaaggggtacctgggtgctgacaccgaaggcttggcgcgcgccgctgtgcagcagttcgaccagtatataaaattcaacaagaaggtcgcatctgaagttcttagcgcgatcgagcaggtcactgaggccgataagatcgccgacatgattgcatcgcatttggctataaatattgaagaaaaacaagatcttctgcaacacttagacatccataagcggcttgagcgcattttccaactcatggaagaggagatcggcgccctgcaggtagaaaagcgtgtccgtaaccgcgtcaagcggcagatggagaagacgcagcgcgagtattatctcaacgagcagatgaaagccattcagaaggaactcggtgacggcgaagacggccgcggggagttggaagagctatcggcccagcttgaagaggcgaagatgccgcgagccgcccgtgaaaaggcggatgccgaactgcgcaagcttaagaacatgggcccaatgagcgctgaggcgaccgtcgtccgcaactatctcgactggatacttgccgttccatggcagaaatctagccggctgaagaaagacatcattaaggcacgagaaattcttgacgcc

SEQ ID NO: 262555 - DNA, 829 bp, Unknown
  Bacterial polypeptide expressing nucleotide sequence isolated from the Sargasso Sea
atgaatttgccattacttccattaagagacatagttgtatttccaagtatggtcatacctcttttcgttggaagagataaatcaataaatgcactaaatgatgtaatgacatcagaaaaaaaaatattattggtaactcaaaaaaattccgaagtagatgatcctaaaagaaatgatatatttaattatggatgtgaaagcagaatactccaattattaaagttgcctgatgggacggttaaagttttagtcgaaggtgtaaaaagagctaaaattttagattttgcagaaaatgataaatttattaaatgtgattatgaaattcaaaaagatgaaattaacaaagatgaagatctgacatcattagctactatcgcagttagaagattagaaaaattaacttcaataaataaaaaagtttcttcagaaactgtaaatactattaaagatttaaaagacgtatcatcaattgcagaccatatagcatcccatttaaatatgactatttctgaaaaacaacaaatttttgaaacatttaatgtcaaaaaaagattggacgcagttataaaagttatggaaaatgaaacaagtattattggagttgaaaaaagaattaggggtagagtcaaaaaccaaatggagaaaacacaaagagagtattatttaaatgagcaattaaaagctattcaaaaagaacttggtgaaatcgaagatggaaaagacgaaagtactaatcttaaaaaatctattttaaaatcaaaaatgccaaaagaagtagaaaaaaaatgtttgtcagaattaaaaaaattaaaaaacatgagcccaatgt

SEQ ID NO: 262556 - DNA, 327 bp, Unknown
  Bacterial polypeptide expressing nucleotide sequence isolated from the Sargasso Sea
ctgttaagcggagtgtcgctatgactggtgaaataactttgcgaggacgcgttttgccgataggaggtttgaaggaaaaacttttggcggcgcttcggggtgggttatctacggttttaataccgaaagaaaatgaaaaagacttggcagagatacctgacaacgtaaaaagtggattaaatataataccagtcagtgttgtagacgaggtgatttccaatgcattaacgaccgaacctgttccggtagatattgatgaagaggaaacagatcaggcgctggcaaaaaacgaagagggcagcaggaacgagattgtgaagcattgaa

SEQ ID NO: 262557 - DNA, 799 bp, Unknown
  Bacterial polypeptide expressing nucleotide sequence isolated from the Sargasso Sea
agaagacgaaaaaattaatattgcaaacaaatttttacttccaaaacaaattaaagaaaatggtgtaaaagatggtgaactagaattacttgatggcacaataaaagaaataataagaagctacacaagagaatcaggagtaagaaatctagaaagagaaatatctaaagtaacaagaaaagttgtaaaaaaagttgtaaataatgaggaaaaaaaggtaaagataaatcaaaataatttaaatgattttttgggtattaaaaaatttaaatatggtgaacttgaatcaaaagataaaattggtgttgttataggacttgcttggacagaatttggaggagaaattctaaaaattgaaacagtaaacatgcatggaaaaggtaagatgcaaattaccggtaaactaggcgaagtaatgcaggaatcagttaaagcagctaaatcatttgtgagatcaaaaagtttagattatggcataataccaccattatttgaaaaaaaagacttccacattcatgttccggaaggcgcaactcctaaagatggaccgtctgcaggcattgcaatggttacctctattgtatcttctattacaaaaatacctgttaatagaaaaattgctatgacaggagaggttacagtaacaggacaagttttaccgataggagggttaaaagaaaagctgcttgcagcacacagagctggaatagaacatgtattaattccaaaagataatgagaaagatttagctgatgttccaaaaaaagtaaaagaagatataaaagttacacctatagaa

SEQ ID NO: 262558 - DNA, 880 bp, Unknown
  Bacterial polypeptide expressing nucleotide sequence isolated from the Sargasso Sea
tctgccgaaggaagtgatcgaggttatcggtgaagagctctctgaatacgtcggccagcccacatttgtcaacgagcggctttacgaatccccccctccgggggttgtcatgggcttggcctggacttccctaggggggagtacgctatttgtcgagaccaccggtcgactgtccttggctgcactgcgcttcggaaaagagaatgctcccggggggagcacaaaacatgacggcgacgaccaggcccttggaggagatgggagcgatgggaggggtagcggccgaggttccggctctctgaaagtgacgggacaattgggaaatgtcatgagcgaatccagcgctatcgcgctctcctttgctcggcagtttctacgaacggtggatccgcatgaagatttcttggaggttgccgacttgcacatgcacgtgccggagggtgccacgccgaaggacggcccctcggcagggatcaccatgactacgtctcttctttccttggcctctggccagcctgtgcctcctgagtttgcgatgacaggagagctcacactgactgggaaggtgatacgagttggagggatcaaagagaaaaccatcgcggccaagcgagacggggtggaatctttgatcttcccaagacaaaacgagtccgactataaggaactcaagccatacctccgggcagggctcacggcgcatttcgtggaccactatgcagacgtctataggctaatctggggggagcccgaacatctgtgcgtcgggcagcatactactcctttttctttcccgagctggcctgcagagcgcatcactacagttcataccccggccgaagatctagaaccaggtacggccattgcagtggaaggatag

SEQ ID NO: 262559 - DNA, 856 bp, Unknown
  Bacterial polypeptide expressing nucleotide sequence isolated from the Sargasso Sea
gtaaaagagggcgaactaaatttagaagatgggacaataaaagagataattagaagttacacaagagaatctggtgttagaaatttagaaagagaaatctctaaagtaacaagaaaagttgttaaaaaagtagtaagtggtgaagttgaaaaagttcatgtgaacgataaaaatattccagactttttaggaattaaaaaattcaaattcggtgaagtagaagataaagataaaactggaattgtaatagggctagcgtggactgaggtaggaggagaaattcttaaaatcgaaactgtcaatatgccaggtaaaggtagaatgcaaattacaggtaaacttggtgatgttatgcaagaatctgttaaagcagctaaatcatatgtaagatcaaaaagtttagaatatggaataataccgcctttttttgaaaaaaaagattttcatattcatgttccagaaggagcaacgcctaaagatggtccatcagctggtattgctatggttacatcaattgtctcatcaattacaaatatacctgtcaacaaagaggtcgcaatgacaggtgaagtaactatcacaggacaagttttacaaataggaggcttgaaagaaaaattattagctgctcatagagcaggagttaaaaaagtattgatccctaaagaaaatgaaaaagatttagtagacattccaaaaaaggtaagagaagacattaaaatcattccagtagaaacagcagatgaagtgcttaaaattgcccttacaaaagagctaaaacctgtggaatggactgaagttgacaaaatatctgagggtaaaaaagacgataaatctcaagctagtattcagtaat

SEQ ID NO: 262560 - DNA, 838 bp, Unknown
  Bacterial polypeptide expressing nucleotide sequence isolated from the Sargasso Sea
ccaaaaaaaatcatccacagaagatcctgatcttaaagatttatataaaactggaactttaggaaatattcttcaattacttaagcttcctgacggaacagttaaagttttagttgagggcaaatcaaggtgtgtaattaaaaagcttgttaaatccgattcccatttgtcagctatcgtaaattttataaaaaacgacgattactctaaagaaggttcccttcatgtagtaaataaattggctactacatttgagcaatatgtaaaattaaatgggaaaattaactctgaagttttgtcaacagtgtctgaaattacagatgctagtttattaacagacacaattatcaatcatttgtttctagatattaaagaaaaacaaactttccttgaaatgaccaacaccattgaaagagttgaaaaattaacaattaaaattgataccgaaataggattattagataccgaaaggaaagttagaggccgtgttaaaaaacaaatggaaaaaactcaacgagaatactacctaaatgaacaattaaaagctatccagaaagaattaggttcatccgaagatggtaaaaatgaatttgatgaaatcgaagataaaattagattaggtaaattaacaaaagaagctaaggacaaagctttttctgagttaaaaaaactaaaaaacatgagccccatgagtgctgaagcaacagtggttcgttcttatatagattggttagttacaattccttggactaagattaacaaagttaagtcagatatatctaatgcaagaaaaattcttgataatgatcactatggattagaaaaagtaaaagatagg

SEQ ID NO: 262561 - DNA, 439 bp, Unknown
  Bacterial polypeptide expressing nucleotide sequence isolated from the Sargasso Sea
acctcctatttttgaaaagaaagattttcatatacacgttcctgaaggtgcaattccaaaagatggaccttcagcaggtattgctatggtaacttcaataatttctgctgtaacagaaattccagtgaataaagatgttgctatgactggagaaataactcttagaggaatagttcttcctattggtggactaaaagagaaattattagcagctcacagagcaggaatcaaaaaggttttaattccatttgaaaaccaaaaagatttaattgaaattccttctgttattaaagaaaatattgaaattattcccgttaagaacgtagatgaagttcttaagatcgcactaactaaaaatttaaaaagagtagagtgggttgaagttgaacaaatttcaaagaaaaataatcaaaagacatctacaacaagaagacattaa

SEQ ID NO: 262562 - DNA, 475 bp, Unknown
  Bacterial polypeptide expressing nucleotide sequence isolated from the Sargasso Sea
tgcaaatctttcgtaagatcaaaatgtttagagtatggaataataccccccatttttgaaaagaaagattttcatattcatgttcctgaaggagcaacaccaaaagatgggccatcagctggtattggaatggtaacctcaattgtttcatcaatcacaaacattcctgtaagaagagatgttgctatgaccggtgaagtaactttaacagggcaagtattaccaattggtggtttgaaagaaaaattattagcagcacacagagctggaataaaagaagttttaattcctaaagagaatgaaaaagatctagttgatatgcctaagaaaattatagatgatataaaaattaccccagtagaatttgctgatcaggttataaaaatagctttgacaaaagaacttaaaccaactgagtgggttgaggtcgatatgtctaaaaaagacgataaatctcaagctagtattcaataat

SEQ ID NO: 262563 - DNA, 326 bp, Unknown
  Bacterial polypeptide expressing nucleotide sequence isolated from the Sargasso Sea
taaaaaagatgtagcgatgactggtgaaattactttgcgtggaagagtcttgccaattggtggattaaaagaaaaaatgtacgcagcagttagagcaggaataaagacagtgctaattcctcaagagaactataatgagcttgaagaatttgataaagatgtaataaaagcattaaaaattattccagttagcgatgctacttcaattctcaagcatacacttacaaaatcggtaatacctctaaatttaagcgaatcagatattttgagagctcaaaaaagcgcatttcagtcagaaaatgttaatgaaaaaataacccattaat

SEQ ID NO: 262564 - DNA, 725 bp, Unknown
  Bacterial polypeptide expressing nucleotide sequence isolated from the Sargasso Sea
tatggacgtaaaaacttcttcaccattattaccactcagagatattgtggtttttcctagcatggtaattccactttttgttggaagagataaatcaatctcagctttaaatgaggtgatgaaaaaagagaaaaaaattattttagtaactcaaaaaaattctgaaatcgatgatcctaagaaaacagatatatttatgtatggatgtgaaggtagcattttacaacttctaaaactcccagacggaacagtaaaagttttagttgagggtgtacgtagagtaaaaattattgattttaaagataatgaaaagtttataacttgtgactttacacctcacaatgatttgatcgatggtgatgaagatttgtatccattagctgtaacagcaatcagacgaatggaaaaattaacctctataaataaaaaagtttctggtgaaactattaatacaattaaacaattaaaagacccatctcagattgcagataatattgcttcacacatcacagctacaatttcagagaaacaacaaatttttgagactattgatgtaaagaaaagattaaatgcaatcataaaaataatggaaaatgaaacaagcattattggagtggaaaaaagaattagaggaagggttaaaacccaaatggaaaaaactcaaagagagtactatttaaatgaacaattaaaagctatccaaaaagagttaggtgaaattgagg

SEQ ID NO: 262565 - DNA, 525 bp, Unknown
  Bacterial polypeptide expressing nucleotide sequence isolated from the Sargasso Sea
gaaaattagaaaaactaacctcagttaataaaaaaatttcttcagagacaattagtaatattaaacagttaaaagaaccttcaaaaattgctgataatattgcagctcacttaaattgcacaatttcagaaaaacaacaaatatttgaaactttagatgttaaaaaaagattaaacagcatcattaaaataatggaaaacgaaaccagcatcattggagtagaaaaaagaataagaggaagagttaaaacacaaatggaaaaaactcaaagagaatactacttaaatgaacaacttaaggctattcaaaaagaattgggagaaattgaagatggaaaagatgaaacttcaaatttaaacaaatcaatattaaaagccaagatgccaaaagaggttcagaaaaaatgcttatctgaattaaaaaaattaaaaaacatgagtccaatgtcagcagaagcaacagtagtaaggaattacttagactggatgattgatgttccgtggtataaaaaagataaacgttgat

SEQ ID NO: 262566 - DNA, 850 bp, Unknown
  Bacterial polypeptide expressing nucleotide sequence isolated from the Sargasso Sea
ggatatagtagtatttccaggaatggttgcgcctttatttgttggcagaaaacaatcagttaatgctctcaataatgtgatgactatggataaaaaaatattactaattactcaaaaagactctgaagtcgataatcctaattttgataacttgtataaatatggaacaatagcaaaggttcttcaacttttaaaattaccagatggcaccattaaagttttagttgagggcatagaaagagctaaattaaattcaattgatattaataaagattatttaattgcaaacataagattagaaaataaaaaaacaaaaattaattcaaagattaaagctttaacaaaagtggttattgagcaatttgaggaatacgtaaaagttaataaaaaactatcttctgatctaaacaataatttaaaaactataaacgatccaaataaattatcagatttagtttctgttaacttgagtatttcactggaacaaaagcaagaacttttagaattactaagtctggaagagcgtttggacaaaatctattcttatcttgtaagtgagatagattcatttcaagttgaaaaaaaaataaagggcagagttaagcgtcaaatggaaaaaactcaaaaagaatattatttaaatgagcagatgaaagctattcaaaaagagctgggtgaaaatgaagaaattgatgaaatttcagaaatagaaaagaaaattgaagatttaaaattatcaaaagaggctaaagaaaaatgtaaatctgaaattaaaaaattaaaaaatatgagtccaatgtcagctgaagcaacggttatcagaaactatttagactggattctttcaata

SEQ ID NO: 262567 - DNA, 870 bp, Unknown
  Bacterial polypeptide expressing nucleotide sequence isolated from the Sargasso Sea
taaaagagaacggtgtgaaagaaggtgaactaaatttagaagatgggacaataaaagagataattagaagttacacaagagagtcaggtgttagaaatttagaaagagaaatttctaaagtaacaagaaaagttgttaaaaaagtagtaagtggcgaagttgaaaaggttcaagtaaatgataaaaatataccagattttttaggaattaaaaaatttaaatttggtgaagttgaagataaaaataaaactggaatagtaataggattggcgtggaccgaagttggaggagaaattcttaaaatcgaaacagttaatatgccaggtaaaggtagaatgcaaataactggaaaacttggtgatgtaatgcaagagtctgttaaagctgccaaatcatatgtcagatcaaaaagtttagaatatggaataattccacctttctttgaaaaaaaagattttcatatccatgttcctgaaggagctacacctaaagatggaccatcagctggtatagctatggtcacatccatagtgtcatcaattacaaacatccctgttgatagagagatagctatgaccggtgaagtaacaatcacaggacaggttttacaaataggtggtttgaaggaaaaattattagccgctcatagagcgggtgttaaaaaagtgttaatccctaaagaaaacgaaaaagatttagtagatattccaaaaaaggtaagagaggacattaaaattatacctgttgaaacagcagatgaagtgcttaaaattgcccttacaaaagagctaaaacctgtagaatggactgaagttgataaaatatctgagggtaaaaaggacgataaatctcaagctagtattcagtaat

SEQ ID NO: 262568 - DNA, 743 bp, Unknown
  Bacterial polypeptide expressing nucleotide sequence isolated from the Sargasso Sea
catggacgtcaaaatttcattaccgttgttaccactaagagatattgtggtttttccaagtatggttatccctttgtttgtaggaagagataaatctatttcagctctaaacgaagtgatgaaaaaagaaaaaaaaattattcttgttactcaaaaaaattcagaaattgatgatccaaaaaaaacagatgtttttatgtatggttgtgagggaagtattttacaattattaaaattacctgatggtacagtaaaagttttggttgaaggtatcaaaagagtaaaaattctagattttaaagacaatgaaaaatttataacttgtgattatgctcattatcaagatattttgcctaaagatgaagatttgtttcctttagcttctacagctttaagaagattagaaaaattaacttctataaataaaaaaatttctagtgaaacaattaatacaattaagcaattaaaagaaccttctcagattgctgacaatattgcttctcacataactgctactatctcagaaaaacaacaaatttttgaaactgtagatgtaaagaaaagattaaatgccattattaagataatggaaaatgaaacgagcattattggtgttgaaaaaagaataagaggtagggttaaaactcaaatggaaaaaactcaaagagagtattatttaaatgagcaattaaaggctatcaaaaaggaacttggagagattgaagacggcaaggatgaaaaac

SEQ ID NO: 262569 - DNA, 706 bp, Unknown
  Bacterial polypeptide expressing nucleotide sequence isolated from the Sargasso Sea
atggacgttagaacatcattaccattacttccacttagggacatagtagtctttcccagtatggttacaccacttttcgtaggaagagataaatcaatatcagctttgaatgaggtgatgaaaaaagataaaaaaattattttagttactcaaaaaaattcagaaattgatgatccaaaaaaaacagatatttttatgtatggttgtgaaggcaatatacttcaacttcttaaattaccagatggtactgtaaaggtcttaatagaaggagttaaaagagttaaaatattagattttaaagataatgaaaaatttattagttgtgattttactgctcataacgatgtaattaataaagaagaagatttatatcctttagcagctactgcagttagaagattagagaagcttacatcaataaataaaaaaatttcaaatgaaacaataaacaatattaaacaattaaaagatccttctcaaattgcagataatatagcatcacatatagcagctacaatttctgaaaaacaacaaatttttgagacagcagatgttaaaaaaagattaaatgcaataatcaaaattatggaaaatgaaacaagtattattggagttgaaaaaagaattcgtggcagagttaaaactcaaatggaaaaaactcaaagagaatattatttaaatgaacaattaaaagctattcaaaaag

SEQ ID NO: 262570 - DNA, 757 bp, Unknown
  Bacterial polypeptide expressing nucleotide sequence isolated from the Sargasso Sea
tcaaaaagatgctggtgatgataatcctgttgaagaaagtatgtacaagattggagttttagctaacgttctgcaagttctgaaacttccagatggcgctgtaaaaatcttgattgaaggcaagcagagagtcgagataactgaattgatagacaaacgaaagtttttcgaggccgtttacaaagagcttccagagaacgacgagccaggagaagagttagaagggttaaaaagggcagtaacgcaagattttgatcgttattcaagacttaataaaaatatttctgaagaatctttgacggctattaaaaaggcagaggaccccaaaaagttatcggatactatagctgggcacttaaccctaactgttgagaaaaaacaagaattgctggaaacaacggaggtcgcaaaacgactggaaaagattttagaaattatacaatcagaacttagtgttttgagagtagaaaaaaagataaagacccgagtaaaaaatcagatggagaagacacagagggagtattatctgaacgaacaaatgaaggcaattcaaaaagagttaggggacaactcggagggtccagatgaaattgctgaaattaaagaaaagatagagaaagttaagcttagcaaagaagcaagagaaaaagctgttggagagttaaagaagctaaaatcaatgtcaccaatgtcagcggagtcagcagttgttagaaattatcttgattggcttctttctattccatggaagaaaaaa

SEQ ID NO: 262571 - DNA, 789 bp, Unknown
  Bacterial polypeptide expressing nucleotide sequence isolated from the Sargasso Sea
tatgaataaaaattctttttctccgtcattaccattaagagatatagtagtttttccaggcatgatcgtgcctttatttgttggccgtgataagtcaataaaagcattaaacgaagtaatgaagtcgaataaaaaaataattttggttacacaaaaaaatgctgaaatagatgaccctgtagaagaggatctttattcctacggttgtgaaagtaaagtattacaactattaaagttacctgatggaactgtgaaagttcttgttgaaggtatagatagagtaaagattatagaatgcaaaaatgaaaaagaatttttggtaaccactacagaagttgtgaaagacaaaattgattcaaaagaagatttgttagctctttcaatagctatagttagaaaattagaaaaactgacaaatttaaacaaaaaaatttcctcagaattatttactagtctaaaggaacaaaaaaatccaacaaaaattgcggaccacattgctgggcaattaaatatatcaatttttgataagcaaaaattattagaaatgattgatttaaaatcgagactagaaaaaattatggaacatataaataacgaaataaatgttattagtgtagaaaaaagaataagaggaagagttaaaaatcaaatggaaaaaacccaaagagagtattatttaaacgaacaaatgaaggctatccaaaaagaacttggggaaattgaagacggaaaagatgaaatagcacaattacatagagcaataattaaagcgaaaatgaccaaggaagc

SEQ ID NO: 262572 - DNA, 832 bp, Unknown
  Bacterial polypeptide expressing nucleotide sequence isolated from the Sargasso Sea
tatgaatgtaaaaatgactctcccactattgccattaagagatatagtagtatttccgagtatggttatacctttatttgttggcagagataaatctatttctgcacttcatgaggtaatgaaaaaagataaaaaaattatacttgttacccaaaaaaattctgagattgacgatccaaaaaataccgatgtatttatgtatggatgtgaaggaaatattttacaacttctaaaactacccgatggaacagttaaagttttagttgaaggttttaaaagagtaaaattactagatttcaaagacaatgagaaatttatttcatgtgaatacactcatcaaaatgatgaactagaaaaaaatgaagatttaatgccattagctctaaccgcagttaaaagactcgaaaaacttacattagtaaataaaaaaatttctaacgaaactattcacaacataaaagagttaaaagatccttctaaaattgcagataatattggttctcatttaaattcaacaatatctgaaaaacaacaaatttttgaaacattcaatgtaaaaaaaagactaaacgcagttattaaaataatggaaaatgaaactagtataattggagtggaaaaaagaataagaggaagagtaaaaactcaaatggagaaaacacaaagagagtattatttaaacgaacaacttaaagctatacaaaaagaattaggggaaatcgaagatggtaaagacgaaacttctagtttacaaaaatctatcttaaaagcaaaaatgcctaaagatgttcaaaaaaaatgcatgtctgaacttaaaaaactaaaaaatatg

SEQ ID NO: 262573 - DNA, 731 bp, Unknown
  Bacterial polypeptide expressing nucleotide sequence isolated from the Sargasso Sea
ggtaaaaattacaaagtttattgatgatgaaaaatttataaactgcagttacgagagtgttgctgaaataattaataaagaagaagatctaatgccattagcaatgactgctattaggagattagagaaacttacatcagtaaataaaaaaatttcaagtgaaactataaataatattaaacaattaaaagatagttctaaaatatcagatcatatcacatcacatttaagcatgatgataacagaaaagcaggaaatatttgaaacacttgatgttaaaaaaagattaaatgctgttattaaagttatggaaaatgaagctagcattattggtgtagagaaaagaataagaggcagagtaaaaactcaaatggaaaaaactcaaagagaatattacttaaacgaacagcttaaagctatacaaaaagaactaggtgaaattgaggatggaaaagatgaaacttcaaatttaaataaggcaattttaaaagcaaaaatgcctaaagatgttcaaaaaaaatgcatgtctgaacttaaaaaattaaaaaatatgagtccgatgtctgctgaagcaactgtggtaagaaattatttagactggatgattgacttaccttggcaaaaaaaagatcaagtttctatagatttaaaaaaatcaagatcagttttagatgaggatcactttggattagaaaaagttaaagagagaataatagaatttttagcggttc

SEQ ID NO: 262574 - DNA, 543 bp, Unknown
  Bacterial polypeptide expressing nucleotide sequence isolated from the Sargasso Sea
agggcagaatgcaaattactggtaaattaggtgatgttatgcaagagtcagttaaggctgcaaaatcatttgttagatcaaaaagtttggagtatggcattatacctcctacatttgaaaaaaaagattttcatattcatgttccagaaggtgcaacaccaaaagatggtccatcagcaggtattgctatggtgacctcgattgtctcatctattgtgaatattccagttgatagagaaatcgctatgacaggagaagttactgttacaggtcaagttttgccaataggtggattaaaagaaaaattgctagccgcacatagagcaggtgtaaaaaaagttttaatacctaaagagaatgaaaaagacttaattgatattcctaaaaaggttagagaagatattaaaattatacctgtagatagcgcagatgaagttttaaaaatagctttaacaaaagagcttaagcgtgtcgaatggacagaagtagaaaaaatatctgactcaaaaaaagacgaaaaatctcaagccagcattcagtaat

SEQ ID NO: 262575 - DNA, 822 bp, Unknown
  Bacterial polypeptide expressing nucleotide sequence isolated from the Sargasso Sea
ccgggctgagaagattctaaatcaggatcactatgggatgcagaaagtgaaaacccgaatcttagaatttattgggattagtaagctcagaaaaagcaccaaaggcgcaatcctctgtttcgtcggtcctccaggagtaggaaaaacatctcttggacgttccatcgccagggctttggggcgggaattctatcgattctcagttggcggcctgaccgatgaatctgaactgaaaggacatcgaagaacctacattggagctatgccgggacgcttcattaaggctctaaaatcagtcaagacgggaaatccggtgatcctcctggatgaattggacaagatggggcaaagctaccgtggcgatccgctctcggtcttactcgaggtgctagaccctgaacagaatcgtgagttcatggaccattaccttgatcttcaatacgatctttccaatgtactcttcattgccacagcaaatgtgctggatacgattccacccgcattaaaagaccgtttagaaatcatcaatctttcgggttacatcagtgaagaaaaaatccagatcggtaccaaatatctgattcccaaagttttagaagaatctggtttaaacaaggaacagtttcgacttcctaaaaaatccttggagaaactgattcaggaatacacacgggaaaccggagtccgtggactggaaaaacaattgaaagcgctcagccgtggtgtcgcccttaaggttgcaaagggagaaaaatcttcaaaaaccgtcacacctggggatcttaaatcattgctcggccctgctctcttcccgaaagatgc

SEQ ID NO: 262576 - DNA, 832 bp, Unknown
  Bacterial polypeptide expressing nucleotide sequence isolated from the Sargasso Sea
aatgagcaaaaatgatttttttccatctctacctttaagagatatagttgtttttcctagtatgatagtgcctttgtttgttgggagagataaatcaataaaagcattaaatgaagttatgaaaactaataaaaagatagtattagttacacaaaaaaatgctgaagtagacgaccctgcatctgaagatttatttaaatttggatgtgaaagtaaaattttacaacttttaaaattacctgatggaactgtaaaggttttagttgaaggaattgatagaattaaaattttagaaacaaaaaatgaaaaaaattatttgacaagttcaattgaaattgtcaaagataaaattgaatctaaagaagatcttacagcttatgcgctggctctagttagaaaattagaaaaattaactaatttaaataaaaaaatttctttagagttaatggcaagtttaaaagatcaaaaagaaccaagtaaaatagccgacagtattgcatcgcaacttaatatttcaattaatgataaacaaaaattacttgaaactttagatttaaaattaagattagataaaataatggaacatattgataacgaaattaacgtaataagtgttgagaaaaggatacgcggaagagttaaaaatcaaatggaaaaaactcaaagagagtattatttaaacgaacaactaaaagcgatacaaagagaattaggagaaattgaagacggcaaagacgaggttacacatttacataaatcaattataaaagctaaaatgacaaaagaagccacaaaaaaatgtctttctgagttaaaaagcttaaatctatga

SEQ ID NO: 262577 - DNA, 787 bp, Unknown
  Bacterial polypeptide expressing nucleotide sequence isolated from the Sargasso Sea
actgcctttaagagacatagtagtatttccacatatggtaattccactatttgttggaagagacaaatctattactgctttaaacgaagttatgaaaaaagacaaaaaaattgtcttagtaactcaaaaaaactcagaagtagacgacccaaaaaaaaacgatatttttaattatgggtgtgaaagcagcattctacaattactaaaattacctgatggtacagtaaaagttttagtagaaggtatatcaagagtaaagataaatgaatttcaagataatagtaattttctgtcgtgttcttatgaaaagcttaatgaaataattaataaagatgaagatttaatgcccttagctcttaattctataaaaaaattagaaaaacttacgtcaattaataagaaaatttctaatgaaacaataaataatattaagcttttaaaagatccatcaaaaatttcagataatatagcatcacacttgaatgccacaatttctgaaaaacaacaagtttttgaaactctagacttaaaaaaaagattaaatctaattaataaaattatggataatgaaactagtattattggagttgaaaaaagaatacgaggaagagttaaaactcaaatggaaaaaacacaaagagaatattatttaaatgaacaacttaaggctattcagaaggaattgggtgaaatagaggacggtaaagacgaaacatcaagtttaaataaagctattctcagatcaaaaatgccaaaagaagtagagaagaaatgtatgtcagaataa

SEQ ID NO: 262578 - DNA, 665 bp, Unknown
  Bacterial polypeptide expressing nucleotide sequence isolated from the Sargasso Sea
tgaagagttagaacttgcagatggaacaataaaagaaataataagaagttatacaagagaatctggtgttagaaatttagaaagagagatatcaaaagttgcaagaaaagtagttaaaaaagtagttagcggcgaagaaaaaaaagtatcaataaattataaaaatgtacatgactttttaggagtaaaaaaattcaaatatggtgaagtggagtcagaagataaagttggtatagtcactggtcttgcttggacagagtttggtggagaaattttgaaaatagaaactgttcacatgcctggtaaaggaagaatgcaaataacaggaaaattaggtgatgtgatgcaagagtctgtaaaagcagccaaatcttttgttagatcaaaaagtttagaatatggaattatacctccaacttttgaaaaaaaagactttcatattcatgtacctgaaggtgcaactccaaaagatggcccttcagcaggaatcgcgatggttacgtcaattgtgtcttcaattaccaataatcctgtctttaaacatattgcaatgactggtgaggttacgattacaggtcaagtattaccaattggaggattaaaagaaaaattattagctgcacatagagctgggataaaactaagttgtaataccaaaagataat

SEQ ID NO: 262579 - DNA, 772 bp, Unknown
  Bacterial polypeptide expressing nucleotide sequence isolated from the Sargasso Sea
tcttgaagagaatttcaaaattacgagaaaagttgttaaaaaagtagtcaataatcaggatacaaaagtacttgtaaatcctaataatattaatgattttttaggtgttaaaaaattcaaatacggagaagttgagtcagaaaataaagttggaatcgtgacaggcttagcttggactgaatttggtggtgaaattttaaaaatcgaaacggttaatatgcctggtaaaggtagaatgcaaattacagggaaactaggcgatgtaatgcaagagtctgttaaagctgcaaaatcatttgttagatcaaaaagtttggagtatggaattattcctccaatttttgagaaaaaagattttcatattcacgttcctgaaggagccacaccaaaagatggaccgtctgctggtatagcaatggtgacttcaatagtatcatcagtaacaaacaatccagttaatagagaaattgcgatgactggcgaggttacaattacagggcaagttttgcctattggtggactgaaagaaaaattattagctgctcatagagctggaataaaacatgttttaataccaaaagataatgaaaaagatttaacagatattccagaaaaggttaaaagtgatatcaagatcacacctgtaaaacatgcagatgaagtactaaaaattgctcttataaaagatctaaaacgagcggagtgggttgaagtacaagatataactgaatctaaaaaagaagacgattcgaagaaaattcttgcaaattaa

SEQ ID NO: 262580 - DNA, 737 bp, Unknown
  Bacterial polypeptide expressing nucleotide sequence isolated from the Sargasso Sea
aagagatatcgttgtatttccaagtatggttgtacccttgtttgttggcagagataagtcaattaatgcattaaaccatgttatgacatcagagaaaaaaattcttttagttacccagaaaaactctgaaactgacgaccctaagagaaacgatatttttaattatggatgtgaaagtagaattttacaattgttaaagttaccagatggaactgtaaaagttttagttgaaggagtaaaaagagttaaaatattggaatatactgaaaacgataaatttataaaatgtgactatgaaattcaaaaagacgaatttaacaaagacgaagatttaacttcattatcatcagttgcagtgaggagattggaaaaattaacttctgtaaataaaaaagtatcaactgaaacgataaataatattaaagatttaaaagactcatcatcaattgcagatcatatagcatcacatttaaatatgacaatctcagaaaagcagcaaatatttgaaacttttaatattaaaaagagattagatgccgtgattaaggtaatggaaaatgaaactagcattataggtgtagaaaaaagaattagaggaagagtaaaaaatcaaatggagaagactcaaagagagtattatttgaatgaacaattaaaagccattcaaaaagagcttggagaaatcgaagatggtaaagatgaaagtacaaatttaagaaaatcaattttaaaatcaa

SEQ ID NO: 262581 - DNA, 714 bp, Unknown
  Bacterial polypeptide expressing nucleotide sequence isolated from the Sargasso Sea
tccaaagttagagtcagcctaattgcagaatcatctattgatgcaaaggatgggagaaatctagcaatatttattaaatctaaatttcatgactacataaaaattacaaagaaaattgcccctgaggttttagcatctatcgatgctttagatgatctctcacgaataatagattctattgctggacaactgccgattgaaataaaacaaaaacaagaaatattagaagccgtagactttcaactcagagcagaaattcttattgcctttatcgaatcacaactggatgtcatggatgttgataagagaattcgtaatagagttaaaggacagatggaaaagtctcaacgagaatattatcttaatgagcaaattaaagccgctcaaaaagaattaggtgatatcagcgaagagggagatgaaatatcccagttagaagaggatattgcaaaggctggtatgtctaaggaagcactgaaaaaagccaataatgagttttccaaatttaaacagatgtcaccaatgtcggctgaggcttctgtggttcgctcttatttagactggcttacttcaattccatggaaaaaaaagagtaaagtaaaatccaatctaacatcagctactaaaatattaaatgaagaccactttggcttagatgaagttaaagagagaatacttgaatatcttgctgttcaacaaagagttaaaaagtta

SEQ ID NO: 262582 - DNA, 841 bp, Unknown
  Bacterial polypeptide expressing nucleotide sequence isolated from the Sargasso Sea
gcgcttgaagcggctatggacgcggataagcaaataatgttagtggctcagaaatcggcaagtgacgatgatcccgcgtgctcggacatatacgaaatcggaacgatagctaatatactccagcttttaaaacttcccgacggaacggtaaaagtgcttgtggaaggcgttcagcggggacgagtagaaaattatctagagacagaggcactatttgtagctaacgtgcaggaaatagaaaatgagtcagtagacgagcgggagggtgaggtgttgagcaaaacactgatgacccattttgaccaatacgtaaaactaaataaaaaagttcctcccgaaataatatcttcactctccagtatagatgaaacatctaggctagctgacacaatcgccgctcatatggcgatcaagattgaagaaaaacaagaggttcttgagacgttcctgatcagggagcgcctagaacgcttaataactttcatggcctcggaaatagatttattgcaggtggaaaaaaggttgcgcggtcgtgtaaaaaaacagatggagaaaagtcagcgtgagtattacctaaatgaacagatgaaagccatacaaaatgagctaggtgaaagcgaggacggcgcaaacgagtttgacgagttagccggacgaatcgaacaatctggtatggccaaggaggctcgcgaaaaagctgaaagcgaactcaaaaaattaagaatgatgtccccgatgtcggctgaagcgacagttgtaaggaactatattgattggatgttatcggtgccttggaagaaaaggtcgcgggtaagcaaggatttaaataaggcggaggaaa

SEQ ID NO: 262583 - DNA, 559 bp, Unknown
  Bacterial polypeptide expressing nucleotide sequence isolated from the Sargasso Sea
aattgaaacagtaactatgcctggtaaaggtagaatgcaaattacaggtaagctcggtgatgtaatgcaagagtctgttaaagctgcaaaatcttttgttagatctaaatgtcttgaatatgggattattcctcctttatttgaaaagaaagattttcacattcatgttcctgaaggtgccactcctaaagatggtccatcagcgggtgtaggaatggttacttcaattgtatcttcaattacaaatattccagtaagaaaagatttggcaatgactggagaagttactttaacaggtcaggttttacaaattggtggattaaaagaaaaattattagcagcacatagagctgggattaaagaggttttaataccaaaagaaaatgaaaaagatcttgtggatatgccaaaaaaaataatggatgatattaaaatcactccagtagaacatgcagatcaagtaattaaaatagctttaacaaaagaattgaaacccactgaatgggttgaagtagacataactaaaaaagacgataaatcacaagctagtattcagtaa

SEQ ID NO: 262584 - DNA, 634 bp, Unknown
  Bacterial polypeptide expressing nucleotide sequence isolated from the Sargasso Sea
tacctgcttcgccgacagcgggaggagaatagtcttacagaagacgaacttcacatgcgagacgaggctattctgacgatagtgcagaattacacgcgtgaagctggggttcggcagcttgagcgtgaggttgggaaattcgcgcgtaaggtcgctagacgcattgctgggggtaaactcaaaagaattgacgcttcaccggctgacgttcgcgagattttgggtcgtccacgggtccatcccgaacggatggcagagcatgacacgctcggggtcgcaacggggatgttttacacacctatgggcggcgatatcatgttcgtggaggccagcgtgatgcccggcgaagggggttttgtgctaacgggccaacttggtgacgtgatgaaggagtctggccgagcagcactttcgttctccaaggcaaacgcaaaacatttggggattcctgaggacagcctgaatggtcatgaggtccatatccacgttcctgcgggggctatcccgaaagacggaccgtcggctggcatcacgatggcgactgcactcgtctcagccgtctcaggacgtaaggtgcgtcgagatgtagcgatgacgggtgagttaactctgacaggccgtgtacttccgatcg

SEQ ID NO: 262585 - DNA, 811 bp, Unknown
  Bacterial polypeptide expressing nucleotide sequence isolated from the Sargasso Sea
actcagagatatagtggtgtttccaagcatggttatacctttgtttgttggtagagataaatcaattacagctttaaatgaaacaatgaaacaaggtaaaaaaattatacttgttactcaaaaaaattcagaaatagatgaccctaaaaaaaatgatgtttttatgtatggttgtgaaagtaatattttgcagcttttaaaattaccagatggtactgttaaagttttagtcgaaggtaataaaagagttaaaatagttgactttaaagatgatgaaaaatttattacttgtagttttgaatatttagaggatcaaattgataaaaacgaagatttgatgcctttagcaacaactgctgttagaaggttagaaaaactaacatcaataaataaaaaaatttcaaatgaaagtattaacagtattaaagaattaaaagatccatcaaaaatagctgacaatattgcagcacacttaaatacaacaatttcagaaaaacaacaaatgtttgaaacagttgacgttaaaaaaagattaaacactattataaaaatcatggaaaatgaaactagcattattggtgttgaaaaaagaattagaggtagagttaaaactcagatggaaaaaacacaaagagaatattatttaaatgagcaactgaaagctatacagaaagaattgggtgaaattgaggacggtaaagatgaaacttcaaatttaaataaagctattcttaaagcaaaaatgccaaaagaagttcaaaaaaaatgtatgtccgaactaaaaaaattaagaaatatgagtcctaatgtc

SEQ ID NO: 262586 - DNA, 799 bp, Unknown
  Bacterial polypeptide expressing nucleotide sequence isolated from the Sargasso Sea
ataagaggctatacaaaagagtctggagtgagaaatttagagagagaaatttcaaaaatagctcgaaaagtagttaaaaaaatagttgccggtgaagaaaaggaagtaaatgttgatagcaaaaatttatcagattttcttggtgttgcaaaatttaattttggagaattagaggctgacaataaagttggtattgttgttggacttgcgtggacagagtatggtggagagatacttaaaattgaaacagtaaccatgcctggcaaaggaagaatgcaaattacaggtaaacttggcgatgtaatgcaagagtctgtaaaagcagcaaaatcttttgtgagatctaaatgtttagaatatggaattattcctcctgtatttgaaaagaaagattttcatattcacgtccctgaaggcgctacaccgaaagatggtccatcagctggagttggaatggttacatctatagtatcctcaattacaaatatcccagttagaaaagacttagcaatgacaggcgaagttactttaacaggtcaggttttacaaattggcggtttaaaagaaaaattattagcagcacatagagcaggaataaaagaagttttaataccaaaagaaaatgaaaaagatcttgttgatatgccaaaaaaaataatggatgatataaaaattactcctgtagaacatgctgatcaagtgattaagattgcattaacaaaagaactgaaacctactgaatgggttgaagttgaaatatcaaaaaaagaagataaatcacaagctagtattcaataaa

SEQ ID NO: 262587 - DNA, 824 bp, Unknown
  Bacterial polypeptide expressing nucleotide sequence isolated from the Sargasso Sea
tatgaatataaaatttttaccagttctacctctaagggatatagtagtttttccaggaatggttgcacctttatttgttggcagaaaacaatcagttaatgcccttaataatgtgatgactggtgataaaaaaatattattaattactcaaaaagattctgaggttgataaccctaattttgataatctatataaatacggcacaatagcaaaagttctgcaacttttaaaattacctgacggtacaattaaagttctagttgaaggtatagaaagggcaaagttaaattcgattgatatcactaaagatttcttaagtgcaaacataaaattggaaaataaaaaaactaaaattaattcaaaaattaaagctctaacaaaagtagttattgagcaatttgaagaatatgtaaaagttaataaaaaactttcatctgatcttaataataatttaaaatctataaatgatcctaataaattatcagatttagtttcagtaaatttaagtatatctttggcacaaaagcaagagcttttagaattgataaatctggaagaacgtcttgataaaatctatacttatctagtaagtgagatcgattcatttcaagttgaaaaaaagattaaaggcagagttaaacgtcaaatggaaaaaactcaaaaagaatactatttaaatgaacagatgaaagctattcaaaaagagcttggtgaaaacgaagatattgatgaaatttcagaaatagaaaataaaatcgaaaatataaaattatctaaagaggcaaaagaaaaatgtaaatcagagataaaaaaattaaaaaata

SEQ ID NO: 262588 - DNA, 948 bp, Unknown
  Bacterial polypeptide expressing nucleotide sequence isolated from the Sargasso Sea
tgtaaatgctcttaattcagttatgaatggtgataaaaaaatttttctactttctcaaaaaaattctgaagttgataatccaaccaaagataatttatatacttatggcactgttgcaaaagttttgcagttacttaaattacctgacggtacactaaaagtacttgtagagggtctttatcgtgctagagtatcaaaattatcatttaattctgattttactattgccaccattacagaaataaaagatggtaataaaaaatcctcaaaaatcaaagcattgcaaaaacttatcattgaacaatttgaagaatatcaaaaaatcaataagaaaatagcaattgatcttgtttcaaatattaagaatattactgatgcaaataaaattgtagatattattgtctcaaatataaatatttcattagaacaaaagcaagaaatattagaaatagaaaatttagaagaaagattaaataaaatttatagttatttagtatctgaaattgattcttttcaggttgaaaaaaaaattaaaggtagagtaaagcgacaaatggaaaaaactcaaaaggagtattatttaaatgaacaaatgaaagctattcaaaaagaacttggtgaaaatgaggaaattgatgaaataacagagttagagaaaaaaataaatgattataaattaactaaagaagctaaagaaaaatgtaaatctgaacttaaaaaattaaagtctatgagtccaatgtcagctgaggcaacagtaataagaaattatttagattgggttttatcaatcccttggaataatccacaaactatctcaaaaaatataaatagtgcatcaaaaattttagaagccgatcattatgggctcgataaagttaaagatagaatattagaatatttagctgttcaaaaaagaatggataagttgagaggtccgattctttg

SEQ ID NO: 262589 - DNA, 418 bp, Unknown
  Bacterial polypeptide expressing nucleotide sequence isolated from the Sargasso Sea
agattttcatatccatgttccagaaggagctacacctaaagatggaccatcagctggtatagcaatggttacatccatagtatcatcaatcacaaacattcctgttaacagagagattgctatgactggtgaagtaacaattacaggacaagttttacaaattggtggtttaaaagaaaaattattagctgcacacagagcaggggttaaaaaagtattaatacctaaagaaaacgaaaaagacttagtagacattccaaaaaaggtaagagaagacattaaaatcattccagtagaaacagcagatgaagtgcttaaaattgcccttacaaaagagctaaaacctgtggaatggactgaagttgataaaatatctgagggtaaaaaggacgataaatctcaagctagtattcagtaa

SEQ ID NO: 262590 - DNA, 826 bp, Unknown
  Bacterial polypeptide expressing nucleotide sequence isolated from the Sargasso Sea
atgaactcaccagtattaccattaagaaatattgttgtttttccaaatatggttgttccactttttgttgggcgtgataaatctataaatgcccttgagcaagtaatggataaggatcaagagttattatttctttctcaaaaaaattctgaagtagatgacccctctgaaaaagatctattcaagataggaacaagaggaaaaattcttcagcttctgaagcttccagatgggacagttaaagttcttgtagaaggtttggccagatgcaaggtcaagaaaattgagtttacatcagattatatcactgccgatattgaagagtttgaaaatagcgaagtgatatctgacactattaaagctttaggtagatctgttgtttctaaatacgaaacttatgcaaatattaataataaaacttcttccgaagttttgacttctgtcaaagatattgaggatgaaaataaattagccgatactgttgccagtcaaattgcaattaatattcaagaaaaacaaaagattctcgaggagatagatcttgagaaaagattaaatatgattttgtcttacattgaaggtgaactatcagttcttcaagttgaaaaaaagattagaagaagagttaagaaccaaatggaaaagactcaaaaggaatattatctaaacgaacaaatgaaggctattcagaaagaattagaagatggcgaaggtggagcctcagaggatattgctgaattaacagagaaaattaataagactaaattatctaaagaagcagaagaaaaagcacataatgagttaaaaaaacttaaacaaatgagtc

SEQ ID NO: 262591 - DNA, 673 bp, Unknown
  Bacterial polypeptide expressing nucleotide sequence isolated from the Sargasso Sea
atgaacgttaagatgaatttaccattgcttcccttaagggatatagttgtatttccaagtatggttatacctttattcgttggcagagataagtccattaatgcattaaataatgtaatgacttcagataagaaaattttgctagttactcaaaaaaattcagaaattgacgatccaaaaagaaccgatgtatttaactacggatgcgagagtagaattttacaattattaaaattacctgatggtacagtaaaagtcttagtcgaaggtgttaaaagagcaaaaattttagattttatagaagaagataaatttattaaatgtgattatgaacttcaaaaagacgaagttagcaaagatgaagaattaatgtctttatcagcgattgcaattagaagattagaaaagctgacttcaataaataaaaaaattccatcagaaacattaaatagtataaaagatcttaaagatccatcatctatctctgaccacatagcttcacatttaaatatgacaatttcagaaaaacaacaaatttttgaaacttttaacgtaaaaaaaagattagattctataattaaagttatggaaaacgaaacaagcattattggcgttgaaaaaagaattagaggtagggttaaaaatcaaatggaaaaaacacaacgtgaatatt

SEQ ID NO: 262592 - DNA, 484 bp, Unknown
  Bacterial polypeptide expressing nucleotide sequence isolated from the Sargasso Sea
tatgaaagagtcagctactgctgctttaacatatgtacgatcacacactgatattttaggcataccagatgatttccatgaaaaaactgatattcatgtacatgttcctgcaggtgcaattccaaaagatgggccatctgctggtgtaagtatgttcacgtcaatagtttctttaatgacaggcaaacctgttaaagctaaagtagcaatgaccggagagattactctcaggggtaatgtattaccaattggaggagttaaagaaaaagtaacagctgcacatcgttcaggtattaaacatattattctacctgatcataataaaaaagatcttgaagatattcctgagcatatcaaaaaagatttaaatttttattttgcaaaagaaattatggatgttattgatgttgctatcccaggtttaaatggtcggaaaaaaagaacaccaagaaaaactacctcaaaagtaaaaaaagtgtcttaa

SEQ ID NO: 262593 - DNA, 560 bp, Unknown
  Bacterial polypeptide expressing nucleotide sequence isolated from the Sargasso Sea
tgtaaatatgccgggtaaaggaagaatgcaaattacaggaaagttaggtgatgtaatgcaagagtctgttaaagcagcaaaatcatacgtaagatcaaaaagtttagattttggtattataccacctatattcgagaaaaaagattttcatattcatgtgcctgaaggagcaacaccaaaagacggtccatctgctggtattggtatggtaacttcaatagtttcatctattacccaaatacctgttagacgagatattgctatgactggtgaggtaacaataacaggtcaggttttacctataggtgggttaaaagaaaaattactagcagctcatagagcaggaattaaacaagttttaatacccaaagaaaatgaaaaagatcttacagacattccaaaaaaagtaaaagaagatatcaaaattacatctgtagaatttgtagaagaggtattgaagattgccttaacaaaagaactcaaaagagtagagtgggtagaagttgaaaaaatttcatctgaaaagaaaaaagatgaaactcaagcaagtattcaataaa

SEQ ID NO: 262594 - DNA, 352 bp, Unknown
  Bacterial polypeptide expressing nucleotide sequence isolated from the Sargasso Sea
atgacgcagaacgcgccagcagcggaagccgccgctttccccgtgttgcccttgcgtgacatcgtggttttcccccacatgatcgttccgctgttcgtcggccgcgagaaatccattcgcgcgctggaagaagtgatgaacgccgatcgccagatcatgctcgtcacccagatcaatgccgccgacgacgatccggaacccgatgcgctttatcgcatcggcaccatcgccaatgtcctgcaattgctgaaactgcccgacggaaccgtcaaggttctggtcgagggcaagtcgcgtgcgcagatcgacgatatccgtcttgagaacgacttctacgaagccaatgccagcg

SEQ ID NO: 262595 - DNA, 823 bp, Unknown
  Bacterial polypeptide expressing nucleotide sequence isolated from the Sargasso Sea
atggaaattaaacattcattaccattattaccactaagagacatagtagtttttccaagcatggtaatacctttgtttgtcggtagagacaaatctattactgctctaaatgaagtaatgaaaaacaacaaaaagattatcttagttacacaaaaaaattctgaagtagatgatccaaaaaaaaatgatgtttttattcatggttgtgaaagttcaattcttcaactactcaaacttccagatggaactgtaaaagtattagttgaaggattaaaaagagttaaaattattgattttaaagatgaagaaaaatttatttcttgcacttatgaacataacaatgatttattatccgaaaatgaagatttaatgcctatggcaatgacagctataaggagattggagaaacttacatctataaataaaaaaatttcatccgaaacaattaataatattaaaggtcttaaagacccttcaaaaattgctgacaatattgcttcccatttaaactgtaccatatctgaaaaacaacaaatctttgaaacaacagatgttaaaaaaagattatcgggtgtgattaaaataatggaaaatgaaaccagtataataggtgttgaaaaaaggatcagaggcagagttaagactcaaatggaaaaaactcagagagaatattatctaaatgaacaattaaaagctatccaaaaggaattgggtgaaattgaagatggcaaagacgaaacatcaaatttaaataaagcaattcaaaaagctaaaatgccaaaagaagtgcaaaaaaaatgcatgtctgaattaaaaaaattaa

SEQ ID NO: 262596 - DNA, 663 bp, Unknown
  Bacterial polypeptide expressing nucleotide sequence isolated from the Sargasso Sea
aggtgcaaaaaggagagaaatcttcaaaaacggtcaaacctggggatctcaaatcattgctcggcccagctctcttcccgaaagatgccttcaaatcaccggaacatccaggcatagcccagggattggcttggactcccagcggaggttcgattttgaatatcgaggcaattgccctccagggagagaaggcagaattgaaactcaccggtcaactcggcgaaatcatgcaggaatcttcaaaaattgcccatagcctggtccgttccatcctgaacgaacaaaaggaccatcgcattggtttggatcaccccgtgcatttacatgtcccggaaggtgcaacacccaaagacggtccttctgcaggaatctccatggcaacggcaatccactccctggctcttaaaaaaacggtcaagaaagacttggcaatgactggagagttgacattgactggccaggtgcttcctgtcgggggaattcgagaaaaacttgttggtgcaagattggggggaataaaacaaatcatcctgccaagagccaacaaaccgcagtacgaggaacttccggattatataaaagaagacatacaaatagaatttgttgaacgatatgctgaagtcagcaatatcgccttgggaattaaaccggaagaaaagtaag

SEQ ID NO: 262597 - DNA, 550 bp, Unknown
  Bacterial polypeptide expressing nucleotide sequence isolated from the Sargasso Sea
ggtggtgatattttatttatagaatcaacaaggatggagggtaaagggaaactcacattgactggtcaactaggcgaagtcatgaaagaatcagctacagctggattaacttttgttcgagctcatgctagtacttttggtattaattctaattttaatgaagaaacagatattcatgttcatgttcctgctggtgctattccaaaagatggcccatctgctggagttagtatggtaacctcattagtttcactaatgacaaatactcccgtaaaagataaaatagcaatgacaggtgaaattacccttaggggaaatgttcttccaataggaggtgtaaaagaaaaagttactgctgcgcatagagcaggaattaaagaagtattattgcctgaattaaatcgtaaggatcttgaagatgttcctgagcatgtttcaaaagatttaacttttcattttgcaaaagaaatttgggatgtattaaaagttgctttacctatggttgctaaaaaaagaaataaaaaaaaatcagttaataataaaaaataga

SEQ ID NO: 262598 - DNA, 841 bp, Unknown
  Bacterial polypeptide expressing nucleotide sequence isolated from the Sargasso Sea
gaaactgtaatggaagaaaataaagaaatagttttacttacccaaaaaaaatcttcaattgaagatcctgattcaaaagacctatttaatatgggtactttaggaacaattttacaaatgcttaaattgccggatggaacggttaaagtattagttgaaggaaaatttaggtgcgagattaaagaaataatttctactgatgattatttaagtgcaaaattaaatgttttaaaaaaagatgtttcattagaaaataatcacgatgatatcaataatcatctcaaaaaatcttttgaaagattttccaaacttaacagtaaaattaactctgatgttttgtcaacaatatataatattgatagttcagatgttttatctgatactattgttaatcatttagttttttccattgatgaaaaacaatcttttcttgaaatgactgatgcagtcgagagagttaaaactttaactacaaaaattgagaaagagattgaaatacttagctctgagaggaaaattagaagtaacgtaaaaaaacagatggaaaaaacacaaagggagtattatttaaacgagcaactaaaggctatacaaaaagaacttggcacatctgatgatggcaaaaatgaatttgacgagtttgaagataaaattaataaagcaaaacttagtaaagaggctaaagaaaaagctttatcagaattaaaaaaactaagaaatatgggtccaatgagtgctgaagcaactgttgtcaggtcatatatcgattggttagtttctattccgtggaagaaaactaataaagttaaatctgatattgttaatgcaagaaaaatcttag

SEQ ID NO: 262599 - DNA, 525 bp, Unknown
  Bacterial polypeptide expressing nucleotide sequence isolated from the Sargasso Sea
tcaggaccaatgccaaccgcctagggatttattcttcggtattcaaggaaaccgatatccatgttcacgtcccggaaggagcggtaccaaaagacgggccttccgctggagtgacaataaccacttcgttggttagtgcttttacgggcatccctgtactccgtgaggtcgcaatgaccggcgaggtaaccctgcgtgggaaagttttaccgattggcgggttgaaagaaaaacttctcgctgccaaaaggggaatgatgaaaaccgtcctcattccagcaaaaaatgaaaaagatttgactgaagttccggaagaaataaaaaccgagcttcaaatcctctcagttgaaaatatggatacggttctggaaagagccttggaatgcgttcccatttccgtgagtgatcctgaggaagttaacaaggatgaaagaaaactttctgaggaagaatcgcttgtcccccaacaaaaagggaacctaaccgaacctccttttgaagttcctaattttccccagcactgag

SEQ ID NO: 262600 - DNA, 985 bp, Unknown
  Bacterial polypeptide expressing nucleotide sequence isolated from the Sargasso Sea
gtatgctatgtcaaccaataagcagattgttctagctgctcagaagaaagcaaagacaaatgatcctaaagaagaggatatttatcaagtagggactgtgtccacgattttacagctcctcagactacccgatggaacagtaaaagttcttgttgagggacaaagaaggaccaagattactcatttcttaaagcaagacaagtactatttagtggaggcttgtgattatagtgagtctataaataattcagtagaaaatgaagccttgattcgtacggtaaaatcatctttcgaaaattatgttcgtttgaataaacgaattccccctgaaatgttaatgtcgattgcacaagtagacagtgattctcgtttatctgatacgttagtttctcatttaacaaacttaaagattggtgaaaagcaagccttgctcgaacaaatggaccctggcaaacgccttgaaactatatatggttttattcaagcagaaattgaaattatgcgggtagagaaaaaaattcgtgctcgggtgaaaagacaaatggaaaaaactcaaaaagagtactatttgaatgagcagatggctgctattcaaaaagagttaggcgacaaagatgatttgcgtgctgaaattcaggaaatggaaaaaaagatcaaaacaaagaagctttcaaaggaggcttctgagagagttaaacaagaaatccgcaaacttaagatgatgtctcctatgtctgccgaggcaacagtcgttagaaactatatcgataccatcgtaaacttaccttggggggtttatacaaaagaacatatcgatattcagttagctgaagaaattttagatagggatcattttggattagaaaaggttaaagacagaatattagaatacctatctgtgaggcagcttgtaaaagaaatgaaaggtcctattctttgccttgtaggtcctccaggagttgggaaaaacttcttagcaaaaagc

SEQ ID NO: 262601 - DNA, 598 bp, Unknown
  Bacterial polypeptide expressing nucleotide sequence isolated from the Sargasso Sea
tggacagaattttggaggagaaatattaaaaatagaaacagttaatatgccaggaaaaggaagaatgcaaatcactggtaaattaggtgatgtgatgcaggaatctgtaaaagctgcaaaatcatatgtaagatctaaaagtttagaatatggaataattccacctatttttgaaaaaaaagattttcacattcatgtacctgaaggtgcaacaccaaaagatggaccttcagcaggtatagcaatggttacatcaatagtttcttctatcacaaacattcctgtagatagagaaattgctatgacaggtgaagtaacagttactggacaagtattacctataggtggattaaaagaaaaattattagcagcgcacagagctggtgtaaaaaaagttttaatacctaaagaaaatgaaaaagatttagtagatgttccaaaaaaagtaagagaagatattaaaattgtccctgttgaaagtgcagatgaagttttgaagatagcactaacaaaagaacttaaagctgttgaatggacagaagtagaaaaattatctgataataagaaagacgaaaaatctcaagctagcattcagtaa

SEQ ID NO: 262602 - DNA, 883 bp, Unknown
  Bacterial polypeptide expressing nucleotide sequence isolated from the Sargasso Sea
gtcgaaggtaacgaccgtgctcattttaagaaactaacacgcaagcaaggctgtgatatcgctcacgttgaggtgatagaggaccttgatgagcaagcggcagcgggtgaagatgcggtagagctcaaggccatgatgcgaacgttgctttctcaattcgaaggcttagtgaaagcaaataaaaaaattccaccagagttaatttcctctttttctaacatcaagcttccggggcgattggctgacggtatcgctgctcatctgacgatgagaatcgacatgcgacaagaaattttagaagcactggaaatcaccaagcgccttgagttgatgcaagacctattgtctcaagagttggagatggtggcggttgagaagcgcgtacatgaacgggtaaaggagtcggttgaaacctcacagcgtcaatattacttgactgaaaaaatcaaagcgattcaaaaagagttaatggaaacggatgattctggggaagcgatagatgaaattaatcagctagagcgtcagattgagaaggtaggtatgccaaaagatgccaaggaaaaggcaattgctgaattaaataaattaaagatgatgccgccgatgtcagctgaggcaacggtgtgccgcaattaccttgaggcaatgatacaggtgccttggaaaaagaaatcgagtgttaagcgcgagttgtcacaagcagaggcaattttagaagaagatcattatggtcttgaaaaggtcaaagagcgtataattgaatacctggcggtacaaaagcgggtgaagaaacttaaaggcccgatattgtgcttggttggaccgcctggggttggtaaaacgtctttgggtgtatcgatggccaatgccacaggaagaaagt

SEQ ID NO: 262603 - DNA, 361 bp, Unknown
  Bacterial polypeptide expressing nucleotide sequence isolated from the Sargasso Sea
tatgattgaaaataacattccagtcttgccattaagagacatagttgtttttcctcatatggtggttccattgtttgtaggtagagataagtcggttaaagcgctagaaaaagtcatggctggtgataaacgcatcatgctcatcactcaaaaaagtgcttcagtggatgacccaaaaaaagatgacctttttgactttggaacaattgcaaatgtattacagttattaaaattacctgacggtacagtcaaagtacttgtcgagggacttcaaagagcttcgattaacatgtttactgataatgaggattatcttgtttccaatattgatcttattgatgagaataatgatagctcagat

SEQ ID NO: 262604 - DNA, 344 bp, Unknown
  Bacterial polypeptide expressing nucleotide sequence isolated from the Sargasso Sea
tatgacacacgtaaatacagagtaccccgtactccctttgagagacatagtcgtatttccccacatgatagtgcctttatttgttggtcgcgaaaaatctattaaggcgctcgaagatgtgatgaatgatgataaacaaatcttgctgacgacccaaaagaatgctgcagacgatgatccggggaaaaacgatgtattttcttttggtactattggcaccgtgttgcagcttctgaagttgcccgacggaactgttaaagtattggttgagggagcttacagagcgaaaattacgagttttaccgaaaacgaagcgttttttgaggcttttgcagaaaaaattg

SEQ ID NO: 262605 - DNA, 607 bp, Unknown
  Bacterial polypeptide expressing nucleotide sequence isolated from the Sargasso Sea
tttggcttggaccgagtttggtggtgaaattcttaaaattgaaacggttcatatgcctggaaaaggtagaatgcagatcactggtaaattaggcgatgtaatgcaagaatccgctaaagctgcaaaatcttttgtaagatcaaaaagtttagattatggaataattcccccaacatttgaaaataaagattttcacatccatgtcccagaaggcgcaacaccaaaagatggaccttccgcaggaattgctatggtcgcttcaatagtttcttctataacaaatattccaattaatagagaaatagctatgactggtgaagttacaattacaggacaagttttacaaattggaggattaaaagaaaaattacttgccgcccatagagctggtataaaacatgttttgatacctaaagataacgaaaaagatttagttgatattccagaaaaagttaaaaatgacgtaaaagttactccggttaaacatgtagatgaagttttaaaaattgctttaactaaagaattaaaaaaaatagaatgggttgaagtccaaaatattactaaaactgaccaaaaaaaagactcagaaaaaatacttacaaattaa

SEQ ID NO: 262606 - DNA, 775 bp, Unknown
  Bacterial polypeptide expressing nucleotide sequence isolated from the Sargasso Sea
gaatttagaaagagaaatttctaaagttgctagaaaagttgtaaaaaagattgttgcgcatgaagaaactaaagtaaatgtaaatgaaaataacttatctggttttttaggagtaaaaaaacataagtttggtgaagctgaaactgaaaataaagttggaatagtaacaggtctagcttggacagaatttggtggagaaatattaaaaattgaaacagttaatatgccgggtaagggaaaaatgcaaataacgggtaaactaggtgacgttatgcaggaatcagttaaagcagcaaaatcttatgtaagatcaaaaagcttagagtatggaattatacctcctatttttgaaaagaaggattttcatattcatgttccagagggtgctacaccaaaagacggcccatcagcaggaattgcaatggtgacatcaatagtatcatcaataacaagcattcctgtgaatagagaaatagctatgacaggtgaagtaacagttactgggcaggtattaccaataggtggtttaaaagaaaagttacttgcagcacatagagcaggaattaaacaagttttaattccaaaagaaaatgaaaaagatttagtagatataccccaaaaagtaaaagatgatattaaaattactccagtagaaatggttgatgaagttttgaaaatagctttaacaaaagaatttaaaaaggtccagtggacagaaattgataacgttgcagattctaaacctgaagataaatcacaagcaattattcaatag

SEQ ID NO: 262607 - DNA, 754 bp, Unknown
  Bacterial polypeptide expressing nucleotide sequence isolated from the Sargasso Sea
aaaccacttttacctctaagagacatagttgtatttccaagtatggtaatccctctttttgttggtagagataaatctatcactgcattaaatgaagttatgaaaggtgataaaaaaattatactagtaactcaaaaagattctgaggttgacgatccaaaaaagaatgatatttttgcatatggttgcgaaagcaatattttacaattattaaaattacctgatggtacagtaaaagttcttgtagagggaatcaaaagagtaaaaataatagattttaaagatgatgaaaaatatatttcatgctcatatgaaaatctaaaagaaataatcgcaaaagaagaagacttgttgcctttagctttaacggcaataagaagattggaaaaactgacttcaataaataaaaaaatttcctcagaaacaattaacaatataaaacaattaaaagatccttcaaaaattgctgataatatagcatcacacttaaatgcttcaattttagaaaaacatcaaatctttgaaaccttggatgttaaaaaaagattaaatggtgttatcaaaattatggaaaacgaaacgagtattattggcgtagaaaaaagaattagaggtagagtcaagactcaaatggagaaaacacagagagagtattatttaaatgaacaattaaaagctatacaaaaagagctgggagaaattgaagatggaaaagacgaaactgctaacttaaaaaaatcaatacaaaaagcaa

SEQ ID NO: 262608 - DNA, 574 bp, Unknown
  Bacterial polypeptide expressing nucleotide sequence isolated from the Sargasso Sea
ggggagatactaaaaattgaaacagtaactatgcctggtaaaggtagaatgcaaattacaggtaagcttggtgatgtaatgcaagagtcagttaaagctgcaaaatcttttgttagatctaaatgtcttgaatatggaattattcctccattatttgagaagaaagattttcacattcatgtccctgaaggtgccactcctaaagatggtccatcagcaggtgttggaatggttacgtcaattgtatcttcaattacaaatatcccagtaagaaaagatttggcaatgactggagaagttactttaacaggtcaggttttacaaattggtggattaaaagaaaaattattagcagcacatagagctggaatcaaagaagttttaataccaaaagaaaatgaaaaggatcttgtggatatgccgaaaaaaataatggatgatattaaaatcactccagtagagcatgcagatcaagtaattaaaatagctttaacaaaagaattgaaacccactgaatgggttgaagtagacataactaaaaaagatgataaatcacaagctagtattcagtaat

SEQ ID NO: 262609 - DNA, 517 bp, Unknown
  Bacterial polypeptide expressing nucleotide sequence isolated from the Sargasso Sea
ggaggggaaaggaaagctcacactaactggtcaactaggtgatgttatgaaagaatcagctacagcagggttaacttttgttagagcccatgctaatacttttggcattgattctaattttaatgagaaaacagatatccatgttcatgtcccagctggagcgattccaaaagacggcccatctgctggagttagtatggtcacttctctagtttctctaatgacaaatactcctgtaaaagataaagtcgccatgacgggtgaaattaccctaaggggaaatgttcttccaataggaggtgtgaaagaaaaagttaccgctgcacatagggcaggaattaaagaagtaatattacctgagctcaatcgtaaagatttagaagatgttccgaaacatgtttcaaaagatttaaccttccattttgcaaaagaaatttgggacgttttaaaagttgctttgcctggaactgctaagaaaagaaacaaaaaacctgcagttaataataaaaagacttaa

SEQ ID NO: 262610 - DNA, 925 bp, Unknown
  Bacterial polypeptide expressing nucleotide sequence isolated from the Sargasso Sea
actctcatcacaaaaaagatctgatattgatgacccatcaattaaagatgttaacacggtcggcacacttgcaaatattttgcaactggtgacattgccagatgggacagttaagttgcttgtagagggtgtatcaagggttgatcttttggacatccgttcagatgaatattttaaggcagactattgcccactagatgagttcggtgatgaaagtgataaggatatacaagcattaagaagaacaatgatttcgcaggtagagagttatgtgcgaatgaccaaaaaagtcccagctgaagtagtgaatactcttgcaagtatcaaagaaagtggaagattggtagataccatagtggcccatatgtcattgaagcttgatgagaagcagaagatcctggaacaaatcaacatcaaagagaggcttgaatatgtcattggcctgatagaagttgaaatagacatgattgaagttgagcagaaagtgagaggtcgtgtcaaagatcaaatggagaagagccagaaagaatactatctaaatgaacagatgaaagcgattcaaaaggagctcggtgaccttgacaatgccaataatgaatttgatgaacttgaagaaaagattaagcaatcaggaatgacaaaagaggccgatgagaaagcatcatcagaactcaaaaaacttcaaatgatgtccccaatgtcagctgaagcaactgtggttaggaactttcttgatgtcttggtttctgcaccatggaaaaagaaaacaaaagcaaaagtatcattggaccaggcacatgaaattctagatgaggatcactatggactaaaaacggttaaggaaaggattatcgagtatctagctgttcaaaaaagagtgaaaaagctcaaagggcctatactctgtttggtgggtccaccaggg

SEQ ID NO: 262611 - DNA, 777 bp, Unknown
  Bacterial polypeptide expressing nucleotide sequence isolated from the Sargasso Sea
tggatgaaccacagaaaaaaatctccattacaccaaaaagagtcagggagtatcttggagttccaaaatataaacatggaaaggttgaggaaaaaaacgaaataggcatcacttccggactcgcatggacacaagccggcggagaactgctcaccactgaagtgaccgtcatgaaaggaaccgggaaagttcaactgaccgggaaattgggtgatgtaatgaaagaatcagctcacgcagcattgagttatgtcaggaccaatgccaaccgcctagggatttattcttcggtattcaaggaaaccgatatccatgttcatgtcccggaaggagcagtaccaaaggacggaccttcagctggagtgacaataaccacttcgttggtgagtgcttttacaggtatccctgtactccgtgaggtcgcaatgaccggcgaggtaaccctgcgtggtaaggttttaccgattggagggttgaaagaaaaactcctcgctgccaaaaggggaatgatgaaaaccgtcctcattccagcaaaaaatgaaaaagatttgactgaagttccggaagaaataaaaaccgagcttcaaatcctctcagttgaaaatatggatacggttctggaaagagccttggaatgcgttcccatttccgtgagtgatcccgaggatgataacaaggatgaaaggaaactatctgaggaagaatcacttgtccctcaacaaaaagggaacctaaccgaacctccttttgaagttcctaattttccccagcactgag

SEQ ID NO: 262612 - DNA, 858 bp, Unknown
  Bacterial polypeptide expressing nucleotide sequence isolated from the Sargasso Sea
gggcgggaattctatcgattctcagttggcgggctgaccgatgaatccgaactgaaaggacatcgaagaacctacattggcgctatgccgggtcgcttcattcaggctctaaaatcagtcaagacgggaaacccagtgatcctcctggatgaactggacaagatggggcaaagctatcgtggcgatccactctcagtcttgctcgaagtgttagacccggaacagaatcgtgagttcatggaccattaccttgatctgcactacgatctttccaatgtgctcttcattgccacagcaaatgtgctggatacgattccacccgcattaaaagaccgtttagaaatcatcaatctttcgggttacatcaatgaagaaaaaatccagatcggcaccaaatatctgattccaaaagtcttagaagattccgggttgaacaaggaacagtttcgacttcccaaaaaaactttggagaaactgattcaggaatacacacgggaaaccggagtccgtggactggaaaaacaactgaaagctctcagccgtgttgtcgccctgaaggttgcaaaaggagaaaaatcttcaaaaaccgtcacacccggggatctcaaatcattgctcggcccagctctcttcccgaaagatgccttcaaatccctggaacatccaggcatagcccagggattggcttggactccaagcggaggatcgattttgaacatcgaggcaattgccctccagggagagaaggcagaattgaaactcaccggtcaactcggcgaagtcatgcaggaatcttcaaaaattgcccatagcctggtccggtccatcctaaacggacaaaaggaccatcgcatcggt

SEQ ID NO: 262613 - DNA, 529 bp, Unknown
  Bacterial polypeptide expressing nucleotide sequence isolated from the Sargasso Sea
gataactggtaaacttggtgacgtaatgcaagagtctgtaaaagctgcaaaatcttttgtaagatctaaaagtcttgactatggaattatacctcctatttttgaaaaaaaagattttcatatccatgttccagagggagcaacaccaaaagatggtccatcagcaggtataggtatggttacatcaattgtttcatcaattaccaaaaatccagttgataaaaatatcgcaatgactggggaagtaactattacaggccaagttttacctataggtggattgaaagaaaaattattagctgcacacagagcaggcattaatcaagttataatacctaaagagaatgaaaaagatttaatagatataccaaaaaaagttagagaggatataaaaataactcctgtcgaaaatgtagatgaagtattaaaaattgcacttaaaaatgaactaaaaaaagttgaatggacagaagtagaaagtatttcaaaatcagaaaaagatcaaaaatctcaagcaagtattcagtaa

SEQ ID NO: 262614 - DNA, 428 bp, Unknown
  Bacterial polypeptide expressing nucleotide sequence isolated from the Sargasso Sea
cgcaaaaacagatttacacgttcatctacctgaaggagcaacacctaaggatggaccttccgctggactaccactaatcatggctataataagtagctttactaaaatttcagttaagcacaatgtaggcatgacaggtgaaattacattgcggggacatgtaactgagataggaagtttgaaagaaaaacttattgccgcaaagagaggtctcttggatacagtcctgattcccgatgaaaatcaaaaagatcttctcgatgttccagatgaaattaaaaaaggtttggaaataattattatcaaaaatgtaaaagaagcattgagattggcactggttactcatcctcaggacataaaagatcagcaaaaagatgtgaaagatatttcatggacaagggattctggttcacaggctaatgcatgaa

SEQ ID NO: 262615 - DNA, 712 bp, Unknown
  Bacterial polypeptide expressing nucleotide sequence isolated from the Sargasso Sea
tatggacgttaaaatatcatcacctttgttgccactaagagacattgtggtattcccgagcatggtcattccattatttgtaggtagagataaatcaattacagccttaaatgaggttatgaaaaaagataaaaaaattattttagttacacaaaaaaattctgaaattgatgacccaaaaaaaacagatgtatttatgtatggttgcgaaggaagtattttgcaattattaaaattaccagatggaactgtgaaagtattagtagaaggaattaaaagagttaagattttagattttaaagataacgagaaatttattatttgcgattatactcattttaatgatgttttaccaaaggatgaagatttatttccattagcagctacagcattgagaagattagaaaaacttacttcaattaataaaaaaatatcaaacgaaacaataaattctattaaacaattaaaagatccatctcagatagcagataatatagcctctcacataacagcaacgatatcagagaaacaacaaatctttgaaactgtagatgttaaaaaaagattaaatgccattataaaaataatggaaaatgaaactagtataataggcgtagagaaaagaattcgaggaagagtaaaaactcaaatggagaagactcaaagagaatattatttaaacgaacaattaaaagctatccaaaaagaatta

SEQ ID NO: 262616 - DNA, 490 bp, Unknown
  Bacterial polypeptide expressing nucleotide sequence isolated from the Sargasso Sea
atgtcgccagaaaacaaaaaaccactactacctctaagagatattgttatatttccttctgtagttgttccattatttgtgggacgtaaaaaatctattagagctctggaagaggttatgaaaactgacaaatcaatagttttagttgctcaaaaaaactctgaggtagatgacccacaggaaaaagatatattttcttatggttgtttaagtaagatattacaactgttaaagttaccagacggaacagtcaaagtattagttgaaggtttaagcagagctaagattaatgagattacagatgaaaataaaaaattcttaagttgtaagatagagaagattgaaaacgaaaaagaaaccgaagaaaataagctgtatgcactaaatctgattaagaaatttgaaaaactgtctagcataagcaaaaaagattcaatcgattttgttaaaactttgaagaacttaaaacaacctggtcagattgccgata

SEQ ID NO: 262617 - DNA, 683 bp, Unknown
  Bacterial polypeptide expressing nucleotide sequence isolated from the Sargasso Sea
tttaggtgattttttaggtgtcaaaaaatttaagtttggtgagctagaagaacaagataaaataggaattgtaacaggacttgcttggacagaatttggtggtgagattttaaaaattgaaactgtaaatatgccaggaaaagggcgtatgcaaattacaggaaaattaggtgacgtgatgcaagaatcagttaaagcagcaaaatcttttgttagatctaaatgtttagaatttggaattattccaccaacatttgagaagaaagattttcacattcacgtcccagaaggagccactccaaaagatggtccatctgctggtatagcaatggtaacatcaattgtttcgtcaattacaaagattcctgtaaaaagagaaattgcaatgactggcgaggttactatcactggtcaagttttaccaattggtggattaaaggagaaactgttagctgcacatagagctggaatcaaacaggttcttattccaaaagataatgagaaaaatttagttgatataccaaaaaaagttatcgatgatatcaaaataactcctgtcagttcagcagatgaggttttaaaaatagctcttacgaaagaactaaaacctactgactgggttgaagtagataaaatttccgataataaaaaatccgaaaaaacgcaagcaagtatacaataat

SEQ ID NO: 262618 - DNA, 805 bp, Unknown
  Bacterial polypeptide expressing nucleotide sequence isolated from the Sargasso Sea
tatggaagttaaacacaaatcacctcttttaccgttaagagatatagtagtattcccaggtattgtaattcctttatttgttggaagagacaaatctattacagctttaaatgaagtgatgaaagataataaaaaaattattttagtaacgcaaaaaaattcagaagtagacgatcccaaaaaaacagatgtttttatgtatggatgtgaaagttccatcttacaacttttaaagttaccagatggtaccgtgaaagttttggtagaaggattaaaaagagttaaaatcgtagattttaaagatgatgataaatttataacatgttcttatgaacattataacgatatatttgttgatgatgaagaattaatgccactagcaattaccgctgttagaagattagaaaaacttacttcaataaataaaaaaatttcttcagaaacaattacaaaaattaaagaactaaaagatccagcaaaaatcgctgataatatagcttcccatttaaatgtaactatctctgaaagacaacaaatttttgagacagttgatgttaaaaaaagattaaacagtgtaataaaaataatggagaatgaaaccagtataattggcgtagaaaaaaagattagaggtagagttaaaacacaaatggagaaaactcaaagagaatattatttgaacgaacaattaaaagctattcaaaaagaattaggtgaaattgaagatggaaaagatgaaacttcaaatttaaataaagctattcaaaaagcaaagatgccaaaagaagtgcaaaaaaatgcatgt

SEQ ID NO: 262619 - DNA, 686 bp, Unknown
  Bacterial polypeptide expressing nucleotide sequence isolated from the Sargasso Sea
tatggcaaaaaatctagttcctgttctaccacttagagatatagttgtttttccaaacatggttgcccctttatttgtaggaagagcacaatcagtaaatgctctcaatcatgtgatgacaggtgataaaaaaatttttttgctatctcaaaaaaattcaaaagttgataatccagacaaagaaaatctttattcatttggaactgttgcaaaaattatccaactattaaagcttccagatggcactctcaaggttttagtcgaaggcattcacagagcaaaagtcaataaaataaattttaataaagaatttattactgcatcaattactgagattaatcagaaagcaaaaaaaaattcaaacataaaagctttacaaaaacttatcattgaacaatttgttgagtttcaaaaaattaataaaaaagtttcacaggatgtaattaataatgtgaaaactattaacgatcctgataaaattgttgatataatagtatcaaatatttcaatttctttatctcaaaagcaagaaattttagagataataaacacagaagaaagactcaataaaatatatggttatttggtatctgaaattgactcttttcaagttgagaaaaaaataaaaggtcgtgtgaaaagacaaatggagaaaacacaaaaagaatattatttaaatgaacaaa

SEQ ID NO: 262620 - DNA, 748 bp, Unknown
  Bacterial polypeptide expressing nucleotide sequence isolated from the Sargasso Sea
ttatttgttggaagaaaaaaatctatcaaggcacttgaagaggttatgaaaacagataaatcaatagttttggttgctcaaaaaaattctgaagtagatgatcccaaagaagaagatatttattcttttggatgtttgagtaaaatattacaattgttgaaacttccagatggtacagtaaaagtattggtagaaggcttagagagagttaaagttaaatccttaaaaaaagaggaaaaaaaatatttaaattgtgagattgaggtagttccgtctactcaagataatcaaacaagcaaaactcttgcagcaaatttaatcaaaaaatttgaaaaattaactaatttgaacaaaaaagactctagcgactttgcgaaaaatctaaaaacacttaatagttcatccgaaatagctgataatatatgttctaatttaaaccttcaacttttcgaaaagcaacaactacttgaaatttctgatttaacgagaagattggaaaaaatttatgaagtaattgaaaaagaaacaagcgtaataactatggagaaaagaataagaggaagagtaaaaaatcagatggaaaaaactcaaagagaatattatttaaatgaacaattaaaagctattcagaaagaacttggggaaattgaagagggtaaagatgaaatatccaatctaagtaactcaatcgttaaagcaaaaatgacaaaagaagcccaaacaaaatgcttatctgagttaaaaaaat

SEQ ID NO: 262621 - DNA, 571 bp, Unknown
  Bacterial polypeptide expressing nucleotide sequence isolated from the Sargasso Sea
agaaattcttaaaattgaaactgttactatgcctggtaaaggaagaatgcaaataacaggaaaattaggagatgtgatgcaggaatctgttaaggctgcaaaatcatttgtaagatcaaaatgtttagaatatggaattattcctccattatttgaaaaaaaggattttcatattcatgtcccagaaggagcaactccaaaagatggaccatcggcaggtataggtatggtaacatccatcgtttcttcgataacgaatattcctgttagaaaagatattgcaatgacaggtgaagtaacattaacgggtcaagttttaccaatcggtggtttaaaagaaaaattattagctgctcatagggcaggtattaaagaagttttaattccaaaagaaaatgaaaaagatttagttgatatgccaaaaaaaattatcgacgaagtaaaaattacacctgttgaattcgctgatgaagttttaaaaattgctttaactaaagaacttaaaaagactgagtgggttgaagtagatctatcaaaaaaagacgacaaatctcaagctagtattcaataa

SEQ ID NO: 262622 - DNA, 754 bp, Unknown
  Bacterial polypeptide expressing nucleotide sequence isolated from the Sargasso Sea
tatggacgttaaaatctcactgccgttattgccattaagagatattgttgtgttcccaagtatggtgattccactttttgttggaagggataagtcaatatcagcattaaatgaagtaatgaaaaaagataaaaaaattatcttagttactcaaaaaaattctgaaatagatgatcctaaaaaaacagatgtttttatgtatggttgtgagggcaatattcttcagctattaaaattaccagatggaaccgtaaaggtattagttgaaggcatcaaaagaatcaaaattttagattttaaagataatgaaaaatttatcacatgtgactatacatatttcaacgatgtattgcctaaagatgaagatttattcccattagcatcaacagcattaagaagattagaaaaacttagttcaataaataaaaaaatatccaatgagacaataaacactatcaaacaattaaaagatccatctcaaatagctgataatatagcttctcacataaccgcaagtatttctgagaaacaacaaatttttgaaaccgtagacgttaaaaaaagattgaacgccataataaaaattatggagaatgaaactagtattataggtgttgaaaaaagaattagaggaagagttaaaactcaaatggaaaaaactcaaagagaatattatttaaatgaacaattgaaagcaattcaaaaagaattaggcgaaattgaagacggtaaagatgaaactacaagtttaaat

SEQ ID NO: 262623 - DNA, 479 bp, Unknown
  Bacterial polypeptide expressing nucleotide sequence isolated from the Sargasso Sea
ggttcatatgcctggaaaggacagaatgcaaatcactggaaaacttggagacgttatgcaagaatctgttaaagctgcaaaatcttttgtaagatcaaaaagtttagaatacggaataattccaccaacttttgaaaagaaagattttcatattcatgtaccagaaggagccacaccaaaagatggaccttcagcaggtgttgccatggtaacttcaattgtttcctcaataactaaaaatccagttgatagaaaagttgcaatgacaggagaagttacaattactggtcaagtattacaaatcggcggattaaaagaaaaattacttgcagcgcacagagctggaattcaacaagtaattatacctaaagataatgagaaggatttagttgatattccaaaaaaagttaaagaagatataaaaatcactccagttgaaacagtcgatgaagttttaaaaattgctctcacaaaatgag

SEQ ID NO: 262624 - DNA, 340 bp, Unknown
  Bacterial polypeptide expressing nucleotide sequence isolated from the Sargasso Sea
atggaaaacattttagattcgcaaacgctaccagttttacctcttcgggatattgttgtattcccacatatggtggtacctttatttgttggaagagacaaatcagtcaaggctcttgaacaagttatgggcaaagataagaaaattatgctcattacacaaaaaagagcatctgtcgatgatccaaaaaaagatgacctttttgaaattggaacggtagctaacgtattacaacttttaaagcttccagacggaactgtgaaagtattagttgaaggcataagccgggcgtcaattaatcagtattcaggcaatgaagaatatttagtagctgacattg

SEQ ID NO: 262625 - DNA, 697 bp, Unknown
  Bacterial polypeptide expressing nucleotide sequence isolated from the Sargasso Sea
agttaatgatggaaatattcatgattttttaggagttaaaaaattcaaatatggagaagttgaatctgaagataaaattggaatagttacgggattagcctggactgagtttggaggagaaatccttaaaatagaaactgttcatatgccaggcaaaggaagaatgcaaattacaggaaaattaggtgatgtaatgcaagagtcagttaaggctgcaaaatcttttgttagatcaaaaagcttagaatatggaattataccaccaatttttgaaaaaaaagattttcatattcatgtaccagagggtgcaacaccaaaagatggaccttctgcaggtattgctatggttacatctattgtttcttcaattacaaataatccagtgcataaacatgttgctatgacaggcgaggtaacaattacaggtcaagtcctaccaattggtggtttaaaagaaaaattattggctgcgcatagagcaggaataaaacaagttataattcctaaagaaaatgaaaaagatttagtagatattccaaaaaaagtccgtgaagatattaaaattacagcagttgaaaatgtagatgaagtgctaaaaattgctcttaaaaatgaattaaaaaaagttgaatggaccgaagtcgaaaacatttcaaaaactagcaaagaacaaaaatcacaagctagcattcagtaa

SEQ ID NO: 262626 - DNA, 532 bp, Unknown
  Bacterial polypeptide expressing nucleotide sequence isolated from the Sargasso Sea
caaattactggaaaattaggtgatgtaatgcaagagtcagtaaaagctgcaaaatcttttgttagatcaaaaagcttagaatatggaattataccgccaatttttgaaaaaaaagattttcatatacacgtaccagagggagcaactccaaaagatggaccttctgcaggaattgctatggttacatctattgtttcttcaattacaaataatcctgtacataaacatgttgctatgacaggtgaggtaacaattacaggtcaagtcctaccaataggaggtttaaaagaaaaattattagctgcacatagagcaggaataaaacaagttataattcctaaagaaaatgaaaaagatctagtagatattccaaaaaaagttcgtgaagatattaaaattacagcagttgaaaatgttgatgaagtattgaaaattgctcttaaaaaggaattgaaaaaagttgaatggactgaagtcgaaaacatttcaaaaactaataaagaacaaaaatcacaagctagcattcagtaat

SEQ ID NO: 262627 - DNA, 823 bp, Unknown
  Bacterial polypeptide expressing nucleotide sequence isolated from the Sargasso Sea
tatgagcaaaactgattttcttccaacattaccattacgagatatagtagtatttccaggaatgatcgtgccgttgtttgtcggtagagataaatcaataaaagcactaaacgaagtgatgaaatcaaataaaaaaataattttgattacacaaaaaaatgctgaaatagacgatccatcagtggaagatttgtattcttttggatgtgaaagtaaaatattgcaacttttaaaattacctgacggaaccgttaaagttttagtcgagggatttgaaagaataaaaattcaagaatgtaaaaatgatgatgaatttttgacatccgcaatcgagatagttaaggataaaattgattcaaaggaagactctttagcattttcaattgctatagttagaaaactagaaaaattaaccaatttaaataaaagaatttcatctgagttatttacgagtttaaaacaacaaaaagatccttcaaaaatagcagatcatatagctggacaattaaatatatcaatttttgaaaaacaaaaattattagaaaccattgatttaaaagaaagattggaaaaattgatggaacatataaataatgaaattaacgttattagtgtggaaaaaagaattagaggaagagtaaaaaatcagatggaaaaaactcaaagagaatattatctgaatgagcagatgaaagctatacagaaagaacttggggaaatagaagagggtaaagatgaaataggacatttacaaaaattgataattaaagctaaaatgactaaagaggcaacaaagaaatgcttatctgaactgaaaaaataa

SEQ ID NO: 262628 - DNA, 553 bp, Unknown
  Bacterial polypeptide expressing nucleotide sequence isolated from the Sargasso Sea
tatgccaggtaaaggtagaatgcaaataacaggaaaacttggtgatgtcatgcaagagtctgttaaggctgcaaaatcatatgtcagatcaaaaagtttagaatatggaataattccacctttctttgaaaaaaaggattttcatatccatgttccagaaggagctacacctaaagatggaccttcagctggtatagcaatggtaacatctatagtatcatcaataacaaacattcctgttaacagagagattgctatgactggtgaagtaacaattacaggtcaggttttgcaaattggcggtttaaaggaaaaattattagctgcacatagagcaggagttaaaaaagtattaatacccaaagaaaacgaaaaagatttagtagatattccaaaaaaggtaagagaagatattaaaataattccagtagaaacagcagatgaagtgcttaaaattgcccttactaaagagctgaaacctgtggagtggactgaagtagacaaaatttctgagggtaaaaaggacgataaatctcaagctagtattcagtaa

SEQ ID NO: 262629 - DNA, 852 bp, Unknown
  Bacterial polypeptide expressing nucleotide sequence isolated from the Sargasso Sea
gctgaaaagtttttattagaaaaacaaatcaaaaataatggtgttaaggatggagaattagaaatcacagatggcacaattaaagaaataattagaaactacacaagggaatctggcgttagaaatttggagagagaaatttcaaaagttataagaaaagcagttaaaaaagttgttaataatgaagaaaaaaaggttttaattaatgataaaaatctatctgattttttaggtgtgaagaaatttaaatacggagaattagaaagcgaagatagagttggaatagtaacaggattagcatggacagaatttggtggagaaatacttaaaattgagacggttcatatgccaggcaaaggacgaatgcaaattacaggaaaattaggtgatgtaatgcaggaatcagtcaaggcagcaaaatcttttgttagatcaaaaagtttagaatatggaattatacctcctatttttgaaaaaaaggattttcatatacatgttccagaaggggcaactcctaaagatggaccatcagcaggcgttggtatggttacctcaattgtatcatcaataacaaaaaatccagtaaatagaaaaattgcaatgacaggagaagttacaattactggacaagttttgcagataggtggacttaaagaaaaattactagcagctcatagagcaggaattaagcatgtgataattcctaaggataatgaaaaggacttagttgatataccaacaaaagttagagaagatattaaaataacaccagtagaaactgttgatgaggttcttaaaattgcgttaaaaaatgaattaaagagagttgaatggacagaggttgataacctt

SEQ ID NO: 262630 - DNA, 752 bp, Unknown
  Bacterial polypeptide expressing nucleotide sequence isolated from the Sargasso Sea
tatggacgtcaaaatatcactacctttacttcctctgagagacattgtggtttttccgagtatggtaatacctttatttgtaggaagagataaatctatttcagcacttaatgaagtgatgaaaaaagataagaaaattattttagtaactcaaaaaaattcagaaattgatgatccaaagaagacagacgtgtttatgtatggttgtgaaggaagtattttacaactattaaaattaccagatggtacagttaaagttttggtagaaggtattaaaagagtaaaaattttagattttaaggataatgaaaagtttataacatgtgactatacaacctttaacgatgttttatctaaggacgaggatttatttcctttagctgctacagctttaagaagattagaaaaattaacttcaatcaataaaaaaatttctagtgaaacaattaatacaattaagcaattaaaagacccttctcagattgctgacaatattgcatctcatataactgctacgatttcagaaaaacaacaaatttttgaaaccgtggatgtaaagaaaagattaaatgccattattaaaataatggaaaatgagaccagtattattggtgtcgaaaaaagaataagaggtagagttaaaactcaaatggaaaaaactcaaagagagtattatttaaatgaacaattaaaagctattcaaaaagaacttggtgaaattgaagatggtaaagacgaaacaaccagtctga

SEQ ID NO: 262631 - DNA, 398 bp, Unknown
  Bacterial polypeptide expressing nucleotide sequence isolated from the Sargasso Sea
tatgattgaaaataacatcccagtcttgccattaagagacatagttgtgttccctcacatggtagttccattgtttgttggtagagacaaatcagtcaaggcgcttgaaaaagtaatggctggcgataaacgtatcatgcttatcactcaaaaaagtgcttcagtagatgacccaaaaaaagatgacctttttgactttggaacaattgcaaatgtattacagttattaaaattacctgacggtacagtcaaagtacttgtcgagggacttcaaagagcttcgattaatatgtttactgatagcgaggattatctagtttccaacattgatctaattgatgagaacaatgacagctcagataaaaaattaagagcattgtctaaatcaattacagatc

SEQ ID NO: 262632 - DNA, 782 bp, Unknown
  Bacterial polypeptide expressing nucleotide sequence isolated from the Sargasso Sea
aatgaacgttaaatctacacttcctctgttaccactaagagatattgtggtatttccaagtattgtaattccactttttgtaggaagagataaatctattactgcattaaatgagacaatgaataacaataaaaaaattattctagctactcaaaaaaattcagaagtagatgatcctaaaaaaacagacatatttatgtatggatgtgaaagcaaaattctccaattgctaaaattaccagatggaactgttaaagttttagtagaaggtattcaaagagttaaaattatcgattttaaagatgatgataaatttattacatgcacatatgaaaataataaagattatataaagattgatgaaaaccttctacctttggcaatgaccgctgtaagaagattggaaaagcttacttcaataaataaaaaaatttcttctgaaacaattaataatattaaacaattaaatgatccagcaaaaattgctgacaatatagcttcacatttaaatacaacaattttagaaaaacaacaaatatttgaaactgttgacgttaagaacagattgaatggtgtaattaaaataatggaaaatgaaactagtattattggtgttgaaaaaagaattagaggcagggttaaaactcaaatggaaaaaactcaaagagaatattatttaaacgaacaactcaaagctatacaaaaagaattaggtgaaatagaagatggtaaggacgaaactttcagtttaaacaaagctattcaaaaagcaaaaatgccca

SEQ ID NO: 262633 - DNA, 727 bp, Unknown
  Bacterial polypeptide expressing nucleotide sequence isolated from the Sargasso Sea
tcaaagagcaaaagttaataaaataaattttaataaagaatttattactgcatcaataacagagattaatcaaaaaacaaaaaaaaattcaaacataaaagctctacaaaaacttatcattgaacaatttgttgagtttcaaaaaattaataaaaaagtttcacaagatgtaattaataatgtgaaaatattaagtgatcctgataaaattgttgatataataatatcaaatatatcaatttctttatctcaaaagcaagaaattttacagatgataaacacagaagaaagactcaataaaatttatggttatttagtatctgaaattgattcttttcaagttgagaaaaaaataaaaggtcgtgtgaaaagacaaatggagaaaacacagaaagaatattatttaaatgaacaaatgaaagccattcaaaaagaattaggtgaaaacgaggatttggatgaaattgctgaacttgagaaaaaattaaatcaatataatttatctaaagaagctaaagaaaaatgtacctctgagattaaaaaattaaaaaatatgagcccaatgtcagctgaggcaactgtaattagaaactatttagattgggtaacttccataccatggaataatccagatccgatttctcaaaatattaataaagcatcaatcatattagaaaatgatcactacggtctagataaagttaaggaaagaattctagaataccta

SEQ ID NO: 262634 - DNA, 715 bp, Unknown
  Bacterial polypeptide expressing nucleotide sequence isolated from the Sargasso Sea
tatgagttcaaataatttcaaaccattactcccgttaagagacatagtaatttttccgtctaccatagtcccactttttgtaggtagaaaaaagtctattaaagcactcgaagaggtaatgaagaccgacaagtcaatagttttggtgacccaaaaaaactctgaagttgatgatccaaaagaccaggatatctattcttatggatgtcttagtaaaattttacaattattaaaacttccagacgggacagtaaaagttttagttgaaggtatagatagagtaaaaattaattctattaaaaacgaagaaaagaaatatttgagttgtgaaataaacaaagtttcttctacaggcgacaatgaacaaagcaaaaatttatctcaaagtttaattaaaaagtttgaaaagttatcgaacttaagtaaaaaggatgtagcagattttacaaaaaacttaaaatctctaactaaaacctcagatattgcagacaacatatcttctaacctaaatattcagctttttgaaaagcaaaaactccttgaaacttttgatttaacaaagagactagagaaaatttatgaaattattgaaaaagaaactagcgttattagtatggagaaaaaaatacgtggtagagttaaaaaccaaatggaaaaaactcagagagagtattatttgaatgaacaattaaaagcaattcaaaaagaattaggt

SEQ ID NO: 262635 - DNA, 688 bp, Unknown
  Bacterial polypeptide expressing nucleotide sequence isolated from the Sargasso Sea
tgaaaaaaatatctcagattatcttggtattaaaaagttcaaatatggagaagtagagaatgaagataaagttggtgtagtaaccggtttagcttggacagagtttggaggagaaatattaaaaatagagacagttaatatgccaggcaaaggtaggatgcaaattactggaaaattaggagatgttatgcaggagtctgcaaaagctgctaaatcatacgtaagatctaagagtttagattatggagtaatacctcctatatttgaaaaaaaagattttcatattcatgtaccagaaggtgcaacacctaaagacggtccttctgctggaatagccatggttacttctatagtatcttcaataactgatattccagtaaacagaaacattgcaatgactggagaggttactattactggtcaagttcttcaaattggaggtttgaaagaaaaattattagccgcacatagagctggaataaatcatgttttgattccaaaagataacgaaaaagatctggttgatttaccaaaaaaagttaaagaagatataaaaattacacctgttagtgttgttgatgacgtgcttaagctagctttaacaaaagagcttaagagagttgaatgggttgaggttgataatttgtcaaaagctaaagataaatctgaaaaagttctcacaaactga

SEQ ID NO: 262636 - DNA, 751 bp, Unknown
  Bacterial polypeptide expressing nucleotide sequence isolated from the Sargasso Sea
aaaattactagaaaagtagttaaaaaagttgtgaacaatgaagaaacaaaagtagacgttaatgaaaaaaatattagtgattttttaggaattaaaaaatttaaatacggagaagcagagaatgagaacagagttggtgttgtaacaggtttagcatggacagaattcggcggagaaatactaaaaattgaaactgtgaatatgccaggcaaaggaagaatgcagataactgggaaattaggtgatgtaatgcaagagtctgtaaaagctgcaaaatcttttgtacgatcaaaaagtctcgattacggtatcattccaccaatatttgaaaaaaaagattttcatattcatgtacccgagggagctacaccaaaagatggtccatccgcaggtatagcaatggttacctcaattgtttcatcaattacagatatacctatagacagaaatatagctatgacgggagaggtaacaataacaggtcaagtacttcaaattggaggtttaaaagagaaactattagcagctcatcgagctgggataaaacatgttttaataccatcagaaaatgaaaaagatttggttgatgttccaaaaaaagttagagaggatataaaaattactcctgtaaaaattgttgatgatgttttaaaaattgctcttactaaagaattaaaaaaaattgattgggctgaagttgataatttgtctaagtctgatgataaaactgaaaaagtcttaacaaactaat

SEQ ID NO: 262637 - DNA, 663 bp, Unknown
  Bacterial polypeptide expressing nucleotide sequence isolated from the Sargasso Sea
aatgccacttgcaattactgcagttagaagattagaaaaattgagttcgataaataaaaaaatttcaacagaaacaataaataatattaaacaattaaaagatgcatcaaaaattgctgataatatagcatctcatttaaacgctacgatatctgaaaaacaacaaatatttgaaacaatagatgttaagaaaagattaaatggagttattaaaataatggaaaatgaggcaagtattataggtgttgaaaaaagaattcgaggaagagtaaaaacacaaatggaaaaaactcaaagagagtattatttaaatgagcaacttaaagctatacaaaaagaattaggagaaattgaagatggtaaagatgagacatcaaatttaaataaagctattcaaaaagctaaaatgcctaaagaagttcaaaagaaatgtatgtcagagttaaaaaaattaaaaaatatgagcccaatgtctgcagaagctactgtggtaagaaattatcttgactggatgatagatataccttggcacaaaaaagataaagttgatattgatttaaataaagctttaaagattttagatgaagatcattttggattagaaaaagttaaagagagaataattgaatttttagctgtacaaaaaagaatggacaaaattaa

SEQ ID NO: 262638 - DNA, 787 bp, Unknown
  Bacterial polypeptide expressing nucleotide sequence isolated from the Sargasso Sea
ggagaatttgatttaacagaaggaacagttcaagaggttataagatcttacacaagagagtctggagtgagaaatttagaacgtgaaatatcaaaagtagcaagaaaggcagttaaaaaagttgttaatggtgaattagaaaaagttaacgttaataaagataatttaagtgactatttaggtgttaaaaaatataaatatggagaagttgaaactgaaaacagaattggaatagtaacaggactagcctggactgaacatggtggagaaatcttgaaaatcgaaacagtaaatatgccaggtaaaggtagaatgcaaataacaggtaaactaggtgatgtaatgcaagaatctgtaaaagctgcaaagtcttttgtgagatcaaaaagtttagaatatggaattattccaccactatttgagaagaaagattttcatatacatgtccctgaaggagcaacaccaaaagatgggccatctgctggagttggaatggttacatcaatcgtttcttctataacaaataatcctatagacagagaaatagctatgaccggcgaagtaacaataactgggcaagtccttcaaataggtggattaaaagaaaaactattagccgctcatagagctggtattaaacgagtagtaataccaaaagataatgaaaaagacttaatagatattcctaaaaaagttagagaagatattaaaataattccagtttctacagttgatgaagttttaaagattgctttaaaaaatgagttaaaacgagttgagtggactg

SEQ ID NO: 262639 - DNA, 718 bp, Unknown
  Bacterial polypeptide expressing nucleotide sequence isolated from the Sargasso Sea
atggatgatgttataaaagttaataaagatttatatcctattcttccgcttcgggatatcgtagtctatccaaatatggttgtacctctttttgtcggtagagaaaaatcaatacaagcactcgaggaagtcatgaataatgatagagagctgtttctagttgcacagaaagactctacaaccgaagatccaacagaagataatctttacactcacggcactgttgcatcaataatgcaattgttaaaactgccagataacactgtcaaggttctcgttgaaggtacaagcagagcaaaaattcgtaacttcatcccgggagaaaaatttcatcaggttgaagtcgatctggtcagtgagattgttctcgatgaccctgaaatcgaggcattggcgcgatcctgtttaatgcaatttgaaagttatactaaaattaatcgaaaaatatcaactgatacatttaataccgtttctgagattgatgattactcaaaaatagcagatacaattgcatcaaatctgcaaataaaattatcgcaaaaacaacaaatacttgagattaacaacctgaaagaacgtttcgaattgatactcagtttccttgagggtgaaattgatgttcttcaaactgaaaaaaggataagagggcgtgtaaaacgtcagatggaaaaaactcaaagagagtactatttaaatgagcaaatgaaagctatccaaa

SEQ ID NO: 262640 - DNA, 520 bp, Unknown
  Bacterial polypeptide expressing nucleotide sequence isolated from the Sargasso Sea
aaattaggcgatgtaatgcaagagtctgttaaagcagcaaaatcttatgttttgtccaagagtttagagtttggaatcattcctcctatatttgaaaaaaaagattttcatattcatgttcctgaaggagcaactccaaaagatggtccttctgcaggtattggtatggtaacatctattgtatcctcaataacaaaaatcccagttaacaaagaaatagcaatgactggtgaagtaaccataactggacaagtcttaccaattggagggttaaaagaaaaattattagctgctcacagagctggaattaaacaagttttaattccgaaagataatgaaaaagatttagccgatattccaaataaagttaaggaagatataaaaattactcctgtagaaattgtagatgaagttctgaaaattgctcttatgaaagagtttcaaaaagttgaatggtcagaaatagacaatttatcaaaatctaaaaaagaagataaatctcaagcaagtatacaataat

SEQ ID NO: 262641 - DNA, 728 bp, Unknown
  Bacterial polypeptide expressing nucleotide sequence isolated from the Sargasso Sea
tatgagtgaagattcccctaccgaagacattacgccccgcacccgctaccagatgttgccgctccgggatgtcgtggtgttcccgcatatggtgctgccgctttttgtcggtcgggagaagtcgattaatgccctggaagaggctgtgcagtcgggtaaacagatcttccttgcagctcagcatgacgcagcggacgatgatccggcgcccgagaatattttcgagatcgggacggttgccaatatccttcagttgctgaagttaccggacggcacagtgaaggttttggtggaaggggtctcccgcgccgggatcgtcaactatgttgaaaccgaagaaagttttgttgtggatgcggcaccgattggcgagggcgatttcgacgagcgcgaaggagaggtcctgatgcgcacagtgacttctgagttcgagcagtacgtcaaactcaattcgaagatccccccggaggtgctgacctctctcagcggcattgaagacccaggccgtctggccgatacgatcgcggctcatctgactttgcgcaatgatgagaaacaaaagattctcgaactgggagacgtgcgggagcgactggaacatatcctgggcatcatggagtccgagattgatctgctccaggtcgaaaagcggcttcgcggccgcgtaaagaagcagatggagaaaagccaacgcgagtattacctgaatgagcagatgaaggcgattc

SEQ ID NO: 262642 - DNA, 643 bp, Unknown
  Bacterial polypeptide expressing nucleotide sequence isolated from the Sargasso Sea
ccttgaagagaatgtaaggcaggtcaccgtgactaatccgaccaaacaatttccggttcttccacttcgcgacatcgtcgtttttcctcatatgatagtgccactatttgttggccgcgataaatcggtccgggcactggaagatgtcatgcaggacgacaagcaaattcttctagttgctcagaagagcgcagcgcaagatgatcctgaagccgatgatatctacgatgtcggcactgtatccacggttttgcaactgttaaaattgcccgacggtacagtgaaggtcctagttgaagggtcccatcgcgcgaaaatcaccagctacctcgataatcctgatttttttcaagttgaagcggaaaccattgaggaatcactagttgatgacgaagacgtccaaggtctatcgcgttcagtggtcacgcagttcgaacaatacatcaagctcaacaagaaaattccgcctgaggtccttgtctccatcaatcaaattgaaaatgcagagaaattagccgacacggtggcctcgcacctggcgctgaagatttccgagaagcaagagcttttggagatctcctctgttacagaacgcctggagcgagtcttctcctatatggaagcggagataggcgtactccaa

SEQ ID NO: 262643 - DNA, 415 bp, Unknown
  Bacterial polypeptide expressing nucleotide sequence isolated from the Sargasso Sea
tttcatattcatgtacctgaaggggcaacaccaaaagatggaccatctgcaggtgtaggtatggttacatcaattgtttcatcaataacaaaaatacctgtcagaagagatatagcaatgactggagaagtaacaataactggtcaagttcttcctataggtggtttaaaagaaaaattattagcagctcatagagcaggtataaaagaagttttaattccaaaagataatgagaaagatttgactgatattcctgaaaaagtaaaaaaagatataaaattaaccactgtagaaatggtagatgatgttttgaaaatagctctcacaaaagagttaaaaaaaatcgattgggttgaagtagaaaaaatttcagacggaaaaaaagacgacaaatctcaagccagtattcaataat

SEQ ID NO: 262644 - DNA, 818 bp, Unknown
  Bacterial polypeptide expressing nucleotide sequence isolated from the Sargasso Sea
aaaagagataattagaagctacaccagagaatctggagtaagaaatctagaaagagaaatatctaaagttgcaaggaaagtagttaaaaaagtagtaagcggtgaagaaaaaaaagtactagttaacgataaaaatgttcatgattttttaggagttaagaaatttaaatatggagaagttgaatctgaggataaagtaggaatagtaactggcttagcttggaccgaattcggaggagaaattttaaaaatagaaacagttcatatgcctggtaaaggcagaatgcaaattacaggtaaacttggagatgttatgcaagagtcagttaaagctgcaaaatcttttgttagatcaaaaagtcttgaatatggaattataccaccaatttttgaaaaaaaagattttcacattcacgtaccagaaggtgcaacaccaaaagacggaccttcagcaggaatcgcaatggtaacttctattgtttcatcaattacaaataatccagttcacaaacatatagctatgactggggaagttacaataacaggtcaagtcttaccaatcggtggtttaaaagaaaagttactagctgctcatagagctggaattaagcaagttgttatacctaaggaaaatgaaaaagatttagtcgatattccaaaaaaagttcgtgaagatataaaaattacgattgtcgaaaatgttgatgaagttttaaaaatagctctaaaaaatgaattaaaaagagttgagtggactgaagtagaaaatatttccaaaggtgataaagatcaaaaatcacaagctagcattcaataat

SEQ ID NO: 262645 - DNA, 430 bp, Unknown
  Bacterial polypeptide expressing nucleotide sequence isolated from the Sargasso Sea
atttgagaaaaaagattttcatattcatgttccagaaggagctacaccaaaagatggtccatctgccggaatagctatggtaacatcaattgtttcatcaattactaaaattcctgttaatagagaaattgcaatgactggtgaagttacaattacaggtcaggttttaccaattggtggtttaaaagagaaacttttagctgcacacagagctggaattaaacaagtattaattccaaaagataatgagaaaaatttagtagatatccctaaaaaagttattgatgatataaaaataactcccgttaacacagctgacgatgttctaaaaattgcactaactaaagaacttaaaccaactgactgggttgaggtagataaaatttcagaaaacaaaaaatctgaaaaaactcaagcaagtattcaatag

SEQ ID NO: 262646 - DNA, 955 bp, Unknown
  Bacterial polypeptide expressing nucleotide sequence isolated from the Sargasso Sea
ccggctacactggctgattttgctgcatctatgactactgcttcaggcaaggaattgcaggaggtcttagaaacaaggaatataaaaacgcgtattgaaaaagcattaaatcttttacgtcatgaacttgaagtagccaaacttcagtttaaaatttctcaacgtgttgaagatagaatgtctcagcagcaaagagaattttttctcagagaacagcttaaagaaataaaaaaagaactaggtataacgaaagatggttcggagagtgaaactgaaaaatatgaagctcgaataaaaaaattgaaactcactgaagaagcaaaagaacgtatcaatgaggagatggataaacttcgcttaattgaacctgcctctccagaatataatgtcacaagaacatatcttgactggttgacaattttaccttggggagttttcagcaaagattattttaacattcagcgtgcagcaaagattcttaacagagatcactatggactgaatgatgtaaaagacagaattttggaactgatctccgtgggtataattaacggagatcttgctggttcaattgttttgctggttggaccaccaggtactgggaaaacatcagtgggtcaatcaatagctagggctttgggacgtaaattttatcgtttttcgcttggagggatgcgtgatgaagccgaaattaaagggcaccgacgtacatatataggtgcacttccagggaagtttattaatgctataaaaaccagtaaaactgcaaacccagtaataatgcttgatgaaattgacaaaattggggcaagttttcaaggagaccctgcttctgctttgctggaagttttagaccctgaacagaataaggattttcttgatcactacttggatgttcgttttgatttatcaaaagtgctatttatatgtactgcaaaccagacggatacaattt

SEQ ID NO: 262647 - DNA, 455 bp, Unknown
  Bacterial polypeptide expressing nucleotide sequence isolated from the Sargasso Sea
tatgattgaaaacgatatcccggtcctaccactaagagacattgtagtgtttcctcatatggtcgttccgttgtttgtaggcagagacaaatcagtaaaagcgctcgagaaagtcatgattggtgataaacgtatcatgctcattactcaaaaaagtgcatcagtagacgatcctaaaaaagatgaccttttcgactttggaactattgctaatgtattgcaattattgaaattacctgacgggacagttaaagttcttgttgagggcattcaaagagcctcgataaatatgtttactgacaatgaagattatctagtttcaaatattgatcttattgacgagaacaatgatagctctgataaaaaactaagagcgctatccaaatcaataacagagctttttgataaatatgtaaatttgaataaaaaaattcctcctgaagtacttggaacta

SEQ ID NO: 262648 - DNA, 490 bp, Unknown
  Bacterial polypeptide expressing nucleotide sequence isolated from the Sargasso Sea
aaagcggctaaatcttacgttagatccaaatgtttagattttgggattattccaccaacttttgaaaaaaaagattttcacattcatgttcctgaaggagcaaccccaaaagatggtccatcagctggtatcgctatggttacctcaatagtatcctctataactaaaataccagtaaataaagacattgctatgacaggtgaggtaactgttacagggcaagttttgccaattggtggattaaaagaaaaattacttgctgctcacagagctggcataaaggaagtcttgataccaaaagaaaacaaaaaagatttatttgatattcctaaaaaagtaaaagatgatataaaaataacaactgttgaaacagctgatgaggttttaaaaatagctttaacgaaaaatttaaaatcagttgagtgggtagaagtagatagcatttctgacaataaaaaaagtgaaaaaacacccgcgagtattcaataaa

SEQ ID NO: 262649 - DNA, 706 bp, Unknown
  Bacterial polypeptide expressing nucleotide sequence isolated from the Sargasso Sea
aatggaagttaaagttacacagcctttgttacctttgagagacatcgtggtgtttcctagtatggttatccctttatttgtaggaagagataagtcaattacagctttaaatgaggtaatgaaggataataaaaaaatagttcttgttacacaaaaaaattctgaagtggatgatccaaaaaaaaatgatgtttttatatatggatgtgagagtaatattttacagttattaaaactgccagacggaactgtaaaagttctagttgaaggtatcaaaagagttaaaattattgattttaaagatgaagaaaaatttatttcgtgctcattcgaatatcaaaaagaaataataccaaataatgaagatcttttgcccttggctttaaccgcagtaagaaggttagagaagcttacatctataaataaaaaaatttcttcagaaactataagcaatataaaacaattaaaagatccatcaaaaattgcagataatattgcatctcacttaaattcaacaatttcagaaaaacagcaaatttttgaaactttagatgtaaaaaaaagattaagtggagtaattaaaataatggaaaatgaaacaagtattataggagtagaaaaaagaattagaggaagagttaaaactcaaatggaaaaaacgcaaagagagtactatttaaatgaacaattaaaagctatccaaaaa

SEQ ID NO: 262650 - DNA, 754 bp, Unknown
  Bacterial polypeptide expressing nucleotide sequence isolated from the Sargasso Sea
atgaaagcaacttatataaaacctcttttgcctctacgagatattgtaatttttccttcaatggtgatcccattatttgttgggagagaaaaatcaattagagctctacaagaagtaatgaaatcagacaaatctatagttttagttactcaaaaaaattctgaggttgatgaccctgaatctaaagatctatacgcttatggttgtttaagtaaagttcttcaacttttaaaattacctgatggaacagtaaaagtattagtggagggtgagaagagggtaaaaattttaaaatacaatgataatgatggtgaaaaatttttaaaatgcgaagtagaagttgcagaagatacgaatatctcaaaagatcttgagctttttgctttaagtttaataaaaaaatatgaaaaattatcaattttaaacaaaaaagattttaataaggagggattaaaaaatttaaaaaatccttctcaaatagctaacaatctatcttcagatctaagtatacaaatttctgaaaaacaagaattgttagaaatgattgatttaaaaaagagattagaaaaaattcactccttgattgaaaaagaaacaagcgttgtatcagtggagaaaaaaatcagaggtagagttaaaaatcagatggagaagacacagcgtgaatattatttaaatgaacagttgaaagctattcaaaaagagcttggtgaaattgatgaaggcaaggatgaattaacaaatctttcaagag

SEQ ID NO: 262651 - DNA, 400 bp, Unknown
  Bacterial polypeptide expressing nucleotide sequence isolated from the Sargasso Sea
attcatgtgcctgagggagccacaccaaaagatggtccctctgcaggaatagcaatggttacatctattgtttcgtcaataacaaacattccagttagaaaagatttagctatgactggagaagttactttgacaggtcaagttttacctataggaggtctgaaagaaaaattattagctgctcatagagcaggcattaaggaggctttaattccaaaagaaaatgaaaaagatttaatcgatataccaaagaagattattgacgaaattaagattactcctgttgaatttgcagatgaagttattaagattgctctaacaaaagagcttaaaaaaacagagtgggttgaagtcgatatttctaagaaagaagataaatctcaagctagcattcaataat

SEQ ID NO: 262652 - DNA, 520 bp, Unknown
  Bacterial polypeptide expressing nucleotide sequence isolated from the Sargasso Sea
aaaacttggcgatgttatgcaagaatccgtcaaagctgctaagtcatttgttagatcaaaaagtttagagtatggaataattccacctttttttgaaaaaaaagattttcatatccatgttcctgaaggagctactcctaaagatggaccatcagctggtatagcaatggttacatccattgtatcatcaatcacaaacattcctgttaatagagagattgctatgactggtgaggtaacaattacaggacaagttttacaaattggtggtttaaaagagaaattactagctgcacacagagcaggtgttaaaaaagtattaataccaaaagaaaatgaaaaagatttagtagatattcctaaaaaagtaagagaagatattaaaattattcctgtagaaacagcagatgaagtgcttaaaattgcccttactaaagagctaaaacctatcgaatggactgaagtagataaaattacagagggtaaaaaagacgataaatctcaagctagtattcagtaa

SEQ ID NO: 262653 - DNA, 601 bp, Unknown
  Bacterial polypeptide expressing nucleotide sequence isolated from the Sargasso Sea
ctgacccaggcagggggcgagttgatccccgtcgaagccaccttgatcccgggaagcggattgacgctgacgggtcaactcggggatgtgatgaaggagtcggcgcagaccgccctctcgtatgtgcgttccattctcgatgatctgattggtgaaggcggagagattttttcccagagtgaggtccacatccacgtgccggccggcgcaacgcccaaggacggtccttctgcgggggtcaccatggcgacggctcttgtgtccatcgcaacaggtattcccgttcgaggcgatgtggccatgacgggcgaagtcacccttcgaggccgcgtgctggctgtggggggagttcgggagaaatcactcgcggctctgcgctccgggatcaccgatatcatcgtgcctcgtcagtccatgagcgaagtgggagagattcccaaagagcttcggcgtcgactgaacttcatccccgtgacccatatgcgtgaggtgatcgaagcggccttgtctcgtcctcctttgtggaaggacaggccctcgcacgcccaggtggccagtccgcccgccgttcacgcgactttcaagggatcggggcagtagg

SEQ ID NO: 262654 - DNA, 300 bp, Unknown
  Bacterial polypeptide expressing nucleotide sequence isolated from the Sargasso Sea
ccggcgaaataacattgcggggcagagtatggccgatcggcggcctaaaagaaaaattacttgctgctttaaggggtggcatcaagacagttttgattccaaaagacaatgaaaaagatttggcggatatcccggagaatgttaagcggggcctcgaaattataccggttactactgttgatgaggttttggatcgtgcacttactgaaaagttagtaccaatagagtggccggatgttgaccctatttctgtttccgatcattccgagaaggatgtaggaggagtggttactcattaaa

SEQ ID NO: 262655 - DNA, 457 bp, Unknown
  Bacterial polypeptide expressing nucleotide sequence isolated from the Sargasso Sea
atcgaaatgtctagagtacggtattatacctccgttattgaaaaaaaagattttcacattcatgttccagaaggtgcaactcctaaagatggtccttcagcagggataggaatggttacatccatagtttcttctattacaaatattcctgtaaaaagagatgttgctatgacaggagaagtaacgcttacaggccaggtattacctattggtggtttgaaagaaaaacttatcgctgcacatagagcaggtattaaagaagttttgataccaaaagaaaacgaaaaagatttagttgatatgccaaaaaaaattgtagatgaaatcaaaattactcctgttgaatttgctgatgaagttttaaaaattgcactaacaaaagaactcaaaaagatagagtgggttgaagttgacatgtctaaaaaagatgacaaaacacaagcaagcattcagtaaa

SEQ ID NO: 262656 - DNA, 808 bp, Unknown
  Bacterial polypeptide expressing nucleotide sequence isolated from the Sargasso Sea
atggaagttaaacacacatctccacttttaccccttagggacataatagtttttcctagcatggttatacctttgtttgtaggaagagataaatctatcacagctttaaatgaagttatgaaaaataataaaaagattattttagttactcaaaaaaattctgaagtagatgatccaaaaaagacagatatatttatgtatggttgtgaaagtaatatattgcagcttttgaaattacccgacggaactgtaaaagttttagtagaaggaattaaaagagtaaaaataattgattttaaagatgatgataaatttattatgtgttcgtacgaacaatgtaacgatataatttctaaagatgaggatttaactcctttatcaattacagccataagaagattagaaaaattaacatcaataaataaaaaaatatcatccgaagtaatttcaaatattaaagaattaaaagatccatcaaaaatagctgataatattgcttcccatttaaattcaacaatttcagaaaaacaacaaatttttgaaactcaagatgttaaaaaaagactaaatggtgttattaaaatcatggagaatgaaacaagtataatcggtgttgaaaaaagaattagaggtagagttaaaactcaaatggaaaaaacccagagagagtattatttaaacgagcaattaaaagctattcaaaaagaattaggtgaaattgaagacggcaaggacgaaacatctaatttaaataaagcgattcaaaaagcaaaaatgcctaaagaagttcaaaaaaaatgtatgtcag

SEQ ID NO: 262657 - DNA, 496 bp, Unknown
  Bacterial polypeptide expressing nucleotide sequence isolated from the Sargasso Sea
tctttctaaagttgaaaagaagatacgtggcagagtaaaaactcaaatggaaaaaagccaaaaagaatattatcttaatgaacagatgaaagccttgaaaaaagaactcggtgagatcgatgaaacagaagaggctgaagaactagagatcaagatcaatgaagctggaatgacaaaagaagctcaagaaaaagctcttaccgaactccaaaaatataaaatgatgtcaccaatgtcagccgaagcctcagttgtgcgcggatatattgactggatgctgaatattccgtggaaaaagaaaagcaaaattaggtcagacttgaatgctgccagtaatgttttgaatgaggatcattttggtttagaggaagttaaagagagaatactcgagtatttagctgttcaaaaaagagtcaaaaagcttaaaggtccagttctctgtttagtaggacctccaggagtgggtaaaacatctcttggtgaatccatagctaga

SEQ ID NO: 262658 - DNA, 462 bp, Unknown
  Bacterial polypeptide expressing nucleotide sequence isolated from the Sargasso Sea
aaagtttagaatatggaattattccacctttctttgagaaaaaagattttcatattcacgtaccagagggtgcaacaccaaaagatgggccttcagctggtatagcaatggttacatctatagtatcatcaattacaaacattcctgttaatagagaaatagctatgactggagaagtaacaataacaggacaagttttacaaattggcggtctaaaggaaaaattattagctgctcatagagcgggggttaaaaaggtgttaatacctaaagaaaatgaaaaagatttagttgatatacctaaaaaggttagggaagatattaaaatcataccagttgaaactgcagatgaagttttgaaaattgcactcacaaaagagcttaagccagttgaatggacagaggtagataaaatttcagagggcaaaaaagacgataaatctcaagctagtattcagtaat

SEQ ID NO: 262659 - DNA, 451 bp, Unknown
  Bacterial polypeptide expressing nucleotide sequence isolated from the Sargasso Sea
tatgattgaaaatagcattccagtcctgccattaagagatatagttgtgttccctcatatggtggttccattgtttgttggtagagataagtcggttaaggcgcttgaaaaagttatggctggtgataaacgcatcatgctcatcactcaaaaaagtgcatcagtggatgacccaaaaaaagatgacctttttgactttggaacaattgcaaatgtattacaattattaaaattacctgacggtacagtcaaagtacttgtcgagggacttcaaagagcttcgattaacatttttactgataatgaggattatctagtttcaaacattgatcttattgatgagaacaatgatagttcagataaaaagttaagagcattatctaaatcaatagcagaactttttgataaatacgtaaatttaaataaaaaaattcctcctgaagtacttgga

SEQ ID NO: 262660 - DNA, 796 bp, Unknown
  Bacterial polypeptide expressing nucleotide sequence isolated from the Sargasso Sea
atggaagttaaattaacacagcccttattaccattaagagatatagtagtgtttccaagcatggtaattccattatttgttggaagagataaatctattactgctttaaatgaagtaatgaaagctgacaaaaaaataatattagttacccaaaaaaattctgaagttgatgatccaaaaaaaaatgatgtattttcttatggatgtgaaagtaacatattgcaacttttaaaacttccagacggtacagttaaggttttagttgaaggaattaaaagagtaaaaattattgatttcaaggatgatgaaaaatttattacttgtacatatgaaaatcaaaaagatgttttaaacaaagatgaagatctattacctctagctcttacagctgtaaaaagattagaaaagttgacttctgtgaataaaaaaatttcatcagagactattaacaatattaaacaattaaaagatccatcaaaaatcgtagataatattgtttcgaacctaaatgcatcgatatctgaaaagcaacaaatatttgaaacattggatgttaagaaaagattaaatgcagccattaaaatgatggagagtgaaacaagtattattggagtagaaaaaagaattagaggaagagttaaaactcaaatggaaaagactcaaagagagtattatttaaacgaacaattaaaagcaattcaaaaagaattaggtgaaattgaagatggcaaagatgaaaccactaatttaaaaaaatccattcaaaaagctaaaatgccaaaagaagtgagaagaa

SEQ ID NO: 262661 - DNA, 913 bp, Unknown
  Bacterial polypeptide expressing nucleotide sequence isolated from the Sargasso Sea
tatgtcgactaaaactacctatcttatattacctctgagagatatagttatattccctcatatgattgctcctcttttcgtaggaaggacaaaatccataaacgcaattgaagcagttatggaagaaaataaagaaatagttttattaactcaaaaaaaaccctctattgaagaccctaaagaaaaagatttgtataaagttggaactatagggaatatacttcagatgcttaaacttccagatggtaccgtaaaagttttagttgaaggaaaatctagatgtgttgtaaagagcattaaaaaatctagtaattacttgagttcagatacagttttattaaaaagtgacgaattttcttcaactcgaaataatgaaataatatctaatttgttagatttatttgaaagatatgtaaaattaaatggtaaaataagtactgaaattttatcaacaattgctgatataaaagatccaaacactttatcagatacaataattaatcatttggtatttaatatagaagaaaaacaatcctttcttgaaatgataaaccctatagagagggttgaaagtttaatattaaaaataaaaaatgaaattgaaatattaagttctgaaaagaaaataaggtctcgtgttaaaacacagatggaaaagacacaacgcgaatactatttaaacgaacaattaaaagcaattcaaaaagaacttggcacatctgaagacggtaaaaatgaattcgatgagattgaagataaaataaataatggtaaattaaccaaagaagctaaagaaaaagcattatctgagttaaaaaagttaaaaaatatgagtgctatgagtgctgaagcaaccgttagtcggtcatatattgattggttggtttcaattccatggacgaaaacaaaaaaa

SEQ ID NO: 262662 - DNA, 610 bp, Unknown
  Bacterial polypeptide expressing nucleotide sequence isolated from the Sargasso Sea
catgggcggaactggaatagtgataggattggcatggacagaagttggaggtgaaattctaaaaatcgaaactgtaaatatgccaggtaagggaagaatgcagataacaggaaagctcggtgatgtaatgcaagagtcagttaaagctgcaaaatcgtttgtaagatcaaaaagtttagaatatggaataattcccccattttttgaaaaaaaagattttcatattcatgttccagaaggagcaactcctaaagacggaccatcagcaggtatagcgatggtaacttcaatagtttcatcaattacaaatattcccgttaatcgtgaaatagctatgacaggtgaagttacaattacaggtcaagtattacaaataggtggtttgaaagaaaaattacttgcagctcatagagcgggtgtaaaaaaagtactaataccaaaagaaaatgaaaaagatttagttgatatacctaaaaaagttagagaagatattaaaataattccagtagaaactgctggcgaagttttgaaaattgctctaacaaaagaattaaagcctattgagtggtcagaggttgataaaatttcaaaaggtgaaaaagaagataag

SEQ ID NO: 262663 - DNA, 672 bp, Unknown
  Bacterial polypeptide expressing nucleotide sequence isolated from the Sargasso Sea
aatggtaaattttaaagattcattttgtgttttacccctaagggatatagttgttttcccaaacatgatagtcccattattcgttggtagatccaaatcaatcaaagctttggactttgctgaaaagaatgaaaaagaaatttttttagttgcccaaaaagatgcaaatactgatgagcccaatatccgagatatctataagtttggaactgtagcatcaattcttcaattattaagactgccagatggaactgtaaaagtgcttgttgaggggctggaaagagcaaaaatatcacactttactgataataaagatttttttgaagcctatattgaccatgtacctaataaaaatgtaatagataaagaaatagacgctttatctagaacagcaatgaatcaatttgaaagctatgttaagttaaatagaaaggtcccacctgaattactcgtaagtctaaaccaaattaatgaccacagcaaacttgctgatactatgtcagcacacttaaacatcaaactatcggataagcaaactcttttagagacgtcatccgttaaggatagactaaacaggatagtagaatttatagatcaagaaattggggtgctttcagttgaaaaaaagataagaagtcgagttaaaaagcaaatggataaaactcaaaaaga

SEQ ID NO: 262664 - DNA, 139 bp, Unknown
  Bacterial polypeptide expressing nucleotide sequence isolated from the Sargasso Sea
tacggaattattccaccaatatttgagaaaaaggattttcatatacatgttcctgagggagcaacaccgaaagacggtccatcagcaggtatagcaatggttacatctattgtttcatctataacaaatattcctgtta

SEQ ID NO: 262665 - DNA, 829 bp, Unknown
  Bacterial polypeptide expressing nucleotide sequence isolated from the Sargasso Sea
ttttcctggtatggtagcccctttatttgttggaagaaaacagtctgttaatgcattgaatcattcaatgacgacagataaaagaatattccttctagctcaaaaaaactctgaaactgacaacccaaatattaaagacttatataaatatggaacgattgcaaaagttttacaacttttaaagcttcccgatggaacaattaaggtactggttgagggaatagaaagggcaaaactaaaatctttaaattcaaacaaagattatatcgcagctaatattgatcaaattaataaaaaagttaagctaaatcctaagattaaggctcttattaaagttgttttggagcaatttgaagaatacataaaagttaataaaaaattacctacagatctaaacaacaaccttaaaacaattaatgacccaaataaaattgctgatcttatttctgttaatttaagtatatcacttcagcaaaaacaagaattgcttgaattgacaagtcttgagcaaagacttgataaaatatactcatacctagtttctgaaattgattcttttcaagttgaaaagaaaattaaaggcagggtaaaacgtcaaatggaaaaaacacagaaagaatattatttgaatgaacaaatgaaagctatccaaaaagaattaggagaaaatgaagaaagtgacgagatttctgaaatagaaaaaaaattagaacaaattaaattatcaaaagaggctctagagaaatgcaaatctgagctaaaaaaacttaaaagcatgagtcctatgtcagcagaagctactgtaattagaaactatcttgattgggtg

SEQ ID NO: 262666 - DNA, 661 bp, Unknown
  Bacterial polypeptide expressing nucleotide sequence isolated from the Sargasso Sea
cggactcgcatggacacaagccggcggagaactgctcaccactgaagtgaccgtcatgaaaggaaccgggaaagttctactgaccgggaaattgggtgatgttatgaaagaatcagctcacgcagcattgagttatgttaggaccaatgccaaccgcctagggatttattcttcggtattcaaggaaaccgatatccatgttcacgtcccggaaggagcggtaccaaaagacgggccatccgccggagtgacaataacgacttcgttagtaagtgcttttacgggtatccctgttctccgtgaggtcgcaatgaccggcgaggtaaccctgcgtgggaaggttttaccgattggcgggttgaaagaaaaactcctcgctgccaaaaggggaatgatgaaaaccgtcctcattccagcaaaaaatgaaaaagatttgactgaagttccggaagaaataaaaaccgagcttcaaatcctctcagttgaaaatatggatacagttttggaaagagccttggaatgcgttcccatttcagtaagtgatcctgaggaagataacaaggaagaaagaaaactttctgaggaagaatcgcttgtccctcaacaaaaagggaacctaactgaacctccttttgaagttcctaatttcccccagcactga

SEQ ID NO: 262667 - DNA, 818 bp, Unknown
  Bacterial polypeptide expressing nucleotide sequence isolated from the Sargasso Sea
taaagaaattattagaaattatacaagggaatcgggagtaagaaatttagaaagagaaatttctaaagtaacaagaaaagttgtaaaaaaaatagttaatgaagaagaaaaaaaagttgaagttaatgaagagaacattcctaattttttgggtgttaaaaaatttaaatttggagaactggaacaagaaaatagggtaggtattgtgattggcttggcatggacagaatttggtggtgagatattaaaagtagagactgttaatatgccaggaaaaggaagaatgcaaattaccggtaagttaggagatgtaatgcaagagtcagtaaaggctgccaaatcatttgtaagatctaaaagtttagaatatggaattataccaccaacttttgaaaaaaaggattttcatatccatgtacctgagggagcaacaccaaaggatggcccgtcagcaggtatagcgatggttacatctattgtttcttctattacaaatatccctgtaaatagagagctagctatgacaggtgaagttacagttacaggccaggttttgccaataggaggtttaaaggaaaaattacttgcagctcatagagcaggagtgaaaagagttttaattccaaaagaaaatgaaaaagatctaatagatgtccccaaaaaagtaagagaggatataaaaattattccagtagaaaatgcggacgaagttataaaaatggctttaaccaaagaacccaaaccaattgaatggacagaggtagaaaaattatctgagtctaaaaaagatgaaaaatctcaagctagcattcaataaa

SEQ ID NO: 262668 - DNA, 814 bp, Unknown
  Bacterial polypeptide expressing nucleotide sequence isolated from the Sargasso Sea
atggacgtaaaaacttcttcaccgttattaccactaagagacattgtggtttttccgagcatggtaattcctctttttgttggaagagataaatcaatctctgctctaaatgaggtgatgaaaaaagagaaaaaaataattttagtaactcaaaaaaattctgaaatcgatgatcctaagaaaacagacatatttatgtatggatgcgaaggtagcatcttacaacttttgaaacttccagatggaacagtcaaggttttggttgagggtgttcgtagagtaaagattattgattttaaagataatgaaaaatttataacttgtgattttacacctcataatgatgtgatcgatggagatgaagatttgtacccattagctgtaacagcaatcagaagaatggaaaagttaacttctataaataaaaaagtttctagtgagactattaatacaattaaacaattaaaagacccatctcagattgcggataacattgcttcacacatcacagcaacaatttcagaaaaacaacaaatctttgagaccatagatgtaaagaaaagattaaatgcaatcataaagataatggaaaatgaaacaagtattattggagttgaaaaaagaattagaggaagagttaaaactcaaatggaaaaaactcaacgagagtattatttaaatgaacagttaaaagctatccaaaaagagttaggtgaaatagaggatggcaaagatgaaaatacaagtttaaataaagctattctcaaatcaaaaatgccaaaagatattgagaaaaagtgccttcaagaatgaa

SEQ ID NO: 262669 - DNA, 778 bp, Unknown
  Bacterial polypeptide expressing nucleotide sequence isolated from the Sargasso Sea
tatacaagagagtcaggagtaagaaatctagaaagagaaatttcaaaagtaacgagaaaagttgttaaaaaagttgtaaatggtgaagtagaaaaagtacaggtaaatgataaaaatgttcctgactttttaggcattaaaaaatttaaatatggcgaagtcgaagacaaaaataaaactggaattgtaattggattagcatggaccgaggttggtggtgaaattctaaaaattgaaactgtaaacatgcctggaaaaggaagaatgcagattacaggtaaacttggcgatgtaatgcaagagtcagtcaaggctgcaaaatcattcgttagatcaaaaagtctagagtatggaattatacctccatttttcgaaaagaaagacttccatattcatgtacccgaaggagcgacacctaaagacggaccttcagctggtatagctatggtgacctctatagtatcatcaataacaaacattccagtaaatagagaaatcgcaatgacaggtgaggtaacaataacaggacaagttttacaaataggtggtttaaaagaaaaattactagcagcgcacagagctggagttaaaaaggtattaattccaaaagaaaatgaaaaagatcttgtagatgtaccaaaaaaagttagagaagacatcaaaattatacctgtcgaaactgcagatgaggtactaaaaatcgcccttacaaaagaacttaaaccagtggagtggactgaggtcgaaaagatctcagatgataaaaaagacgataaat

SEQ ID NO: 262670 - DNA, 703 bp, Unknown
  Bacterial polypeptide expressing nucleotide sequence isolated from the Sargasso Sea
gatggaacttaaagttaatctaccacttttgccacttagagacatagttgtatttccaagtatggttatacctttgtttgtagggagagataaatcgataacagctttaaacgaaacaatgaagcaagataaaaaaattattcttgttacacaaaaaaattctgaagtagatgatcctaaaaaaaatgatatttttacttatggttgcgagagtaatattttacaacttttaaaactcccagatggaacagttaaagttttagttgaaggtaatagaagagttaaaatagttgactttaaagatgatgaaaaatttataacatgtggttttgaatattacgaagatcaaattgataaaaacgatgatttgttacctttagcaacaactgctgtaagaagactagaaaagttaacatcaataaacaaaaaaatttctagtgaaactatcaatagtattaaagaattaaaagatccatcaaaaatagctgacaatattgcttcacatttaaataccactatttctgaaaaacaacagatgtttgaaacagctgatgtaaaaaaaagattaaacatagttattaaaataatggaaaatgaaaccagtattattggtgttgaaaaaagaattagaggaagagttaagactcagatggaaaaaaaccaaagagaatattatcttaacgaacaattaaaggctatacag

SEQ ID NO: 262671 - DNA, 392 bp, Unknown
  Bacterial polypeptide expressing nucleotide sequence isolated from the Sargasso Sea
tcctgaaggtgcaacaccaaaagatggtccatctgctggtattggtatggtaacgtcaattgtttcttcaattacaaatattcctgttagaagagatgtagctatgactggagaagtaactttaacaggccaagtattaccgattggaggattaaaagagaaattattagcagctcatagagctggaattaaagaagtactgatacccaaggaaaacgaaaaagatctagttgatatgcctaaaaaaattattgatgatatcaagatcacacctgttgaatatgcagatcaagttataaaaatagctctaactaaagaattgaaacctacggagtgggttgaagttgatatctctaaaaaagacgataaatctcaagctagcattcagtaaa

SEQ ID NO: 262672 - DNA, 551 bp, Unknown
  Bacterial polypeptide expressing nucleotide sequence isolated from the Sargasso Sea
agtaactatgcctggcaaaggaagaatgcaaattacaggtaagctcggggacgtgatgcaagagtctgtaaaagctgcaaaatcttttgtgagatccaaatgtctagaatacggaattattcctcctatatttgaaaagaaagattttcatattcatgttcctgagggcgctacacctaaagatggtccatctgctggagttgcaatggtaacatcaattgtttcttcaattacaaatatacctgtaagaaaagatgttgcaatgacaggtgaggtcactttgacaggtcaagtgttacagattggtggattgaaagaaaagttgctagcagcacatcgagcaggaataaaagaggttttaataccaaaagagaatgaaaaagaccttgttgatatgccaaaaaaaatcattgaagatataaaaattacacctgtggaacatgctgatcaagtaattaagattgcattaacaaaagaactaaaacctacagaatgggtcgaagttgatatatctaaaaaggatgataaatcacaagctagtattcaataat

SEQ ID NO: 262673 - DNA, 440 bp, Unknown
  Bacterial polypeptide expressing nucleotide sequence isolated from the Sargasso Sea
cccacctttctttgaaaaaaaagattttcatattcacgtcccagagggagcaactccaaaagatggaccttcagctggtatagcaatggttacatctatagtatcttcaattacaaacattcctgttaatagagaaatagctatgactggtgaggtaacaattacaggacaagttttacaaataggtggtttgaaagaaaaattattagctgctcatagagcaggagttaaaaaagtattaattccaaaagaaaatgaaaaagatttagtagatatacctaaaaaggttagagaggatattaaaattataccagttgaaactgctgatgaagttttaaaaattgcccttacaaaagagcttaaaccagtggagtggacagaggtagataaaatttcggagagtaaaaaagacgataaatctcaagctagtattcagtaat

SEQ ID NO: 262674 - DNA, 703 bp, Unknown
  Bacterial polypeptide expressing nucleotide sequence isolated from the Sargasso Sea
atggatattaaatttactttaccactattaccgctacgagacattgttgtatttccaagcatggtaattcctttgttcgtaggaagagataaatctatatctgctttaaacgaggtgatgaaaaaagaaaaaaaaatcattttagtcacacagaaaaattctgaaatagatgatccaaaaaaaacagatgtatttatgtatggttgtgagggaagtatacttcaattactaaaattaccagatggtacagtaaaagttttaatagagggattgaaaagagtcaaaattacagattttagagataatgataagtttataatgtgtgattactcaattcacaacgatatagtaaataaagaagatgatctaaattctttagcttctactgctgtaagaagattagaaaagctaacatctatcaataagaaaatttcaagcgaagtaatcaacaccattaaacaacttaaagagccatctcaaattgcagacaatattgcatctcacgtcaacgcaacaatttcagaaaaacaacaaatattcgaaactaatgatgtgaaaaaaagattaaacctaataataaaaattatggaaaatgagacaagtattattggagttgaaaaaagaattagaggaagagttaaaactcaaatggaaaaaactcaaagagagtattatttgaatgaacagttgaaagcaatcaaaa

SEQ ID NO: 262675 - DNA, 476 bp, Unknown
  Bacterial polypeptide expressing nucleotide sequence isolated from the Sargasso Sea
tgcaaaatcttttgttagatctaaatgtcttgaatatggaattattcctccattatttgagaagaaagattttcacattcatgttcctgaaggtgccactcctaaagatggtccatcagcgggtgttggaatggtcacgtcaattgtatcttcaattacaaatatcccagtaagaaaagatttggctatgactggagaagttactttaacaggtcaggttttacaaattggtggattaaaagaaaaattattagcagcacatagagctggaattaaagaagtcttaataccaaaagaaaatgaaaaagatcttgtggatatgccaaaaaaaataatggatgatattaaaatcactccagtagagcatgcagatcaagtacttaaaatagctttaacaaaagaattgaaacccactgaatgggttgaagtagacataactaaaaaagacgataaatcacaagctagtattcagtaat

SEQ ID NO: 262676 - DNA, 481 bp, Unknown
  Bacterial polypeptide expressing nucleotide sequence isolated from the Sargasso Sea
aaagcagccaaatcttttgtaagatcaaaatgtttagaatatggcattattccacctgtatttgaaaaaaaagactttcatatacacgttcctgagggcgcaactcctaaagatggtccttcagcaggcatagggatggtaacctctatcgtctcctcaattactaatattcctgtaagaagagatttagcaatgactggagaggtaactttaactggtcaagttctgccaattggtggtttaaaagaaaaattattagctgcgcatagagcaggtattaaggaagttttaattccaaaagaaaacgaaaaagatttagttgatatgccaaaaaaaattattgatgatataaaaattacatcagttgaatatgctgatcaggtagtaaaaatcgctttaattaaagaacttaaacctactgaatgggtagaggtagatatctctaaaaaagacgataaatctcaagctagtattcaataaa

SEQ ID NO: 262677 - DNA, 535 bp, Unknown
  Bacterial polypeptide expressing nucleotide sequence isolated from the Sargasso Sea
atgtcaattaccggtaaactaggtgatgtaatgcaagagtccgttaaagcagcaaaatcttttgtaagatctaaaagtcttgaatatggaataatacctccaatctttgaaaaaaaagactttcatattcatgtacccgaaggagctactcctaaggacggaccatcagctggtgttgctatggtaacatctatagtttcttctattaccaaaatacctgtaaacagagaaatagctatgacaggcgaggtaactgttacaggtcaagttcttccaataggaggcttgaaagaaaaacttttagctgctcatagagctggaattaaaacagtacttatacctaaagataatgaaaaagatctagttgaaattccaaaaaaagttaaagaagatattaaactaatacccgttgaaacggcagatcaagttataaaaatagctcttacaaaagaattaaaaaaagttgaatggaacgatgttgaaaacatttcaaaaagcaaaagagacgaaaaaactcaagcaagtattcaataac

SEQ ID NO: 262678 - DNA, 606 bp, Unknown
  Bacterial polypeptide expressing nucleotide sequence isolated from the Sargasso Sea
catgtctgatatggttgagggttctgtttttcctgtattgccgttgcgagatatagttgtatttccgcacatgattgtgccgttattcgtaggtcgagagaaatcggtgcaggctcttgaaggagtaatgaatgatgataaaaaaattcttttggttacccaaaagaatgcgggggacgatgaccctaagccggaggatatttatcaggttggaactatagggactgtcttgcagttgcttaaacttccagacggaactgtcaaagtactagtagaaggcactcaaagagcgaaaatttcaaattttaaagacaatgaacaattttttgaagctagtgcagagttgatactggatgaagatgattcgaaagaacatgatgcattagctcgttctgtgatttcgcaatttgagcaatacataaaactgaataaaaagattcctccagaggttctggtttctttaaatcaaattgaagagcctagtaagcttgccgatacggttgcatcacatttagcacttaaaatcgcggaaaagcaggaacttctcgaattatcaacggtagcggagcgattagaaaaagctacgcactcatggaagcagaaatc

SEQ ID NO: 262679 - DNA, 481 bp, Unknown
  Bacterial polypeptide expressing nucleotide sequence isolated from the Sargasso Sea
tcttatgtaagatctaaatctttagagtttggtattattccaccaatttttgaaaaaaaagattttcatgttcatgttcctgaaggggctacaccaaaagatggaccatctgcaggcatagctatggtaacttcaataatttcttcgataacaggtatacctgttaataaaactattgccatgacaggtgaagtcacattaagaggacatgttttgcctatcggaggacttaaagagaaacttttggcagctcatagagctagaatagcaacggttataataccagaggacaacaaaaaagatttggtagagataccaaaaaatatattggataatattgaaataaaaacggttaaaactgttgaggaagttttaaaaattgctctcacaaaagaacttaaacctgtagaatggattgaggtcgagactttaccaaaatcaaaaagtgtcgataaacctacagctggtagcacacactaaa

SEQ ID NO: 262680 - DNA, 643 bp, Unknown
  Bacterial polypeptide expressing nucleotide sequence isolated from the Sargasso Sea
taatttgggggagctagaagcagataataaagtgggcattgtcactggtttagcttggactgaatatggaggtgaaattttaaaaatcgagactgtaactatgcctggtaaaggtagaatgcaaattacaggtaagttaggtgatgtaatgcaagagtctgttaaagctgcaaaatcttttgtaagatcaaaatgtttagaatatggaattattcctccattatttgaaaaaaaagattttcatattcatgtccctgaaggtgcaactcctaaggatggcccatctgcaggtataggaatggtaacatctattgtttcatctctaacaaatattcctgtaagaaaagatgttgccatgacaggtgaagtaactattaccggtcaagttttgccgattggtggtttaaaagagaaattattagcagcacatagggcagggattaaagaagctattattcctaaagaaaatgaaaaagatttagttgatatgccaaaaaaaattattgatgaaataaaaattacaccagttgaatatgctgatgaagttttgaaaattgctttaactaaagaattgaagagaacagaatgggtagaggtagatttaagtaaaaaagacgacaaatctcaagcaagtattcaataa

SEQ ID NO: 262681 - DNA, 804 bp, Unknown
  Bacterial polypeptide expressing nucleotide sequence isolated from the Sargasso Sea
atgattgatttcagaggatatattgatgatgaaaaagtgcagattgctaaaaaacatttaattcctaagcaggttaaagaaaatggacttacttccaaacaggtaaaattcaatgatactggaattaaggaaattatttcttcatacactagagaatcaggtgttagaagtttagaaagagaaatttctaatgttcttcgaaaaatagcagtagatgttgttaacaaaaaacttaaaacagctagtatttctaaaaaatctgtaaatgaatatcttggtattccaaaattccaatcagatttagctgaaagaactactaagcctggtgtagtaactgggatggcatggactgctgctggtggagatattctatttattgaatctagtaaaatgaaaggtaaagggattttaaccttaactggtcaacttggagatgttatgaaagaatcagcttcagctgcattcacttatgtaaaatctcatacagatattttaaatcttgaagatgattttgcagataagatggatattcatgttcattgtcctgctggagcaattccaaaggatgggccttcagccggagttggaatgtttacctctcttgtttcattattagctaataagccagttaaaagcaaagtcgcaatgactggagagattacattgagaggaaatgtattagctattggcggagtgaaagagaaagtaacagctgctcatagagcaggtattaaaactattatcttgcctcatgctaataaaagagatcttgaagaaataccagaacatatcaaaaaagattta

SEQ ID NO: 262682 - DNA, 727 bp, Unknown
  Bacterial polypeptide expressing nucleotide sequence isolated from the Sargasso Sea
caagaagtaatgaaaactgacaagtccattattttaataacgcaaaaaaattctgagatagatgatccagtaggtaaagatttataccaattcggatgtttaagtaaagttcttcagcttttgaagttgccagatggaacagttaaagttttagttgagggagagaaaagagttagaattgttaaacatggagaagctaaagataattttttaacttgtgaagtagagttagcagaagataataatgtttctaaagaattggaacccttagctttaggtttggtaaaaaaatttgaaagacttcaagttttaagtaaaaaagatttcaatgaaacgaccaataaccttaaaaatctcaaaaatccgtcgcaaattgcaaataacatttcatcaaatttaaatattcaaattttcgaaaaacaggaacttttagaaataacagatctaaaaaaaaggttagaaaaaattcattctcttattgaaaaagaaataagcgtcctttctgttgagaaaaaaattcgtggaagagtaaaaaaccaaatggaaaaaactcaaagagaatattatttaaatgaacaactcaaagctattcagaaagagcttggtgaaatagatgaaggtaaagatgagttatcttctttatcaaatgctatcacagatgcgaaaatgcctaaaatagccaaagaaaaatgtttatctgaacttaaaaaattaaaatcaatgagcc

SEQ ID NO: 262683 - DNA, 844 bp, Unknown
  Bacterial polypeptide expressing nucleotide sequence isolated from the Sargasso Sea
ggagaatttgaactttcagatggaacaataaaagaaattatcagaaattacacaagagaatcaggagtaagaaacctagaaagagaaatttctaaggtagctagaaaagtagttaaaaaagtagttaatggtgaagaaaaaaaagttacagttaataatgacaatatttctgattttttaggagttaaaaaatttaaatatggagaattagaaagctctgacaaaataggtatagtgacaggtttagcttggactgaatttggtggagagatacttaaaattgaaacagttcatatgccaggtaaaggaaaaatgcaaattacaggaaaattaggtgatgttatgcaagagtctgtaaaagcagctaaatcatttgttagatctaaaagtcttgaatatggtgttatacctcctttatttgaaaaaaaagattttcatatacatgttcctgaaggcgcaacaccaaaagatggtccatccgcaggtatagcaatggtaacatcaatagtatcttctattacaaataatcctgttaacagagaaattgctatgacaggagaggttactgtaacaggacaagttttaccaattggtggtttaaaagaaaaattattagctgctcatagagcaggaattaaaaaagtaattattccaaaagataatgaaaaagatctaattgatattccaaaaaaagtaaaagaagatattaaaattattccagttgaaactgctgatgaagtagtaaaacttgctcttaaaaatgaacttaaaagagttgagtggactgaagtagaaaatatttctggagcaggtaaagaaaaatcacaagcaagtatacagtaaa

SEQ ID NO: 262684 - DNA, 577 bp, Unknown
  Bacterial polypeptide expressing nucleotide sequence isolated from the Sargasso Sea
attaaaaatagaatctgctatgatgcctggaaaaggtaaaatgcaaataacaggaaaattaggtgatgtaatgcaagaatctgtaaaagcagccaaatcatacataagatccaaatctttagagtttggtattattccaccaatttttgaaaaaaaagattttcacgtacatgttcctgaaggagcaacaccaaaagatggaccttcagcaggtattgctatggttacctcaatagtttcatcaattacaggcatacctgtcgataaaaatattgctatgaccggagaagttactttaagaggtcatgttttacctatcggaggacttaaagaaaagcttttggcagcacatagggcaagaatttctaaagttataataccagaagataacaaaaaagatttaacagagattccaaaaaatattatggatgatcttacaataactacagtaaagactgtagatgaagtattaaaagttgcgcttgttaaagaattgatgcctgtagaatggattgatgctgaaaatttagctaaatctaaaactggtgaaaaagtaactactggtagtcctcattaa

SEQ ID NO: 262685 - DNA, 779 bp, Unknown
  Bacterial polypeptide expressing nucleotide sequence isolated from the Sargasso Sea
aatggatatcaaatataattctccggtattacctctaagagatattgtcgtatttccaagcatggttataccactgtttgtaggtagagataaatcaattgcagctctaaatcaggttatgaaaaatgaaaaaaagattgttcttgtaactcagaaaaattcagaggttgatgatccgaaaaaaaatgacgttttcttatatggttgtgagtgcaatattttacaacttttaaaacttccagacggcaccgttaaagttctagtagagggtaacaaaagagtaaaaatcacagaatttaaagaagaaacaaattttattacttgtgaattcgtttatcagaacgatgtaatagagaaagatgcaagtttgttaactttagcgttaacagcggttaaaagattagaaaaattaaatacaattaataaaaaactttcacaagacacagtaataaatattagacaattaaaagatccatcaaaaattgctgacaatattgcaacacatttaaatagcactatttcagaaaaacagcagatatttgaagagctagacgtaaaaaaaagattaaattcagtaattaaaattatggaaaatgaagcaagcattattggtgttgaaaaaagaatacggggaagagtaaaaactcaaatggaaaaaactccacgagagtactatttaaatgaacaactaaaagcgattcagaaagagttgggagaaattgaggatgggaaagatgaaacatccaatttaaacaaactaattctcaaagcaagaatgc

SEQ ID NO: 262686 - DNA, 856 bp, Unknown
  Bacterial polypeptide expressing nucleotide sequence isolated from the Sargasso Sea
tgttaaggaaggagagcttgacatagccgatgggacaataaaggaaattattagaagttatacaagagaatcaggagtaagaaatttagaaagagaaatttcaaaagttacaagaaaagttgttaaaaaagttgtaaatggtgaagttgaaaaagttcaggtaaacgaaaaaaatgttccagattttttgggtattaaaaaatttaaatatggtgaagtcgaagacaaaaataaaacaggagttgtaattggattagcttggactgaggttggaggtgaaattcttaaaatcgaaactgtaaatatgcccggaaaaggaagaatgcagatcacaggtaaacttggtgacgttatgcaagagtcagttaaggctgcaaaatcgttcgttagatcaaaaagtttagagtatggaattatacctccaatttttgaaaagaaagatttccatattcatgttcccgaaggagcaacgcctaaagatggaccttcagctggtatagctatggtcacctctattgtatcttcaattacaaatattccagttaatagagaaatagcaatgacaggtgaagtaacaataacaggacaagttttacaaattggtggtttaaaagaaaaattattagcagcccacagagctggagtaaaaaaggtattaattccaaaagaaaatgaaaaagatttagtggacattccaaaaaaagtaagggaggacattaaaattataccagttgaaacagcagacgaagtactaaaaatagccctaacaaaagaacttaaaccagtagagtggactgaggttgaaaaaatctcggatgataaaaaagacgacaaatctcaagctagtattcagtaa

SEQ ID NO: 262687 - DNA, 713 bp, Unknown
  Bacterial polypeptide expressing nucleotide sequence isolated from the Sargasso Sea
taaaaaagtagttagcggtgaagaaaaaaaagtaaatgttagtgaaaagaatataccagattttttgggtgttaaaaaatttaaatatggagaagttgagtctgaagataaagtaggaatagtcactggactagcttggactgaatttggtggtgaaattctaaaaattgagacaattcatatgcctggtaaaggaaaaatgcaaatcaccggtaagcttggtgatgtaatgcaagaatcagttaaagctgcaaaatcttttgttagatcaaaaagtttagaatatggaattatacctccaatatttgaaaaaaaagattttcatattcatgttcctgaaggtgccactccaaaagacggtccgtctgcaggtatagctatggtaacttcaatagtttcatcaataacaaataatccagttcataaacatgttgctatgacaggagaggtaactattactggtcaagttttaccaattggaggattaaaagaaaaattactcgctgcacacagagctggtatcaagaaagtcgtaataccaaaagaaaatgaaaaagatctagtagatattcctaaaaaagttcgagaagacattaaaataactccagtagataatgtagacgaagttttaaaaattgctcttaccaaagaacttaagagaattgaatggacagaagtagaaaatatttcaaaaactggtaaagatcaaaaat

SEQ ID NO: 262688 - DNA, 799 bp, Unknown
  Bacterial polypeptide expressing nucleotide sequence isolated from the Sargasso Sea
tatacaagagagtctgggggttagaaatcttgaaagagaaatatccaaagtaactagaaaagtcgttaaaaaagtagttaatggtgaggaaaaaaaagtttcaattgataagaaaaacctgcctgatttcttaggggttaagaaatttaaatatggtgaattagaagataaagataaagttgggatagtaactggtttagcttggactgagtttggaggggaaattttaaaaatagaaacagtaaatatgccaggtaaaggcagaatgcaaattacaggaaaattaggggatgtcatgcaggagtctgtaaaagcagcaaaatcatttgtaagatcaaaaagtttggaatatgggattatacctccattatttgaaaaaaaagattttcatattcatgtacccgaaggtgctactccaaaagatggaccttctgcaggaataggcatggttacatcaattgtttcatctattacaaacaatcctattaatagagaaattgctatgactggtgaagtgactattacaggtcaagttttgcctataggtgggttgaaagaaaaattattggcagcacatagagcaggaattaaacatgtaattattccaaaagataatgaaaaagatttagttgatattccaaaaaaagtcaaagaagatataaaaataactccagtagaaactgttgatgaagttttaaagattgctttaacaaaagaattaaaaagagtagagtggactgaagtagaaaatatttcaaaaactaaaaaagaagataaatctcaagccagtattcaataa

SEQ ID NO: 262689 - DNA, 930 bp, Unknown
  Bacterial polypeptide expressing nucleotide sequence isolated from the Sargasso Sea
tcaaaattatttgaagaaaatccaagtattcccagtgaggcctcatttgctataaaaaatattcatagtagctcatttcttgtaaactttgtttcttcaaatatgaatatcagtgttgcagaaaaatttaaaatattatcaattaatgatcttaaaaaaagagccctcaggtgtctaaaatttatggatgttgaatttcaaaaactgtctctgaaaaatgatattcaatctaaagttagaaatgatcttgatcagcaacaaagagagtattttttaaatcaacaattaaaaaccatacaagaagagttagggggttcatcaaatcatcaagatattgatgaaatgaaattaaagtcaaaatcaaaaaaatggaataaagaagttggaaatcactttaacaaggaattaattaaattacagagaatgaattctcaagctgctgattattcaattcaaagaaattatctcgatttaatgttagatctgccttggaacgaatactctaaagataattttagtttaaataatgcccaaaaaactttaaataaagatcattatggtttggatgatgtcaaaagacgaataattgagcaaattgctgtaatgaaactcagaggtgatatgaattcaccaatactctgtttttatgggccacctggagttggaaaaacttcgttaggtaaatctattgcagaatcattaggaagggaatatgttaggatatcattaggtggtttaagagatgaggctgagataagaggacatagaaaaacctacataggagctatgcctggaagaattgtacaaaatttgaagagagtaaaaacatctaatccagtatttgtattggacgaaattgataaactttcaattggaaatcagggagacccctcttctgcaatgcttgaggttcttgacccagaacaaaac

SEQ ID NO: 262690 - DNA, 720 bp, Unknown
  Bacterial polypeptide expressing nucleotide sequence isolated from the Sargasso Sea
tggtgaagaaaaaaaaagttattgttaatgatactaatgttcatgactttttaggagttaaaaaatttaaatatggtgaagtagaatcggatgataaaataggcatagttactggactagcatggactgagtttggtggagaaattttaaaaatagaaactgttcacatgccaggtaaaggtaaaatgcaaattacaggaaaacttggtgatgtcatgcaagaatctgttaaagcagctaaatcatttgttagatcaaaaagcttagaatatggaattatacctccaatttttgaaaagaaagattttcacattcatgtacccgaaggagcaaccccaaaagatggtccttcagctggaattgcaatggttacttctattgtttcatcaataacaaacaatcctgtgcataaacatattgctatgacgggtgaagttacaattacaggacaagttttgcccattgggggattaaaagaaaaattacttgctgcacatagagctggaataaaacaagttataattcctaaagaaaatgaaaaagatcttatggatattccaaaaaaagttagagaagatattaaaattacagctgttgaaagtgtagatgaggtattaaaaatagctcttaaaaatgaattaaaaagagttgaatggactgaagtagaaaatatttctgaagccaacaaagatcaaaaatcacaagctagcattcaataat

SEQ ID NO: 262691 - DNA, 391 bp, Unknown
  Bacterial polypeptide expressing nucleotide sequence isolated from the Sargasso Sea
gatgggccaagcgccggtttagcaatggtaacatcaattgtgtccgtattaaccggtatccctgtgaggaaagatttagcgatgacaggagaagttactttgcgaggaaacgcgctcgcaataggtgggcttaaagagaagttacttgccgctctcagaggcggaattaaaacagtacttattcctgaggaaaatgaaaaagatcttgtggacattcctgataatgtaaaaacttctctagaaattatagccgtcaaaaatgtttccgaagttttgaagatcgcacttactgagtctccaagcccaatcgaatgggacgaagctgcagaagaggcagcggctgcaaaagctcttgaggaacagaaacaaagccagacaattaaacactaag

SEQ ID NO: 262692 - DNA, 571 bp, Unknown
  Bacterial polypeptide expressing nucleotide sequence isolated from the Sargasso Sea
attgaaacagttaatatgcccggcaaaggaaggatgcaaatcacaggtaaactaggtgatgttatgcaagaatcagttaaagctgcaaaatcttttgttagatcaaaaagtttagagtatggaattttaccacctatttttgaaaagaaagattttcatatacacgttccagagggtgcaactcctaaagatggtccttcagcaggtatagcaatggtaacatcaatagtctcatcaataacaaacaatccagttaatagagaaattgcaatgacaggcgaggtaacaatcacaggtcaggttttagcaataggtggattaaaggaaaagttgttagctgcacatagagcaggaataaaacatgttttaataccaaaagataacgagaaagatttagctgatattccagaaaaagttaaaaacgatattaaaatttcacctataaaacatgcagatgaagctttaaaaattgctctaacaaaagaatttaaaagagttgaatgggttgaagtacaagacattgctgagtcaaaaaaagaagacgattcagagaaaattcttacaaattaat

SEQ ID NO: 262693 - DNA, 874 bp, Unknown
  Bacterial polypeptide expressing nucleotide sequence isolated from the Sargasso Sea
atgattaaaaatattttacccgttttacctcttcgcgatatagttgtttttcctaacatggtagctcctcttttcgtcgggagaaaacactcagttaatgctctcaattcagttatgcttggtgaaaaaaaaatatttttattatctcaaaaaaattcagatgttgacaatccagacgaaaaaaacttatacaaatatggaaccgttgcaaaagtacttcagcttttaaaattgccagatggaacccttaaagttttagtagaaggacaaaatagagccaaagtttcaaagcttacttttaataaagatttcatagtagcaaccataactgatataaaaaacagttacaaaaaaaattcaagtattaaagccttacaaaaattaacagtagagcaatttgaagaataccaaaaatataacaaaaaaattaatatagatttggttaacaatattaaaacttatagcgaagctaataaagttgctgatgttatttccgctaatattaatatttctcttgaacaaaaacaagaaatcttagaaattgagagtgtagaagatagactaaataaaatttatagtcacttaacaactgaaatagactcatttcaagttgagaaaaaaattaagggtagagtaaaaagacaaatggagaagactcaaaaagaatattaccttaatgaacaaatgaaagccattcagaaagaacttggagaaagtgaagatattgatgaagtatcagaattagagaaaaaaattgaagaatattcccttagcaaagaggcaaaagaaaagtgtaaatctgaaatcaaaaaattaaagtcaatgagtccaatgtctgctgaagctacagtaataagaaattatcttgagtggg

SEQ ID NO: 262694 - DNA, 1348 bp, Unknown
  Bacterial polypeptide expressing nucleotide sequence isolated from the Sargasso Sea
ctggacaccgtgcccatgctcaagcgcatggagaaggtgctgccactgctgcgcaaggaggtcgaggtcggccgcctgcagaaggagctgtcagccgaggtcaacaagcagatcggcgagcgtcagcgcgaattcttcctcaaggaacagctgaagctgatccagcaggagctgggcatcagcaaggacgacaagagcgccgaccgcgaagagtttctcgctcgcctggaaggcaagaccctgacggccgccgcgcagaagcgcatcgacgaagaactgaacaagctgtcgatcctggaggccggctctccggagtatgccgtcacccgcaactacctcgactgggccaccgccctgccctggggcatccagggccaggacaagctcgacctcggtcacgcacgcaaggtgctggacaagcaccacgccggcatggacgacatcaagcagcgcatcaccgagtttctcgcggtcggcgccttcaagggcgagatcgccggctccatcgtgctgctggttggcccgcccggcgtgggcaagaccagcatcggcaagtccatcgccgaatccctcggccggccgttctaccgcttctcggtgggcggcatgcgcgacgaggccgagatcaagggccaccgccgcacctacatcggcgccatgcccggcaagctggtgcaggccctcaaggaagccgaggtgatgaacccggtgatcatgctcgacgagatcgacaagatgggcaccagctaccagggcgaccccgcctcggcgctgctggaaacgctggacccggagcagaacgtcgaattcctcgaccactacctggacctgcgcctggacctgtccaaggtgctgttcgtctgcaccgccaataccctcgattccatccccgggccgctgctcgaccgcatggaggtgatccgcctgtccggctacatcaccgaggaaaaactggccatcgccaagcgccacctgtggcccaagcagttggagaaagctggcgtgccgaaagcgcgcctgtccatcagcgatgcggcgctgcgcacggtgatcgagggctatgcccgtgaggccggcgtacgccagttggagaaacagctgggcaagctggtgcgcaaatcggtggtcaagctgctggagaatcccgaagcgaagatccgcattggcgccaaggatctcgaggaagccctcggcatgccggtgttccgcaacgagcgggtgctggccggcaccggggtgatcaccggtctggcctggaccagcatgggcggcgctaccctgccgatcgaggcgacgcgcatccatacgctcaatcgcggcttcaagcttaccggccagctcggtgacg

SEQ ID NO: 262695 - DNA, 787 bp, Unknown
  Bacterial polypeptide expressing nucleotide sequence isolated from the Sargasso Sea
atgaattatccagttttgcctttaagagatatagttatttttcctcatatgattgtcccattatttgttggaagggataagtctgttttggcgcttgaagaagctatgagtaaaaaaaaagaaattgttttattatctcaaaaagatcctagaacagaagatccaaagaaaaaagatttgtttgatgttggtacaattggaaaaatattacagttattaaagttgccagatggtacagttaaggttttagttgaaggaaaaaaaagagtaaaagtaactaaaatttgctttgaagaatcatttttaaaagctgatgtaaaaactgttgtggaaagtgctgacaacaatgttgataaaactaaaataaatgttttacatacagtttttgaggactttattaatctcaataaaaaaactaataatgaattaattaatgtcataagtgaaataaaagaccccggacatttgtcagatactatcgcatctaatttaaatcttgaaatttctgaaaaacaaaaatttcttgaaaattttaatgtttcaaaaagaattgaaggcttaatcataaaattagaaactgaaattggatctttgcaagcagaaaataaagtgagatctagagttaaacgtcagatggaaaaaattcaaagagaatattatctcaatgaacaattaaaggcaattcaaaaagaattaggcacctcagaagatgggaaaaatgaatttcaagaattagacgaaaagataaaaaaagttaaattgtcgaaagaagccctgaaaaggtaaa

SEQ ID NO: 262696 - DNA, 614 bp, Unknown
  Bacterial polypeptide expressing nucleotide sequence isolated from the Sargasso Sea
tatggttgaaaataacattccagtattaccattaagagacatagttgtgtttcctcacatggtggttccattgtttgttgggagagataagtcggttaaggcgctggaaaaagtcatgactggtgataaacgcatcatgctcatcactcaaaaaagcgcttcagtggatgacccaaaaaaagatgacctttttgattttggaacaattgcaaatgtattacagttattaaaattacctgacggtacagtcaaagtacttgtcgagggtcttcaaagagcttcgatcaatatgtttactgataatgaggattatctagtatccaacattgatcttattgatgagaacaatgatagctcagataaaaaattaagagcaatatctaaatcaataacggatctttttgataaatatgtaaatttaaataaaaaaattcctcctgaagtacttgggacaataaacgaaattgacgatttagctaagttgagtgacacaattgcatcacacttatcaattaagctgtctgataaacaagagatattagaagcaatcgaccttacagagagatttgaaaagataatgaattttattcaagcagaactcgatgttatgcaag

SEQ ID NO: 262697 - DNA, 751 bp, Unknown
  Bacterial polypeptide expressing nucleotide sequence isolated from the Sargasso Sea
atgaactcagaaagcaaaaaaccacttttaccattaagggatatagttatattcccctcaattgttgtgcctttatttgttggaagaaagaaatctatcaaggcattagaagaggtcatgaaatctgataaatctgtagttttagtaacacaaaagaattcagaagtagacgacccaggagagaaagacatatattcatatggctgcctaagcaaagttttgcaattgttaaaattacctgacggaacagttaaagttttggtcgaaggtcttgctagggttaaaattcttgaaattgaagatgacacaaaaaagtttttatgttgcaagtctcaaataattgagtcagaaaatgaaaatgaagagcataaaatttttgcaacaaatttaattaagaagtttgaaaagctatctactcttaacaaaaaagatgtatctgattttacaaaaggccttaaatctctaaagaacgcaacacaattggctgacaatatttgctcaaatttaaatattcaaatttttgagaagcaagctttattggaaatgaccgatctaaagaaaagattagaaaaaatttatcaattaatagaaaaagaaacaagcgttatcagcatggaaaaaagaataagaggtagagttaaaaatcaaatggaaaaaactcaaagagagtattatttaaatgaacaattaaaagcaattcaaaaagaattaggcgagatagaagatggaaaagatgagatatcaaatttaa

SEQ ID NO: 262698 - DNA, 1557 bp, Unknown
  Bacterial polypeptide expressing nucleotide sequence isolated from the Sargasso Sea
tctggtggattctgagggtacggttgtaacaacggctgatctcccggaaaaggttccggtactgcctgctttccaccgtccgatctttcccggcatcctctcaccgatcagtgtcgacaaccaaaccagtcagtggctaagagaacagatcagtgaagataaaatgatcgcggtggttatggtcaaacctgacaagttgcgtgaagaccaggacatgctcgttaatgcctcacaactctaccgtctaggaactcttgcttatgttttgaactgggtcgaacttccagaccaaagctgtcagttcatgctttccactttgcaacgcatcaagatcaaacgatatcaacgcaaacagcaacactatcaggccgagatcggttattttgaagataagaaaattaaactcactgaagaactgaaagccggagcagctgccattgtttcgaccctcaaagaactaatcccacagaatccgactttttcacaggaaatgtttcatttgctgaatcaggtggacatcaatgatccagtaatgctggcagatctggcggcctccatgaccaacgcaaagagtgaagatcttcaaaaaatcctcgaaaccgaaaacctggaacaaagaattgaaaacactctgttgttgttaagagaagaatatgatctaagcctgctcaaggaacagatcagccaaaaaatcgatgaacgtgtttccaaacaacagcgtgatttttttctgcgcgaacaacttcgtgaaatccaacaggaattgggcctcgaacaggaacgtaaaagccttgaactgagaagatttcgggaaagatttgagaatctggatttgaatgaagaagcattgaaacgtgttgatgatgagatgcatcgttattcgatgctcgatgagcattctccggaacttcaaatcgttcaccaataccttgactgcatagcctcgcttccctggaaacaatatagccatgacaggctgagcctatcccgggctgagaagattctaaatcaggatcactatgggatgcagaaagtgaaaacccggatcttggaattcattggggtcagtaaactcagaaagaccaccaaaggcgcgatcctctgtttcgctggtcctccgggagtaggaaaaacctctcttggtcgttccatcgcccgggctttggggcgggaattctatcgattctcagttggcggcctgaccgatgaatccgaactgaaaggacatcgaagaacctacattggcgctatgccgggtcgcttcattcaggctcttaaatcagtcaagaccggaaacccagtgatcctcctggatgaactggacaagatggggcaaagctaccgtggcgacccactctcagtcttgctcgaagtgttagacccggaacagaatcgtgagttcatggaccattaccttgatctgcactacgatctctccaatgtgctcttcattgccacagcaaatgttttggatacgattccacccgcattaaaagaccgtttagaaatcatcaatctttcgggttatatcaatgaagaaaaaatccagatcggcac

SEQ ID NO: 262699 - DNA, 654 bp, Unknown
  Bacterial polypeptide expressing nucleotide sequence isolated from the Sargasso Sea
ttaaatacggtgaggtcgaaactgaaaatagaataggagtagtaactggactggcgtggacggaatttggaggtgaaattctaaaaattgaaactgtaaatatgcctggtagaggaaaaatgcaaattacaggtaaattaggtgacgttatgcaagagtcagtaaaagcagccaaatcttttgtaagatctaaaagtctagattatggaattataccaccggttttcgaaaagaaagattttcacatacacgtaccagaaggggcaacaccaaaagatggtccttcagccggcatagcaatggttacatctattgtatcatcgattacaaaaatcccagtaaatagaaaaatagctatgacaggagaagtcacagttacaggtcaagtgcttgctataggaggtttgaaagagaaattacttgctgctcatagagcaaaaatagaacatgtactaatacctaaagaaaatgaaaaagatttagtggatattcctaaaaaagtcagagaagatattaaaattactccagttgagtttgttgatgaagttttaaagatcgctctaacaaaagagttgagaaaaactgaatgggttgaagttgaaaatatttcaaaaacaaaaaacgacgataaatctcaagtattaactaactaaa

SEQ ID NO: 262700 - DNA, 769 bp, Unknown
  Bacterial polypeptide expressing nucleotide sequence isolated from the Sargasso Sea
agttaaggaaaatgaattggatcttgaagatggtacaataaaagaaataattaggtcatacacaagagaatcgggtgtcagaaatcttgaaagagagatatcaaaagtatcgagaaaagttgttaaaaaagtagtcaatggtgaaaagtcaaaagtaaatgtaaataaaaataatttgccagatttcttaggtgttaaaaaatttaagtatggtgaagttgaggctcaagatagaataggtatagtaactggtttagcttggacagaatttggaggtgaaattcttaaaattgaaacagtaaatatgccaggcaaaggaagaatgcaaattactggtaagcttggagatgttatgcaagagtccgtaaaagccgcaaaatcatttgtaagatctaaaagtcttgattatggaattataccacctgtttttgaaaaaaaagattttcatatccatgttccagaaggcgcaacaccgaaagatggtccttcagcaggtatagccatggttacgtcaattgtttcttcaattacaaagaatccagttgataaaaatattgctatgactggcgaggtaacaattacaggacaagttttaccaattggtggattgaaagaaaaattactagccgcacatagagctggcatcaatcaagtaattattcctaaagaaaatgaaaaagatttaatagatatacctaaaaaagtaagagaagatattaagattactgtagttgaaaatgtagatgaagtattaaaaattagctcttaa

SEQ ID NO: 262701 - DNA, 778 bp, Unknown
  Bacterial polypeptide expressing nucleotide sequence isolated from the Sargasso Sea
aagagaaattggcaaagtttgccgcaaggtggtgaccaaattggtacgcaacgggaaagaccggaaaatcactgtcacttccaaattggttaaagaacttctaggggtgcctgttcatcagcgtgattacaaagctgatcaaaacgaagtcgggatagcgatgggattgggagtcactcaaatgggtggagagttgatgctgatcgaagccgtactgatgcccggaagcggcaaaacggtcctcaccggtaaactcggggaagtcatgcaggaatcggccaaggcggctttttcattcgtgcgcagcaacacccagttgctcggcatcgatgaggaagattttgccaaatctgaccttcacattcatattcctgatggggcgatccctaaagacgggccttctgcaggactgccgctgatgatcgcgatcatcagtgctttcaccaagaatccggtgaacaacgaagtggccatgactggagaaatcaccctgcgcggccaaatcaccgaaatcggaggactcaaggaaaagctgcttgctgcccggagaggccttctgaccaaggttctcattcctgaagacaacaaaaaagacctcgatgagatacccaaagaaatcatggaaggtttaaaagtaataccgttaaacaagatccaagatgccttagaacatgccttggagaacttcccactgattgaaaaagccctgccagaacaacccctggtgatcagcgaaaatctgtctcccgaaacgaaccctcaaacgcccgtggcctga

SEQ ID NO: 262702 - DNA, 463 bp, Unknown
  Bacterial polypeptide expressing nucleotide sequence isolated from the Sargasso Sea
aaaagtttagaatatggaattatacctccaatttttgaaaagaaggattttcatattcatgtacctgaaggagcaacgccaaaagatggtccttcagctgggattgcaatggttacatcgattgtttcttcaataacaagcaatcctgtacataaacatattgctatgacgggtgaggttacaatcactggacaagttttgcctattggcggattaaaagaaaaattacttgctgcacatagagctggaattaaacaagttataattcctaaagaaaatgaaaaagatttgacggatattccaaaaaaagttagagaagatattaaaattacagctgtggaaagtgtagacgaggtattaaaaatagctcttaaaaatgaattaaaaagagttgaatggactgaagtggaaaatatttctgaagcaaacaaagatcaaaaatcacaagctagcattcaataat

SEQ ID NO: 262703 - DNA, 925 bp, Unknown
  Bacterial polypeptide expressing nucleotide sequence isolated from the Sargasso Sea
tatactgaagatgaaaagattaatattgctaataaatacttattaccaaaacaaattaaagataatggcgtgaaagatggtgagatgaatttaactgatggcaccataaaggacatcattagatattacactagagagtcgggcgtaagaaatctggagagagaaatttctaaaattactcgaaaggttgtaaaaaaagttgttaacaatgaaagtaaagacgtaactgtaaacgataaaaacttaggtgactttcttggtgttaaaaagtttaaatttggcgagctagaagagcaaaataaaattggaattgtaacaggactggcctggacggaatttggtggagaaattttaaaaattgaaactgtaaatatgcctggaaaaggtagaatgcaaattacaggtaaattaggtgatgtaatgcaagagtcagttaaagcagcaaaatcttttgtaagatcaaaatgtttggaatttggaattattcctccaatattcgagaaaaaagattttcatattcatgttccagagggagctactccaaaagatggtccgtctgctgggatagcgatggtaacatcaatagtttcttcaattactaaaattcctgttaaaagagaaattgcaatgactggtgaagttacaattacaggtcaggttttaccaattggtggattaaaagagaaacttttagcagcgcacagagcgggaattaaacaagtgctaattccaaaggataatgagaaaaatttagtagatatcccgaaaaaagtgattgatgacataaaaattgcacctgtaagtacagccgatgaagttttaaaaattgcacttaccaaggaactcaaaccaaccgactgggttgaggtagataaaatttcagaaaacaaaaaatctgaaaaaacacaagcaagtattcaatagt

SEQ ID NO: 262704 - DNA, 518 bp, Unknown
  Bacterial polypeptide expressing nucleotide sequence isolated from the Sargasso Sea
tgctggtggagatatcctatttattgaatctagtaaaatgaaaggtaaggggattttaaccttaactggtcaactcggagatgtgatgaaagaatcagcttcagctgcattcacttatgtaaaatctcatacagatattttaaatcttgaagatgattttgcagataagatggatattcatgttcattgtcctgctggagcaattccaaaggatgggccttcagccggagttggaatgtttacctctctagtgtcattactaactaataagccagttaagagtaaagttgcaatgactggagaaattacattaagaggaaatgtcctagcaatcggtggagtaaaagaaaaagtaactgctgctcatagagctggtattaaaactataattctacctcatgccaacaaaagagatcttgaagaaattcctgaacacatcaaaaaagatttgtctttccattttgctaaggaagttatggatgttattgatgttgctattcctaatttgaaaaagtaaa

SEQ ID NO: 262705 - DNA, 1027 bp, Unknown
  Bacterial polypeptide expressing nucleotide sequence isolated from the Sargasso Sea
atgagtaagattaaatcagatttgccattaatacctcttagagatgttgtagtttttcctggaatagtaacaacactttttgttggaagggcaaagtctgtagaagccttaaatattgcaatgacttccaacaagaaattggtattagttagtcaaaaagatgcaggtaacgaagatccaaaagttgaagatatttatcaatatgcttccataagtaacttattacagctaatcaaacttcctgatggcactatgaaagttttagtagaaggctataaaaggtgctctatagataagattattgaaaaagattcatacaccattgcaagagttactgaagaggatgatcttcctgtaaaagaaaatgagtctaagaatctagttagattaattaaagcaaagtttgaagactacattagtgttacaaaaagaattcctccagagatagtttcaacagtagattcattagatgaattatcaagattaatggatacaattactggacacctatcaattgaaacatcaaagaaacaagagattctagaaacacttgatcttaaagaaagagctgaaaaagttttaacttttatagaatcacagctagatgtagttgatgttgaaaaaaaggttcgagacagagttaaaaagcaaatggaaaaatctcaaagagaatattatctcaatgagcaaattaaagccgcacaaaaagagcttggtgaaataggagaagagggcgatgaactagagaatcttgagaaaaaaattcatgaagtaggcatgacaaaagaagccttaaaaaaagcaaagagcgagcttgcaaaatttaaacatatggcaccttcttcagctgaggcttcagttgtaagaacttatcttgattgtctagtggatgtgccatggaaaaagaagtctaaggttaaaactgatataaaagcctcgatggaaattcttgaagaagaccactatggtcttgaagaagttaaagaaagaatcgttgagtatttagcagttcaaaacaagagttaag

SEQ ID NO: 262706 - DNA, 430 bp, Unknown
  Bacterial polypeptide expressing nucleotide sequence isolated from the Sargasso Sea
ttcgagaaaaaagattttcatatacatgttccagaaggtgcaacgcctaaagatggaccttctgcgggaatagctatggttacatcaatagtatcttcaattacaaaagttcctgtaaaaagagaaattgcaatgactggagaggtaacaattacaggtcaagtgttgcctattggcggcctaaaagaaaagttattagctgctcatagagcaggtgttaaaaaagttttaataccaaaagaaaatgaaaaagatttagtagatgttccaaaaaaagttaaagatgatattgaaattattcctgtagagacagcggatgaagttataaaaattgctcttactaaagaattaaaaccgactgagtggacagaagtggataagttaactgagactaaaaaagacgataaatctcaagctagtattcagtaat

SEQ ID NO: 262707 - DNA, 505 bp, Unknown
  Bacterial polypeptide expressing nucleotide sequence isolated from the Sargasso Sea
gtagagtgcacggcgatcgattccggcgaaggaaagggcgcgctcaaaacgacgggtcaactcggcgacgtgatgaaggagtcgagcgccatcgcgcacacgtttactcgaagtttcctcgaaacaaaggatcccggtaacgagtacctcgccaacacgtctctgcacgtgcacgtgcccgcgggcgcgacgccaaaagacggaccctcggcgggcatcaccatcacgacgagtctgctctcgctcgccatgggcaagcccgtcaaaccgaacttggccatgacgggcgagttgacgctcacgggacgcgtcttgccgatcggaggcgtcaaggagaaaaccatcgccgctcgacgaagcggcgtgaagacgatcattttcccgagtggaaacaagaaggattacgacgagttatcggaggacattcgggaaggtttagaggcgcactttgtgtcgacgtacgaggaggtatatcatcaagcgctcgattgggagtcgtcgtgac

SEQ ID NO: 262708 - DNA, 526 bp, Unknown
  Bacterial polypeptide expressing nucleotide sequence isolated from the Sargasso Sea
ggcttggcctggacatccatgggggggcgcaaccctctccattgaagccaatgtggtgcacagtaagcaacggggcttcaaactcaccgggcagctgggtgatgtaatgaaagagtctgccgaaattgcttacagctatgtggcgagtaatcttgagctgttctccctaagcaaggaacagctggatgatgcctttgtgcacctgcatgtgcctgaaggagccaccccgaaggacggccccagtgctggcatcaccatggctacggcactactctcactgctaatgaaaaaacgggtcccccgtaaggttgccatgaccggcgagcttactctcaccggccaggtgctagcggtgggagggattcgcgaaaaagtaatcgccgctcggcgggtaggcatcaaggagatcattcttccagaggcctgtcgtcgcgatttcgacgaactccctgattacctcaaacacggtctcagcgtacattttgccgaacaatacagcgatgtcttccgcatcctctgggcctga

SEQ ID NO: 262709 - DNA, 841 bp, Unknown
  Bacterial polypeptide expressing nucleotide sequence isolated from the Sargasso Sea
atgaatttaaaagacggaacaattaaagaaattattagaaattatactagggagtcaggtgttagaaatttagaaagagaaatatctaaagtcactagaaaagtagtcaaaaaagttgttaacgatgaggaaaaaagtgttgaagtaaatgataaaaatatttcagaatttttaggtgttaaaaaatataaatttggtgaattggagaccgaaaataaagttggtatagtaataggattagcttggacagaattcggtggtgaaattcttaaagtagagacagtcaatatgccaggaaaaggaagaatgcaaattacaggtaaattaggtgacgttatgcaagagtcagtcaaagctgcaaaatcatttgtaagatcaaaaagcttagagtatggaattatacctccaacttttgagaaaaaagatttccatatacatgtacctgaaggcgcaactccaaaagatggtccatcagcaggtattgcaatggtaacttcaatagtttcatctattgcaaatattcctgttgatagggaaattgcaatgacaggagaagttacagttactggtcaagttttaccaataggaggattaaaagaaaaattattagctgctcatagagcaggtgtaaaaaaagttttaataccaaaagataacgaaaaagatttaatagatatacctaaaaaagtaagagaagatattaaaattattccagtagatagtgcagacgaagttttaaaaatagctttaacaaaagaacttaaacctgttgagtggacagaagtagaaaaaatatctgaatctaaaaaagacgaaaaatctcaagccagcattcagtaat

SEQ ID NO: 262710 - DNA, 1396 bp, Unknown
  Bacterial polypeptide expressing nucleotide sequence isolated from the Sargasso Sea
tccttcgacggtctcaacacgatcggcaccgtcgccaacgtgctgcgctacatcaccagtccggaggacggcgcgcatcacctgatatgccagggggtagagcgcttccggctgatcgcgccggtggcgggtctcgggttcagggccgccagggtggaaatgctgcccgataccacgcttcgcgactccgctgtcgacgcgcgcacgctggttctgaggcagcgcgcgggggaaatgatcgggctgctgcccaacgccggaggcgagcttgtgcgggccctggatgcgattgagtcgcctggcctgctcgccgacaccgtggccggcctgctcgaaatcccgccgggccgtaagcaggagatcctcgaaacgctcgacctctgcaaacggctggacaaggtgctcgacgccgtcgccggccggatcgaagttctgcgcctgtcgcaggaaatcggcgagcagacacgtggccggatcgatcagcgccaacgcgagatgatgctgcgcgagcagttgaggaccatccagcaggaactcggcgagaacgtcgaaagccgcgaagaagcccgcaagctggccgaagcgattgacgccgcgcatatgccgccggacgtcgaagctcatgcccgcaaggaactcggccggctggaacggatgccggaggcatcgtcggaatattcgatcagcgtgagctacctcgaatggctgaccgaactgccctgggcgcttgcgccggaggcgccgatcgacattgcccgtgcaaggcagattctcgacgacgcgcatttcggcttggaaaaggtcaagcgccgcatcctcgagtatctcggcgtcagaaagctcaatccccaaggcaaggcgcccattctttgctttctcggcccgcctggcgtgggcaagacatcactgggacagagcattgcgcaggcactcgcgcggccgttcgtacgggtgagtctcggcggcgtgcatgacgaatcggaaatccgtggccaccggcgcacgtatatcggcgccatgcccggcaatatcgtccaggcgatccgcaaagcgggggcgcgcaattgcgtcatgctgctggacgaactcgacaagctcggccatggcgtgcatggcgacccgggcgcggcgatgctcgaggttctggaccccgagcagaacgccaccttccgggacaattacctgggggtgccgttcgacctctccgccgtcgtgttcgttgccacggccaatcagctcgaaggtatccccgggcctttgagggaccgcctcgaaattctcgatttacccggctataccgaggccgagaagtttcagatcgcccggcgctttctggttccacgcgagttggaggcgtgcgggctgacccccgcacaatgcgaactgagcgacgagg

SEQ ID NO: 262711 - DNA, 703 bp, Unknown
  Bacterial polypeptide expressing nucleotide sequence isolated from the Sargasso Sea
aatgatttctgaaaattcaaaaccgctattgccactaagagatatcgtaatatttccatctattgttactcctttatttgtagggagaaaaaaatcaatcaaagccttagaagaagtaatgaaactagacaaatctattgttcttgttactcagaaaaattcagaggtagatgatcctaaagaggaggacctatactcattcggttgcttaagtaaaattttacaattgcttaaactacccgatggcactgtaaaagttcttgttgaaggtatcgaaagagtaaaaatattagaattagataatgaaaataaaaaatattttaattgtaaaatttcaattgtatcaagcgaaaaaaacgacgaagattcaaaagtttttgctacaagtttaatcaaaaaatttgaaaaactatcgagtttaagcagaaaagatattgttgattttactaaaagtttaaaaatgatcactagcccatcaaaaatagctgacaatatttgttcaaatttgaatattcaaatttcagataaacagcatctattagagatggtggatgtgaagaaaagactagaaaagatttatgaaattatagaaaaagaaactagcgtaatcacaatggagaaaaagattagaggaagggttaaaaatcaaatggaaaaaacccaaagagaatattacttaaacgaacaacttaaggctatcaaa

SEQ ID NO: 262712 - DNA, 718 bp, Unknown
  Bacterial polypeptide expressing nucleotide sequence isolated from the Sargasso Sea
tggtgaaaaagaaaaagtaaacgtaaataaaaataatttatcagattttttaggtgttaaaaaatttaaatacggtgaagtggaagcacaagatagagtaggaattgttacaggattagcatggacagaatttggaggagaaattttaaaaattgaaaccgttaatatgccaggcaaaggaagaatgcagataactggtaaacttggtgacgtaatgcaagagtctgtaaaagctgcaaaatcttttgtaagatctaaaagtctcgactatggaattatacctcctgtttttgaaaaaaaagattttcatatccacgttccagagggcgcaacaccaaaagatggtccgtcagcaggtataggtatggttacatcaattgtttcatcaattaccaaaaatccagtagataaaaatattgctatgacaggtgaagttacaataacagggcaagttttacctataggtggattgaaagaaaaattattagctgcacacagagcgggcattaatcaagttataattcctaaagagaatgaaaaagatttaatagatataccaaaaaaagttagagaggatataaaaataactcctgttgaatatgtagatgaggtattaaaaattgcacttaaaaatgaactaaaaaaagttgagtggacagaagtggaaaatatttcaaaatcagaaaaagatcaaaaatctcaagcaagtatccagtaa

SEQ ID NO: 262713 - DNA, 705 bp, Unknown
  Bacterial polypeptide expressing nucleotide sequence isolated from the Sargasso Sea
aagttcaagtaagcgataaaaatattccagattttttaggaattaaaaaattcaaatttggtgaagtagaggataaagataaaactggaatagtaataggattagcgtggactgaagtaggtggagaaattcttaaaattgaaactgtcaatatgccaggtaagggcagaatgcaaataacaggaaaacttggtgatgtgatgcaagagtccgtcaaagccgcaaaatcgtacgttagatcaaaaagtttagaatatggaataattccaccattctttgaaaaaaaagattttcatatacatgttcctgaaggagctacacctaaagatggtccatcagctggtatagcaatggttacatccattgtgtcatcaattacaaaaattccagttaaaagagagatagctatgaccggtgaagttacaattacaggacaagttttacaaataggaggtttaaaggaaaaattattagccgctcatagagcaggagtaaaaaaagtattaatacctaaagagaacgaaaaagatttagtagatattccaaaaaaggttagagaagatattaaaatcataccagttgaaacagcagatgaagtgcttaaaattgccctcacaaaagagctaaaaccggtggaatggactgaagttgataaaatatctgagggtaaaaaggacgataaatctcaagctagtattcagtaat

SEQ ID NO: 262714 - DNA, 727 bp, Unknown
  Bacterial polypeptide expressing nucleotide sequence isolated from the Sargasso Sea
catgaagacaaccatcgaattgcctctcctgccgttgcgtgatgtcgtcgtctatccgcacatggttatcccgctgttcgtggggcgcgagaagtctatcgaagccctcgaggccgcgatgacgggcgacaagcaaatcctgctgttggcccagaagaatcctgctgatgatgatccaggtgaagatgccctgtatcgcgtcggcaccattgccactgtcctgcaattgctcaaactgcccgatggcaccgtcaaggtgttagtcgaaggtgagcagcgcggcgccgtagagcgtttcatggaggtggatggccacctgcgtgcagaagtggcgctgatcgacgaagtcgaagccccggagcgtgagtccgaggtgttcgtgcgcagcctgctctcgcagttcgagcagtatgtgcaactgggcaaaaaagttccggctgaagtcctgtcgtccctcaacagcattgatgagccaagccgcctggtcgacaccatggccgcccacatggcgctgaagatcgagcagaagcaagacatcctcgaaatcatcgacctgtcggcccgtgtcgaacacgtgctggcgttgctggatggcgaaatcgacctgctgcaggttgagaaacgcatccgtggccgtgtgaaagagcagatggagcgtagccagcgcgagtactatctgaatgagcagatgaaggccattcagaaagaaactcgtgacggcgaagaa

SEQ ID NO: 262715 - DNA, 526 bp, Unknown
  Bacterial polypeptide expressing nucleotide sequence isolated from the Sargasso Sea
acaggtaagcttggcgatgttatgcaagagtcagttaaagcagcaaaatcttttgtaagatcaaaaagtttagaatatggaataataccacctatctttgaaaaaaaagattttcatattcatgtaccagaaggcgctactccaaaagatggtccatctgctggaattggtatggttacttcaatcgtatcatcgataacaaacaatccagtttataaacatattgctatgacaggtgaagttactattactggacaggtacttccaataggtggtctaaaagaaaaattacttgctgcacatagagctggaattaaacaagttataattccaaaagaaaacgaaaaaaatttagttgatattccgaaaaaagttcgtgaagatataaaaattactccaattgaaaatgttgatgaagtattaaaaatagctcttaaaaaagaattaaaaagagttgagtggactgaagtagaaaatatttccaaaactgctaaagatcaaaaatcacaagctagcattcagtaat

SEQ ID NO: 262716 - DNA, 923 bp, Unknown
  Bacterial polypeptide expressing nucleotide sequence isolated from the Sargasso Sea
tacagaagatgagaagattaatatcgctaacaagtatttacttcctaagcaaatcaaagataacggtgttaaagaaggtgaaatgaagttagctgacgacacaataaaagaaattattagaagctataccagagaaagtggtgttcgaaatttagagagagaaatatcaaaagtaacaagaaaagttgttaaaaaagttgtaaataatgaagaaaagagtgttgtagttaatgaaaaaaatatacctgactttcttggaattaagaaatttaaatttggtgaactagaagcaaaagataaagttggaatagttataggtttagcttggacagagtttggaggcgaaatattaaaagttgaaacagttaatatgccaggtaaaggcagaatgcaaataactggaaagttaggtgatgtaatgcaagagtcagtaaaagctgcaaaatcttacgttagatcaaaatgtttagagtttggagtaactcctccactatttgagaaaaaagattttcatattcacgttccagagggtgcaacaccaaaagatggaccttctgcgggtattgctatggttacatcaatagtatcatcaattaccaaagttccagttaagagagaaattgctatgactggagaggtaacaattacaggtcaagttttacctattggtggactcaaagaaaaattattagcagctcatagagcaggtgttaaaaaagttttaatacctaaagagaatgaaaaagatttagttgatgtaccaaaaaaagtgaaagatgatattgaaatagttccagtagaaaccgcagatgaagtaattaaaatagctttaactaaagaattaaagcctactgaatggactgaagtagataaattaaccgaaactaaaaaagacgataaatctcaagctagtattcagtaat

SEQ ID NO: 262717 - DNA, 766 bp, Unknown
  Bacterial polypeptide expressing nucleotide sequence isolated from the Sargasso Sea
tatggaagttaaattatcacagcctttattaccattaagagacatcgtggtgtttccaagcatggttattccactatttgttggaagagataaatctattactgccttaaatgaggtaatgaaaagtgacaaaaaaataatactagtcactcaaaaaaattctgaagttgatgatccaaaaaaaaatgatgtattttcttatggatgtgaaagcaacatattacaacttttaaaacttccagacggaacagttaaagttttggttgaaggaattaaaagagtgaaaattattgattttaaggatgatgaaaaatttatcacatgcacatacgaacatcaaaaagatgttttaactaaagatgaagatctattacctctagcacttacggcagtgagaagattggaaaagttgacgtcagttaacaaaaaaatttcgtcagaaactattagcaatattaaacaactaaaagatccatctaaaattgtagataatattgtttcaaaccttaatgcatcgatatctgagaaacaacaaatattcgaaacgttagatgttaagaaaagattaaatgcagccattaaaatgatggaaagtgaaacaagtattattggagtagaaaaaagaattagaggaagagttaaaacccaaatggaaaagactcaaagagaatattatttaaacgaacaattaaaagcaattcaaaaagaattaggtgaaattgaagatgggcaagatgaaactactaacttaaaaaaatcaatccaa

SEQ ID NO: 262718 - DNA, 766 bp, Unknown
  Bacterial polypeptide expressing nucleotide sequence isolated from the Sargasso Sea
catggacatcaaagtgaatctgccgttattaccgttaagagatattgtagtttttcctagtatggtaatcccattgtttgttggaagagataaatctataaccgcgttaaacgaggtcatgaaaaatgaaaaaaaaatagtcttagttactcaaaaaaattctgaagtagatgatcctaaaaaaactgatgttttttcttatggatgtgaaagtaatattttacaattattaaaactaccagacggaacagtaaaggttttagttgaaggaacaaaaagagtaaaaattatcgattttaaagatgataataaattcataacttgtacttttgagtatttgaacgatcaatttgataagaatgaagatcttatgcctctagccactactgcagtaagaagattagacaagttaaacactattaataaaaaaatttctagcgaaacaataaacagtattaaagagttaaaaaatccatcagcgatagcagataatatcgcgtcccatctaagtactacaatttctgaaaaacaacaaatttttgagacaagtgatgttaaaaaaaggcttaacgcagtcattaaaattatggaaaatgaaaccagcatcataggtgttgaaaaaagaattagaggtcgagttaaaactcaaatggaaaaaacacaaagagaatattatttaaatgaacaattaaaagctattcagaaggaattaggtgaaattgaggacggcaaagacgaaacatcaaatttaaataaagcaatctaa

SEQ ID NO: 262719 - DNA, 847 bp, Unknown
  Bacterial polypeptide expressing nucleotide sequence isolated from the Sargasso Sea
tatggacgtcaaaatatcattaccactattaccattaagagatatcgtggtttttcctagcatggttattcctttgtttgtaggaagagataaatctatctctgctttaaacgaagtcatgaaaaaagataaaaaaattattcttgttactcaaaaaaattctgaaattgatgatcctaagaaaacagatgtttttatgtatggttgtgaaggaagtattttacaattattaaaattaccagatggtacagtaaaagttttggttgaaggtattaaaagagtaaagatcttagatttcaaagataatgaaaaattcataacatgtgattacacacactataacgatgttatatctaaggatgaagatttgtttcctttagcagccacagctttaagaagattagaaaaattaacatccataaataaaaaaatttctagtgaaacaattaatacaattaagcaattaaaagatccttctcagattgctgacaatattgcatctcatataactgctactatttctgaaaaacaacaaatcttcgaaaccgtagatgttaagaaaaggttaaacgcgatcattaaaataatggaaaacgagacaagtatcattggtgttgaaaaaagaattagaggaagagttaaaactcaaatggaaaaaacgcaaagagaatattatttaaatgaacaattaaaagctattcagaaagaacttggagaaattgaagatggtaaagatgaaactactagcttaaacaaagctattacaagagcaaagatgccaaaagaagttgaaaagaaatgtttgcaagaactaaagaaattaaaaaatatgagtccaatgtctgct

SEQ ID NO: 262720 - DNA, 322 bp, Unknown
  Bacterial polypeptide expressing nucleotide sequence isolated from the Sargasso Sea
gctgttcttaaagctaagaaaagatatgaagtcacctatattatgtttatttggccctcctggtgtaggtaaaacttcacttggtaaatctatagccaaatcaataaacagagagtatgttagagtttcgctaggtggattaagagatgaagctgaaattagaggacatagaaagacatacattggagcaatgcctggtagaattatacaaagtgtaagaaaatcaggtacatctaatccagtatttgttttagatgaaattgataaaatttcaagtggctcacaaggtgatccctcatctgctttgttaagagttgcttga

SEQ ID NO: 262721 - DNA, 796 bp, Unknown
  Bacterial polypeptide expressing nucleotide sequence isolated from the Sargasso Sea
taaagaaaatgggcttaccactaaacaggtaaaaatcaacgatactggaattaaggaaattatttcttcatacaccagagaatcaggtgttagaagtttagaacgagaaatttctaatgttcttcgaaaaatagctgtagatgtagttaacaaaaaacttaaaacagctagtatatctaaaaaaactgtaaatgaatatcttggtattccaaaattccaatcagatttagctgaaaggactactaagcctggagtagtaactggaatggcatggactgctgctggtggagatatattattcattgaatctagcaagatgaaaggtaaaggcgttttaaccttaaccggtcagctgggagatgttatgaaagagtctgcttcagctgcatttacttatgtgaaatcccatacagatattttaaatcttaaagatgatttcgcggataaaatggatattcatgttcactgtcctgcaggagcaattccaaaggatggaccttcagctggagttggaatgtttacctcgcttgtgtcattattaactaataagccagttaaaagtaaagtagctatgactggtgaaattaccttgagaggaaatgtattagctattggtggagtaaaagaaaaagtaacagctgctcatagagctggtattaaaacaattatccttcctcacgcaaataaaagagatcttgaagaaattccagatcatatcaaaaaagatttatcttttcactttgctaaagaagtgatggatgtaattgatgtagcaattcctaatttgaaaaagtag

SEQ ID NO: 262722 - DNA, 989 bp, Unknown
  Bacterial polypeptide expressing nucleotide sequence isolated from the Sargasso Sea
attagatgaaattgataagcttggcgctgactacagaggtgatccatcttcagctttgcttgaagtattagatccagaacaaaataactcctttaatgatcattatcttgaggttgattatgacttgtctgatacaatgtttattacaactgccaatacattgagaatgccgccagcattattagatagaatggaaattattaggatagcaggatacacagaagatgagaaattagaaattgtaaagcaacaccttgcccctcagatgcttgaaaaacatggcttaaaaaaagatgaacttattctagatgatacagcaattttaggtttaattagatattatactcgtgaagctggagtaagaagtctcgaaagagaactttcaaatcttgcgcgcaagacagtaaagaaaattgtagctggtgaagttgcatcaattaaaatcgatgaaagtaatttgaatgactttgctggtgttaggaagtttaagtacggtgaaattgacaatgatgatcaagttggaattgtgactggacttgcctggactgaggtaggtggagacatcttgccaattgaatcagttataatgccaggtaaaggcaggatgactattaccggaaagttaggcgatgtaatgaaagagtcaatacaggcagcgaagtcatatgttcgctcaaggtgtatagagtttggaatcaagccaactatttttcctcaaagagacatacatattcatgttccagaaggcgctatacctaaagacggaccatctgctggtcttggcatggtgacttcaattgtttcggtattaactggaattccggttagaaaagatatcgcaatgacaggcgaggttactttacgtggaaaagctctcggcattggaggacttaaggaaaaattattagctgcacttagagctggtacaaaaacggtaatcgtcccaaaagaaaatgagaaggatatggctgatatacctgataatgtta

SEQ ID NO: 262723 - DNA, 973 bp, Unknown
  Bacterial polypeptide expressing nucleotide sequence isolated from the Sargasso Sea
gtgctggtcgaaggtgtgtatcgcgcccaggtcgagagttatacggagaccgacgacctgtatgctgcgcgcgtattgcaactcgacgccgacgaggtcagcgaacgggaatcggaggttttaagtcgctccgtgatgacgcagtttgaccagtacgtgaagctgaataagaaggtgccgccggagattatttcttcgctgtcgagtattgacgatccgtcgcgactcgccgacaccatcgccgcacatatggcgatcaagattcaggacaaacaagaggttcttgaaatcgttgacctgcgcgagcgtctggagcacctgatcaagttgatggagtccgaaatcgacttgctgcaggttgagaaaaaattgcgcggccgcgtcaagaagcagatggagaaaagtcagcgcgagtactacctgaacgagcagatgaaagcgattcagaatgaactcggtgagatcgaagacggcgtcaacgagttcgacgaactggccggcaagattgaaaagtcgggcatgtcgaaggaggcgcgcgagaaagcggaaaacgaactcaagaagctgcgcatgatgtcgcccatgtcggccgaagcgacggtcgtacggaattacatcgactggattttgtcggtgccgtggaaaaagcgttcaaaggttaaacgcgatttgaatctcgccgaagagaccctggaagccgatcattatggccttgaaaaggtcaaagaaaggattcttgagtacctcgccgtgcagcagcgcgttaagaaaatgaaaggtccgatcctctgcctggttggcccgccgggcgtcggcaagacctcgctcgggcgttcaatcgccagggcgacgaatcgaaaattcgtgcggatgtccttgggcggcgtacgggacgaggcagaaattcgcggacatcgacgcacttacgtgggctcactgcccggtaagatttgcagaatatggcgaaagtgaa

SEQ ID NO: 262724 - DNA, 841 bp, Unknown
  Bacterial polypeptide expressing nucleotide sequence isolated from the Sargasso Sea
atggaaaaaatcaaaggtccaattttatgtttaataggacccccaggtgttggaaaaacttcacttggtaaatcaattgctaaagctactaatagacagtttgtaagaatgtctctcggtggagttagagatgaagcagagataagaggacatagaagaacttatattggatctttgccaggaaaaattattcaaatgatgaaaaaagctggcacaaaaaaccctttaattctcttagatgaaattgacaaagtaggtaatgactataggggagatccatcttctgcattacttgaagctttagatccagaacaaaatacaaattttaacgatcattatttagaagttgattatgatctttccgatgtgatgtttgtaacgacagcaaacactttaaatattttacctcctttgttagacagaatggaagtaataagaattcctggctatactgaagatgaaaaaattaacattgctgataaatatttattaccaaaacaaataaaagaaaacggtgttaaaaaagaggaattagaagttgcaaatggtacaattagagaaattataagaagctatacaagagagtcaggggtaagaaatttagaaagagaaatatctaaagttgcaagaaaagtagtgaaaaaagtcgttagtggagaagaaaaaaaagtaaatgttagtgataaaaatataggagatttcttgggtgtcaaaaaatttaaatacggagaagttgaggctgaggatagaattggaattgtaacaggactagcctggacagaatttggaggtgaaattcttaaaattgaaacaatacatatgccaggaaaaggaaggatgc

SEQ ID NO: 262725 - DNA, 793 bp, Unknown
  Bacterial polypeptide expressing nucleotide sequence isolated from the Sargasso Sea
ttagttgaaggtgaaaaaagggtaaaaattttaaaacatagtgaaagttcaaataatttcttaaattgtgaagttgaagttgtagatgatcaaaatacctcaaaagatcttgaacagtttgcttcaggtttagttaaaaaatttgagagacttcaaacattaagtaaaagagagtttaacgagagttcaaataacattaagaatttaaaagacccctcacaaatagcaaataacatatcttcaaatttaaatatccagatttttgaaaaacaagaattgcttgagattacagatcttaaaaaaaaactagagaaaattcatgcgattatagaaaaggaaacaagcgtgatatctgttgagaaaaaaataagaggtagagtaaaaaaccaaatggaaaaaactcaaagagaatactatttaaatgaacagttaaaagctattcaaaaagaacttggagaaattgatgaaggtaaagatgaattgtcttcattgtcgaaagctatatctgaggcaaaaatgcctaaattagcaaaagaaaaatgtttatctgaattaaaaaaacttaaatcgatgagtcctatgtcagctgaagccacagtagtaagaaactatttagactggatgacagaactaccttggtcaaataaatcaaagataaatactgatttaaataatgctcaaaagattttagatgaagatcattatggtttagaaaaagttaaagagagaataatagaatttcttgcagtacaaaaaagaatccaaaaaatgaaaggcccaattttgtgtttag

SEQ ID NO: 262726 - DNA, 502 bp, Unknown
  Bacterial polypeptide expressing nucleotide sequence isolated from the Sargasso Sea
cgagcgtcctcgcttggattggcttctaattttcatgagaaaaaggatatccatattcatgttcccgagggcgcaaccccaaaggatggcccgagtgccggtattgggatgtgtacggctttggtttcagttttaacaggaattccggttaaagcagatgttgctatgacgggcgagatcaccttgagaggtcaggtgcttcctataggtgggttgaaggaaaagcttctagcggctcacaggggcggaattaaaaccgtcattattcccgccgaaaatgaaaaagatttaaaagaaataccagaaaacgtaaagtctaacctggatattgtatccgtgaaatggatggatgaggttctgtctcttggtcttgaatctgtgccagtcgctaaatcctcaactcgtaaatccggacgtagcaaagagggttcagcgtcccaaaattcatcctctacgcggaaaaaacgagaagatatttcggttggtgtcaagacccattaag

SEQ ID NO: 262727 - DNA, 1108 bp, Unknown
  Bacterial polypeptide expressing nucleotide sequence isolated from the Sargasso Sea
cgctgcacgtttggctgataccatgctgccccatatgccattaaaagttgatgacaagcagaaggtattagaaatcatcgatgtgacggaacgtttagagttcctgatggcgatgatggaaagcgaaatcgatattctgcaagtcgagcgccgtattcgcagccgtgttaaaaagcagatggaaaaaagccagcgcgagtattacctgaatgagcaaatgaaagccattcagcgtgaactgggcgagctggaagatacaccggatgagttcgaaactctgtcgaagaaaatcgaacaggcgcaaatgccggaagaagcccgcactaaagcgacggctgaactgcaaaagttaaaaatgatgtcgcctatgtcggctgaagccacagtagtgcgcagctatatcgactggctgactaatgtgccgtggaaaaagcgcagcaaggtgaaaaaagacctggcaggcgcagaacgtattttggactcggaccactatggtctggataaagtcaaagaacgcattctggaatatctggccgtgcagcagcgtgtcaacaaattaaaaggcccgattttatgtttagtcggaccgccaggcgtaggtaaaacttcactgggtcagtctgttgctaaagcaacaggccgtaaatatgtgcgtatggctttaggtggcgtgcgtgatgaagcggaaatccgtggtcacagacgcacctacattggctctatgccgggcaaaatcattcagaaaatggctaaggttggcgtacgcaacccgctgttcctgctggatgaaattgacaaaatggcctctgatttccgtggtgatccggctgcagctttgcttgaggtgttagatccagagcaaaataccgccttctcggaccactatctggaagtggattacgacttatccgacgtgatgttttttgccacatcgaacagcttaaatattccggcagccttactggaccggatggaagtgattcgtttagcgggttacaccgaagatgagaagctgaatatttccaagcagcatttgatcaacaaacagattgaacgcaacggtttaaaacctcatgaaattgagattgaagacagcgcaattatcggc

SEQ ID NO: 262728 - DNA, 560 bp, Unknown
  Bacterial polypeptide expressing nucleotide sequence isolated from the Sargasso Sea
gggtaaagcaaaactaactatcacaggtagcttaggtgaggtaatgaaggagtctattaaagctgcagtttcttatgttaggtcaaaatcattaaaccttggaataaaccctaatgatttcgaaaaatatgatatccatatacatgttccagaaggtgcaactccaaaagatggtcccagtgctggtattgcaatattcaattctttagtatcttcaatgactcataataaagttagaaaagatgttgcaatgacaggagaaattacacttcgtggacgtgttttgccaattggtggactaaaagaaaaaatatatgcagcaagtagagctggaattaaaaaagttctaatacctgaggaaaatcatcgtgaaatagttgaatttgataaagaaattttaaaaactcttaaaattattcctgtttcagaagctatttcgattttagagcacacattaatcaaaccagtaatacctataaatttaagcgaatcagacctgcaagaaaatcaaaaaaggtcatctgaactcgatctatcaaaagaaaatattactcattaat

SEQ ID NO: 262729 - DNA, 972 bp, Unknown
  Bacterial polypeptide expressing nucleotide sequence isolated from the Sargasso Sea
atcttggaacaaatcaacatcaaagagaggcttgagtatgtcattggactgatagaagttgaaatagacatgatgaaagttgagcagaaagtgagaggtcgtgtcaaagatcagatggaaaagagccagaaagaatactatctaaatgagcagatgaaagcgatccagaaggaactcggtgatttagacaatgccaataatgaatttgatgaacttgaagagaagatcaagcaatcaggaatgacaaaagaggctgatgaaaaagcatcatcagaactcaaaaaacttcaaatgatgtcccccatgtcagcagaagcaactgtggttagaaactttcttgatgttttggtttctgcaccatggaaaaagaaaacaaaagcaaaagtctcattggatcaggcgcatgaaattctagatgaggatcattacgggctaaaaacggttaaggaaaggattattgagtatctagctgttcaaaaaagagtgaaaaaactcaaagggcctatactctgcttagtaggtcctccaggcgttggaaaaacctcattgggagcaagtattgcgagagcaactggaaggaaatttgttagaatgtctcttggtggcgtaagggatgaagcggagatcagagggcataggagaacctacattggagccatgccaggaaagatcatgcagaatctaaataaagtaggagtaaggaacccactttttcttcttgatgagatcgataaaatgtcgatggattttagaggagacccatcttctgcacttttagaagttctagatccagagcaaaatacaacattcaatgatcactatatggaagttgattttgatctttctgatgtaatgttcatttgtacagccaacactcttaatatacccccacctttattggatagaatggaagtcattcgcatagagggctatacagaagatgaaaaaatgaatatcgctgagaagtactta

SEQ ID NO: 262730 - DNA, 1000 bp, Unknown
  Bacterial polypeptide expressing nucleotide sequence isolated from the Sargasso Sea
atagcgaaagcaaccaatagacagtttattagaatgtctttgggaggtgtcagagatgaagctgagattagaggtcatagaagaacatatataggttcacttccaggaaaaattatacaaatgatgaaaaaagcaggtactaaaaatccactttttttactcgatgagatagacaaaataggaaatgattatagaggcgacccttcttcagctttattagaagctcttgatcctgaacaaaacacaacatttaatgatcattatttggaagttgattatgatttgtctgatgtaatgtttgtaacaactgcaaatacattaaatattcttccccccctacttgatagaatggaggttataagaattccaggttacacagaagatgaaaaaataaacattgcaaataaatatcttcttcccaaacaaattaaagataatggtattaagcaaggtgaaatgaatttacatgaagggacaattaaagaaataattagaaattatactagagagtcaggtgttagaaatttagaaagagaaatttcaaaagttacaagaaaagtagtaaaaaaagttgttaatgaagaagaaaaaagtgttgaagtaaatgaaaaaaatttatcagattttttaggtgttaaaaaatttaaatttggcgaattagagtctgaaaataaaataggtatcgtaataggattagcttggaccgaatttggaggagaaattttaaaaatagagactgtaaatatgcctggcaaagggagaatgcaaattacaggtaaattaggcgatgtaatgcaagagtcagttaaagcagcaaaatcatttgtaagatcaaaaagcttagagtacggaattattcctccaacatttgaaaaaaaagattttcatattcatgttccagaaggtgcaactcccaaagatggaccttcagcaggtattgccatggtaacttctattgtatcttcaataacaaatattcctgttaataaagaaatagcaa

SEQ ID NO: 262731 - DNA, 1048 bp, Unknown
  Bacterial polypeptide expressing nucleotide sequence isolated from the Sargasso Sea
ttaggaggaattagagatgaggctgagatcagaggtcatagaagaacctatattggatctcttccaggtaaaataatacaaatgatgaaaaaagctggcacaaaaaatcctctattccttcttgatgaaatagacaaagttggtaatgattatagaggcgatccttcatccgctttattagaagcattggaccctgaacaaaataaagaatttaacgatcattatttggaggttgattatgacctttctgatgtaatgtttgtaactactgctaatacattaaatattttgccgccattgctcgatagaatggaagttatcagactatcaggttatactgaagatgaaaaagtaaacatttctcaaaaatttctaattccaaaacaaagtgagaataacggtcttaaaaaaggagagtggagtataaacgaagaagttaacagagaaattataaggaattacacaagagagtcaggtgtaaggaatttggaaagggaaatatctaagattgcaagaaagcttgtcaaaaaaattgataataatgagaaagtaaacagttcaattaaaggaaccgatcttaaaaatttattaggagttccgaaatttaaatatggtgaaatagaggaagagaatagaattggtgtagttactggactcgcatggacagaagttggaggcgaaatacttaaaatagaatctgcaattatgcctggaaaaggcaaaatgcaaataactggtaagttaggtgatgtaatgcaagagtctgtaaaagctgcaaagtcttatattagatctaaaagtttagaatttggaattataccaccaatttttgataaaaaagattttcatatacatgtacctgagggggcaacacctaaagatggtccatcagcaggtgttggtatggtcacctctattatatctgcaattactgaaatacccgttgataaaaatgttgctatgacaggagaaataactttgagaggtatagttcttccgataggaggattaaaagagaaacttttagcagctcatagagcaggtataa

SEQ ID NO: 262732 - DNA, 762 bp, Unknown
  Bacterial polypeptide expressing nucleotide sequence isolated from the Sargasso Sea
ggtaagtccattgcaagagctacaaatagaaaatttgccaggatgtctcttggaggagtaagggatgaagctgaaataagaggacatcgaagaacttatattggatcaatgccgggcaagatcatccaaaaactttcaaaagtagaggtaaaaaaccccttatttttattagatgaaatagataaaatgggaatggatcatagaggcgatcctgcgtcagcacttctcgaagttcttgatccagagcaaaataatacattctctgatcattacttggaagttgattttgatttatcagagataatgtttgtttgtactgcaaacagcttaaatattcctggtccattgttggatagaatggaaatcattagacttccgggttatatcgaagatgagaaattaaatattgctaagcagtatcttattccaaaacaattggaaagaaatggactggataataccgaagttaaattaaccgataaatctgtcttagacattgtgcgttattacacaagagaagctggagttagaggtttagaaagacaaattgcaaaaatatttagaaaatctgtcaaagaaagagttttatcagattctaaaaaagctaaatccattatcaacattacaccaaagaatctagagaagtattgtggggttcctaaatttaagtttggagaagctgatgttgaggatattgtcggaaaagttgctggactcgcttggacagaggttggtggcgagctacttactattgaatcttca

SEQ ID NO: 262733 - DNA, 1075 bp, Unknown
  Bacterial polypeptide expressing nucleotide sequence isolated from the Sargasso Sea
gatgttgagaagaagattagagatagagttaaaaaacaaatggagaaatctcaaagagaatattatcttaacgagcaaataaaagctgctcaaaaagaacttggagagattggagaagagggtgatgaattagaaaaccttgagaagaaaatccatgaagttggaatgactaaagaggcattaaaaaaagctaagagcgaactagcaaaatttaaacatatggcaccttcttcggctgaagcatccgttgtaagaacttatttagattgtcttgtagatgttccttggaaaaagaaatcaaaaattaaaacagatattaaagcttcgatggatattttagaggaagatcattacggactagaagaagttaaagagagaatagttgagtatcttgcagtgcaaaaaagagttaaatctatgaaagctccagttttatgtcttgtcggccctccaggtgttggaaaaacttcacttggtgaatcaattgctcgtgcgactaacagaaagtttgtaaggatgtccttaggtggagtaagagatgagtcagaaatacgaggccacagaagaacatacattggatcaatgccaggtaagatagttcaaaaacttagtaaagttggagtaaaaaatccattatttcttttagatgaaatcgataagattggcatggatcacagaggcgatcccgcttctgctttattggaagttttagatcctgaacaaaataatacatttagcgatcattaccttgaagtagattatgatttatctgaagtgatgtttgtttgtactgctaacagcctaaacattccaactcctttactagacagaatggagattataaggatacctggctacatcgaagatgaaaaagtgaatattgcaaataaatatcttttacccaagcaaatgtctcgtaacggcgtaaaggataatgaaatcaaattaaataaagaagtaattttagctttaataagatactacactagggaggctggtgttagaggtcttgaaagacaaattgccaaaattttaagaaaggtagttaaagaaagattaattgcgaagaaaccaa

SEQ ID NO: 262734 - DNA, 859 bp, Unknown
  Bacterial polypeptide expressing nucleotide sequence isolated from the Sargasso Sea
gtagctcagaaaaactctgaagtagatgaaccacaacaaaaagatattttttcatatggttgtctaagcaaaatattacaattactgaaattgcccgatggtacagtaaaagtacttgtagaaggcttaagtagagtgaaaataacagaaataagcgatgaaaataaaaaatatttaagctgcaaaatagacagtataaacgatgagaaagaaacagaagagaacaaattatacgctacaagcttaattaaaaagtttgaaaaattatctagtcttagcaaaaaagactcaatggattttataaaaaccttaaaatcgcttaatggagctgcacaaatagttgacaatattgcttcaaatttgaatatttccattcaagataagcagtttctacttgaactagttagtttaaagaaaagattggaaaaaatttatgaaattttagaaaaagaaaccagcgtgataagtatggagaaaaaaattagaggaagagtcaaaaatcagatggagaaaactcaaagagaatattatttaaatgaacagttaaaagccatacaaaaggaactaggtgaaatagaggaaggaaaagacgaaatatctaatcttacaaaatcaattgtgaaggctaagatgacaaaagatgctcaaaataaatgcatgtctgaactgagaaagctaaaggcgatgagtccaatgtcggcagaagcaactgttgtaagaaattatttagattggatgatagatttaccatggaataacaaaagcaaagtaattaaagatttaaactcagcacaaaaaatattagacgaagaccattttggcttagaaaaagttaaggagagaataattgaatttttag

SEQ ID NO: 262735 - DNA, 1029 bp, Unknown
  Bacterial polypeptide expressing nucleotide sequence isolated from the Sargasso Sea
caatttaaacaagctatccttaaatctaaaatgccaaaagaagttcaaaaaaaatgcatgtctgaattaaaaaaattaagaaatatgagtccaatgtctgctgaagcaacagtcgtaagaaactatttagactggatgatagatataccttggtataaaaaagataaagttgatattgatttaaataaagcattaaaaatattagacgaagatcattttggattagataaagttaaagaaagaataatagaatttttagctgtacaaaaaagaatggaaaaaataaaaggtccaatactttgtttagttggtcctccaggagttggaaaaacatcgttaggtaagtctattgctaaagcaacaaataggcaatttgtaagaatgtcattaggcggaataagagatgaagctgaaattagaggtcatagaagaacttatataggatctttgccaggaaaaattattcaaatgatgaaaaaggctggaactaaaaatccacttattctactagatgaaatagataaagtaggaaatgactatcgtggtgatccatcctcggcattattagaatctttggatccagaacaaaatacaacttttaatgaccattatcttgaggtcgattatgatttatctgatgttatgtttgttacaactgccaacacattaaatattttaccacctttattagacagaatggaagttattagaatacctggttatacagaagatgaaaaaattaatattgctaataaatttcttttaccaaaaactattaaggaaaacggggttaaagatggagagatggatttatctgatggtacaataaaagaagttattcgtaattacacaaaagagtcgggtgttagaaatcttgaaagagaaatttcaaagataacaagaaaagttgttaaaaaagttgttaacgctgaagaaactaaagttaaaattaatgaaaaaaatttaacagactttcttggtgttaaaaaatttaaatttggtgaattagaaaatgaaaataaagtagga

SEQ ID NO: 262736 - DNA, 729 bp, Unknown
  Bacterial polypeptide expressing nucleotide sequence isolated from the Sargasso Sea
cgtctcaaaaaaaagttactaacatatctaataaaaatcttgataaatattctggcgttaaaaaattaaaatatggaatagctgaaaaagataatgctattggacaagtaactggtttggcttggactgaagttggcggcgaattgttaaccattgaagcttcaaatataaaaggtaaaggaaggattataaaaacaggttcccttggtgatgtaatgcaggaatctattcaagctgctttaactgttgttaggtcaagatcagactcccttggtatagattcagatttttatgagaaatatgacgttcatattcatgtcccagagggtgctacaccaaaagatggaccaagtgctggaggtgcaatggcaatttcattgatctcagtatttactggaattccagtgagagcagatactgcaatgactggagaaataacacttagaggacaaattttgaaaattggtggtttaaaagaaaagttacttgcagcaaaaagaggcggtatcaagaatgttattattccaaaagaaaatatgcctgacctccaagaaattccaaaacaaattactgattcacttgagataaaacctgttgaatggattgatgagattattaactttgcattaacagatgaaccaacaccgctgcttaaaaatcaaaaactagctaaaagtaaaaatgctagtaaaaaatcaacaaagtcctctgacaaacaaactcactaaa

SEQ ID NO: 262737 - DNA, 883 bp, Unknown
  Bacterial polypeptide expressing nucleotide sequence isolated from the Sargasso Sea
agatcaaaaatattagatttgaaagatgatgataagtttcttacttgcactgtcgagagtcaatctgatgtgattactaaaaatgaagatttgttacctcttgctgtatctgcatatagaaaactagaaaagttaaactcagttaataaaaaaattgctaacgaaactataaacaatataaagattttaaaagatccttcaaaaatagctgataacattgcttcgcacttaaatactactatatccgaaaaacaacaattatttgaaactttagatcttaagaaaagattgtcagcaatcattaaaattatggagaatgaaactagtataattggtgtcgaaaaaagaattagaggcagagtaaaaactcaaatggaaaaaacccagcgagaatattatttaaatgaacaattaaaggctattcaaaaagaacttggagaaattgaggacggtaaggatgaaacttcaaacttaaataaagcaatacaaaaagcaaaaatgccaaaagaggttcataaaaaatgtatgtcagaattaaaaaagttaagaaatatgagcccaatgtctgctgaagcgaccgttgtaagaaactacctagattggatgatagaaataccttggtttaaaaaagataaagttgatattgatttaaataaagctttaaaaattttagatgaagatcattttggtttagagaaagttaaagagagaattattgaatttttagcagtccaaaaaagaatggagaaaattaaaggcccaattttgtgtcttgttggacctcctggtgtaggaaaaacttcattaggaaaatcaattgctaaggcaaccaatagacaatttgtaagaatgtcattgggaggcataagagatgaagctaaaa

SEQ ID NO: 262738 - DNA, 931 bp, Unknown
  Bacterial polypeptide expressing nucleotide sequence isolated from the Sargasso Sea
gaggcacaaattgacttaactgaagttgagcaacgcataagagggcgggttcgaaaacagatggaaaaatctcaaaaagagtattttttaaatgagcaaataaaagcagcgcaaaaagagctgggtgaaattggtgaagaaaaaaatgaacttgatgagatccagaagaagattgaggctacaaagctttcaaaagatgcattagaaaaagtaaattctgaattttcaaaacttaaacaaatgtcaccaatgtcggctgaggcaacggtggttagaacgtatattgagactcttttagaggtcccttggagtaattcgacaaagattaatctagatttaaatagagcaaaaagtgttctcgacacagatcattatggcttaaaagagataaaagatagaatcatagaatatcttgcagttcaaaaaagagtaaaaaaaatgaaagctcccgtattgtgttttgttggccctccaggagttggtaaaacctcattaggagaatcaatagcaagatcagtaaatagaaattttattaggctatctcttgggggtgtaagagatgaggccgagataaggggccatagaaagacatacatcggttcgatgcctggcaaaataattcagaaacttacaaaagtaaaagtaaagaatcctttatttttgcttgatgaagttgataaggtagggatggatcaaagaggcgatccaagttctgcgttactagaagttttagatcctgaacaaaataatacatttaacgatcattatctagaggttgattatgatttatcagaagtaatgtttatttgtacagcaaattctttaaatatacctgcaccactgcttgatagaatggagataatacgattgccgggatatattgaggatgagaagttgaacattgctaaaaactatcttgtccctagaaatc

SEQ ID NO: 262739 - DNA, 986 bp, Unknown
  Bacterial polypeptide expressing nucleotide sequence isolated from the Sargasso Sea
aaagggccgatactatgcttggtaggtccaccaggagttgaaaaaacctcattgggagcaagtattgcaagagcgactggcaggaaatttgtaagaatgtctcttggtggcgtaagagatgaagcggagatcagaggccacagaagaacttacatcggagccatgccaggaaagatcatgcagaatctaaataaagtaggcgttagaaacccactttttcttcttgatgagatcgataaaatgtcgatggattttagaggagatccatcttctgcacttttagaagttctagatccagagcaaaatacaaccttcaatgatcactatatggaagttgattttgatctttctgatgtaatgtttatttgtacagccaatactcttaatatacccccacctttattggatagaatggaagtcattcgcatagaaggctatacagaagatgaaaaaatgaatatcgctgagaagtacttagtgaagaagcaaacagaagcaaatggtctcaaagattctgagattaaaatcacaaatagcgcaattctctcaattattcgtcactatacccgtgaagcaggagtcagaaacttggatcgtgaaatcgcaaaaattgccaggaaagtagtgaaatcattggtgatgaagtctaaagatgaaacagttcatgttagaccaggtagccttgaaaaatatcttggcgttcaaaaattcaaatatggcattgctgagaaagataatcaaatcggtcaagtgactggtttggcttggactcaggtgggcggagaattgctaacaattgaatcaacagcgattccaggtaaaggcaagttaatcaatacaggacagcttggtgatgtcatgaaggagtcaattcaagcagctacaactgttgtcagaagccgttccaaagcactaggtataaaagaggattttcatcagaaaatggatatgcatattcacgtcccagagggcgccacgcctaagga

SEQ ID NO: 262740 - DNA, 889 bp, Unknown
  Bacterial polypeptide expressing nucleotide sequence isolated from the Sargasso Sea
agatatttattcttatggatgcgaaagtaaagtattacagcttttaaagttaccagacggaacagttaaagttcttgtcgaaggaatagacagagtaaaaatattagaatgcaaagatgataaagatttcttatctactgcggtggatgtagtaaaagataaagttgaagatattgataatttactaccactagctatagctttagttagaaaattagaaaagttaactaatttaaataaaaagatttcttctgaattaatggtcaatttaaaagagttaaaggacccaactagaatagcagaccaaatagcatcccaaataagcatttcaatttctgaaaagcaaatattactggagacagttgtcttaaaacagagattagaaaaactcatggatcatataaacaatgaaattaatgttattggcgttgaaaaaagaatcagaggaagagtaaaaaatcaaatggaaaaaacccaaagagaatactatttgaatgaacagatgaaagctatccagaaggaattgggtgaaatagaagatggtaaagatgaaatagcaaatttacaaaaatcaattattaaggctaaaatgacaaaagaagctacaaaaaaatgtttagctgaattaaagaaattaaaatcaatgagctcaatgtctgctgaagcaaccgtagtaagaaattacttagattggatggttgagctgccttgggtaaataaagataaaaaaattgatggtataagcattccagaagcaaaaaaagtccttgacgaggatcattatggactggaaaaagttaaagaaagaatccttgaatatttagcagtacaaaaaagagtaggaaaaattaaaggtgcaatactttgcttagttggcccacccctgggg

SEQ ID NO: 262741 - DNA, 1046 bp, Unknown
  Bacterial polypeptide expressing nucleotide sequence isolated from the Sargasso Sea
tgctgaagccacagttgttagaaattaccttgattggatgattgatattccatggtttaaaaaagataaagtagatatagatttgaaaaatgctcttaaagttttagacgatgaccattatggcttagataaagttaaagaaagaataatagaatttctagcagtacaaaaaagaatggaaaagataaaaggaccaatattatgtttgataggacccccaggtgttggaaagacctcattaggtaagtctattgccagagctacaaacagacaatttgttagaatgtcattaggtggtgtaagagacgaagctgaaattagaggacatagaagaacttatataggatctttgcctggtaaaattattcaattaatgaaaaaagctggtactaaaaatccattaattttactagatgaaattgataaggttggaaatgattatagaggagacccatcatcagctttactagaagcattggatccagaacagaacacaacttttaatgatcactaccttgaagttgactacgacttatcagacgtaatgtttgtgacaactgcaaataccttaaatattttaccaccattattagatagaatggaagtaattcgaattcctggttacacagaggatgaaaaaattaatattgcgaataaatatttgttacctaaacagataaaagaaaatggagttaaaacagaggagttggaactagaagatgggactattagagaaattataagaagttttactagagagtcaggcgtaaggaatttagaaagagaaatatctaaagttgctagaaaagttgttaaaaaagttgttagtggcgaggaaaaaaaggttgttgttactaataaaaacatacctgaatttttaggagttaagaaatttaaatatggcgaagttgaatctgaagatagagtaggaatagttacaggtttagcttggactgaatttggtggtgaaatcttaaaaatcgaaacagtacatatgcctggtaaaggaagaatgcaaattacaggtaaacttggtgatgtgatgc

SEQ ID NO: 262742 - DNA, 968 bp, Unknown
  Bacterial polypeptide expressing nucleotide sequence isolated from the Sargasso Sea
ttaaatattttaccacctctactcgatagaatggaagtgattagattatctggatacactgaagatgaaaaagtaaacatatctcaaaaatttttaattccaaaacaaagtgaaaataacggattaaaaaaagaagaatggaatattgatgaaaaagtaaatcgaaaaattataagagactatacaagggagtctggcgttagaaatctagagagagaaatatcaaaaattgctagaaaactcgttaagaaaatagataacaatgaaaaaataaacaatcctataaaagaagaggatatgaaagatttactaggtgttcaaaaatttaattatggtgaaatagaggatgaaaatagaattggagtggttacaggactagcttggactgaagtaggaggagaaattttaaaaatagagtcagctgtaatgccaggaaaaggtaaaatgcaaattactggaaaattgggagacgttatgcaagagtctgtaaaagcagctaaatcatatataagatctaaaagtttagaatttggaattatacctcctatatttgataaaaaagactttcatattcatgttcctgaaggcgcaacgcctaaagacggtccttcagctggagttggaatggtaacttctataatttcagctattacagaaataccagttgataaaaaagtagcaatgacaggtgagattactttacggggaattatacttcctataggtggtttaaaagaaaaattattagctgcacatagagcaggaattaaaaaggttttaatacctattgaaaataaaaaagatttagtagaggttccaaaaactatattggaaacaatggaaataattcctgtaaaaaatgttgatgaagtgcttaaagttgctttaattaaacctttaaaaagggttgaatgggttgaagtagatcaaattaccgataaaaacaaaactaaaaaagaagaacttag

SEQ ID NO: 262743 - DNA, 937 bp, Unknown
  Bacterial polypeptide expressing nucleotide sequence isolated from the Sargasso Sea
acatcacttggaaaatctattgccaaagctacaaatagacagtttattagaatgtcattagggggtgtaagagatgaagctgaaatacgaggtcatagaagaacatacattggatctttaccaggaaaaataattcaaatgatgaaaaaggctggtacaaaaaatcctttgtttttattagatgaagtcgataaaatcggaaacgattatagaggagatccatcgtcagctttacttgaagctttagaccctgagcagaatacagcattcaatgatcactatttagaagttgattatgatttgtctgatgtaatgtttgtaactacagcaaatactttaaatattttaccaccacttcttgatagaatggaagttataagaattcctggatatacagaggatgaaaaagtaaatattgcaaacaagtatttattacctaaacaagtaaaagaaaatggtgtgaaggagggtgaactaaatttagaagatgggacaataaaagagataattagaagttacacaagagagtctggtgttagaaatttagaaagagaaatttcaaaagtaacaagaaaagttgtaaaaaaagttgtaagcggtgaagtagagaaagttcaagtaaacgaaaaaaatattacagactttttaggaattaaaaaattcaaatttggtgaagtagaagacaaagacaaaacgggaatagttataggactagcgtggaccgaagtaggtggagaaattcttaaaatcgagactgtcaatatgccaggtaaaggtagaatgcaaataactggaaaacttggtgatgtgatgcaagaatctgttaaggctgcaaaatcatatgtcagatcaaaaagtttagaatacggtataattccacctttctttgaaaaaaaagattttcatatccatgttcctgaaggtgcaacgcctaaag

SEQ ID NO: 262744 - DNA, 768 bp, Unknown
  Bacterial polypeptide expressing nucleotide sequence isolated from the Sargasso Sea
ttgtaaccactgcaaactcattaaatatcttacctccactactagataggatggaagtaattagactttctgggtacacagaagatgaaaaagttaaaatttctcaaaaatttttaattccaaaacaaagtgaaaataatggattaaaaaaagaagaatggaatattgatgaaaaagttaatcgaaaaattataagagactacactagagagtccggtgttagaaatcttgagagagaaatatcaaaaatcgcaaggaaattagtcaaaaaaattgataacgatgaaaaaataaataatcctataaaagaaaaagatatgaaagatttattaggagtgcaaaaatttaattatggtgaaattgaagaggaaaacagaataggagtagttacaggtctagcttggacagaagtagggggagaaattttaaaaatagagtctgcgataatgcctggcaaaggcaagatgcaaattacgggaaaactaggcgatgttatgcaggaatccgttaaagctgctaaatcatacattagatccaaaagtttggaatatggaattatacctcctatatttgataaaaaagatttccatatacatgttcctgaaggagcgactcctaaagatggaccttcagctggagtaggaatggtaacttcaataatttcagctattacagaaataccagtcgataaaaatgttgcaatgaccggtgaaattactttaagaggtattgttcttcctataggaggattaaaagaaaaatattagc

SEQ ID NO: 262745 - DNA, 907 bp, Unknown
  Bacterial polypeptide expressing nucleotide sequence isolated from the Sargasso Sea
aaagatttatccttggctcaacagattttggacagagatcaccatggtttagagaaagtcaaagagagaatagtagagtacctcgcagttcagcaaaggacgggaaaagtgaaaggccccatcctctgcttggtaggtccgcctggcgtgggtaaaacatcgttgggcaaatcaatagcagattcgactggtcggaactttgtgaggatgtctttagggggcgtaagagatgaggccgaaattagaggccataggcgcacctacatagggtctctacccggaaaaatcgtacacagtatgaagaaagcaaagacgtcgaatcctctatttcttttagatgaaattgataaattaggtaatgactacaggggagacccctcatcggctctcttggaagttttagatcctgagcaaaataacacattccaggaccattatttagaagtggactatgacttgtcagatgtcatgttcgttacaacagcaaacactctgagaatgccacaaccgctgttagaccgaatggaaataataaggctgtctggatataccgaagatgagaaacttgaaattgcgaataaacatctcatcaggaaacaacaggagcagcatggcctgaagaagggagaatgggaagttgctgaatccggattgcgggatctcatccggtattacactagagaggcaggggtaagaaatttagagcgtgagatagctaatctcgcaagaaaagcagttaaggaaatacttactgagggggtacctaaaataatcgtgactgctaaaaatctagaagaatacgctggtgtaagaaaatataggtttggtgaggttgaggagagtgatttagtcggagtaaccacggggttagcgtggacggaagtgggaggagaaattctttcgatag

SEQ ID NO: 262746 - DNA, 868 bp, Unknown
  Bacterial polypeptide expressing nucleotide sequence isolated from the Sargasso Sea
ttagatgaagatcattttggtttggaaaaagtaaaagagagaattattgagtttttagctgttcaaaaaagaatggaaaaaattaaaggaccaattttatgtttagttggacccccaggagttggaaaaacatcacttggaaaatctatagctaaagctactaacagacagtttattagaatgtcgttaggaggtgttagagatgaggctgaaataagaggtcatagaagaacatacattggatctttaccaggaaaaataattcaaatgatgaagaaagctggtacaaaaaatcctttatttttgttagatgaagtagataaaatcggaaacgactatagaggagatccatcatcagctttgctagaagcattagaccctgagcagaatacagcttttaatgatcactatttagaagttgattatgatttgtctgatgtaatgtttgtaacaacagcaaatactttaaatattttaccaccacttcttgatagaatggaagttataagaattcctggatatacagaagatgagaagataaatattgcaaataagtatctgttacctaaacaagttaaagaaaatggagtgaaagagggtgaactaaatttagaagatgggacaataaaagagataattagaagttatacaagagagtctggcgttagaaatttagaaagagaaatttctaaagtaacaagaaaagttgttaagaaagtagtaagtggtgaagttgaaaaggttcaagtaaatgataaaaatattccagactttttaggaattaaaaaattcaaatttggtgaagtagaagataaaaataaaactggaatagtaattggattagcttggactgaggtaggaggagaaa

SEQ ID NO: 262747 - DNA, 886 bp, Unknown
  Bacterial polypeptide expressing nucleotide sequence isolated from the Sargasso Sea
tggaaacttcctgatggcactcttaaggtattagtagagggtatacaaagagccaaggttacaaaaattaatttcaataaagaattcattagcgcatccatttcagaaattaatcaaaaatcatataaaaaccctaacataaaagctttacaaaaacttattaccgaacagtttgcagaatttcaaaaaattaataaaaaagtttcacttgatgtaatcaacaatgttaagacaataaatgacccagataaaatagttgatataattgtttctaatatttcaatatcattagatcaaaagcaagaaattttagaaatcataaagacggaggatagactaaataagatatatggatatttagtttctgagattgattcatttcaagtagaaaaaaaaatcaaaggccgtgtaaaaagacaaatggagaagacccagaaagaatattacttgaatgagcaaatgaaggctattcaaaaagaattaggtgaaaatgaagatttggatgaaattgctgaattagaaagaaaattaaacaactataatctttcaaaagaggctaaagataaatgttcatctgaaataaaaaaattaaaaaatatgagcccaatgtccgcagaagcaactgttattagaaactatttagattgggtaatgtcaataccatggaataatcctgatcaaatttctcaaaatataaaaaaagcatcaactattttagagaatgaccattacggtttagacaaagttaaagagagaattcttgaatatttagcagttcaaaaaagaactaataaactcaagggtcctatattatgtttggttggaccgcctggagttggaaagacgtctcttggaaaatcaattgcaaatgcaacaggaagaagtt

SEQ ID NO: 262748 - DNA, 963 bp, Unknown
  Bacterial polypeptide expressing nucleotide sequence isolated from the Sargasso Sea
aaaacatctctaggagaatctatagcaagagctaccaatagaaaatttataagaatgtctcttggtggtgtaagagatgaggctgaaataagaggccatagaagaacatatattggctctatgccaggaaaaataatccaaaaactaacaaaagttggtgtaaaaaatccacttttcctattggatgaagtagataaaattggtatggatcatagaggagatccagcctctgcattattggaggttttagatcccgagcaaaatacatcattcagcgatcattatctcgaagtagattatgatctatcagaggtgatgtttgtatgcacggctaacagtttaaatatccctggaccacttttagatagaatggaaattattagaatccctggatacattgaagatgagaagctgcaaattgctaagaactatcttcttcctaaacagcttgaaagaaatgggcttgaagataaagaattgaatttaaataaaaatgtccttttagatctagtaaggtattacacgcgagaagccggtgttagaggtcttgaaaggcaaatctcaaagattttaagaaaggttgtcaaagaaagattgctatccaaaaagaaaacagcaacaaaaatagattctaaaaacttagaaaaatattccggagttagaaagttcaagtttggcgaagctgaatcttcaaatactattggtcaagtttgtggactagcatggactgaggttggaggtgagcttcttaccattgaagcatcaaaagtctcgggaaaaggtaaaacaattaaaactggctcattaggcgaagtaatgcaggaatcaattcaagcagctttaacagttgtaagatcaagatcagactcgcttggtatcaagaaagacttttatgaaaagtttgacacacatattcatgttcctgagggcgctactccaaaagatggacctagtgctggagtt

SEQ ID NO: 262749 - DNA, 1003 bp, Unknown
  Bacterial polypeptide expressing nucleotide sequence isolated from the Sargasso Sea
gataaatctataacagcactaaatgaagtgatgaaaggtgacaaaaaaattgttctagtaactcaaaaaaattcagaagtagatgatccaaataaaaatgatgtatttttatatggatgtgaaagtaacattttacaattactcaaattacctgacgggacagtaaaagttttagttgagggaattaaaagagtaaaaatagtcgattttaaagatgatgaaaaatttatttcttgtacatttgaatatcaaaaagatattttgtctaaagacgaagatctgcttccactagcactaacagctgtaagaagattagaaaagttaacttcaataaacaaaaaagtttcaacagaaacaattaacaatattaaacaactaaaagatgcatcaaaaattgcagataatattgcatctcatttaaatgcgaccatttctgaaaaacaacagatttttgaaactttagatgtcaaaaaaagactaaatggtgttatcaaaataatggaaaacgagacaagtattattggcgttgagaagagaattagaggtcgtgttaaaacacaaatggagaaaactcaaagagaatattacttaaatgaacagttaaaagctatccaaaaagaacttggcgaaatcgaagatggcaaagatgaaacaacaaacctaaagaaatcaattcaaaaagctaaaatgcctaaagaagttgagaaaaaatgtatggctgagcttaaaaaattaaagaatatgagcccgatgtcagcagaagctacagttgtacgaaattatttagattggatgattgatattccatggtttaaaaaagataaagttgatattgatttaaataaagctttaaaaattttagatgaagaccactttggattggaaaaagttaaagagagaattattgaatttttagctgttcaaaaaagaatggataaaattaaaggcccaattctttgtttagtaggtccgccaggtgttggaaaaacttcattaggaaaat

SEQ ID NO: 262750 - DNA, 930 bp, Unknown
  Bacterial polypeptide expressing nucleotide sequence isolated from the Sargasso Sea
aaaaaaatcatactggtcactcaaaaaaattctgaaattgatgatccaaataaaactgatgtttttatgtatggatgtgaaggaaatattttacaattattaaaattaccagatggtactgttaaggttttagtagaaggaataaaaagagttaaaattttagattttaaagataatgaaaaatttattacttgtgactatacttattttaacgatgtcctctctaaggatgaagacctgtttccattagcagcaaccgctttaagaagactagaaaagttaacatctattaataaaaaaatttctaacgaaacaataaatacaattaagcaactaaaagacccatctcaaattgcagacaatatagcatcacatatagcggcttcgatttctgaaaaacaacaaatttttgaaaccaatgatgttaaaaaacgattaaacgccataattaaaattatggaaaatgaaactagtataattggtgttgaaaaaagaattagaggaagagttaaaactcaaatggaaaaaactcaacgtgaatattatttaaatgaacaactgaaagcaattcaaaaagaacttggtgaaattgaagatgggaaagatgaaactacaagcataaacaaagcaatcactaaagctaagatgccaaaagatgtagaaaaaaaatgtcttcaggaattaaaaaaattaaaaaatatgagcccaatgtcagctgaagctactgtagtaagaaattatttagattggatgacagaacttccatggcataaaaaaagtgaagttgatattgatttggcgaaggcacaaaatactttagacaaggaccattttggcttagaaaaaattaaagagagaatagtagagttccttgcagttcaaaaaagaatggaaaaaattaaaggaccaattttatgtttagttgggcca

SEQ ID NO: 262751 - DNA, 1029 bp, Unknown
  Bacterial polypeptide expressing nucleotide sequence isolated from the Sargasso Sea
tcctccgggcgtcggtaaaacctccctcggcgagtccatcgcccgcgcgactaaccgcaagtttgtacgaatgtccctgggcggcgtacgcgatgaagcggaaatccggggtcatcgccgaacctatatcggatcattgcctggcaagattatccagaacatggctcgcaccggtacccgcaacccgctgttcatgcttgatgaggtcgacaagatgtcgatggattttcgtggggatccttcctctgctttactagaggtcttggatccggagcagaaccataagttcggtgaccattacctagaggttgactacgacctgtccgaggtcatgtttgtcgcgacggccaacacgttgaacattcccgggccgcttctggatcggatggaagtgattcgcatctcggggtataccgaggatgagaaaatcaatatcgcgacccggtacctggtcgagaagcaaaagggcaacaatggtctgaaagaaggtgaaatcagcatcaatcggcaggctttgaccgatatcgttcgctattacacccgtgaagccggtgttcgcggactggatcgtgaaatcgcgaaaatctgccgcaaggtggcaaaggagttgttgctcgatacctctcgaacccgtgttcaggtatcttcacggaatctcggcaagtacctgggtgtgcagcgacatcgtttcggccgagccgaggagggcaaccggattggacaggtgaccggtctcgcctggacagaggtgggcggtgaactgctctctattgaggccgctgttatgcccggcaaggggaagcatagtttcacgggcaaactgggcgatgtcatgcaggagtcgatccaggcggcgatgtcagtggtgcggacgcgttcggctcaatacgacatcgacgcagactttttccaaaataaagatatccatatccacgtaccggaaggcgcgacgcctaaagacggtcctagcgcggggatcggcatgtgtacggccgtcatctccgcgattaccggaatcccggcgcgatc

SEQ ID NO: 262752 - DNA, 859 bp, Unknown
  Bacterial polypeptide expressing nucleotide sequence isolated from the Sargasso Sea
caaaaaagattagatgaagaccattatggtctacctaaggtaaaagaaagagtattagagtacttagctgtaaggtctttaaagaaaaaagtaactaaagaagaaacagttaggggtcctatactttgcttcacgggccctcctggtgttggaaaaacatcattaggaaagtccattgcaaaatcaatgggtagagagtttgttagaatttccttaggtggagttagagatgaagcggaaattcgaggacacagaagaacttatattggggcacttccaggaagaattattcagtcattgaaaaaagcaaaaacgaataatcctgtatttatgttggatgagattgataagcttggttcggattttagaggagacccttcctcagcaatgcttgaagtgctagatccggagcaaaatcatgcttttagcgatcattatcttgaagtcgattttgatttaagtaaagtgatgttcattgctactgcaaattatccagataatattcctcctgctctttatgatcgtatggaaatgattgattttagaggatacattgatgatgaaaaagttcagatagcaaaaaaacatttaatacctaaacaagtaaaagaaaacgggctcacttctaaacaagtcaaatttaacgacacaggaattaaagaaattatttcttcatataccagagaatctggagtgagaagtcttgaaagagaaatatctaatgtattacgtaaaatagctgtagatgtggtaaacaaaaaacttaagacagctagtatttctaaaaaatcagtaaatgaatatcttggtattccaaaatttcaatctgatttagcagaaagaactacaaaacctggtg

SEQ ID NO: 262753 - DNA, 784 bp, Unknown
  Bacterial polypeptide expressing nucleotide sequence isolated from the Sargasso Sea
tttacatcgttgtatttctaaaatatgtcgtaagattatcaaatctctgacattaggcaaaacaaacagcaagatgttaaaaatcaacccattaaaccttaatgactttcttggagttagacaacacagttatggctcgatagataaaaaagatatgattggacaagttaatggacttgcgtggacatcaactggtggtgaactcttgagaatagagtgtgctttaatgtctggtaaaggaaaaattactcaaactggaaaattaggtgatgtaatgcaggaatcaattaaagctgctataactgtcgttagaacaagatccgcttctcttggaattgattctgatttctatcaaaacaaagatatacatattcatgttcctgagggtgcaacaccaaaagacggacctagtgcaggtatttcgatggctttggctgttgcttcatccttatcaggcattgcagtgaaatctgatgtcgctatgacaggtgagataactttaagaggccaagtacttgaaataggtggcctcaaagaaaaactgcttgcagcgttgagaggtggtattaaagaagttattattccaaaagataacgaaaaagatcttgtagagataccagataatgttaaaaggggattaaaaattcatcctgttaagtttgttgatgaggtatttgcaatagctctaaaatctaaacctgcaaaaagcaaaaatttatcaaagaaaacatcactgcaaaacaaaaagacaaaatcaagcagttcaaaacgtcttcctcactag

SEQ ID NO: 262754 - DNA, 928 bp, Unknown
  Bacterial polypeptide expressing nucleotide sequence isolated from the Sargasso Sea
actaatcgagaattcgttagaatgtcggttggtggaatgagagatgaagctgaaataagaggtcatagaagaacatatattggttctttacctggaaagataattcaaatgatgaaaaaagcaggaacaaaaaaccctttaattttattagatgaaattgacaaagtaggtaatgattatagaggagatccttcatctgctttacttgaagctttagatcctgaacaaaatactacatttaatgatcattatttagaagtagactacgatttgtctgatgtaatgtttgtaacaacagctaacacattaaatattcttccaccattattggacagaatggaagtaattagattggctggttacacagaggacgaaaaaattagtattgccaataaatatctattaccaaaacaaattaaagacaatggtgtaaaagaacacgagatgaagttggatgatgatattattaaaaatgtaataagaggttatacaaaagagtcaggtgtaagaaatcttgaaagagaaatttctaaaatcacaagaaaagttgtaaaaaaagttgtttctggtgaagaaaaagaagtaaatattaataataaaaatttatcagattttcttggagtggctaaatttaaatttggtgaattagaatctgacaatagaattggtatagtaactggacttgcatggactgaatatggcggtgaaattttaaaaattgaaacagtgactatgcctggcaaaggaagaatgcaaattactggaaaactaggtgatgtaatgcaagagtcggttaaagctgcaaaatcttttgttcgatcaaaatgtcttgaatatggaattattccacctttgtttgaaaaaaaagattttcatattcatgtacctgagggcgcgacacctaaagatggaccatctgcaggagtgg

SEQ ID NO: 262755 - DNA, 768 bp, Unknown
  Bacterial polypeptide expressing nucleotide sequence isolated from the Sargasso Sea
gatccggagcaaaatgataaatttaacgatcattatttagagctagattatgatttgtcagatgcgatgtttgtatgtactgcaaatacacttaatattcctcctgcactgcttgatagaatggaagttataagaataccaggctatactgataaagaaaaaaacataattgcccaaaaatatttaattccaaaacaaataaaaaatcattatcttaaaaaaaatgaagttagattttctaataatataataaatcaaataatcagaaactatacgcgcgaagctggagtaagaaatttagaaaaagaaatttcaaaagtatgcagaaaaactgttaagtctcttgaaactagcaacaaaaaatttattcatctaaatgatgataaattaaaagatttcttaggtataagtaaattcagatccaatgaaattgaaaagaaaaatttaattggcgtaactaacggtcttgcttggacagaagttggaggagagatactttctatcgaagttattctttcaattggaaaaggtaaacttacaataactggtaagctgggcgaagtcatgaaggaatcagtgcaggctgctatttcatatgtaaaatctcacagtttaaatcttggtattcatccttttgattttgataaatttgacatacacgttcatgttccagaaggagcaactccaaaggatggtcctagtgctggaatagctatttttaattcattagtatcttcattaacatcaaacaaaagtaagaaaagatgt

SEQ ID NO: 262756 - DNA, 568 bp, Unknown
  Bacterial polypeptide expressing nucleotide sequence isolated from the Sargasso Sea
aaagacattaaacaatgatcattatggcttagaaaaagttaaagaaagaattattgagttcttagctgttcaaaaaagaatggaaaaaattaagggcccaatattatgtttggtaggacctccaggcgtaggcaaaacatctcttggtaaatctattgcaaaagctacaaatagacagtttgttagaatgtcacttggaggagttagagatgaagctgaagtgcgtggtcacagaagaacatatataggatcacttcctggaaaaattattcaaatgatgaaaaaagcgggcactaaaaatccattattcttactcgatgaagtggataaaataggaaatgattatagaggagatccatcttcagcattgttagaagctttagacccagaacagaatactacgtttaatgatcattatttagaggtcgattatgatctttcagatgtaatgtttgtaaccacagctaacacacttaatattttaccgcccttattagatagaatggaagttattagaataccaggatatacagaagatgaaaaaatcaatattgctaataagtatttg

SEQ ID NO: 262757 - DNA, 126 bp, Unknown
  Bacterial polypeptide expressing nucleotide sequence isolated from the Sargasso Sea
gcgatccttcggcggctctattagaagttttagatccagaacaaaatgataaattcaatgaccattacttagaagttgattacgatctatctgacgtgatgtttatacaacagcaaatactttaaa

SEQ ID NO: 262758 - DNA, 967 bp, Unknown
  Bacterial polypeptide expressing nucleotide sequence isolated from the Sargasso Sea
aacttcaagggtagagataaacaaagttgaaaacgataacaagctttcttgtacttattcagatttcagctcaaatggtcctacaaatgacaatcagtcagacgctctatttaggacactggaagatactttttctaactatgtgaaattaaataaaaaagtaccaccagaggttatttcatcaattaccggaattgatgatttgtcaaagttagctgatagcatcgctgctcacatgacattgaaacttgaagaaaaacagcaagttctggagctcatagatattaagaaaagatgtgaatttctcataaaggcaatggagggtgaacttgatatcctacatgttgagaagaaaatcagaagtcgcgtgaaacagcaaatggagaaaagccaaagagagtattatctaaacgaacaaatgaaagctatacaaaaagagcttggtgaaataggagatgaaagtaacgatttagatcagcttttaaataaaattaaatcattaaagttgcctagtgatgccaatgaaaaagctatgagtgaattcaataaattaaaaatgatgtcgccaatgtctgcagaggcaacagttgtgagaaattatttagatattcttgtaaatcttccttggaatcaatctacagagatctcaaccgacatgaacaatgctaataatgttttggagcaagatcatcacggattagaaaaagtgaaagagagagtgctcgaatatctagctgtcacgaagagagttaataaaataagaggaccaattttatgcctcgtagggccacctggtgttggaaaaacatcacttgctaaatcaattgccagagctacctcacgtaaatttataaaaatgtccctgggaggtgttagagatgaagctgaaattagagggcacagaaaaacttatattggttctatgcccggaaaaatcatgcagaatctatcgaaagttaaaactaat

SEQ ID NO: 262759 - DNA, 860 bp, Unknown
  Bacterial polypeptide expressing nucleotide sequence isolated from the Sargasso Sea
taatagaaaatttatcagaatttctttaggcggtataagagatgaagcagaaataaggggtcacagaagaacttatattggttcattaccaggaaaaattatccaaatgatgaaaaaagccggcacgaaaaatcctttatttttattagatgaaattgataaagttggaaatgattacagaggagatccttcatcagctttgcttgaggcgttagacccagagcaaaataaagaatttaatgatcattatttagaagtagattacgatctttctgatgtgatgttcgtaacaactgcaaatacattgaatattttacctccactcttggatagaatggaagtaataagactttcaggatatacagaagatgaaaaagtaaatatttcccaaaaatttcttatacccaatcaaagtaaaaataatggattaaaaagtgacgaatggaatatagatgaaaatattaatagaaaaataatcaggcattacacaagagagtctggcgtaagaaatcttgaaagagaaatttcaaagatagcaagaaagcttgtaaaaaaaattgataataatgaaaaaataaataatccaataaatgaaaaagatttaaaagatcttttaggtgttcaaaaatttaattatggagagatagaggaagaaaacagaataggtgtagttactggtttagcgtggacagaagttggaggagaaatacttaaaattgagtccgcaataatgcctggtaaaggtaaaatgcaaattactggaaaattgggtgatgtaatgcaagagtctgttaaggcagcaaaatcatttataaggtcaagaagtttagagtacggaataattccacccaatatttgat

SEQ ID NO: 262760 - DNA, 730 bp, Unknown
  Bacterial polypeptide expressing nucleotide sequence isolated from the Sargasso Sea
gttgagctaaatgaaattgaagaggcaatcaaaaaggcaaaaatgcctgaagatgctgaaaaggtggcgctgaaagaacttgaccgacttacaaaaattccaacacagtctccagaatatactgttgctagaacatatttggattggttaacagacctcccttggtcaatttcttctgaggactcaattgatgttaaagagtctaaaaatattttagacgaagaccactatggtttagaaaaagttaaagaaagaatcattgaatatctagctgttcgagctttgaaaatgaagaataatccagacagcgcaattcgtggtccaatattatgttttgcgggtcctcctggagtaggaaaaacttcgcttgggaaatcaattgcaaaatcaatgggaagagaatttgttagaatgtctttgggcggcgttagagatgaagctgaaatacgtggtcacagaagaacttatatcggcgcactcccaggaagaattatacagtcactcaaaaaagcaggatcaaacaaccctgtttttatgctagatgaaatagataaattaggaatggattttagaggagacccttcttcagctttattggaggtgcttgaccctgaacaaaatagtgcttttgcagatcactatttagaggttgattttgatttaagacaaggtaatgttcatagcaacagcaaattaccaagaccctattccaccagctttaaaggataga

SEQ ID NO: 262761 - DNA, 859 bp, Unknown
  Bacterial polypeptide expressing nucleotide sequence isolated from the Sargasso Sea
aattgcaaaaaggcatctagttgataaagccgtcaaaaatcatgggttaagaaaaggagagtttgaattaacgaacggagccttaacaggcattgttcgttattacaccagagaagctggagttagaaaccttgagcgcgaaatttcaaaattggcccgaaaatctgtcacgaaaattgtaaaaaatgaagagaaaaatattaaggtgactatggacaatctaggggacttccttggtgtcaaaaaattcagatttggccttgccgagcaagatgatcaaattggagtggtaaccggattagcatggacctctgtcggaggtgatttgttgcatattgaagctttaaagttacctggcaaaggaagaatgaaaactactggtaaactaggtgatgtaatgaaagaaagtattgatgctgcaaactcatatgttcgctctatcagtgcagaagttggtatcaagccacctaaatttgataaaactgatatccatgtccatgttcctgagggagccactccaaaggatgggccaagtgctggattggcaatggttacatcaatcgtttcggttttaactggtatccccgttagaaaagatttggcaatgacaggagaggtcacattacgcggtaatgctttagcaataggtggtctcaaagagaaattgcttgcagcactaagaggtggtataaaaactgttcttataccagtagaaaacgaaaaggatctcgtagatattccggataatgtaaaatcgtcactggatataattgctgtcaaaaatgtttctgaagttataaaaattgcgcttactaaaactccaactccgatagaatgggacgaagctgcgaggaggctg

SEQ ID NO: 262762 - DNA, 896 bp, Unknown
  Bacterial polypeptide expressing nucleotide sequence isolated from the Sargasso Sea
atttgtaggaagggataaatcaattacagcacttaatgaagtaatgaaaagtgataaaaaaattattttagtaactcaaaaaaactctgaaattgacgatccaaaaaagaatgatgtttttgcatttggatgtgaaagcaatattttgcaattgctaaagttacccgatggaacagttaaagttcttgtagaaggcattaaaagagttaaaattttagattttaatgatgaagaaaaatttattagttgtacttatgaaaatcaaagtgaacatatctcaaaagatgataatatacttcccttagcattaacagctatacgaagattagaaaaacttacttcagtaaataaaaaactgtcaactgaaactataaatagtattaaacagttaaaagatccatctaaaatcgctgataatattgcgtcacatttaaacacaactattagcgaaaaacaaaacttatttgaaactcttgatgttaaaaaaagacttaatgaaataataaaaattattgaaaatgaagcgagtataattggtgttgaaaaaagaataagaggacgagttaagactcaaatggaaaagacacaaagagaatattatttaaatgaacaactaaaagctattcagaaagaactaggagaaattgaagatggtaaggacgaaacatcaaatctaaataaggctattttaaaagcaaaaatgcctaaagaagttcaaaaaaaatgtatggcagagttaaaaaaattaaaaaacatgagtcctatgtcagcagaagcaacagtagtaagaaattatttagattggatgatagatattccttggaataaaaaagatgatgttaacatagatcttaataaagcaacaaaaattcttgatgaagatcattttggttaga

SEQ ID NO: 262763 - DNA, 916 bp, Unknown
  Bacterial polypeptide expressing nucleotide sequence isolated from the Sargasso Sea
tctgacaaatctattgttttagtaactcaaaaaaattctgaagtcgatgacccagatagcaaagatttgtaccaatatggttgtttaagtaaagtactacaattgttaaagttacctgatggtacggtaaaagttttagtagaaggggaaaaaagagctaaaattttaaaatatgaagaaaacagcaacgattatataaagtgtgaagtagaagtagttgatgatcaaaattcatctaaagatactgagcaactagccttagggcttgttaaaaaatttgaaagattacaagttttaaataaaaaagagtttatcgaaggagcaaataatttaaaaaatttaaaagatccgtcgcaaattcttaataacatatcttctaacttaaacattcagatatttgagaaacaagaacttttagaaattaaagatttaaaaaaaaagatagaaaaaattcattcaatcatcgataaagaaacaagtgtattgtctgtcgagaaaaaaattagaggaagagtaaaaaatcaaatggagaagactcaaagagaatattatttaaatgagcaattaaaagctatacaaaaagaacttggagaaatagatgaaggcaaagatgaactaacatcgttatctaaagcaataaatgatgcaaaaatgccaaaattagcaaaagaaaaatgtttatctgagttaaaaaagttaaaaacgatgagcccaatgtctgcagaggcgacagtggttagaaattacttagattggatgacagaacttccttggtctaacaaatctaaaattaatacagatttagaaaatgctcaaaaaattttagatgaagatcactatgggcttgaaaaagtgaaagagagaattattgaatttttagctgttcaaaaaagaatacaaaaaatgaaaggtccaa

SEQ ID NO: 262764 - DNA, 904 bp, Unknown
  Bacterial polypeptide expressing nucleotide sequence isolated from the Sargasso Sea
aaggtaaaagaagccaatatgccgaatgaggtccgtgaatcggcagagaaggaagtcaaaaaactgaaaatgatgtctcctctttccgccgaggcaaatgtgatccgaaactaccttgaatggctggtcgcaatgccttgggatgtcactactgaagataacttcgacctgaaacgggcgcagaagattttggatgaagatcactacggcctggagaaagtgaaagaacgaataatcgaatacctggcggtggcctcacttaagaaatccttgaaaggcccgattctctgcctcacgggtcctcccggggtcggaaaaacctcccttgcccaatccatcgcaggtgcactggacaggaagtttgtccgaatcagcctgggtggagttcgagatgaagcggaaatccgcggacaccgccggacttacatcggcgcacttcccggaaaaatcatacagtccatccggaaagccaagagccggaatcctgtattgctgatcgacgaaatcgacaaactctatcaaagtgccctcagcgacccctcggcggcaatgctcgaggtactggatccggagcaaaataacacctttatggatcactatcttgaggttgagtgggatctctcaagtgtgctgtttatctgcactgccaataccacccaaagcatttccagccccctgcttgaccgcatggaacagattcctctttccggatacaccgaactggaaaagcaggaaatcgcaaaccgcttcctgattccaaggcaggctaaagatcacggtctcaaggaaaactggattcgtttcaagaaagatgcacttcaggaagtcatcatcggatatactcgtgaagccggggtgagaaacctggaaagagaaattggcaaagtctgccgcaaggtgggac

SEQ ID NO: 262765 - DNA, 784 bp, Unknown
  Bacterial polypeptide expressing nucleotide sequence isolated from the Sargasso Sea
caaaaaaattctgaagtagatgatccaaaaagaaatgatgtattctcatatggatgtgaaagtaacatactgcaacttttaaaacttccagatggaacagttaaagttttagtagaaggtataaaaagagtaaaaataattgatttcaattacggtgataaatttatatcttgtacatacgaacagcaaaaagatatcttaaataaagatgatgatcttttacctttggcattaacagctgtgaaaagacttgaaaaattaacatcagtaaataaaaaagtttcatctgatacgattaacaatattaaacaattaaaagatccatctaaaatcgcagataatatagtttcaaatttaaatgcctctatatctgaaaaacaacaaatatttgaaactctagatgtaaagaaaagattaaatgccgctataaagatgatggaaagtgaaaccagtattattggtgttgaaaaaagaataagaggaagagtaaaaactcaaatggaaaaaacccaaagagaatattatttaaatgaacaattaaaagcaattcaaaaagaattaggggaaatagaagatggaaaagatgaaacttccaatcttaaaaaatctattcaaaaatctaaaatgccaaaagaagttgagaagaaatgtatgtctgaacttaaaaagttaaagaatatgagtccaatgtctgcagaagcaactgttgtaagaaattacttagactggatgatagatctgccgtggtttaaaaaagacaatgttgatattgatttaaacaagg

SEQ ID NO: 262766 - DNA, 782 bp, Unknown
  Bacterial polypeptide expressing nucleotide sequence isolated from the Sargasso Sea
ttagagtatttagcagttcaaaaaagaatgaataaattaaaaggaccaattttatgtttagttggccctccaggtgttggtaaaacatctcttggaaaatctattgcaaatgccactggaagaagtttcgtcagaatgtcactgggcggagttagagatgaagctgaaattcgagggcatagaaaaacatatattggatcaatgccagggagatttattcaagcaatgaaaaaatctaaatcgtccaatccattaatattacttgatgaaattgacaaactcggatcggattggaggggtgatccatcttcagctctactcgaagttcttgatcctgagcaaaataataaatttaatgatcactatttagagttagattatgatctatctgatgttatgtttgtttgtacggctaataccttaaatattcctccagctcttttggatagaatggagataatcagaattcctggttacactgaaaaagaaaaaaatcaaatagcacaaaaataccttgttccaaaacaattaaaaaatcatggtctaaaaaaatctgaaataaatattaattctaaaattataaactcagttattagaaattatacacgtgaagccggtgttagaaatcttgaaaaagaaatttcaaagatatgtagaaaggcagttaaattaattgaaacttctagaaaaaataaagtaactcttgatcaaaataaacttcatgaatttttaggtgtgattaagtttagatcaaatgaaattgaaaagaaaaatcttgtagg

SEQ ID NO: 262767 - DNA, 487 bp, Unknown
  Bacterial polypeptide expressing nucleotide sequence isolated from the Sargasso Sea
aaagctgctaaatcttatataagatcaaaaagtttagattatggaattatacctccaatatttgataaaaaagattttcatatacatgttcctgaaggagctacacctaaagatgggccttcagccggagtgggtatggtaacctcaataatttctgcgattacagaaatacctgtaaacaaagatgttgcgatgacaggtgaaattacattaagaggtttagttcttccaattggtggcttgaaagagaaactgttagctgctcacagagcaggtataaaaaaagttttaattccaattgaaaataaaaaagatctagttgaagtcccaaaaactatactagattctattgaggtgattacagtaaaaaatattgaggaagttttaaaagtagcattaactaaaccttttaaaagagtagactgggttgaggttgatcaaataagtaaaaaagaaaaagcaaaaaaagaaattagcactcactaaa

SEQ ID NO: 262768 - DNA, 986 bp, Unknown
  Bacterial polypeptide expressing nucleotide sequence isolated from the Sargasso Sea
gatgttccttgggtataaaaaagacaaagttgatatcgatttaaataaagctttaaaaactctagatgaagaccattttggattagaaaaagttaaagaaagaatagttgaatttttagcagttcaaaaaagaatggaaaaaattaaaggcccaattttatgtttagtaggacctccaggtgttggaaaaacatcattaggaaaatctattgcaaaagcaacaaatagacagtttgttcgaatgtctcttggtggtgttagggatgaggcagaaattagaggtcacagaagaacttacatagggtcactaccaggaaaaattattcaaatgatgaaaaaagcaggaacaaaaaacccgctaatcttacttgatgaaatagacaaggtgggaaatgattacaggggcgacccttcatctgctttattagaagctttagaccccgaacaaaactctacatttagcgatcattatttagaagttgattatgatctttcagatgtaatgtttgtaactacagcaaacacactcaatatactgccaccacttttagatagaatggagatcattaggattccaggatatacagaagatgaaaaaattaatatttcaaataattttttacttccaaaacaagtcaaagaaaacggaattaaagaaggagaatttgaactttcagatggaacgataaaacacattattagaaactatacaagggaatctggagttagaaatttagaaagagaaatttcaaaagtggctagaaaagtggttaaaaaagttgttaacggtgaagaaaaaaaagttacagttaatactgacaatctctcagattttttaggagttaaaaaatttaaatatggtgagttagagacttcagataaaataggtattgtgacaggtttagcttggactgaatttggtggagaaatatttgaaatagaaacagttcatatgccaggcaaagggaaaatgcaaattacaagaa

SEQ ID NO: 262769 - DNA, 871 bp, Unknown
  Bacterial polypeptide expressing nucleotide sequence isolated from the Sargasso Sea
aaagcggaaaaagtactcaacaaagaccatttcggactagaagacattaagaaaaggattttagaacacatggctgttttaaaactcaaaaaaaacatgaagtctccaattttatgtttagtagggcctccaggagttggtaaaacttctctaggaaaatctattgctgatgctcttggcagaaaatatgtaagaatgagtttgggcggtttgcacgacgaatctgaaatccgaggacatagaaaaacctatattggcgcaatggcaggaaggctgcttcaatctataaaaaaagcaggaacttctaatcctgtcattgttttagacgagattgataaattaggacaaggcatacatggtgacccaagttctgcacttttagaagttttagacccagaacaaaacaataatttctatgataatttcttagaaattggttacgacttatcaaaagtgatgtttatagcaactgccaattcactttctacagttcaaactccacttttagacagaatggaaataattcaactttctggttataccatcgaagaaaaagtagaaattgcaaaaagacaccttataaaaaaacaaatggaagaaaatggtttaacatctgattctttcaaactaggaaataaagaaattgcacacgttgtagaagcgcacaccagagaaagtggcgtaagaagattagaaaaacatattgcaaaaattgcacgttgggtagctttacaaatcaccatggaaaaagattacaatcaaaaaatttcaattgataaaattgatgaaattttgggcgttcctattccaaaaaacttttctgaaatgactgatgttccaggtgtggtaacaggcttggcttggacttcgg

SEQ ID NO: 262770 - DNA, 889 bp, Unknown
  Bacterial polypeptide expressing nucleotide sequence isolated from the Sargasso Sea
ttaggtggagttagagatgaagcggaaataagagggcatagaagaacctatataggttcattaccaggaaaaataattcatatgatgaagaaagctggcactaaaaatcctttaatcttactcgatgaaatagataaagtcggaaatgactatcgtggagatccttcatcagctttattagaggcattagatccagaacaaaatacgacatttaatgatcattatttagaggtagattatgatctatcagatgtaatgtttgtaacaacagctaatactttaaatattttgccaccacttttagatagaatggaagttattagaatacctggatatacagaagacgaaaaaattaatattgcagaaaaatttctattagaaaagcaaattaaagacaatggtgttaaggatggtgaatttgaaataacagatggtactattaaagaaataattagaaattacacaagagagtctggtgttagaaatttagaaagagaaatttctaaaatcataagaaaagcagtaaaaaaagtggttaacaatgaggaaaaaaaggtttctataagtgataaaaatctttcagactttttaggtgttaaaaaatttaaatatggtgagttggagagcaaagatagagttggtatagttacaggattagcttggacagaatttggcggagaaatacttaaaattgaaacagttcatatgccaggaaaaggtaggatgcaaattactggtaaattaggagacgttatgcaagagtcagtaaaagcagctaaatctttcgttagatcaaaaagtctagaatacggaatcataccaccaattttcgaaaaaaaagattttcatatacatgttcctgaaggagcaactccaaaagatggacctc

SEQ ID NO: 262771 - DNA, 580 bp, Unknown
  Bacterial polypeptide expressing nucleotide sequence isolated from the Sargasso Sea
aagtcacttatcctcaggaaagggaatgattaacgccactggtaaacttggtgatgtgatgaaagagtctattactgcagcattaggttatattaaatctaattctgttgaatttggtgttaacccaaaggtttttgataaagtagacatacatcttcatgtcccagagggagctatcccaaaagatggtccgagtgccggtataacaatatttacatcactaatttcatcacttactgaaattaaaatcaaaagagacatagcgatgactggtgaaattactttaaaaggtagagtcctcccaattggcggcttaaaggaaaaactccttgctgcgataaggtacggtataaaaactgttatcattccaaaagagaatgagaaggacttggctgaaatacaaaaggattttcaaaataaacttgttataaaaaaagttgagtttgctaaagaggtgctggacttagctctcgatgggaaaatcagtaaaatcaacaaaaaactagactggagacacttagttacagagtctatgaagcctaaaaaccaacaaaatcaagaaaaaacattcgttaactag

SEQ ID NO: 262772 - DNA, 907 bp, Unknown
  Bacterial polypeptide expressing nucleotide sequence isolated from the Sargasso Sea
actactgctaatacattaaacatattacctccgttactagacagaatggaagttataagaatacccggatacaccgaggatgagaaaataaacattgcaaataaatacttgcttccaaaacaaataaaagaaaatggagttaacaaagaagaattaaatttattagatggaacaattaaggaaataataagaagctacacaagagagtctggtgtaagaaacttagaaagagaaatatcaaaagttgcaagaaaagtagttaaaaaagtagttagtggagaagaaaaaaaagtgacagtaaatgatgcaaatattcatgattttttaggagttaaaaaatttaaatatggagaagttgaatctgaagataaaattggagtagttacaggtttagcctggacagagtttggaggagaaattcttaaaattgaaaccgttcatatgccaggtaaaggaagaatgcaaattactggaaaattaggtgatgtaatgcaagagtcagtaaaagctgcaaaatcttttgttagatcaaaaagcttagaatatggaattataccgccaatttttgaaaaaaaagattttcatatacacgtaccagagggagcaactccaaaagatggaccttctgcaggaattgctatggttacatctattgtttcttcaattacaaataatcctgtacataaacatgttgctatgacaggtgaggtaacaattacaggtcaagtcctaccaataggaggtttaaaagaaaaattattagctgcacatagagcaggaataaaacaagttataattcctaaagaaaatgaaaaagatctagtagatattccaaaaaaagttcgtgaagatattaaaattacagcagttgaaaatgttgatgaagtattgaaaattgctctaaaaa

SEQ ID NO: 262773 - DNA, 779 bp, Unknown
  Bacterial polypeptide expressing nucleotide sequence isolated from the Sargasso Sea
agcacataaaaaatgcatgtcagaactcaagaaacttaaaaatatgagtccaatgtcagctgaggcaactgttgtaagaaattatttagattggatgatagatattccttggtttaaaaaggataaagtagacattaatcttgataaggctttgaaaattcttgacgaagatcattttggtttagaaaaagtcaaagagagaattattgaatttttagcagtccagaaaagaatggataaaattaaaggtccaatcttatgtttagttggtccgccaggtgttggtaaaacttctcttggtaaatcaatagcaagagcaaccaatcgccagtttgttagaatgtcattaggtggaataagagatgaagctgaaattagaggtcatagaagaacatacatcggttcacttcctggaaaaataattcaaatgatgaaaaaagctggaacaaaaaatccattaatattattagacgagatagataaagttggtaatgattaccgaggagatccatcttcagctttacttgaaactcttgatccagagcaaaatacaacttttaatgatcactatttagaggttgattatgatctttctgatgttttgtttgtaactactgcaaatacattaaatatattaccaccgttattagatagaatggaagtaataagaattccaggttatacagaagatgaaaaaattaacattgcaaataaatatcttcttccgaaacaaattaaagagaatggggttaaagaaggtgagttagatttgaaagatg

SEQ ID NO: 262774 - DNA, 875 bp, Unknown
  Bacterial polypeptide expressing nucleotide sequence isolated from the Sargasso Sea
gaggaaattccatggtctggaagaaaagcagcttcgtttcatgaaatctgcaattgaagaaataacacatggctatactcgtgaagctggtgtacgtaatctggaacgcgaaattggtaaggtatgtagaaaagtagtaactcgtctggtacgcacaaaagagaaaaaagctcctgtggtaactccaaaactggtacacgaacttcttggtgttccaaagtatgaacgtgaccagcgtgaagataagagtgatgttggagttgcaatgggtttgggtgtcactccaatgggcggagagatgctacttattgaagtaggtttaatgccaggttccggaaaagttgtactgacagggaaactaggagaagttatgcaggaatctgctaaggcggcattttcctatgtacgtagtaattctgattatttagaaattgatcctgaaatattcgcaaaaacagatttacacgtacatctacctgaaggagcaactcctaaggacggaccttctgctggactacctctcatcatggctataataagtagctttacaaaaatttctgtcaagcacaatgtaggcatgacaggagaaattacattgcggggacatgtaactgagataggaagtttaaaagaaaagcttattgccgcaaagagaggactccttgatacagtgctgattccggctgaaaatcaaaaagatcttgtcgatgttcctgatgagattaaaaaaggtttggatataaatattgttaaaaatgttaaggaagcattgggaatagccttggttgctcatcctaaggaaataaaagatcagcaaaaagatgtatctgatatttcatggacaagtgattcaggttcccaacctgcagcgtgaa

SEQ ID NO: 262775 - DNA, 1003 bp, Unknown
  Bacterial polypeptide expressing nucleotide sequence isolated from the Sargasso Sea
gggcgcaagcattgcaagagcaacgggcagaaaatttgtgagaatgtctctaggtggtgtgagagacgaagcagagatcaggggtcatagaagaacttacataggggcaatgccaggaaagatcatgcagaatttgaataaggcgggcgttagaaacccactttttttgcttgatgaaatcgataaaatgtcgatggatttcagaggcgacccatcatctgcacttcttgaagtactagatcctgagcaaaacaccacctttaatgatcactacatggaagtcgattttgacctttctgatgtcatgttcatctgcactgccaatacccttaatatacctcctcctttgctggatagaatggaagtaatacgtattgaaggttatacagaagatgaaaaaatgaatattgctgagaggtatctagtcaacaagcaaacagaagccaatggcctcaaagattcggagatcaaaatcacaaatagcgcaattctctcaattattcgtcattatacacgcgaggctggtgtcagaaatctagaccgtgaaattgctaaaattgctaggaaagttgtgaagtcattgatcatgaagtcaaaagatcaaacagtgcatgtaaggcctggcagtctagaaaaatatcttggcgtcaaaaaatttaagtatggcattgcagagaaagacaatcagattggacaagtcactggtttggcttggacacaagtcggaggagagcttcttaccattgaatctacagcgattgcaggtaaaggtaagctaatcaacacaggacagcttggtgatgtaatgaaagagtcaattcaagcggccaccacagtcgttagaagtcgtgccaaagcacttggaataaaagaggattttcatcagaaaaaggacatgcacattcacgtcccagagggcgctacgcctaaggatgggcccagtgcaggcattggaatgtgtactgctctaatctcatctttgaccgtatattcctgtcaaagc

SEQ ID NO: 262776 - DNA, 796 bp, Unknown
  Bacterial polypeptide expressing nucleotide sequence isolated from the Sargasso Sea
caatattatgcctgttggtccaccaggagtaggtaaaacatcattaggaatgtctatcgcaagatctaccaatagaaaatttataaaaatgtcactcggtggtgtaagagacgaagcagaaatcagaggacacagaaaaacatatattggttctatgccaggaaaagtaatacaaaacttaacaaaagcgaaaactaaaaatcctctatttcttttggacgagattgataagatggcaatggattttagaggtgacccatcatcagcgcttttagaggtacttgatcccgaacaaaattttgcatttaatgatcattacctagaagttgattttgatttatctgatgttatgtttattgcaacagctaattcaatggagtcaattcctgctccgctattagatagaatggaaattatcagattacccggttataccgaagatgaaaaagtagatatcgctaaaaaatatttgcttcaaaaacagtttaagcaaaatgggcttaaaacaaaagaattgactatatcgataccatctattagagatattattagattttatacaagggaagcgggtgttcgaggattagatagatcaatttcaaaaatatgccgaaaagtaataaaatctctaacacttggtaataataaaagtaaaagtataaaaattacaccattgaatttaagtaattatcttggtgtcaaacaatttggtttcggctccgtagataaaaaggatatgattgggcaggtaaatggacttgcttggacttctaccggtggcgagctattaagaatc

SEQ ID NO: 262777 - DNA, 748 bp, Unknown
  Bacterial polypeptide expressing nucleotide sequence isolated from the Sargasso Sea
gttggtaaaacttcacttgggaaaatctattgcagaatcaacagggcgtaactttgttagaatgtcattaggcggcgttcgggatgaggctgaggtccgagggcacagacgaacttatatcggttcgcttcccggaaaagtcattcaaggaatgaaaaaggctaaaacatcgaacccgttatttttattagatgagatagacaagttaggaaacgattaccggggcgacccttcttcggcgcttttggaagttcttgacccagagcagaatagtagttttcaggatcactatcttgaagtggactacgatctctcagatgttatgttcgtaacaacagccaatacattgcggatggcacagccattgctggaccgtatggagataatccggctatcgggttataccgaagatgagaaagttgagattgcgaaaaaacatctaatagggaaacaaagggatcagcacgggttgctagataccgaatggagtataacggatgatgccctaagagatttaattcgcttttatactcgagaggccggagtccgcaatttagaacgggaaattgcgaatctagcaaggaagtcagtaaaagaaatactgatgacggaacttaagcaattaaaaatcaccaagaaaaatttagagaaattctcgggagtgagaaagtttagatttggcgaaacagaggacagtgatttggttggagtcactactggcctagcttggacagaggtgggaggcgag

SEQ ID NO: 262778 - DNA, 800 bp, Unknown
  Bacterial polypeptide expressing nucleotide sequence isolated from the Sargasso Sea
agattatttaagctgcgatgtagagaaaatagaagagtcaaatagaaataaagattcagatacttatgctttatctcttgttaaaagatttgagaaattattgattttaaacaaaagagatttgtcagagtcagtagagagtataaagaaattaaaagacagcagtgaaatagcagacaatattgcttctaatttaaatttagagatttttcaaaaacaggaacttcttgaattatcagacgtaagaaaaagactagaaaaaatatatgagttaatagaaaaagaaacaagcgttgtttctgttgaaaagaaaattagaggaagggttaaaaatcaaatggagaaaacccaaagagaatattatttaaacgaacaacttaaagctatccaaaaagaacttggagaaatagacgaaggaaaagatgaagtatcaaatttaactaaatctatagctaaagccaaaatgcccaaattagttcaagaaaaatgtctttcagaacttaaaaagctgaaatctatgagtcctatgtcagcagaagcaacagttgtaagaaattatttagattggatgactgaactcccttggagtaataaaagcaaaattaatagtgatttaaaaaatgcccaaaaaattttagacgaggatcattttggtttagaaaaagtaaaagaaagaataattgaatttttggcagtacaaaaaagaacggaaaaaatgaaaggtcctatactttgcttagttggcccacccggagttggaaaaacttcacttggtaaatcaatagccagagcaacaggaa

SEQ ID NO: 262779 - DNA, 874 bp, Unknown
  Bacterial polypeptide expressing nucleotide sequence isolated from the Sargasso Sea
ttccttgctgtgcaaaaaagaatggataaaattaaaggcccaattctttgtttggttggtccaccaggagtaggaaaaacttcattaggaaaatctattgctaaagcaacaaatagagagtttgtaagaatgtctgttggcggtatgagagatgaagcagaaatacgtggacatagaagaacttatattggttcattgcctggaaaaattattcaaatgatgaaaaaagctggaactaagaatccattagtcttgttagacgaaatagataaaattggaaatgattatcgtggcgacccttcttctgctcttttggaagctttggatccagaacaaaatacttcatttaatgatcattatttagaagttgattatgatttatcagatgtaatgtttgtaacaacagctaacacactaaatattcttcctcctttattagatagaatggaagtaattagattagctggttatactgaagacgaaaaaataaatatagcaaataaatttttattacctaaacaaatcaaaaataacggtgttaaagaaaatgagatgaaacttgatacagatattattcaacaagttattagaaattacaccaaagagtctggagttagaaacttagaaagagaaatttctaaactagcaagaaaagttgtcaaaaaagttgtctcaggtgagcaaaaagaagtcaaaataactaaagaaaatcttaatgactttttgggtgtagcaaagcataaatttggagaacttgagactgataataaagttggaatagttacaggacttgcatggacagaatatggtggtgaaattttaaagattgaaactgtaactatgccaggcaaaggtagaatgcaaattacgggta

SEQ ID NO: 262780 - DNA, 826 bp, Unknown
  Bacterial polypeptide expressing nucleotide sequence isolated from the Sargasso Sea
attgaaaagcactgatattgcttttgataaatcttccatagctaagattatcaatgattacacccgggagtccggagtgcgaaaccttgaaagaaaaatagcctcggtgattaggtcggtagccaaatcagtagcaatggaagaagaatatatctcaaagatcaatgctgaacaggtaagggagatcttaggaccggaaatctttgataaagacaattatgaagacaattctgtgccaggtgtggtcacagggcttgcctggactccctccggtggtgacatattgtttattgagtcatcactaagtcgcggcaagggaaaacttacactttcgggacagttgggtgatgtgatgaaggagtcggccattgctgccctttcttatctacgttctcattcagaaatgttgggaatagatcatcgggtatttgatgcctacgatctccatgttcacgttccggcaggagctatcccaaaagacgggccatcggctggtatcacaatgctcacctccttagcttcggttttcacccagaaaaaggtgaagaagaagattgcaatgactggagagataacactacggggcaaggtactccccgttggaggtatcaaagagaaaatactggcggcaagaagagccggaatcaaggagatcatcatgtgccaccggaatcagaaagatctggaagatatagatcagatatatttaaaagggctgaacatccatttcgtagaatatgtaccagaggtgttagaaatagcgttaaccaaccaaagagctagcaatccgatcgaatttatccttccagaagaaaagaaagattga

SEQ ID NO: 262781 - DNA, 712 bp, Unknown
  Bacterial polypeptide expressing nucleotide sequence isolated from the Sargasso Sea
ctacatcgactggttgctggatatgccctggggcgataaaaccgaagatcggttcgatcttgatgcggcagaaaaaattctgaataaggggcactacggacttgaaaaaatcaaagagcggatcattgaatacctcgcagttgctcaaaaggtgggttccctgaaaggtcctatcatctgtctggttggacctcctggggttgggaaaacatcacttgcccgttctgtcgccgatgcgttaggtagaaaatttgccagaatgagtctgggtggtgtcagggatgaggctgaaatcagaggccatcgaagaacctacgttggtgcaatgccgggaaaaatcatccagtccctgcgtaaagttaaatcaaaaaatccacttcttcttcttgatgaagtggacaaaatgacacgcggagtgatgggagatccctcctcagccttgcttgaggtcctagacccagaacagaatcacactttcatggatcattatctcgaggttgaattcgatctttcggatgttcttttcttctgcacggccaatgtggcacaagatattccacctgcgcttcaggaccggatggaagtcatcaacctttcaggatataccgaactggaaaaagtccacattttgaaaagacatttgttgccgaaacagattgaggaaaacgggctcaattcaagccaactcggatttcaaaacaaatctttcgat

SEQ ID NO: 262782 - DNA, 685 bp, Unknown
  Bacterial polypeptide expressing nucleotide sequence isolated from the Sargasso Sea
gaagatgaaaaagtagaaattgttaaacaacatttagcacctcagatgttagaaaagcatggtttaaagattggtgagcttatactggatgatagtgcgataactggattaataagatattatactagggaagcaggtgtaaggagtttagaaagagaacttgctaatctcgctcgtaaaacagttaaaagaatcgtagcaggcgatattggatcactaacaataaacaaagataacctgcatgagtttgcgggtgttagaaaatttaaatttggcgaaattgataatgatgaccaggttggaatagttacaggtcttgcttggacagaagttggaggtgatatattgccaatagaatcggtcataatgcctggaaaaggtcgaatgactattactggaaaactaggcgatgtaatgaaagagtctattcaggccgcaaaatcttatgttcgctcaagatgcattgagtttggaataaaaccaactatttttccgatacgtgatattcatattcatgtaccagaaggtgcaattccaaaagatggtccatccgctggcctaggaatggttacttccatagtttcagtgttgacaggtataccggtcagaaaagatattgctatgacaggtgaagtaacacttcgtggaaaggcacttgggattggtggtttaaaagaaaagctat

SEQ ID NO: 262783 - DNA, 969 bp, Unknown
  Bacterial polypeptide expressing nucleotide sequence isolated from the Sargasso Sea
atttttagccgtacagaaaagaatggataaactaaaaggaccaatcttgtgccttgtagggcctcctggtgttggaaaaacttctttaggaaaatctattgcaaaagcaaccaatagacaatttgttagaatgtctttaggtggagttagagatgaagcagaaattcgtggtcatagaagaacttatattggttcattgcctggtaaaattattcaaatgatgaaaaaagcaggtacaaaaaacccacttattttattagacgagattgataaagttggtaatgactatagaggcgatccatcatcagcattactcgaagctcttgatccagagcaaaatactacttttaacgaccattatttagaagttgattatgatctttcagatgtgatgtttgttacaacagcgaataccttaaatattttacaacctttattggatagaatggaagtaataagaatacctggttatacagaagatgaaaaaattaatattgcgaacaaatatcttttaccgaaacaaataaaggaaaacggagttaaagcaaacgaattagaccttgaagacggcacaataaaagaaattattagatcctacactagggaatctggagtaagaaatctcgaaagagagatttcaaaagtctctagaaaagttgtgaaaaaagtagttaatggagaaaaagaaaaagtaaacgttaataaagataatttatcagattttttaggtgttaaaaaatttaaatacggtgaagttgaagcacaagatagagtaggaattgttactggtttagcgtggacagagtttggaggagaaattttaaaaattgaaactgttaatatgccaggtaaaggaagaatgcagataactggtaaacttggtgacgtaatgcaagagtctgtaaaagctgcaaaatcttttgtaagatctaaaagtcttgactatggaattatacctcctatttttga

SEQ ID NO: 262784 - DNA, 981 bp, Unknown
  Bacterial polypeptide expressing nucleotide sequence isolated from the Sargasso Sea
aggtattggtagagggaaaaaaagagttagaattttagattttaaagataacgataaatttattacttgtgattatacagtcttcaatgatgttatctcaaaagatgaagatttatttccattagcaacaacagcactaagaagattagagaaattaacctcaataaataaaaaaatttctaatgaaacaataaatactattaaggaattaaaagacccatctcaaattgcggacaatatagcatctcacatatcggcttcaatttctgaaaaacaacaaatttttgaaaccaatgatgttaagaaaagattgaatgccataatcaaaattatggaaaatgaaactagtataattggcgttgagaaaagaattagaggaagagttaaaactcaaatggaaaaaacccaacgtgagtattatttaaatgagcaattaaaagctatccaaaaagagcttggtgaaattgaagatggtaaagacgaaacatcaagcattagtaaagctattactaaagctaagatgccaaaagatgtagaaaaaaaatgtcttcaggagttaaaaaaactaaaaaatatgagtcctatgtctgcagaggctactgtagtaagaaattatttagattggatgacagatctaccgtggcataaaaagagtgaagttgatattgatttgtcgaaggcacaaaatactctagacaaggatcattttggattagaaaaaattaaagagagaatagtggagtttcttgcagttcaaaaaagaatggaaaagattaaaggaccaattctatgtttagttggaccaccaggtgtgggtaaaacttcgttaggaaagtcgattgctaaagctacaaatagggaattcgtgagaatgtctgttggaggtatgagagatgaagctgaaatcagaggtcacagaagaacttacatcggctcacttcctggtaaaataatccagatgatgaaaaaagctgggactaa

SEQ ID NO: 262785 - DNA, 649 bp, Unknown
  Bacterial polypeptide expressing nucleotide sequence isolated from the Sargasso Sea
cgatcaagttggaattgtaactggacttgcgtggacagaggtgggtggtgatatacttcctatagagtctgttattatgccaggaaaaggtaggatgacgattacaggtaagcttggagatgttatgaaagagtcgatacaagcagcaaagtcatatgtaagatcaagatgcattgaatttggtattaagcctacgatatttcctatgagagatattcatattcatgttcccgagggagcaatacctaaagatggtccttcagcaggtcttggtatggttacgtcgattgtctcagtattaactggaatacctgtcagaaaagatatagccatgacaggcgaggtaactttacgaggcaaagcacttggtattggaggattgaaggaaaagttattggctgctctaagggctggaacaaagacagttatcatcccgaaagagaatgagaaagacatggctgacataccaaataatgtaaaagacggtttagaattaatctttgtagataatgtcgacgaggttttgagaattgctcttacaaaacctttgcttccgatcgagtgggacgaagatgattcacccagttcttctagtgaaatatctgatgaagatgcagaacaagattcagataatcctataactcattga

SEQ ID NO: 262786 - DNA, 981 bp, Unknown
  Bacterial polypeptide expressing nucleotide sequence isolated from the Sargasso Sea
ttggtataaaaaggatgatgtaaatattgaacttaacaaagctgtaaaaacattagatgaagatcattttggattagaaaaagttaaagaacgtataatagaatttttagctgttcaaaaaagaatgcaaaaattaaaaggcccaatactatgtctagtcggccccccaggtgttggaaaaacttcattaggtaaatcaattgcaagagctacaaatagacaatttattagaatgtcactaggtggcgttagagatgaagcggaaattagaggtcacagaagaacttatataggatcattacctggaaaaattattcaaatgatgaaaaaagctggtactaaaaatcctctttttttacttgatgaaattgataaagtaggaaatgattatagaggtgacccatcatcagctttactagaagctttagacccagaacaaaatacaacattcaacgatcactatctagaggttgattatgatttgtctgatgtaatgtttgttacaactgcaaatactttaaatattctcccaccactattggatagaatggaagtaattagaattcctggttatacagaagatgaaaaaataaatatagctaatagatatttacttccaaaacaaattaaagataacggagtcaaagaaggagaattattattatctgacggtactattaaagaaataataagaaactacacaaaagagtcgggagttagaaatttagaaagagaaatttctaaagtagcaagaaaagttgttaaaaaagtaatttccaaagaagaaacaaaagttaatgtgaatgaagataatttatcaaattttttaggagttaaaaaatataaatttggtgagttagaaagtgaaaataaaattggtatagttactggacttgcatggaccgaatatggaggagagattttaaaaattgaaacagtaaatatgccaggaaaaggtagaatgcaaattacaggtaaatt

SEQ ID NO: 262787 - DNA, 943 bp, Unknown
  Bacterial polypeptide expressing nucleotide sequence isolated from the Sargasso Sea
attgaagatcctaagtctaaagatctttattctgttgaaactctctctaaaatacttcaactcttaaaacttcccgatggtactctaaaagttcttgtagaaggaaaaaaaagggtaaaaattaattttttgccaataaaaaaagaatttgattatttaacttgtaaatatacagctcttacaaatttaggcttatctaaaattgatgttactaaaattaatgaactacatactgtattcgaagattatttgaaccttaataaaaaatcaaataatgaaattattaatttaataacagatatcaaagatgcctccaaactatgtgatactataatatcaaatttgacactctctattaatgaaaaacaagaatttttagaaattaatgatgtttcgtctagaattcataaactaatttcgaaattaaaagttgaagttgatactcttgaaatcgataaaaaggttagaaatagagttaaatctcaaatggaaaaaacacaaagagaatattatttaaatgaacaactaaaggcaatacaaaaagaacttggtaatgacgaagatgataaggacgagtttcaagaaattaaagaaaaaattactaaaactaagcttccaaaagatgctttagaaaaagttaattcagaattcaaaaaacttaaaaacatgagcccaatgagtgctgaatctggagttgtaagaagctatattgattggattcttagccttccatggaaaaaagtttcaaaaataaattatgatttatctttagcaaaaaaaattcttgatgaagaccattacggtttaaaaaaagttaaagaaagaattttagagtttttagttgtacaaaaaaggtcaaagtctttaaagggtcctatattatgtttagttgggcctcctggagttggaaaaacatctttgggtaaatcaatagcaaaagcta

SEQ ID NO: 262788 - DNA, 979 bp, Unknown
  Bacterial polypeptide expressing nucleotide sequence isolated from the Sargasso Sea
gaaaatgagtctaagaatttagttagcctgattaaagcgaatttcgaagactacataagtgttactaaagaatttcctccagaaatagtctcaacagttgattcgttagatgaattatcaagattaatggatacaattactggacaccttccaattgaaacctcaaagaaacaagagattctagaaacagttgatcttaaagaaagagctgaaaaagttttaactttcatagaatcacagctagatgtagttgatgttgaaaaaaaggttcgagacagagtcaaaaggcaaatggaaaaatctcaaagagaatactatcttaatgagcaaattaaagctgcgcaaaaagagctcggtgaaattggtgaagagggcgatgaactagataatcttgagaaaaaaattcatgaagttggcatgactaaagaagctttaaaaaaagcaaagagtgagcttgcaaaatttaaacacatggcaccatcttcagctgaggcttcagttgtaagaacttatcttgattgtctggtggatgtgccatggaaaaagaagtctaaggttaaaactgatgtaaaagcttcgatggaaattcttgaagaagaccactatggtcttgaagaggtcaaagaaagaatagttgagtatctagctgttcaaaaaagagttaagtcaatgaaggctcctgtcttgtgtcttgttggtcctccaggtgttggtaaaacatctttaggtgaatctatcgccagagcaactaatagaaagtttgtaagaatgtctcttggcggtgtaagagatgaatctgaaatcaggggacacagaagaacttatattggatcaatgcctggaaaaattattcaaaaactttcaaaagtgggtgtaaaaaatccattatttcttttagatgaaattgataaaattggtatggaccacaggggggacccagcatctgctttgttggaggtccttgatcctgaacaaaaca

SEQ ID NO: 262789 - DNA, 874 bp, Unknown
  Bacterial polypeptide expressing nucleotide sequence isolated from the Sargasso Sea
tatgtcacaagataacaaaaaacctttattaccattaagagatatagttatttttccgtcagtggttgttccattatttgtagggcgcaagaaatctataagagccctagaagaggtcatgaagacagataaatcaattgttttagttgctcaaaaaaattccgaggttgacgaccctcaagaaaaagatattttttcatatgggtgcctaagcaagattctgcaattattaaaactaccagacgggacggttaaagttttagtagaaggtttgagcagagcaaaaattaaagaaataaccgatgaaaataagaaattcttaagttgcagcatagataaaataaacgatgaaaaagaaactgaagaaaataagctatatgctttaaacttgataaaaaaattcgaaaaactgtctagcttaagtaaaaaagactcaatggatttcgtgaaaacattaaaatcactaaaggagtcaagccagattgctgataatatttcctcaaatttaaatatttcaataaatgataagcaactgctacttgagataggagatttaaagaaaagattagaaaaaatttatgaaattttagaaaaagagacaagcgtaattagcatggagaagagaattagaggcagagtaaaaaaccaaatggagaagactcaaagagagtattatcttaacgaacagctgaaagccatacaaaaagaattgggtgaaatagaggagggcaaagatgaagtttcaaatttaagcaaatcaattacaaaagctaaaatgacaaaagatgctcaaaataagtgcatgtctgaattaagaaaactaaaagctatgagtccaatgtcagcagaggcaaccgtagttagaaattattta

SEQ ID NO: 262790 - DNA, 901 bp, Unknown
  Bacterial polypeptide expressing nucleotide sequence isolated from the Sargasso Sea
tgaaaaaaaatgtatgtcagagctcaaaaaattaaaaaatatgagcccaatgtctgcagaagctaccgttgttagaaattatttggattggatgatagacctaccatggtttaaaaaaaataacgtagatatagatcttaataaaggacttaaaattttagatgaagatcattttggactagaaaaagttaaagagagaattatagaatttcttgcggtacaaaaaagaatggaaaaaattaaaggacctatactttgtctagttggtcctccaggagttggcaaaacttcattaggcaaatctattgctaaagctactaatagacagtttataagaatgtcattaggtggtgttagagatgaagcggaaataagaggtcatagaagaacatacattggatcattaccaggaaaaattattcaaatgatgaagaaagctggcactaaaaatccattatttctattggacgaagtagataaaataggaaatgattatagaggagatccgtcctcagctttgttagaagcattagatcctgaacaaaatactgcatttaatgatcattacttggaagtcgattatgatttgtctgatgtaatgtttgtaactactgccaacactttaaatattttaccaccacttcttgatagaatggaggtgataagaattccaggatacacagaggatgagaaaataaatattgctaataaatatctactgcctaaacaggtaaaagagaatggtgtaaaagagggagaacttaatcttgaggatggaactattaaagagattattagaagctacacaagagagtccggtgttagaaatttagaaagagaaatttcaaaagtaacaagaaaggttgttaaaaaagtagtaagtggtgaagtgaaaaagttc

SEQ ID NO: 262791 - DNA, 958 bp, Unknown
  Bacterial polypeptide expressing nucleotide sequence isolated from the Sargasso Sea
tcttggtgagagtattgctagggcgactaaccgaaaatttgtccgcatgtctttaggaggtatgcgagacgaggcagagattcgcggccacagacgaacttacatcggctcgatgcctggaaaaattttacagaaaatgtcaaaggcgtcagtggtcaatcctttgtttttgttggatgagatcgacaaaatgggaatggatgttcgaggagaccctgctagcgctttgcttgaggttttggatcctgaacaaaacaatactttcaacgatcattatcttgaggtcgactatgatctctcagatgtgtttttcgtctgtacatcaaattccatgaacattcctgctcccttattagataggatggaagtcattcggcttcctggatatacagaagatgaaaaattaaatattgcaaagaaatatcttgtcccgaaacaaactaagctcaatggtttaaagcctgatgaacttactatttctgatgctgctataacggacatcattcggtactacacaaaagaggctggagttagagggttagaaagggagatagcaaaggtcgctcgcaaggtggttactgagaaggagttgggccgtaaagcgcaaaagatcagtgtcagcgagaaattattagaaaaatacaatggcgtacgtaagtttagttatggtctggctgaagagaaaaatgaagtagggatcgtgacaggcttggcttggactcaggtgggtggtgagctgctaaacatagaagcagtagtcgtacctggcaagggacggcacactaaaacgggttctcttggtgacgtgatgcaagaatccatacaggcggctatgacctttgtgagaagtcgtgcgtcgtcgctaggattggcctcgaattttcatgagaaaaaggatattcatattcatgtttccgagggcgcaccccaaaggatggccctagcgcgggtattggga

SEQ ID NO: 262792 - DNA, 912 bp, Unknown
  Bacterial polypeptide expressing nucleotide sequence isolated from the Sargasso Sea
agacttatattgggtgcactccccaggaagaattatacaaaatattaaaaaggctggtactaataatcctgtcttcatgctcgatgaggttgacaaattaggttctgattttagaggtgatccttcatcagctttgcttgaggtattagatccagaacagaatcactcattcaatgatcactatttagaacttgattttgatttaagtaaagttatgtttatagctactgcaaataattatggaaatattccacctgctttgcgcgatcgtatggaaatattagagttttcaggctatatccaagatgaaaaagtgcaaattgctaaaagacatcttatcccaaaacagataaaagaaaatggattgaagaaaacggaagtaactttagatcttaattcaataaaagagttaattagtgcatatactcgagaagctggcgttcgtcagttagagagacagattgctaatgttttgcggaaagttgcgagggatattgttgagtcaaagaaaaaacagattaaagtaacaaaaacaaaggttcatgacttattaggtgcttccagatttcactctgagctagctgagagagctactgagccaggtgttgtaactggtttagcatggacagcagctggtggtgatattttatttatagagtcaacaaaaatgcaggggaaaggtaaacttacattaactggtcaactgggcgatgttatgaaagaatcagccacagcaggattaacttttgttagagcccatgctagtacatttggcattgattctaattttaatgaggaaacagatatacatgttcatgtccctgctggtgctattccaaaagatggaccatctgctggggttagtatggtcacttctttagtttctttaatgacaaataatccggtaaaaga

SEQ ID NO: 262793 - DNA, 919 bp, Unknown
  Bacterial polypeptide expressing nucleotide sequence isolated from the Sargasso Sea
aaatttgtcagaatttctttaggaggaataagagatgaagctgaaatcagagggcacagaagaacttacataggttcattacctggaaaaattattcaaatgatgaaaaaggcgggaactaaaaatcctttattcttattagatgagattgataaagttggaagtgattatagaggagatccatcttcagctttgctcgaggctttagatccagaacaaaacaaacaatttaacgaccattatctagaagttgattatgacttatcagatgtgatgtttgttacaacagcaaatacattaaatattctaccacctttactagacagaatggaaataataagaataccagggtatacagagaatgaaaaaacaaacattgctcaaaaatttttaatacccaaacaaggaaaagataatgggctaaaaaatgatgaatggaaaatttctgaaacagtaattaaaaaagtaataagagattatacaagagagtctggagttagaaatctagaaagagaaatttctaaaattgctagaaaaatggtaaaaaaaatagattcaaaagaaaaaataaaccatgaattatcagaaaaagatgtaaacagttatttaggcgtcaaaaaatataattatggcgaaattgaaagtgaaaacaaaataggtgtttcaaccggactagcatggaccgaagtaggaggcgaaattttaaagatagaatcagtaaatatgccaggaaaaggaaaaatgcaaattacaggaaaactcggggaagtaatgcaagagtctgtaaaagccgcaaagtcctatgtgagatcaaaatctttagaatttggaataataccaccactatttgaaaaaaaagattttcacgttcatgttccagagggtgctacgccaaaagacggaccttcagctggaatag

SEQ ID NO: 262794 - DNA, 748 bp, Unknown
  Bacterial polypeptide expressing nucleotide sequence isolated from the Sargasso Sea
agaggttcaaaaaaaatgcatggcagaactaaaaaaattgagaagtatgagtccaatgtcagccgaagctacagttgtaagaaattatttagattggatgatagatcttccatggcacaaaaaggataaggtagatattgatttaaataaagctttgaaaattttagatgaagatcattttggtttagataaagttaaagagagaattatagaatttctagctgttcaaaaaagaatggataaaattaaaggaccaattttatgcttagttggaccaccgggtgttggaaaaacttctttaggaaaatcaattgccaaagctacaaatagacagtttgtgagaatatcactaggaggaattagagatgaagctgaagtaagaggtcatagaagaacatatatcggatctctaccaggcaaaataattcaaatgatgaaaaaggctggaactaaaaatccattatttttattagatgaaattgataaagtaggaaatgattatcgtggagatccctcatcagctttactagaagctttggatcctgaacaaaatacaacattcaatgatcattatttagaagtagattatgatttatctgatgtgatgtttgtaactacagctaatacattaaatattttgcctccattattagatagaatggaggttatacggataccagggtacacagaagatgagaaagttaatattgcagataaatttttactaccaaaagcaattaaagaaaat

SEQ ID NO: 262795 - DNA, 511 bp, Unknown
  Bacterial polypeptide expressing nucleotide sequence isolated from the Sargasso Sea
atgcaagagtctattcacgcagcgatgacggtggtccgaagtcgtgccacggttctgggcatcgaagatgattattttcatcagcgtgattttcatgtgcatgttccagaaggtgcgacaccaaaagatggtccgagtgcggggattggcatgtgtacagcgattgtttctgccatcactaacattcctgttttagcggatgtggcgatgacaggcgagattactttgcgcggtgaggtgttgccgattggtggcctcaaagaaaaattattagcggcattgcgcggtggcgtgaaaaacgtgattattccgcacgaaaacaagcgagatttaaaagaaattcctgataacgtgaagcaaggtatgtcgattcatccggtgcgttggatagatgaggtatttgagctggcgttagttaagcagccttcaccactcgtgaagtcacgaaagcgtaaaccagcggctaagaaaaagtcgacagcgaaggcaaagcgtaaacgtgcaaactaac

SEQ ID NO: 262796 - DNA, 943 bp, Unknown
  Bacterial polypeptide expressing nucleotide sequence isolated from the Sargasso Sea
gaagtatttagattatctggttatacagaggacgaaaaagttaatatttctcaaaaatatttaataccaaatcaaagcaaaaataatggacttaaagatcatgagtggaagatcacagaagacattaatagaaaaataattagggattatactagagagtcaggagtaagaaacctagaacgagagatttcaaaaatcgctagaaaattagtaaagaaaattgataataatgaaaaagtaaaaaatccaataaatgagacagaccttaaaaatctgttaggagtccaaaaatttaattacggtgaaatagaagaggaaaatagaattggagttgttacaggattagcttggactgaagtagggggtgaaattcttaagatcgagtcagtaataatgccaggtaaaggaaaaatgcaaattactggaaaactcggagacgttatgcaagaatcagttaaagcagcaaaatcatacattagatctaaaagtttggaatttgggataattcctccaatctttgataaaaaagattttcatattcatgtacctgaaggtgcaactcctaaagatgggccatcagctggcgtagggatggtaacatcaataatatctgcaattacagaagttccagtaaacaaagatgtagcaatgacaggagagatcacccttcgaggactagtattgccaataggaggactaaaagaaaaattgttagccgctcacagagcaggtataaaaaaagtaattataccaaaagaaaacaaaaaagacctgatggaagtccctaaaacaattttagagtcaatggaaataatttccgttaaaaatgttgatgaagttttaaaagttgcattgaccaaacccctaaaaagagttgagtgggtcgaagttgatcaaatttcaaaaaatgaaaaaggaaaagaagaactaagtactcattaga

SEQ ID NO: 262797 - DNA, 1022 bp, Unknown
  Bacterial polypeptide expressing nucleotide sequence isolated from the Sargasso Sea
gataatagaatttttagcagtacagaaaagaatacagaaaatgaaagggccaattttgtgtttagttggaccacctggtgttggaaagacatcattaggtaagtctatagctaaagccacaaatagaaaatttattagaatttccttaggtggtattagagacgaagctgaaataagagggcacagaagaacttatattggttctttgccaggaaaaattatacagatgatgaaaaaagctggtactaaaaatccactctttttattagatgaaatcgacaaggtgggcaatgactatagaggagacccttcatctgctttattggaggcattggatcctgagcaaaacaaagaatttaacgatcactatttagaagttgattatgatctttctgacgtaatgtttgtaacaactgcaaatacattaaatattttgccaccactgcttgatagaatggaagtgattaggctatctggatacacagaggatgaaaaagttaacatctctcaaaagtttctaattccaaaacaaagtgaaaacaatggattaaaaaaagaggagtggaatattgatgaaaaagttaatcgtaaaattataagagactacacacgtgaagctggagtaagaaatttagagagagagatatctaaaatagcaagaaaattagtaaaaaaaatagacaacaaagagaaaataaacaatccgcttaaagaaactgatgttaaagatttgttaggagtacaaaaatttaattacggtgagattgaagaggaaaacagaataggagttgtcactggactcgcttggacagaagttgggggagaaattttaaaaatagagtcagctataatgccaggtaaaggcaagatgcaaattacaggaaaacttggggatgttatgccagagtctgtaaaagcagctaagtcttatattagatcaaaaagtttagactatggtattataccaccagtatttgataaaaaagattttcatatacatgtaccagaaaggagcacacaaa

SEQ ID NO: 262798 - DNA, 493 bp, Unknown
  Bacterial polypeptide expressing nucleotide sequence isolated from the Sargasso Sea
gtctgtaaaggcagcaaaatcatacataacatttaaaagtttagattacggaataattccacctatttttgataaaaaagattttcatatacacgttcctgagggagcaacgcctaaagacggtccctcggcaggagttggaatggtaacttctatcatctctgcaataacagaaatacctgtaaataaagacgtagcaatgacaggagaaattacattaagaggtttagttttgccaataggtggtttaaaagaaaaattgttggcggcccatagagcaggtattaaaaaagttttaataccagtagaaaacaaaaaagatttaattgaagtgcctaaaacaattttaaaatcaatggaaataattcctgttaaaaatattgatgaggtgcttaaagtggctttaactaaacctttcaagagagtagaatgggtcgaagtcgatcaaatttcgaaaaaaggtaaagttaaagaggaattaagtacacattaa

SEQ ID NO: 262799 - DNA, 845 bp, Unknown
  Bacterial polypeptide expressing nucleotide sequence isolated from the Sargasso Sea
aaccaacaataatctaaaagctctcattaaagttgttgtagaaaattttgaagagtattctaaagttaataaaaaaattccatctgaggttataaccaacctcaattccattagtgatcctaataaaatatcagatataatttctataaatttaacaattaatatggcgcagaagcaggaattgcttgaaatgcttaacttagaagaaagattaaataaaattcacttatatttagtatctgagatagattcttttcagatggaaaaaaagataaaaggtagagtaaaacgacaaatggaaaaaactcaaaaagaatattatctaaatgagcaaatgaaagctattcagaaggaattaggcgataatgaagacactgatgatattgctgagatagaaaaaaaaatcgatacagtaaagctctcaaaagaagcaaaagagaaatgtaagtcggaaataaaaaaattgaaaaatatgagccctatgtcagcagaggcaactgtaataagaaattatctagactgggttttatctatcccttggaataaatcttctgcaatttcaaaaaatataaaaaaagctaaatctattttagagaatgatcattacggacttgataaagtaaaagagagaattttggagtatttagcagttcaaaaaagaactgataaaataaaggggccaattttatgtttagtaggcccaccaggtgtaggtaagacatctcttggtaagtcaatagctacggcaactgggagaaacttcgtaagaatgtccctagggggggttagagatgaagctgaaataagagggcatagaaaaacatatattggttcaatgcctggaa

SEQ ID NO: 262800 - DNA, 946 bp, Unknown
  Bacterial polypeptide expressing nucleotide sequence isolated from the Sargasso Sea
ctgaacaaaaatacaacatttaacgatcattatcttgaagtagactatgatttatcagatgtaatgtttgtacaaacagctaacacactaaatatacttcccccattgcttgatagaatggaggtaattcgtttagcaggttatactgaggatgaaaaaataaatattgctaataaatttctacttcctaaacaaattaaggataatggcgttaaagaaaaggaaatgaaattaggtgacgatataattaaagaaattattcgaagttatactaaggagtcaggagtaagaaatcttgaaagagaaatttctaaagttgcaagaaaagttgtcaaaaaggttgtatcgggcgaagaaaaagaagttaatattgatacaaaaaatttagcagattttttaggtatacctaagtttaagtcaggtgaattagaaagtgaagacagagtgggaatagttacaggtttagcctggacagaatatggaggagagatattaaaaatagaaactgtaacaatgcctggaaaaggcaggatgcaaatcactggtaaattaggagatgtaatgcaggagtctgttaaagcagcaaaatcctttgttagatctaaatgtttagaatatggaataatcccaccattatttgaaaaaaaggatttccatattcatgttcctgaaggagcaacacctaaagatggcccctctgcaggtattggaatggtaacatctattgtttcatctataactaatattcctgtaagaaaagatattgctatgactggagaagtaactttaactggacaagttttaccaataggtggattaaaagaaaaattattagcagcccatagagctggaattaaagaagctttaattccgaaggaaaatgaaaaagatctagttgatatgccaaaaaaaattattgatgaaattaaaataactcccagttgaa

SEQ ID NO: 262801 - DNA, 914 bp, Unknown
  Bacterial polypeptide expressing nucleotide sequence isolated from the Sargasso Sea
gtgtaggaaaacatcattgggtaaatcaattgctaaagctactaatagagagtttgtccgtatgtcagttggaggtatgagagatgaggctgagataagagggcatagaagaacttatattggatcgttgccaggtaaaattatccaaatgatgaaaaaagctggaacaaaaaatccattaattttattagatgaaatagacaaaataggaaatgattatagaggagacccttcatctgctcttctagaagctctagatccagaacaaaacacaacatttaatgatcactatcttgaagttgattatgatttatcagatgtgatgtttgtaacaaccgcaaatactttaaatattttaccacctttattggatagaatggaagttattagattagccggatatacggaagacgaaaaaattaacattgcaaataaatttctactaccaaaacagattaaagataacggtgttaaagaaaatgaaatgaagttagatgacaacattattaaagaaattattagaagatacactagagagtctggtgttagaaatctcgagagagaaatttctaaggttgcaagaaaagttgtaaaaaaagtagtatcaggtgaagagaaagaagttaatgttaataataaaaatttgtcagattttcttggtgttccgaaacataaatttggtgaactagagtcagataataaggttggaattgttactggtttagcatggactgaatatggtggcgaaattcttaaaattgaaacggtgacaatgcctggaaaaggaagaatgcagatcactggtaaattaggtgacgtaatgcaagagtctgttaaagctgctaaatcatttgtaagatcgaaatgcttagaatacggaattataccacctttatttgaaaaaaaagattttc

SEQ ID NO: 262802 - DNA, 743 bp, Unknown
  Bacterial polypeptide expressing nucleotide sequence isolated from the Sargasso Sea
caaaaaaaatgacatttttaattatggttgtgaaagtagtattttacaattattaaaactcccggatggaacagtaaaagttttggtagaaggtattaccagagttaaaataaacgattttcacgataatgagcagtttttatcttgtagctatgaaaaattaattgagatagttgataaaaatgaagatttgatgcctttagctttaaattcaatcaaaaaattggaaaaacttacatcaattaacaaaaaaatttctaatgaaacgattaataatattaaacttttaaaagacccatcaaaaatttctgacaatatagcatctcatttgaatgcaacaatttcagaaaaacaacaagtttttgaaactttggaattaaagaagagactaaatttaattaataaaatcatggataatgaaacaagtattattggtgttgaaaaaagaatacgaggaagagtaaaaacacaaatggaaaagacacaaagagaatattatttgaatgaacaacttaaagctatccaaaaagaattaggcgaaatagaggatgggaaagatgaaacctcgagtctaaacaaagctatattaagatcaaaaatgccaaaagaagttgaaaagaaatgtatgtctgaattaaaaaagctgaaaaatatgagcccaatgtcagcagaagcaactgttgtaagaaactatttggattggatgatagacttaccgtggttcaaaaaagataaagtagaca

SEQ ID NO: 262803 - DNA, 885 bp, Unknown
  Bacterial polypeptide expressing nucleotide sequence isolated from the Sargasso Sea
ccaagcaaatgtctcgtaacggcgtaaaggataatgaaatcaaattaaataaagaagtaattttagctttaataagatactacactagggaggctggtgttagaggtcttgaaagacaaattgccaaaattttaagaaaggtagttaaagaaagattaattgcgaagaaaccaaattcaaaagccactagcattacggcaagaaatcttgaaaaatattcaggagtaagaaaattcaaatatggcatagctgaaaaagataatgcagttggtcaagttactggcctggcatggacagaagttggtggagaacttttaactattgaagcttctaacattgatggcaaaggcagagtaattaaaactggttcattgggagatgttatgcaggaatcaattcaggctgcaatgacagttgttagatctagagcagattctttaggaataaaacctaatttttatgaaaaatacgacatccatattcatgttccagagggagcaactcccaaagatggtcctagtgctggaggtgcaatggcaatctctttaatttcaatttttacaggaataccagttagagctgatacagctatgaccggtgagattacgcttagagggcagattctaaaaattggaggccttaaagaaaaactgcttgctgctaagcgaggtggaataaagaatgtaataattcccaaagaaaatgaacctgaccttcaggaaatacctgaacagataactaaatcattaaatattattccagttgagtggattgatgatgtcatttcagcagcgcttgtagaagaaccaactccaaagactaagaaaataaaaactgaaaaatctaaaacttctacaaaaactgaaaataagacagcccactaaa

SEQ ID NO: 262804 - DNA, 934 bp, Unknown
  Bacterial polypeptide expressing nucleotide sequence isolated from the Sargasso Sea
aacagtaaaagttttagtagagggagtaagaagagtaaaaattttagattttaaagataatgataaatttattacatgtgactacacagtttataatgatttaattaataatgatgaggatttatacccattagctgtaacagctgtaagaagacttgaaaaattaacttctattaataaaaaaatttcaagtgaaacaataaattctattaaacaattaaaagatccatcacaaatagctgataatattgcctcacacataagcgcaactatttcggaaaaacaacaaatttttgagacagctgatgtcaaaaaaaggttaaacgcgattattaaaataatggagaatgaaactagcattataggtgttgaaaaaagaattagaggtagagttaaaactcaaatggaaaaaactcaaagagaatattatttaaatgagcaattaaaagctattcaaaaagaattaggtgagattgaagatggtaaagatgaaagcactagtcttaataaagctattctaaaagcaaaaatgccaaaagaagtcgaaaaaaaatgtctacaggaactcaaaaagttaaaaaatatgagccctatgtctgctgaagctacagttgttagaaattatttggattggatgactgaacttccatggcataaaaaaagtgcagttgatattgatttaaaaaaagcattagagatattggatagagatcattttggattagaaaaagttaaagagagaataattgaatttttagcagtgcaaaaaagaatggagaaaattaaaggtccaatattatgcttagttggtcccccaggtgttggaaaaacttcattaggaaaatctattgcaaaagcaactaatagggagtttgtaagaatgtcagttggaggtatgagagatgaagctgagatcagaggtcatcgaagaact

SEQ ID NO: 262805 - DNA, 699 bp, Unknown
  Bacterial polypeptide expressing nucleotide sequence isolated from the Sargasso Sea
attgggatctttaccaggaaaaattattcaaatgatgaaaaaagctggaactaaaaacccacttattcttttagacgaaatagataaagtaggaaatgattatagaggtgatccttcttctgcattactagaagctttagacccagagcaaaatactaatttcaatgatcattatttggaagtagattacgatctttcagatgtaatgtttgtaactacagctaataccttaaatattttacctcctctacttgacagaatggaagtgataagaatacccggttatacagaagatgagaaaattagtatagctgacaaatatttattaccaaaacaaataaaagaaaatggtgttaaaaaagaagaattagaattagcaaatggaacaattaaagagattatacgaagttatactagagaatctggtgtgagaaatttagaaagagaaatatcaaaagttgcaagaaaagtggttaaaaaagttgttagtggagaagagaaaaaagtaaacgttaatgaaaaaaatatatcagactttttaggtgtcaaaaaatttaaatatggtgaagttgaaccagaagatagaattggagttgtaaccggtttagcttggactgaagttggtggagagattcttaaaattgaaaccatccatatgccaggaaaaggtaagatgcaaattacaggtaaacttggtga

SEQ ID NO: 262806 - DNA, 969 bp, Unknown
  Bacterial polypeptide expressing nucleotide sequence isolated from the Sargasso Sea
agggcaaaaattcgtaacttcataccgggagaaaaatttcatcaggttgaagttgatctggttaatgagattgttcttgatgacccagaaattgaggccttggcgcgatcctgcttaatgcaatttgagagttatactaaaattaatcggaaaatatcaactgatacatttaacaccgtttctgagattgatgattactcaaaaattgcagatacaatcgcatcaaatctgcaaataaaattatctcaaaaacaacaaatacttgagataaataatctgaaagaacggttcgaattaatactcggcttccttgagggtgaaattgatgtactgcagactgaaaaaaggattagagggcgtgtgaaacgccagatggaaaaaactcaaagagagtattacttaaatgagcaaatgaaagcaatccaaaaagagctaggcaaagactctgaggatgcgggcgatgatattaatgagttagaagataagcttgagagtttaaagctaccaaaagatgttcgagaaaaagcaaaatcagaattcaagaagctcaaacaaatgagcccaatgtcagcggaggctactgtcgtacgaaactacctagattggattgtatcaataccttgggctaaaaaatcacggtttaataagccaataacattttccgaagatattttagataatgatcactatggacttgaaaaagtaaaagaaagaataattgaatatatagcggttcagaaaagaacaaagaaattaaagggacctatattatgccttgttggcccacctggcgttggtaaaacctcgttgggtaaatctatagctcaagcaaccggcagagactttgtaagggtgagcctaggtggagtcagagatgaggctgaaataagagggcacagaagaacatacattggttcattgccaggtcgtattatacaatctatgaaaaaagtaaaaacaaaaaaccca

SEQ ID NO: 262807 - DNA, 919 bp, Unknown
  Bacterial polypeptide expressing nucleotide sequence isolated from the Sargasso Sea
cactgaaacaattggtaatattaaacagttgaaagacccttctaaaattgctgataatatttcttcgcacttaagtactacgattttagaaaaacaacaattatttgaaacctttgatgttcaaaagagattaaatagcataataaaaattatggaaaatgaaactagtattataggggtagaaaaaagaattagaggtcgtgtaaaaactcaaatggaaaaaacacaaagagaatattatttaaacgaacaattaaaagctattcaaaaagaattaggagaaattgaagatggaaaagatgaaacttcaaatttaaacaaagcaatattaaaagcaaaaatgccaaaagaagttcaaaaaaaatgtatggctgaattaaaaaaattaaaaaatatgagtccaatgtcagctgaagccactgttgttagaaattatttagattggatggtagatataccttggcacaaaaaaaatgatgttaatatagatcttagcaaagcttcaaaagttcttgatgaagatcattttggtttagaaaaagtaaaggaacgaattgttgaattcttagctgtacaaaagagaatgcaaaaaataaaaggaccaatattatgtttggttggccctccaggtgttggaaaaacatctttaggaaaatctattgctagagctacaaacagaccgtttgttagaatgtctcttggcggtgttagagatgaagctgaaatacgtggacatagaagaacttatattggatctttgccaggtaaaataattcaaatgatgaaaaaagctggaacaaagaatccacttttcttgttagatgaaatagataaagttggaaatgattatcgtggtgacccatcttctgctttactagaagctctagactcagaacaaaatactactttcaatgatcac

SEQ ID NO: 262808 - DNA, 898 bp, Unknown
  Bacterial polypeptide expressing nucleotide sequence isolated from the Sargasso Sea
tttagcaatacaacaaagatctaagaaaattaaaggtccgatactttgtttgttaggacctcctggtgttggaaaaacttccctaggtaaatctattgcatctgccactggtagggaatttatacgaatagccttaggtggagttcatgatgagagtgagatcagaggtcatagaagaacctatattggttctatgcccggaaaaattattcaatctatgaaaaaagcaaaaactactaaccctcttattcttcttgatgaagtagataaaatgggtagagattttaggggtgatcctgcaagcgctatgttggaagttcttgatccagaacagaacagtacctttacagaccactacttagaagtagaatatgatttatccaatgtaatgtttataacgactgccaatacttataatatggcaagacctttgttagatagaatggagataataagtcttgcaggctatactgagatcgaaaagcgtgacattgctactgagcatttgatatcgaagcagatgaaagcacatggacttaaagatgcggagtttagtattaatgaaaacggtcttttagaaataattagaagatatacacgagaagctggagttcgtaatttagaaagagaaattgccaaactctgtaggaaatcattaacaaaaattattaaaggtgaagcaaaaaaagtaaatgttaccctgaagaatattgatgactttttaggagttaaaaaatttaaatttggtcttgcagaagaagaaaaccaaattggtgttactactggtcttgcttggactgagactggaggagatttgttatcaattgaaagctttgcattaccaggtaagggaagaatgaatctactggtaactgggcgaaagtatgaagaagtattg

SEQ ID NO: 262809 - DNA, 835 bp, Unknown
  Bacterial polypeptide expressing nucleotide sequence isolated from the Sargasso Sea
tattgaggaaaaagttaatagaaaaataataagagattatacaagagagtcaggagtaagaaaccttgagagagaaatatcaaaaattgccagaaaacttgttaaaaaaatagataataacgaaaaaataaataaccctttaaaagaagaagatatgaaagatttattaggagtacagaaatttaattatggtgagatcgaagaagaaaatagaataggtgtagttacaggacttgcttggacagaagttggaggggaaattttaaaaatagagtctgcagttatgccaggtaaaggcaaaatgcaaataacaggaaaattaggtgacgttatgcaagaatctgttaaagcagctaaatcttatattagatctaaaagtttagaatatgggattatacccccaattttcgataaaaaagattttcatatacatgttcctgaaggagcaacacctaaagatggaccttcagctgggataggaatggtaacttcaataatttcagctattactgagataccagtagataagaaagtagcaatgactggcgagatcactttaagaggagttattctccctattggaggattaaaagaaaaattattggcagctcatagagcaggaattaaaaaagttttaatacctatggaaaataaaaaagatttaattgaagtaccaaaaactatattagatacaatggagataattccagtaaaaaatgtagatgaggttctaaaagttgctttaattaaaccccttaagagagtagaatgggttgaagtagatccaattgcaaaaaaagaaaaaactaaaaaagaagagctaagcacacactag

SEQ ID NO: 262810 - DNA, 859 bp, Unknown
  Bacterial polypeptide expressing nucleotide sequence isolated from the Sargasso Sea
gatcttggaatcgtcagatctaaagttaagagcagaaaaagttcttacatttatagaatctcaattagatgttgttgacgttgagaaaaaagttagggacagagttaaaaaacaaatggaaaagtcacagagggaatattatttaaatgaacaaataaaagcagctcaaaaagaacttggagaaataggtgaggaaggggatgaactagaaaaccttgagaagaaaatcaatgaagttggaatgactaaagaagcattaaagaaggcaaaaagtgaatttgcaaaatttaaacacatggctccatcttctgctgaggcgtctgttgttagaacttacttagattgtttggtagatgtaccatggaaaaagaagtctaaggtaaagtcagacattaaagcttctatgagtatccttgaggaagatcactatggacttgaggaagtaaaagagagaattgtcgagtaccttgctgttcaaaaaagagtaaagtcaatgaaagctccagttttatgtctcgttggtcctcctggagttggtaaaacttcactcggtgaatcaattgcacgagcaacaaatagaaagtttgtaagaatgtcacttggtggcgttagagacgaatcggagattagaggccatagaagaacatacattggttcaatgcctggaaaaataatccaaaaattatcaaaagttagtgtaaaaaatcctctttttcttttagatgaaattgataagattggaatggatcatagaggagatccagcttcagctcttttagaagttcttgatcctgagcaaaataatactttcagcgatcactatttagaagttgattatgatttatcagaagtgatgttt

SEQ ID NO: 262811 - DNA, 926 bp, Unknown
  Bacterial polypeptide expressing nucleotide sequence isolated from the Sargasso Sea
accttggtcagaaaaaacaaaaataaatactgacttgaattcagcacaaaaaattcttgacgaggatcattacggcttagaaaaagttaaagagagaataattgaatttttggctgttcaaaaaagaattcaaaaaatgaaaggaccaattctatgtctagttggccctcctggagttggtaaaacttccttaggaaaatcaattgcaaaagcaacaaatagaaaattcataagaatttcattagggggaataagagatgaagcagaaataagaggtcatagaagaacctatataggttctttgcccggtaaaataattcagatgatgaaaaaagctggaagtagaaatcctttgttcttattagatgaaattgataaagttggaaatgattacagaggagatccctcttcagctttattggaagcattagaccctgaacaaaacaaagaatttaacgatcattatttagaagttgattatgatctctcagatgtgatgtttgtgactacggcaaatactcttaatattcttcctccacttttagatagaatggaagtaattaggatttcaggttatacggaggatgagaaggtaaacatatctcaaaaatatttaattccaaaacaaagtacgaataacggtcttaaaaaagatgaatgggaactaagtgaagaaataaatagaaaaataataagaaactacactagggagtctggagtaagaaacttagaaagagagatagctaaaattgctaggaaattagtcaaaaaaatagatgctaaagaaaaagtaaatacatcgttaaatgagaaagacttaagtaattttttaggtgttcaaaaatttaaatatggtgagatagaggaagaaaatagaattggagtcgtaacaggattagcttggacagaggttggaggtgaaattt

SEQ ID NO: 262812 - DNA, 871 bp, Unknown
  Bacterial polypeptide expressing nucleotide sequence isolated from the Sargasso Sea
aaaaactcagaggtagatgatcctggtgagaaagatatatattcgtacggctgtttaagcaaagttttacaattactcaaattaccagacggtacagtaaaagttttagtcgagggtctagcaagagttaaaatactagagatagaagatgacgttaaaaaatatcttagttgtaaaactcaaattatagaggcagataaagagaacgaggaacataaagtttttgcgtcaaacctaataaaaaagtttgaaaaactatctagtttaaacaaaaaagatgtttctgatttcacaaaaggattaaaatctttaaaaaacgctaatcaactcgcagacaatatttgttcaaatttaaatattcaaatatttgaaaaacaggctcttcttgaaatgaatgatctgaaaaagagactggaaaaaatatatgaattaattgagaaagagacaagtgtgattagtatggaaaaaaggattagaggtagagtcaaaaaccaaatggagaaaactcagagagaatactatttaaatgagcaactaaaagctattcaaaaagaacttggcgaaatcgaagatggcaaagatgaaatatcaaatttaaccaaggctatagctaaagctaaaatgcctaaagaagcacaaaacaaatgtatggctgaacttaaaaaattaaaaggtatgagtccgatgtctgctgaggcaaccgtggtaagaaactatcttgactggatgattgatttaccatggggtaataaaagcaaaattatttctgatttaaattcagctcaaaaagttttagaccaagatcactatggattagctaaagtgaaagagagaattatcgagtatttagctgtacaaaaaagaatagaaa

SEQ ID NO: 262813 - DNA, 789 bp, Unknown
  Bacterial polypeptide expressing nucleotide sequence isolated from the Sargasso Sea
acagtaaaagttttagttgaaggtacaaaaagagtaaaaatcttagactttaaggataatgaaaaatttattacttgtgattacacacactaccatgatgttttaacaaaagatgaagatttattcccattagctgctacggccttgagaagattagaaaaacttacctcaattaataaaaaaatctcaagcgaaacaattaatacaataaagcaattaaaagacccctctcaaatagctgacaatattgcatctcatataactgctactatttcagaaaaacaacaaatatttgaaactgttgacgtgaagaaaaggctaaacgctattattaaaataatggaaaatgagacaagtattattggtgtagaaaaaaggataagaggaagagttaaaactcaaatggaaaaaactcaaagggaatattatcttaatgagcagttaaaagctattcaaaaagaacttggcgaaattgaagacggtaaagatgaaacaacaagtctcaataaagcgataacaaaagcaaagatgccaaaagaagttgaaaaaaaatgccttcaagaattaaaaaaattaaaaaatatgagccctatgtctgctgaagcgacagttgtaagaaattatttagactggatgactgaacttccttggcataaaaaaagtgaggttgatataaatttaaccaaggctttaaatattcttgataaagatcactttggattggaaaaagttaaagagagaataattaaatttctagctgttcaaaagagaatgaaaaaattaaagggc

SEQ ID NO: 262814 - DNA, 855 bp, Unknown
  Bacterial polypeptide expressing nucleotide sequence isolated from the Sargasso Sea
ttacgtgatgaagcagagatccgtggacaccgaaaaacctacattggagccatgccgggaagagtgctgcaaaatttgatcaaagccaaaacgtcaaacccagtttttgtcttggacgaaatagataaggtgagcaatgattttcatggagatccatcttctgcattgttggaagtattggaccccgagcaaaacaatgccttcaacgacaactttgtggaattggactatgatctttccaatgtattgtttttggcgaccgccaattccttggccactatacaaccagcattgagggaccgcatggaaatcattgagatcaatgggtataccttggaggaaaaagtacagattgcgaatcgtcacttgattccaaaactgatcaaagacaacgggctcaagtccgatcaaatcaagatttctccagcagtgattgaaaagatttgcgatgagtacaccagagaatctggggtgcgtaatttggagaaacgcttggcaaaggtggtgcgttttgccgccaaatccattgccatggaagaggagtatgatccaaaaatttctgtggaaaaaacagtggaaattctagggcccggacattccaaagacaagtaccaaggcaatgatgtggctggagtggtgactggcttggcctggacacaagtaggaggagacatcctctacgtggaagtgagcttaagcaaaggcaaaggaaaatttaccttgactggcaacttgggcgatgtgatgaaagaatcggccaccattgctttggaatacatcaaggcacatgccacggaattcggcataaaagaggatgtatttgaaaattggaatgtgcacattcacgtgccagaa

SEQ ID NO: 262815 - DNA, 839 bp, Unknown
  Bacterial polypeptide expressing nucleotide sequence isolated from the Sargasso Sea
ctactatctgaacgaacagatgaaagccatccagaaagagctcggtgaaagtgacgagacccccaatgaactcgaagagattgtagagaagctcgagtcgtccggtatgtcaaaggaggcacgtgagaagacagaggcagagatccgaaaactgaagatgatggcaccgatgtcggcggaagcgaccgttgttaggagctatattgactggatgcttggcgtcccctggaaaaagcgctcccgggcgcgcaacagcatcagcgatgcagaagatgtactaaataccgatcattatgggcttgaagaggtgaaggaaagaatccttgagtatctagcggtccagcggcggatcaagaagatcaagggacccgtcttatgccttgtcggtcctcctggtgttggtaaaacctcactgggtgaatcgattgcaagagccactaatcgtaaatttgtgcgtatggcgctcgggggggttcgtgatgaggcagaaattagaggacatcgacgaacctatatcgggtcaatgccgggtaaggtcattcaaaaaatcagtaaagcaggggtcaagaatcccctgtttatgctcgatgagattgacaagatggggcaggactatcgcggcgatccagcgtctgcacttttggaggtcttggacccggagcagaacaatacctttaacgatcattatatggaggtggactacgatttgtcggacgtcatgttcatctgcacctcgaattctatgaacattcccccagctctcctagaccggatggagatcattcgcattcccggatacaccgaacacgaaaagctgaacattgctcgacgttacctgc

SEQ ID NO: 262816 - DNA, 844 bp, Unknown
  Bacterial polypeptide expressing nucleotide sequence isolated from the Sargasso Sea
gatggaagtaattagattagctggctatacagaagatgaaaaaattaatattgctaataagtatcttctacctaaacaaataaaagataatggtgttaaagaaaatgaaatgaaaataggtaatgaaataataaaagaaataattagaagttatacgaaagaatctggagtaagaaatcttgagagagaaatttcaaaagttgccagaaaagttgttaaaaaagtggtttctggtgaagagaaagaagtcaatattgaaaataaaaatttacccgattttcttggaattccaaagtataaatttggagaactagaaactgaaaatagagttggaattgtaactggcctagcttggactgaatatggtggagaaattttaaaagtagaaactgtaacaatgccaggaaaaggtagaatgcaaattacaggtaagttaggtgatgttatgcaagagtctgtaaaagccgcaaaatcatttgtgagatcaaaatgtttagaatatggaattattccgccattgtttgaaaaaaaagattttcatattcatgtaccggaaggagcaactccaaaagatggaccatcagctggtatagcaatggttacatctatagtctcttcaatcaccactattcctgttagaaaagatgttgctatgactggtgaagttactttaacaggtcaagtattacctataggcggtttaaaagaaaaattattagcggcccacagagctggaattaaagaagttttgattccaaaagaaaatgaaaaagacttagttgatatgccaaaaaaaatattagacgaattaaaaatcactcctgtagaatatgcagatgaagta

SEQ ID NO: 262817 - DNA, 457 bp, Unknown
  Bacterial polypeptide expressing nucleotide sequence isolated from the Sargasso Sea
atgaaggaatccgcagttattgcattagagtatattaaatctaattatcaagacctgggaatcaataaagaaattgattactcaaaatataatattcatattcacgttcctgagggagcaactcctaaagatggtccaagtgcaggtataacgatacttacatcccttgtctcattatttactcaaaaaagagtaaagaagaatatcgctatgactggcgagatcactctaagaggaaaggttcttcctgtaggaggaataaaagaaaagattttggctgctaaaagagcaaatattaaggaaattattttaagttcatataataaaaaggatattgaagaaatagatcaaaaatatctaaagggtttaaactttatttatgttgataatatgagtgatgtaatatctcactctcttacaaatagaaaggttttaaatccaaaaaatataaattaat

SEQ ID NO: 262818 - DNA, 724 bp, Unknown
  Bacterial polypeptide expressing nucleotide sequence isolated from the Sargasso Sea
taaaaaaagacttaatagcgtgatcaaaataatggaaaatgagacaagcattattggtgttgaaaagagaatacgaggaagagttaaaactcaaatggaaaaaactcaaagagaatattatttaaatgaacaattgaaggcaatacaaaaagaattaggtgaaatagaggatggaaaagacgaaacatcaaatctaaataaatcaattttaaaggcaaaaatgcctaaagaagttcaaaaaaaatgtatgtctgaactaaaaaaattaaaaaatatgagcccgatgtcagctgaagcaacagttgttagaaactatctagattggatgatagatataccttggtttaaaaaagacaaagtcgacattgatttaaataaagctttaaaacaattggatgaagatcattatggattagagaaagtgaaagagagaataattgaattcttagctgtacagaaaagaatggataaattaaaaggtccaatattgtgtctggtagggcctccaggtgttggaaaaacttctttaggaaaatctatagcaaaagcaaccaatagacaatttgttagaatgtcattaggtggtgttagagatgaagcagaaattcgtggtcacagaagaacttatattggttctttgcctggaaaaattattcaaatgatgaaaaaagcaggcacaaaaaatccactaatacttctagatgagattgataaagttgggtaa

SEQ ID NO: 262819 - DNA, 889 bp, Unknown
  Bacterial polypeptide expressing nucleotide sequence isolated from the Sargasso Sea
aagaaactgatttcatttaattgtaatgtagagactattgaggaaaataataaaaataaagactcagaaatttatgcgcaaaatctcataaaaaagtttgaaaagttagttggaataaataaaaaagattttactgattccgtagataacattagaaaattgaaagatcctagctctatagcagacaatatagcctctaacttaaatttacaaatttttgaaaaacaagagcttttagaattaagcgatttaagaagaaggttggaaaaaatttataattatattgataaagagactagcctaatatcagttgagagaaaaataagaggaagagtaaaaaatcaaatggaaaaaactcaaagagagtattatttaaatgaacaactaaaggctattcaaaaagagcttggagaaatcgatgaaggtaaagacgaaattactaatttatcaaaagctattgctaaagccaaaatgccaaaattagttcaagaaaaatgtttatctgaattaaaaaaacttaaatctatgagcccaatgtcagctgaggccacagttgttagaaattatttagattggatgactgaattaccttggagccacaaaagtaaaattaatacagatttgaaaaatgcacaaaaaattttagatgaagaccattatggtttagaaaaagttaaggagagaattatagaatttttagctgtgcaaaaaagaattcaaaagatgaaaggcccaatcttatgtttagtaggccctccaggagttggtaaaacttcattaggtcaatctattgcaaaagccactggtagaaagtttgttaggatttctctaggcggtataagagatgaagcagaaatccgtggtcatagaagaacatatataggttctt

SEQ ID NO: 262820 - DNA, 830 bp, Unknown
  Bacterial polypeptide expressing nucleotide sequence isolated from the Sargasso Sea
attgactcattaccaagttgagaaaaaaataaaaggaagagttaaaagacaaatggaaaaaactcagaaagaatattatttaaatgaacaaatgaaagcaatacaaaaagaattaggtgactcagatgatgttgatgatatttctgagctagaaaaaaaaatagaggatttaaagcttacagaagaagctaaagaaaaatgtaaatctgaattaaaaaaattaaaaactatgagccctatgtctgcagaggcaacagtaattagaaactatttagactgggttttatctattccttggaataatcccacttcaatttcaaaaaatattaaaaaagcaaaatctatactagaagaagatcactatggcctagataaagttaaggaaagaatattagagtatctagcagtgcaaaaaagaataaccaaattgaaaggtccaatactctgcttagtaggccctccaggagtgggtaaaacttctcttggtaaatctattgcttcagcaacaagtagaaattttgtaagaatgtcattaggcggtgttagagatgaagcagaaataagaggtcatagaaaaacatacattggctcgatgcctggtagatttattcagtctatgaaaaagtctaaatcatcaaatcctcttattctattagatgaaattgataaattaggatctgattggagaggagacccatcttcagctcttttggaggttcttgatcctgaacaaaatcataaatttaacgatcattatcttgaactagattatgatttatcagatgttatgtttgtatgtacagcaaatacattaaatattccacctgctc

SEQ ID NO: 262821 - DNA, 892 bp, Unknown
  Bacterial polypeptide expressing nucleotide sequence isolated from the Sargasso Sea
attagaggctctagatccagagcaaaatactacatttaatgatcattatttagaagttgattatgatctttcagatgtgatgtttgtaacaacagccaatacactaaatattttaccgccacttttagatagaatggaagtaataagattagctggttacacagaggatgagaaaataagtattgctaataagtatttattaccaaaacaaataaaagataatggtgttaaagaaaaagaaatgaagctggatgatgacattataaaagaagttattagaggatatacaaaagagtctggtgtaagaaatctagaaagagaaatttctaaacttgcaagaaaagttgttaaaaaaattgtggctggagaagaaaaagaagttggaataaataataaaaatttatctgattttttgggtgttcccaagtttaaatttggtgaattggaaactgagaatagagtaggtatagtaacaggacttgcttggactgagtacggtggagaaattttaaaaattgagaccgttacaatgccaggcaaaggtagaatgcaaattactggtaaacttggtgatgttatgcaagagtcagtcaaagcagccaaatcttttgtacgatcaaaatgtctagaatacggtataataccaccagtgtttgaaaaaaaagattttcatattcacgttcctgaaggtgcaacaccaaaagatggtccttctgctggtattggaatggttacttctatagtttcatctataacaaatatcccaattaaaagagatgtggcgatgactggagaggtaactctaactggtcaggtattaccaattggaggtttaaaagaaaaattattagctgctcacagagcaggaattaaagaagttttaattccctaa

SEQ ID NO: 262822 - DNA, 914 bp, Unknown
  Bacterial polypeptide expressing nucleotide sequence isolated from the Sargasso Sea
ttccgaagatggaaaaagtgaatttgatgaaattgaagaaaaaattaatgatggtaaattaactaaagaagccaaagaaaaagcattatcggagttaaaaaagttaaaaaatatgagccctatgagtgccgaggctactgtaagtcgttcatacatagattggttggtctcaattccgtggacaaaaactaacaaagttaaaactaatatagctaaagcaagagaaatattagataatgatcactacggcttagaaaaagttaaagatagaataatagaatttttagctgttcaaaagaggactaaagaaattaaaggtccaattttgtgtttagtgggtccacctggtgtcggtaaaacttccttaggaaagtcaattgcaaaagctacaggtagagaatatataagaatggctttaggcggagttagggatgaggctgagataagagggcacagaagaacttatattggttcacttccaggaaaaatagttcatggtatgaaaaaagcttctgcaataaatccactttttttattagatgaaattgacaaattagggaatgattatagaggcgatccttcttctgcacttctagaagtgttagatccagaacaaaataagtgttttcaagatcattatcttgaaatagattatgacttatcaaaagtattatttatcactacatctaatacactaaacatgcctcaagctttattagataggatggaaataattagactttctggttatacggaagatgaaaagctagaaatagcaaaaagacatttgataaaaaaacagatggataattgtaaactaaaagaatcagaattttctattaatgaagaagccattaaaataataattcaatcttacacaagagaggctggtgtaagaacccttgagagacaat

SEQ ID NO: 262823 - DNA, 817 bp, Unknown
  Bacterial polypeptide expressing nucleotide sequence isolated from the Sargasso Sea
gaattgactataaaagaagaagcaataaaagagattataagaaaatatacaagagaatctggcgttagaggtttagagagagaattatcgaaactttccagaaaaagtgtcaaagaaattgtttctaaaataaaattaaatatttctgtagatgataaaaatattgatcagtatctgggagtaaaaaaattcaaatacggcgaaatagaaaatgaggacaaagtaggagtagtcacaggtttagcttggacagaggtaggaggagagttgctatcaattgaatcattagtaatgcctggaaaaggtaaattagaacacaccggaaaattaggtgatgtcatgaaagagtctataaaggctgcaaaatcatttgtaagatctagatgtcttgattatggaattataccaccaacatttgaaaaaaaagatattcatattcatgttccggaaggggcaacaccaaaagatggcccttctgctggaatagcgatggtaacttcaattgtctcagcgctagcaggtgttccggtaaaaaaagacgtagcaatgactggcgaagttactttaagaggaagagttcttccaatcggtgggttgaaggaaaaactattagctgctttaagaggtggaattaaaaccgcaatcattccttcagaaaacgagaaagatctaaaagagttaccaaaaaatatcttagatggattaaaaattatacctgttaaagatgttgaagaggtactaaaaattgctttagtaaaagagctaaaccctatagagtggattgaagttgataagttgcaaagcaaaactgcctcag

SEQ ID NO: 262824 - DNA, 743 bp, Unknown
  Bacterial polypeptide expressing nucleotide sequence isolated from the Sargasso Sea
aatggagaaaattaaagggccaatattatgtttagtaggtccgccaggtgtaggtaaaacttctttaggtaaatcgatcgccaaggcaacaaatagagaatttcttagaatgtctgttggtggaatgagagatgaagcggaaataagaggtcatagaagaacttatattggttctttgccaggcaagatcattcaaatgatgaaaaaagctggaacaaaaaatccattaattttacttgatgagattgataaaattggaaatgattatagaggagatccatcttcagctttactagaggcattagatccagagcaaaacacaacatttaatgatcattacttagaagttgattacgatctttcagatgtgatgtttgttactactgctaacacattaaacatattacctcctttgcttgacagaatggaagtgattagacttgctgggtacaccgaagatgaaaaaatcagtattgctgacaaatatttactaccaaaacaaattaaagataatggtattaaggaaaaagaattaaaattagacgatgatataattaaagaagtaataagaggttacactaaagagtcaggagtaaggaacctggaaagagagatatcgaaaattgcaagaaaggttgtcaaaaaaattgttgctggagaggaaaaagaggtaagtgttaataacaaaaatttacaggattttcttggtgtagcaaagtttaattttggtgaacttgaagcaa

SEQ ID NO: 262825 - DNA, 911 bp, Unknown
  Bacterial polypeptide expressing nucleotide sequence isolated from the Sargasso Sea
atttgataaattaaataaaatttctaaaaaatttaatgaagaaaataatattaacttaaaaaatcttactgatccaaaaatcatatctaataaaattgcagcaaacctaaaaatagatttaaatgacaagcaaaagatattggaaatacttgatatacaaaaaaaattagagacaattttaagttttttagaaaacgaaattgatgttttatctgttgagaaaaaaattagaggaagagttaaaaatcaaatggaaaaaacacaaagagaatattatctcaacgaacaactaaaagctattcaaaaagaattaggagacattgaagacggtaaagacgaagttaagcaattagaagaggcaataaaaaaatgtaaaatgacgaaggaagctgaagaaaaaagtttatcagaacttaaaaaattaaaaacaatgagtccaatgtcagctgagtcaacagtagtcagaaattatttagattggatgaccggattaccatggcaaaagatgtcagaagttaacactgatattagaagagcggaagatatacttaataaagatcattatggacttgaaaaagtaaaagatagaattttagaatttttagcagttcaatctagaattaaaaagataaaaggtccaattttatgcttagttggccccccaggtgtgggaaaaacttctttaggaaaatcgatcgcaagatctactggtagagagtttgtaagaatgtcattagggggtgttagagacgaggcagaaattagaggtcatagaagaacatacataggtagtttgcccggaaaaattgttcaattaatgaaaaaagcaggaactaaaaatccattaattttattagatgaaatagataaaataggaatggattatagaggcgacccatcttcggcgttat

SEQ ID NO: 262826 - DNA, 907 bp, Unknown
  Bacterial polypeptide expressing nucleotide sequence isolated from the Sargasso Sea
atggatataaaagtgacattaccgttattgccattaagagacattgtagtttttccaagtatggtaattcctttatttgttgggagagacaagtccatcactgcattaaatgaagtaatgaaaggtgacaaaaaaattgttctagttacacaaaaaaattctgaagttgatgacccaaagaaaaacgatgtattcacttatggatgtgaaagtaatattttgcaattactaaaacttcctgatggaactgttaaagtattagttgaaggaactaaaagagtcaaaatagtagattttaaggatgacgaaaattttattaaatgttcatttgaatatcagaaagatataatatcaaaagatgatgatctgttaccattgagtttaacagctataaaaagattagaaaaacttaccagcgttaacaagaaaatttcttcagagacaattaacaatataaaacaattaaaagatccatctaagatagcagataatataatttcacatatcaatgctagtatctcagaaaaacaacaaatctttgaaactttagatgttaaaaaaagacttaatagtgttgttaaaattatggaaaatgaggccagcataattggtgttgagaaaagaataaggggaagagttaaaactcaaatggagaaaactcaaagagagtattatttaaatgaacagttaaaagctatacaaaaggaattgggtgaaattgaagatggtaaagacgaaacaacaagtttaaaaaaatcgattttaaaagccaagatgccaaaagaagtcgaaaagaaatgtatgtcagaattgaaaaaattaaaaaacatgagtcctatgtcagcagaggctactgttgttagaaactatctagattggatgatagatttgccttggttaaaaaaga

SEQ ID NO: 262827 - DNA, 649 bp, Unknown
  Bacterial polypeptide expressing nucleotide sequence isolated from the Sargasso Sea
aaaattttagatgaagatcattatggtttggaaaaagttaaggaaagaattattgaatttttagcagttcaaaaaagaattgaaaaattaaaagggccaatcttgtgtttagttggtcccccgggtgttggtaaaacatctttaggaaaatcaattgctagagcaacaggtcgaaaatttgttagaatttctttaggtggaattagagatgaagcagaaataagaggtcacagaagaacatatattggatctctgccaggaaaaattattcaaatgatgaaaaaagcaggaactaagaatccattattcttattagatgaagttgataaagttggaagtgattatagaggcgatccatcatcagcattattagaagcactagatccagaacaaaataaacaatttaatgatcactatcttgaagttgattatgatttatcagacgttatgtttgtgactactgcaaatacattaaatattttacctcctttattagatagaatggaaataattagaattccaggatacacagaaagtgaaaaaattaatatttctcaaaaatttttaattcctaaacaaagcaaagataacggtttaaaagacggagaatggaaaatttctgagaaagtaaacaaacaaattattagag

SEQ ID NO: 262828 - DNA, 1002 bp, Unknown
  Bacterial polypeptide expressing nucleotide sequence isolated from the Sargasso Sea
gaaataggtgaggaaggagatgaattagaaaccctgagaagaaagattaatgaagttggaatgactaggaaagcattaaagaaggcaaaaagtgagtttgcaaaatttaaacatatggctccatcttcagcagaggcttctgttgttagaacatacttagattgtttagttgatgtaccatggaagaagaagtctaaggttaagtcagacatcaaagcttctatgagcattctcgaggaagatcattacggacttgaagaagtaaaagagaggattgttgaataccttgctgttcaaaaaagagtaaaggcaatgaaagctccggttttatgtcttgttggccctcctggagttggtaaaacttcactaggtgaatcaattgctcgagcaacaaatagaaagtttgtaagaatgtcactaggtggagttagagatgaatctgaaattagaggccatagaagaacatacataggttcaatgcctggaaaaataatacaaaaattatcaaaagttggtgttaaaaatcctctttttcttctagatgaaattgataagattggaatggatcacagaggagatcctgcttctgctcttttagaggttcttgatcctgagcaaaataatactttcagcgaccactatttagaggttgattatgatttatcagaagtaatgtttgtttgtactgcaaatagcttaaatattccaacaccgcttctcgatagaatggagattattagaattcctggatatatcgaagatgaaaaaataaatattgcggaaaaatatttattacctaaacaaatgaaaagaaatggtctcaaagagactgagctaaaattaaataaaaatgtactattatccttaattagatattacacaagagaagcaggcgttagagggctggaaaggcaaattgctaagattttacggaaagtcgtaaaagaaagactcgtgaataattacgatgacaataaatcaacatctatatcgccaaaaaat

SEQ ID NO: 262829 - DNA, 880 bp, Unknown
  Bacterial polypeptide expressing nucleotide sequence isolated from the Sargasso Sea
ttggtttctttcctagaaaatcagttagaccttactcaaatggagaaaaaaattcgagacagggttaaaaagcaaatggaaaaaagtcagaaggactattaccttacggagcagatgaaggctttaaaaaaggaaatgggtgaagatgaagatcaagatgaaatagaaactattaccaaaaacatagaaaaatcaggcatgcctaaggatgctaaagataaagtaaatagtgaattaaacaaattcaagatgatgcctccaatgtcagcagaagcttctgttgttagagggtatatagattggatgacgagcattccttggaaaaagaaatctaaaatccaaacagagatcactaaagcatctgaagttttggattcagatcattatggtttagaggaagttaaagagagaatactagaatacttggcagttcaacaaagagtttccaaaattaaaggcccggttttatgtctggttggtcctcctggagttggaaaaacttctttaggtgaatctattgcaaaatcaaccggaagaaagttcgttaggatgtctctaggtggagtaagagatgaatcagagataagaggacatagaaggacttacattggttcaatgcctggaaagattcttcaaaaattgtctaaagtaggagttaaaaatcctctttttcttttagatgaaattgacaaaatgggaatggatttccgaggggatccagcagcagctttacttgaagttcttgatccggaacaaaaccatacttttaacgatcattacctcgaagttgactatgatttatcagatgtaatgtttgtttgtacggcaaactcaatggatattccgcctgcacttttagatagaatggagattataagat

SEQ ID NO: 262830 - DNA, 831 bp, Unknown
  Bacterial polypeptide expressing nucleotide sequence isolated from the Sargasso Sea
ttattagaagctttagatcctgagcagaacactacattcaatgatcattatttagaagttgattatgatttatctgatgtgatgtttgtaacaactgctaataccttaaatattttacctcctttattagatagaatggaagtaattagattagcaggttacactgaagatgagaaaataagtatcgcaaacaagtatttattaccaaaacaaattaaagataacggtgttaaagaaaaagaaatgaagctggatgacaacattataaaagaagttattagaggatacaccaaagagtcaggtgtaagaaatcttgaaagggaaatttctaaacttgcaagaaaggttgttaaaaaaattgtagctggtgaagaaaaagaagttggaataaataataaaaatttatctgattttttaggtgttcctaagtttaagtttggagaattagaagctgaaaatagagtaggtatagtaacagggcttgcttggactgagtatggtggagaaattttaaaaattgagaccgttacaatgccaggaaaaggaagaatgcaaatcactggtaaattaggtgatgttatgcaagagtcagttaaagctgcaaaatcttttgtaaggtcaaaatgtttggagtatggaattattccgcctatttttgaaaaaaaagattttcatattcatgttcctgaaggagcaacaccaaaagatggtccatctgctggtattggaatggtaacatctatcgtctcatcaattaccaatattcctgtaagaagagatgttgctatgactggtgaagtaactttaacaggacaagtattacccatcggt

SEQ ID NO: 262831 - DNA, 617 bp, Unknown
  Bacterial polypeptide expressing nucleotide sequence isolated from the Sargasso Sea
acatcactaggtaaatctattgctaaagctacaaacagagagtttgttagaatgtctgttggtgggatgagagatgaagcggaaataagaggtcacagaagaacatatattggatctttacctggtaaaataattcaaatgatgaaaaaagctggcacaaaaaatccattaattttactagatgaaatagataaaattggtaacgattatagaggagatccatcttcagctttattagaggctttagatccggaacaaaatacaacatttaatgatcattatttagaagttgattatgatttgtctgatgtgatgtttgtaacaacagctaatactttaaatatattacctcctttattagatagaatggaagtaattagattagcaggatatacagaagatgaaaaaataagtatcgctaataaatatttactacctaaacaaataaaagataatggagttaaagaaaaggaaatgaaactggatgacgatattataaaagagatcattagagcgtatacaaaagagtctggtgtaagaaatctagaaagagaaatttctaaacttgcaagaaaagttgttaaaaaaattgttgcaggtgaagaaaaagaagtagg

SEQ ID NO: 262832 - DNA, 610 bp, Unknown
  Bacterial polypeptide expressing nucleotide sequence isolated from the Sargasso Sea
aaaaaagttttttagagacaaatacgaaaataatactgtagcaggagtagtaacaggactagcatggacatctgttggtggtgaaatattatttattgaatcatcaatatctgaaggaaaaggaaatctctccataactggaaatctaggtaaaataatgaaagagtctgcaattattgcattggaatacataaagtcaaatcaaaatgaattaggaattgaaaaagaattggactactccaaatataatattcatattcacgtcccagagggagctactcccaaagacggaccaagtgctggtattacaattctaacttcactagtgtcattatttactcaaaaaagagttaaaaaaagtatagctatgaccggagagattactttaagaggtaaggttctacctgtgggtggcataaaagaaaagattcttgcagcaaaaagagcaaatattaaagaaattattttaagttcatataataaaaaagatattcaagagataaatcctaaatatcttaaaggacttaaatttatttatgttgattcaatgaaagatgttatttcaaatgctataataaatcgaaaagttattaaccctaagttaatttga

SEQ ID NO: 262833 - DNA, 857 bp, Unknown
  Bacterial polypeptide expressing nucleotide sequence isolated from the Sargasso Sea
agcagaggcaacggttgttagaaattattttgattggatgcttggaattccatggaaaaaaagaagtagagtaaaaactgatattgagttcgcagaaaaagtgctcgatgctgatcactatggacttgataaagtaaaagaaagaatacttgagtatttagctgttcaacatcgagttaagaaaatgaaaggcccaattttatgtttagttggtgcgccaggtgtgggcaaaacttcattaggacgatctattgcaagagcaacaggtagacaattcgtaaggatctccttaggaggtgtcagagatgaagccgaaattagaggtcatagaaggacttatattggttcaatgcctggaaaaattattcaatcaatgaaaaaggccaaattttctaaccctatttttatgttagacgaagtagataaacttggttctgactttcggggtgatcctgcttctgctttattagaggtattagatcctgaacaaaactcaacttttaatgaccattatttggaagttgactacgatttgtctgatgtaatgtttatagcaactgcaaatactctaaaaattccagctccattattagatagaatggaggtaattaggttatctggttatacagaagatgaaaaattagaaattgcaaaaaaacatttactttgcaagcaaatggattctcatggtcttaagagtaacgaatggtcaattacagatgatgctttaagaaacttaattaggttgtacacaagagaagcaggtgttcggggactcgaaagagagattgccaatttagcaaggaaatctactcgtcaattggttcaggaaaaaagaaaagacataaaagtaacaa

SEQ ID NO: 262834 - DNA, 885 bp, Unknown
  Bacterial polypeptide expressing nucleotide sequence isolated from the Sargasso Sea
attaaaagatccatctcaaattgcagataatatagcgtcccatatatcagcttcaatctctgaaaaacaacaaatttttgaaacaaacgatgttaagaaaagattaaatgccattatcaaaattatggaaaatgaaaccagtataattggagttgagaagagaattagaggaagagttaaaactcaaatggaaaaaactcaaagagagtactatttaaacgagcaattaaaagctattcaaaaagaacttggtgaaattgaagatggcaaagatgaaacatcaagtttaaataaagctattagcaaggctaaaatgccaaaagaggtagaaaaaaagtgtttacaagaattaaaaaaactaaaaaatatgagtccgatgtcagccgaggctacagtagtaagaaattatttagattggatgaccgaacttccatggcataaaaagagtgaagtagatatcgatttggcgaaagcacaaaacactttagataaggatcattttgggcttgagaaaattaaagagagaatagtagaatttcttgcagttcaaaaaagaatggaaaaaattaaaggtccaatcttgtgtttagtcgggccaccaggtgtggggaaaacttcattaggaaaatcaattgctaaagctactaacagagaatttgtaagaatgtccgttggaggcatgagagatgaagcggaaattagaggccacagaagaacttatattggttcactaccaggtaagattatccaaatgatgaaaaaagctggtactaaaaatcctctgattttattggatgaaattgataaaataggaaacgattatagaggagatccatcttctgctttattagaggctttggacccagaacaaaatacaacatttaa

SEQ ID NO: 262835 - DNA, 802 bp, Unknown
  Bacterial polypeptide expressing nucleotide sequence isolated from the Sargasso Sea
gtcttagtagaaggaataaaaagagttaaaattttagattttaaagataatgaaaaatttattacttgtgactatacttattttaacgatttcctctctaaggatgaagatctgtttccattagcagcaaccgctttaagaagactagaaaagttaacatccattaataaaaaaatttctaacgaaacaataaatacaattaagcaactaaaagacccatctcaaattgcagacaatatagcatcacatatagcggcttcgatttctgaaaaacaacaaatttttgaaaccaatgatgttaaaaaaaggttaaacgccataattaaaattatggaaaatgaaacaagtataattggtgttgagaaaagaattagaggaagagttaaaactcaaatggaaaaaactcaacgtgagtattatttaaatgaacaacttaaagcgattcaaaaagaacttggtgaaatcgaagatggtaaagacgaaactacaagcataaacaaagcaatcactaaagctaagatgccaaaagatgtagaaaaaaaatgtcttcaggaattaaaaaaattaaaaaacatgagtcctatgtcagctgaagctactgtagtaagaaattatttagattggatgacagaacttccatggtataaaaaaagtgaagttgatattgatttagcaaaagcacaaaatactttagacaaggaccattttggcttagaaaaaattaaagagagaatagttgagttccttgcagttcaaaaaagaatggaaaaaattaaaggaccaattttatgtttagttgggc

SEQ ID NO: 262836 - DNA, 931 bp, Unknown
  Bacterial polypeptide expressing nucleotide sequence isolated from the Sargasso Sea
aacctcagttaataaaaaaatttcatcagaaacgataaataatattaaacaattaaaagagccatctaaaattgtagacaatattgtttcaaatttaaatgcatcgatatctgaaaaacaacaaatatttgaaacattggatgtgaagaaaagattaaatgcagttattaaaatgatggaaagcgaaacaagcattattggggtagaaaaaagaattagaggaagagtaaaaactcaaatggagaagacacaaagagagtattacttaaatgaacaattaaaggctattcaaaaagaattaggtgaaattgaggatgggaaagatgaaacaacaaatctaaaaaaatcaattcaaaaagctaaaatgccaaaagaagttgaaaagaaatgtatgtcggagctcaagaaattaaaaaatatgagtcctatgtctgccgaggcaacagttgtaagaaattatttagattggatgatagaccttccgtggtttaaaaaaaatgatgtagatattgacttaaataaaggtttgaaaattttagatgaagatcattttggtttagaaaaagtaaaagagagaattatagaatttcttgcagttcaaaaaagaatggacaaaattaaaggaccaattttatgtttagtcggccctcctggagttggaaaaacgtccctgggaaaatctattgctaaagctacaaacagacagttcatcagaatgtcactagggggcgttcgagatgaggcagaaataagaggtcatagaagaacatacattgggtcgttaccaggaaaaattattcaaatgatgaagaaagcaggcacgaaaaatcctctatttttgttagacgaagttgataagattggaaacgattacagaggagatccatcttcagctttacttgaagcattagaccctgagcaaatacagcat

SEQ ID NO: 262837 - DNA, 817 bp, Unknown
  Bacterial polypeptide expressing nucleotide sequence isolated from the Sargasso Sea
cttaaatccgaaatggaagttttgaaaattgaaaaacgggttcatgggcgagttcgaaagcaaatggagcgtagccagaaagagttttatctgaatgagcaaatgaaagccattcagaaagaacttggtaaacgtgatgagtttaaaagcgactttgacgagttaaaacaaaaaattaaaaaagctaaaatgccgaaagaggttagcgataaagcaaaaaaagaattaaaaaggctagaactcatgcagcccatgtcggcagaagccaccgtagcgcgaacttatattgaatggcttacagatataccttgggaaaaagctgcaggcactgaaaaaattaaaattccagaggcacaaaaagtcctagatgcagatcattacggactggaaaaagtcaaagaacgtataacagaacatcttgccgttttaaaactggtaaaaaaaatcaaaggacccatcatttgtttagtagggcctcctggagttggtaaaacttccttaggcaaatctataggtaaagcgatgggtagaaaatttgttcgtatttctttaggtggaattcgtgatgaagccgaaatacgcgggcaccgtagaacctatattggtgccttacctggtaaaattattcaaggcatgaaaaaagccgaagtacataatcctgtctttatgctcgatgaagttgataagatgaacgccgatttccggggcgatccttcttcggccttattggaagttttggaccctgagcagaactctaatttcaatgaccattatcttgagattgattacgatctttcgaatgttttgtttatttgta

SEQ ID NO: 262838 - DNA, 780 bp, Unknown
  Bacterial polypeptide expressing nucleotide sequence isolated from the Sargasso Sea
aaattctgaagtagatgatccaaaaaaaacagatatatttatgtatggttgtgaaagttctatccttcaacttcttaaactaccagatggaactgttaaagttttagtagagggattaaaaagagtaaaaatagttgattttaaagatgatgaaaagtttattacgtgtacctacgagttgaataatgatgtcttgcctcaagatgaagatttaatgccgttagcgatgatagcaataagaagattagaaaaacttacatctataaataaaaaaatatcctctgaaacgatatcaaatattaaagatttaaaggatccagcaaaaatatcagacaatatagcttctcatttaaattgcactatttctgaaaaacaacaattatttgaaacaacggatgttaaaaaaagattaaacggcgttattaagattatggaaaatgaaactagtataataggagttgagaaaagaattagaggaagagttaaaactcagatggaaaaaacacaaagagaatactatttaaatgaacagttaaaagcgatccaaaaagaattaggcgaaatagaagatggcaaagatgaaacttcaaatttaaataaagcaattcaaaaagctaaaatgcctaaagaagtacagaaaaaatgtttgtctgaactaaaaaaattaaaaaatatgagtcctatgtctgcagaggccacagtagtaagaaattatcttgattggatgattgatattccttggtacaaaaaagacaaagttgatatagatttaaataaagc

SEQ ID NO: 262839 - DNA, 866 bp, Unknown
  Bacterial polypeptide expressing nucleotide sequence isolated from the Sargasso Sea
tcaaagagagtattatttaaatgaacagttaaaagctattcaaaaagaattaggtgaaattgaagatggcaaggatgagaccacaagcttaaaaaaatcaattttgaaggcaaagatgccaaaagaagttgagaaaaaatgcatgtccgaattaaaaaaattaaaaaatatgagtccaatgtctgctgaggcaactgttgtaagaaactatctagattggatgatagatttaccatggtttaaaaaagacaaagtggatatagatttgaacaaagctttaaaaattttagaggaagatcactttggattagaaaaagtcaaagaaagaataatagaattcttagcagtgcaaaaaagaatggataaaataaaaggccctattctatgtttagtaggtccaccaggtgtaggaaaaacctctttaggtaaatcaatagctaaggcaactaatagacaatttgtaagaatgtctctaggtggagtaagagatgaagcagaggtaagaggtcatagaagaacttatattggttcacttcctggaaaaattattcagatgatgaaaaaagcagggactaaaaatcctttatttttactagatgaaattgataaagttggaaacgattatagaggtgatccatcatcagctttattagaggctttggatccagaacaaaatacaacatttaacgatcattaccttgaagttgattatgatttatcggatgttatgtttgttactacagcaaacacattaaatattcttcccccacttttagatagaatggaagtcataagaattccaggatatacagaagatgagaagattaatattgctaacaaatatttacttcctaaacaaatcaaga

SEQ ID NO: 262840 - DNA, 400 bp, Unknown
  Bacterial polypeptide expressing nucleotide sequence isolated from the Sargasso Sea
atgttccgtggtataaaaaagataaacgttgatattaacttaaacaaagctttaaaaacacttgatgaagatcattttggattggaaaaagtaaaagaaagaatagttgagtttttagcagttcaaaagagaatggaaaaaattaaaggcccaattttatgtttagtgggaccaccaggtgttggaaaaacttctttaggaaaatctatagcaagatcaaccaatagacagtttgttagaatgtctcttggcggtgttagggatgaggctgaaatcagaggtcatagaagaacttatataggatcactaccaggtaaaattattcaaatgatgaaaaaagcaggaacaaaaaatcctttaattttactagatgaaatagataaagtgggaaatgattata

SEQ ID NO: 262841 - DNA, 943 bp, Unknown
  Bacterial polypeptide expressing nucleotide sequence isolated from the Sargasso Sea
caatcacctgagtacaatgtatcgcggacttatattgaatggttatctgatcttccttggagttcttcatcaaaagatcgtattgaccttaaagaagccaaaaagattctagatgaagatcactttggtttagataaagtaaaagaaaggattattgagtatcttgcagtaagaaacttaaaacaaaaaaagaaaccgaacggatctgtccgtggccctatactatgtttcggcggacctccaggcgtaggaaaaacatctcttggtcgttccatagcaagatctatgggaagagagtttgttaggttatctcttggtggtgtacgcgatgaggctgagattcgaggtcatcgccgtacgtacattggcgcattaccaggtaggattattcaaagtattaaaaaagcagggaaaaataatcctgtttttatgcttgatgagatagataaacttggatctgactttagaggagatccttcctctgcgctcctcgaggtattagacccagagcaaaatcattcatttagtgatcattatcttgaggttgacttcgatcttagcaatgttatgtttattgcaactgcaaactaccaagatgctatacctcctgctcttcgggaccgtatggaagtattagatttttctggatatattgaagatgaaaaagttcagattgctaaaaggcatatagtgcccaagcaggtagaagaaaacggacttacaaaaagtgatgtcgcttttgatgatggttcgctcaaagagttaattcgctcatataccagggaggcaggagtaagaaatttggagcgtgaaatagcaaatgttcttcgaaaggttgcccgaggggttgttgaaaataaggtgaaaaaaacaaaagtaacaaagactaaggtaagcgactatctaggtgctgctcggtttcattctgagttagctgaaagag

SEQ ID NO: 262842 - DNA, 763 bp, Unknown
  Bacterial polypeptide expressing nucleotide sequence isolated from the Sargasso Sea
ccttgagagagagatctcaaaaattgcaagaaaagttgtaaaaaaagttgtatcaggtgaggaaaaagaggtagtaattgaaagtaaaaatttacctaattttcttggagttccaaagtttaagtttggtgaattagaaagtgataaccgagtaggtgtagcaacaggcctagcatggactgaatatggtggtgaaattttgaaaattgagactgttacaatgtcaggtaaaggcagaatgcaaattacaggtaaattaggagatgtaatgcaagagtctgttaaagctgcaaaatcatttgttaaatctaaatgtttagagtatgggattataccccctgtgttcgaaaagaaagattttcacattcatgttccagaaggggcaacaccaaaagacggaccatcagccggaattggaatggtcacttcaatagtttcgtcgattacaaatatcccaattagaaaagatgtagcaatgacaggtgaagtaactttaactggccaggtattagctattggtggtttaaaagaaaagttattggctgcacatagagctggaataaaaaaagttttaattccaaaagaaaatgaaaaagatttggtagatattccaaaaaaaattaaagatgaaatagaaattatatctgttgagtatgctgatgaagttttgaaaattgcattaacgaaagaactaaaaaaaacagaatgggttgaggttgatatatctaaaaaagatgataaatctcaagctagtattcaataa

SEQ ID NO: 262843 - DNA, 451 bp, Unknown
  Bacterial polypeptide expressing nucleotide sequence isolated from the Sargasso Sea
tcaaaatctgtaagcttaggaataaatccaaaagacttgaaaagttacgacattcatatacacgtacctgagggagccacaccaaaagatggtccaagtgcaggtatagctatttttaattctttagtatcttccttaactaacaacaaaattagaagagatgttgcaatgaccggagaaattacacttagaggtcgagttcttcccattggggggttaaaagaaaaaatatatgctgccagcagagcaggtataaaaaaagttttaatacctcaagaaaattttagagaagtatctgaatttgataaagaagttattagaggtatcaaaataattcctgtttctgatgcatttgcaattcttgaacatactttgactaaatcggtaattccattaaatttaaccgaatctcaattaaaaaataatcaaaacactacgagcactcattaat

SEQ ID NO: 262844 - DNA, 932 bp, Unknown
  Bacterial polypeptide expressing nucleotide sequence isolated from the Sargasso Sea
aatggataagattaaaggccctattttgtgcttagtaggaccgcctggtgtcggaaaaacatctttaggaaagtcaattgctaaagcaacaaatagagaatttgtaagaatgtcagtaggtggaatgagagatgaagctgaaattagaggtcacagaagaacctatattggttctttacctggtaaaattattcaaatgatgaaaaaagctggaactaaaaatccactaatacttttagacgaaattgataaagttggaaatgattatagaggagatccttcttcagccttattagaggctttagacccagaacaaaatacgacttttaatgatcactatctagaagtcgattatgatttatctgatgtaatgtttgtaactacagctaatacactaaatattttacctccattattagatagaatggaagtaattagattagcaggctacacagaagatgaaaaaataaatattgcaaataaatatcttcttccaaaacaaataaaagataatggtgtaaaggaaaaagaaatgaatttgggtaatgatattataaaagaagtaatcagaagttatacaaaggagtctggagttagaaaccttgagagagaaatttctaaaattgcaagaaaagtagttaaaaaagttgtctctggagaggaaaaagaagtcaatataaacataaaaaatctaccagactttttaggagttcctaaatttaaatcaggtgagttagagtctgaaaatagagtgggtatagtaacaggattagcttggactgagtatggcggagagattttaaaaatagagaccgtaacaatgccaggtaaaggccgtatgcaaattactgggaagctaggtgacgtcatgccagagtcggttaaagctgcaaaatcattcgtaagaatcaaatgcttagaatatggaatta

SEQ ID NO: 262845 - DNA, 874 bp, Unknown
  Bacterial polypeptide expressing nucleotide sequence isolated from the Sargasso Sea
tattctctaagtaaggaagctaaagacaagtgtaagtctgaaattaaaaaattaaaatcaatgagtcctatgtctgcagaagcaacagtaattagaaactatcttgattgggtattatcaattccttggaaccaacctaatcaaatttcaaaaaatattaaaaaagcatctgatattcttgaaaatgatcactacggtttgattaaagtaaaagagagaatacttgaatatttagctgtacaaaaaagaatggataaaattaaaggtccaatattatgtttggtaggtccaccaggagtcggaaaaacatctttaggtaaatctatagctaatgccactggaagaagttttgttagaatgtccttagggggagtaagagatgaagctgaaattagaggtcatagaaaaacatatattggatcaatgcccgggcgctttattcaatcaatgaaaaaatctaaaacttccaacccattaatcttacttgatgaaattgataaacttggctctgattggagaggagatccttcttccgcattgttagaagttttagacccagaacaaaacggcaaatttaacgaccattatttagaactagattatgatctttctgatgttatgttcgtctgtactgcaaacacactgaatataccgccagcacttttagatagaatggaaattattagaattcctggatatacagataaagaaaaaaaccaaattgctcagaaatatcttgtacctaaacaattaacaaatcacggtcttaaaaaaactgagttgagatttaattctaaaatcttaaatcaaattattagaaattttacaagagaagctggagtaaggaatctcgaaaaagaaatatcaaaagttt

SEQ ID NO: 262846 - DNA, 840 bp, Unknown
  Bacterial polypeptide expressing nucleotide sequence isolated from the Sargasso Sea
tatttaaatgagcaacttaaagctattcaaaaagaacttggtgagattgaagatggaaaagatgaaagtacaaatttaaaaaaatcaattcttaaggccaaaatgcccaaagaagttgagaagaaatgcctgtctgaacttaaaaagttaaaaaatatgagcccaatgtcagctgaagctacagttgttagaaactatcttgattggatgattgatcttccttggttcaaaaaagataaagtggatatagatttaagtaatgcaattaagaccttagatgaggatcattttggtttagaaaaagtaaaagagagaattgtagaatttttagcagtccaaaaaagaatggaaaaaataaaaggcccaatactttgtttaataggtccaccaggtgttggaaaaacatctctaggaaaatctatagctaaagctacaaaccgacaatttgttagaatgtctttaggaggcgtaagggatgaagctgaaatacgtggtcatagaagaacttatataggttctcttccaggtaaaattattcaaatgatgaaaaaggctggaacaaagaatcctctaatacttcttgatgaaatagataaagttgggaatgattatagaggcgatccatcctctgcattgttagaagcgttagaccctgaacaaaatacttcttttaacgatcactatcttgaagttgattatgatttgtctgatgtaatgtttgtaacaacagcaaataccctaaatattcttccaccacttttagatagaatggaagttattagaattcctggatacacagaagatgaaaaaataaatattgctaacaaatatctgctacct

SEQ ID NO: 262847 - DNA, 907 bp, Unknown
  Bacterial polypeptide expressing nucleotide sequence isolated from the Sargasso Sea
tacaactgctaatacattaagaatgccccctgcacttttagacagaatggaaatcattagaattgcaggctacacagaagatgaaaaagtagaaattgtaaaacaacatttagcaccacagatgttagaaaagcatggcttaaagagtggtgagcttatactggatgatagtgcgataactggattaataagatattatactagggaagcaggtgtaaggagtttagaaagagaacttgctaacctcgctcgtaaaacagttaaaaaaattgtagcaggtgacattggatcactaacaataaacgaagataacctgcatgagtttgcaggtgttagaaaatttaaatttggcgaaattgataatgacgaccaggttgggatagttacaggacttgcttggacagaagttggtggggatatattgccaatagagtcggtgataatgcctggaaaaggccgcatgactattactggaaaattaggtgatgtaatgaaagaatctattcaagccgcaaaatcctatgttcgctcaagatgtattgagtttggaataaaaccaactattttcccgatacgtgatattcatattcatgtaccagaaggtgcaattccaaaagatggtccatccgctggcctgggtatggttacatccatagtttcagtgttgacaggtatacccgttagaaaagatattgcaatgacaggtgaagtgacacttcgtggaaaggcacttgggattggtggtttaaaagaaaaactattagctgctctcagagctggaaccaaaactgttataattccaaaggaaaatgaaaaagacatggctgatataccagataatgtaaaagatggactggaactaatatttgttgataatgttgatgaggtcttaaaaatagctttgata

SEQ ID NO: 262848 - DNA, 814 bp, Unknown
  Bacterial polypeptide expressing nucleotide sequence isolated from the Sargasso Sea
gatggaactgtaaaagtcttagtagaaggtattaagagagtaaaaattgttgatttcaaagatgaacaagaatttataagctgttcatttgaattcaacaatgatgttttgtcctctcaagacgacttacttgcattaggattgaccgcaataagaagattagaaaagttaacttccgtgaataagaaattatcatcagaaactataacaaatattaaaaatttaaaagatgcttcaaaaattgctgataatatagcttctcatttaaattgcacaatttctgagaaacaacaattatttgagactttagacgttaaaaaaagactcaatagtgtgattaaaataatggaaaacgagacaagcattattggtgtagaaaagagaataagaggtagagttaaaactcaaatggaaaaaactcaaagagaatattatttaaatgaacaattgaaggcaatacaaaaagaattaggcgaaatagaagatggaaaagacgaaacatcaaatttaaataagtcaattttgaaggcaaagatgcctaaagaagttcaaaaaaaatgtatgtctgaactaaaaaaattaaaaaatatgagcccaatgtcggcagaagcaacagttgttagaaactatctagactggatgatagacataccttggtctaaaaaagacaaagtcgacattgatttaaataaagctttacaacaattggacgaagatcattatggattagagaaagtcaaagagagaatagttgaatttttagccgtacagaaaagaatggataaactaaaaggaccaatcttgtgccttgtag

SEQ ID NO: 262849 - DNA, 825 bp, Unknown
  Bacterial polypeptide expressing nucleotide sequence isolated from the Sargasso Sea
attttagatcaagatcattatggcctggaaaaagttaaagaaagaattctagaatatttggctgttcaaaaaagagtaggaaaaataaagggtgctattttatgtctggttggacctcctggcgtcggaaaaacttctttgggaaaatctatagctagagcgacgggaagaaagtttgtccgtgtgtcactaggtggtataagggatgaagcagaaataagaggtcacagaagaacttacataggttcattgcctggaaaaataattcaacagatgaaaaaagctggtgccaaaaatcctcttttcttattagatgaaattgacaaagtgggatctgattatagaggcgacccatcatctgcgttgcttgaagctttggatcctgaacaaaatgttacctttaacgatcattatctggaagtagattatgatctttcagatgtgatgtttgtaacaacagcaaatacattaaacattttgcctccactactggataggctcgaagtaatacgaataccaggttataccgaagatgaaaaagttaatattgctaacaattacctgatacctaaacaggttaaagataacggacttaaagataatgaactgacattaaataatgatgttcttaaagatgttattagaagttatacaaaagaggctggagttagaaatttggagagggaaatttctaaattggccagaaaaacagtaaaaagaattttaactaaagaacaaaatggtcaaaaaattagtccagaaaatttgcataactatttaggtgtgaaaaagtttaaatacggagaaatagaaagtgaaaatagg

SEQ ID NO: 262850 - DNA, 451 bp, Unknown
  Bacterial polypeptide expressing nucleotide sequence isolated from the Sargasso Sea
atgaaggaatctgcaactatatcattagaatacataaaatctaatgcaaaattattgaacattaaagaaagtatatttgatgattataactttcatttacacgttcctgaaggagccacacctaaagatggtccgagcgctggtgtaacaatgattacatctttagtttcacttttatcccaaagaaaagtgaaaagtaaattagcaatgacaggcgaaataaccttgagaggtaaagttttacctgtaggcggaataaaggaaaaaatattagcagccaaaagagcaaaaataaattcaataatattacctgctgataataaaaaaaatgttgatgaaattgataaaaagtatctcaaaggtttaaattttttctatgttgaaaatattttagaggttttagaatatgcattgctaagaaaaaaagtttctaattttaaaaaattataat

SEQ ID NO: 262851 - DNA, 989 bp, Unknown
  Bacterial polypeptide expressing nucleotide sequence isolated from the Sargasso Sea
attgagtttttagctgtacaaaaaagaattcaaaaaatgaaaggtccgattttatgtttggttggaccaccaggcgtcggtaaaacttctttaggaaaatcaatagctaaagcaactaatagaaaatttattagaatatctttgggcggaataagagatgaagctgaaataagaggtcatagaagaacttatatcggatcattaccgggtaaaataattcaaatgatgaaaaaagcaggttctaaaaaccctttattcttattagatgaaatagataaagttggaaatgattatagaggagatccttcctcagcgttacttgaagctcttgatcctgagcaaaacaaggaatttaatgatcattatttagaggttgattatgatttatctgatgtaatgttcgtcacaactgctaatactttaaatatcctaccacctttacttgatagaatggaggttataagactttcaggttatacagaggatgaaaaagttaatatttcacaaaaatttttgatacctaaccaaagtaaaaacaatggtttaaaaaaagaagaatggaatatcgatgaaagcataaatagaaaaatcataagacactatacaagagagtcaggcgttagaaatttagaaagagaaatctctaaaattgcaagaaaactagtaaaaaaaattgatagcaaagaaaaaataaacaatcctattacagacaatgatctcaaagatcttttaggagttcaaaagtttaattacggagaaatagaagaagaaaatagaataggagttgtcacaggactagcatggaccgaagttggaggagaaatattgaaaatagagtcggttatgatgccaggaaagggaaaaatgcaaattacaggtaaacttggcgatgtcatgcaagagtcagtgaaggcggcaaaatcttacattagatctaaaagcttagattttggtatcataccccctttgtttgataaaaagattttcat

SEQ ID NO: 262852 - DNA, 941 bp, Unknown
  Bacterial polypeptide expressing nucleotide sequence isolated from the Sargasso Sea
aaatgtcgagaaacgcgctgaaaaagccatcagtttgattgctcgtgaaattcaaagaataaagcttggagatgaaattcagtcagaagtgcatgatgaaattaccaaaactcaaagggaatattatttaagagagcaaatgaaggctattaaaaaggagcttggagaggatgagggttcggttgatcacaaagaactagaggaaaaattagaggccgcaaaattgccaaaagaagctaaagttgtggcgatgaaagaactaggtagattatctagaattcctactcaatcgcctgaatataatgtttcaagaacatatattgaatggttatcagatctaccttggagcaaatcctcaaaagatagaatagatctaaaaaaagcactcaatatccttgatgaagatcattacggacttgacaaggtaaagcaaagaataatcgaatatcttgcagtacgaaacttaaaacaaaaaaaagacccaaatggcactgtcagaggtcccattttatgttttggaggcccccctggtgtagggaaaacatccttgggtaaatcaatagctcgtgcaatggggagagaatttgtaagattatcgctaggtggagttcgtgatgaggctgaaattagagggcataggagaacttatattggagctttgccaggaagggtaatacaaagtatcaagaaagcaggtaaaaataatccaatttttatgcttgatgaaattgataagttagggtctgattttcgcggtgacccctcctctgcattgttagaggtactggatcctgagcaaaatcattcatttagtgatcattatcttgaagttgattttgacttgagtaaagtcatgtttattgcaacagcaaattatcaggatgctataccacctgctctgctagatagaatggagataatcgacttttcaggatatattg

SEQ ID NO: 262853 - DNA, 847 bp, Unknown
  Bacterial polypeptide expressing nucleotide sequence isolated from the Sargasso Sea
tattctacctccgttattagatagaatggaagttattagaattcctggatacaccgaggatgaaaaaattaatatcgcaaataaatttcttttgccaaaacaaattaaagataatggcgtaaaagaacaggaaatgagcttagttgatggaactattaaggaaattataagaagttacacaagagagtcaggagttagaaatcttgagagagagatttctaaaataacaagaaaagttgttaaaaaggttgtcaataaagaagaaaaaaatgttgaaataaacagtcaaaatatatcagaatttttaggagtgaaaaaatttaaatttggaatgctagaagaaaaagacaagacaggtatagttattggtttagcatggactgaatttggaggtgaaattttaaaaattgaaacagtcattatgccaggcaaaggaagaatgcaaattactggtaaacttggagatgttatgcaagaatctgtaaaagctgcgaaatcctatgtaagatcaaaaagtctagagtttggaattattccaccaatttttgaaaaaaaagattttcatatacatgtaccagaaggtgctactccaaaagatggtccttcggcaggtatagcaatggttacatccattgtctcttcaattacacaaatacctgtaaataaggaaatagccatgacaggagaagtaactgttacaggtcaagttttaccaattggaggattaaaagaaaaattactagccgcacatagagcaggagttaaaaaagttttgataccaaaagataatgaaaaagatctcgcagatgtaccaaaaaaagtaaaagaagatattaaaattattcct

SEQ ID NO: 262854 - DNA, 952 bp, Unknown
  Bacterial polypeptide expressing nucleotide sequence isolated from the Sargasso Sea
atattatgttttggggggcctcctggtgtaggaaaaacctccctagggaaatcaattgctagggcaatggggagagaatttataagattatcccttggtggtgtaagggacgaagcagaaatcagaggacatagaagaacttatattggtgctctaccaggaagaattatacaaaacataaaaaaagccggtactaacaatccagtttttatgcttgatgaggttgacaaattaggttctgattttaggggcgatccttcatcggctttacttgaagtattagatccagaacaaaatcattcttttaatgatcattatttggagcttgattttgatttaagtaaagtgatgttcattgctacagctaataattatgcaaatatcccgcctgctttgcgtgatcgtatggagattctagagttttcaggctatattcaagatgaaaaggttcaaattgcaaaaagacatcttattcctaaacaaatcaaagaaaatggattgaataaaactgaagtcactctagatcttaattcaataaaagagttaattagtgcatatactcgagaagctggtgttcgtcagttagagagacagattgctaatgtgctacggaaagttgcaagagatattgttgaatcaaagaaaaaacagattaaggtaacaaaaacaaaagttcatgaattattaggtgcttctagatttcactctgagctagctgaaagagctactgaaccaggtgttgtaactgggttagcatggacagctgctggaggtgatatattatttatagagtcaacgaagatgcatggaaaaggtaagcttacattaactggtcaattaggtgatgtgatgaaagaatcggccactgcaggcttaacttttgttagagcccatgctaacacttttggtattggtttaaattttattgaggaaacagatatccccatgttca

SEQ ID NO: 262855 - DNA, 593 bp, Unknown
  Bacterial polypeptide expressing nucleotide sequence isolated from the Sargasso Sea
cgaagttggtggcgaaattttaaaaatagagtcagctgtaatgccaggtaaaggaaaaatgcaaataactggtaaacttggagaagtaatgcaagagtctgttaaagctgcaaaatcttatattagatccaaaagtttagaattcggaataataccaccaatttttgataaaaaagattttcatatacatgttcctgaaggggctacaccaaaagatggaccatcagctggaatagcgatggtcacttcaatagtttccgcgattacagagatacctgtagataaaaacgtagcaatgactggagaagttactttgagaggtttggtcttaccaataggtggcttaaaagaaaaacttttagctgcccacagagcagggatcaaaaaggttttaataccaatagaaaataaaaaagatcttattgaagtaccagagtcaatcaaaaaaaatatggaaatcattgctgtaaaaaatgtcgatgaagttttgaagattgcccttactaaaaatcttaaaagagtagaatgggtagaagttgaacaattgccaaaaagcaaaaataaagaagagtcaaaagcacctattaactaag

SEQ ID NO: 262856 - DNA, 844 bp, Unknown
  Bacterial polypeptide expressing nucleotide sequence isolated from the Sargasso Sea
tatagaggtgatccatcatcagctttattagaggctttggatcctgagcagaacacgacatttaatgatcattacctagaagttgattatgatttatcagatgttatgtttgtaacaactgctaatactctaaatattcttcccccacttttagatagaatggaagtgataagaattccagggtatacagaagacgagaagattaatattgctaataaatatttacttcccaaacaaatcaaagataacggtgttaaagaaggtgaaatgaagttggctgacgacacaattaaagagattataagaagttatacaagagagagtggtgttagaaatttagagagagaaatatctaaagtaacaagaaaagttgttaaaaaagttgtaaataatgaggaaaagagtgtagaggttaatgaaaaaaatataccagactttcttggcattaagaaattcaaatttggagaactagaagcgaaagataaagtgggaatagttataggtttagcttggacagagtttgggggagagatattaaaagttgaaacagttaatatgccaggcaaaggtagaatgcagataactggtaagttaggagatgtgatgcaagagtcagtaaaagctgcaaaatcttatgtcagatcaaaatgtttagaatttggagtaacaccgccactatttgagaaaaaagattttcatatacacgtacctgagggtgcaacaccaaaagatggtccttcagcaggtatagccatggttacatcaatagtatcgtcaattacaaaagttccagttaaaagagaaatagcgatgacaggtgaagtaacaatcacaggtcaagttt

SEQ ID NO: 262857 - DNA, 949 bp, Unknown
  Bacterial polypeptide expressing nucleotide sequence isolated from the Sargasso Sea
aagaatgtctcttggtggtgtaagggatgaagctgagatcagagggcataggagaacctacattggagccatgccaggaaagatcatgcagaatctaaataaagtaggcgttagaaacccactttttcttcttgatgagatcgataaaatgtcgatggattttagaggagacccatcttctgcactcttagaagttctagacccagagcaaaatacaacattcaatgatcactatatggaagttgattttgatctctctgatgtaatgttcatttgtacagccaacactcttaatatacccccacctttattggatagaatggaagtcattcgcatagagggctatacagaagatgaaaaaatgaatatcgctgagaagtacttagtgaataagcaaacagaagctaatggcctcaaagattctgagattaaaatcacaaatagcgcaattctctcaattattcgtcactatacgcgagaggcaggggtcagaaacttggatcgtgaaatcgctaaaatttctaggaaagtagtgaaatcattggtgatgaagtctaaagatgaaacagttcatgttagaccgggaagccttgaaaaataccttggtgttcaaaaattcaaatatggcattgctgagaaagataatcaaatcggtcaagtgactggtttggcttggactcaggtgggcggagaattactaacaattgaatcaacagcgattcctggtaaaggtaagttaattaatacaggacagcttggtgatgttatgaaagagtcaattcaagcagctacaactgttgtcagaagtcgttccaaagcactaggtataaaagaggattttcatcagaaaatggatatgcatattcacgtcccagagggcgccacgcctaaggatgggcctagtgcaggtattggaatgtgcactgctctgatttcgtctttgaccgat

SEQ ID NO: 262858 - DNA, 794 bp, Unknown
  Bacterial polypeptide expressing nucleotide sequence isolated from the Sargasso Sea
aaacgccataattaaaattatggaaaatgaaactagtataattggtgttgagaaaagaattagaggaagagttaaaactcaaatggaaaaaactcaacgtgagtattatttaaatgagcaactgaaagcaattcaaaaagaacttggtgaaattgaagatgggaaagacgaaactacaagcataaacaaagcaatcactaaagctaagatgccaaaagatgtagaaaaaaaatgtcttcaggaattaaaaaaattaaaaaacatgagtcctatgtcagctgaagctactgtagtaagaaattatttagattggatgacagaacttccatggtataaaaaaagtgaagttgatattgatttagcaaaagcacaaaatactttagacaaggaccattttggcttagaaaaaattaaagagagaatagttgagtttcttgcagtccaaaaaagaatggaaaaaattaaaggaccaattttatgtttagttgggccaccaggtgttggtaaaacttcattaggaaagtcaattgctaaagcaactaatcgagaattcgtgagaatgtcagttggaggcatgagagatgaagcagaaatcagaggtcatagaagaacttatataggctcactacctggcaaaattattcagatgatgaaaaaagccggaacaaaaaacccattaattttattagatgaaatcgataaaattggtaatgattatagaggagatccttcttctgctttgttggaggctttagatcctgaacaaaatacaacttttaatgaccattattaga

SEQ ID NO: 262859 - DNA, 931 bp, Unknown
  Bacterial polypeptide expressing nucleotide sequence isolated from the Sargasso Sea
aaatttgttagaatgtcactcggaggagttagagatgaagctgagattagagggcacagaagaacttacataggatctctgcctggaaaggttcttcagatgatgaagaaagcaggatcatctaatccattatttctattagacgaaattgataagttaggagctgattacagaggagatccttcatcagctttattggaagtacttgatccagagcaaaataattcatttaacgatcactatctagaagttgattatgacttgtccgatacaatgtttattacaaccgctaatacattaagaatgcctcctgcacttttagacagaatggaaattattagaattgcaggctacacagaagatgaaaaagtagaaattgtaaaacaacatctagcaccacagatgttagagaagcacggcttgaagagtggtgagcttatactggatgatagtgcgataactggtttaataagatattatactagggaagcgggtgtgaggagtttggaaagagaactcgctaacctcgctcgtaaaacagttaaaaaaattgtagcaggtgacatcgggtcgctaacaataaacgaagataacctgcatgagtttgcaggtgttagaaagtttaaatttggcgaaattgataatgacgaccaggttggaatagttacaggactcgcttggacagaagttggcggcgatatattgccaatagaatcagtaataatgcctggaaaaggccgcatgactattactggaaaattaggtgatgtaatgaaagagtctattcaagccgcaaaatcctatgttcgctcaaggtgtattgagtttggaataaaaccaactatttttccgatacgtgatattcatattcatgttccagaaggtgcaattccaaaagatggtccatccgctggtctaggtatggttactt

SEQ ID NO: 262860 - DNA, 763 bp, Unknown
  Bacterial polypeptide expressing nucleotide sequence isolated from the Sargasso Sea
aatttgtagaaaagcagtcaaagttattgaaacgactaaaaataaaaaagtgtcacttgataaaaaaacaatgaataaatttttaggtgttgaaaaattcaaaaccaatgaaatcgaaaagaaaaatcttgttggcgtaacaaatggccttgcatggacagaagttggtggtgaaattttatcaattgaagtaattttatctgaaggaaaaggaaaattaactataacaggtaaacttggtgatgtgatgaaagaatccattcaggctgctgtctcatttgttagagcaaaggctatcaattttggaattaatccaaaaacatttgataaaaaagatattcatgttcacgtgcctgaaggtgcaacacccaaagatggtcctagtgcaggtatagcaatttttagttctctagtatcatcgttaacgaatattaaagtaaaaaaagatgttgcaatgactggtgaaataactttaagaggtagagtgcttccaataggtggccttaaagaaaaactttatgcggctgtaagagctggtataaaaacagttcttgtccctgaggacaatcttaaggatattaaagaaattgataaaaacattattaaagctattagtattataggtatttctgatgctacatctgttttagatcattctcttacaaaagctgttatccccctagaatacagcgaatctgataatgtaaaggatttaaaaacatcaatttcaagagataatttatcagaatccgtagctcactaa

SEQ ID NO: 262861 - DNA, 919 bp, Unknown
  Bacterial polypeptide expressing nucleotide sequence isolated from the Sargasso Sea
tcgattgctaaagctacaaatagagaattcgtaagaatgtctgtaggaggcatgagagatgaggcagaaatcagaggccatagaagaacttatataggttctcttcctggaaaaattattcagatgatgaaaaaagctggaactaaaaatcctctaattttattagatgaaatagacaaaataggaaatgattatagaggagatccttcatctgctttgttagaggctttagatccggaacaaaacacaacctttaacgaccattatttagaagttgattatgatctatcagatgtgatgtttgtcacaactgcaaatactttaaatatacttccaccattactagatagaatggaagttatcagacttgctggttatacagaggatgaaaaaataagtattgctaataaatacttactgcccaaacaaattaaagataatggtgttaaagataaagaaatgaatttaagtgatgacattattaaagaggtaataagaggttacactaaagagtctggggtaagaaatttagaaagagaaatttcaaagatagcgcgcaaagtagttaagaaaatagttggtggtgaagaaaaagaagttaatgttaataacaaaaatttatctgattttcttggtgttgcaaaatttaattttggagaactagaggctgataataaagttggtattgttgttggacttgcatggacagagtatggtggagagatacttaaaattgaaacagttaccatgcctggtaaaggaaggatgcaaattacaggtaagcttggagatgtaatgcaagagtctgttaaagctgcaaaatcatttgttagatccaaatgtctcgaatatggaattattccacctgtattcgaaaagaaagattttcatattcacgttcctgaaggtgctactccaa

SEQ ID NO: 262862 - DNA, 756 bp, Unknown
  Bacterial polypeptide expressing nucleotide sequence isolated from the Sargasso Sea
ttccctcggaggagttagagacgaaagtgaaattagaggacatagaagaacatatattggttcaatgccaggcaaaatagttcaagcacttaaaaaagcaaaaacaactaacccactgattttactagatgaaattgacaaaatgggtcaagattttcgtggagatccagctagcgcaatgcttgaagttctcgatccagagcagaatagtacattcacagatcactatttagaggttgaatacgatctatctaatgtgatgtttattacaacggctaatagctacaacatgccagctcctttgctagacagaatggaaattatacctttatctggctacacagaagatgaaaaaatagaaattgcaaagcgtcacttaatcgataaagccattaaaaaccatggcttacgaaagggcgagtttgagttaaccgatagcgctttaacaggtattgttcggtactatacccgagaagctggtgtaagaaatttagagcgcgaaatctcaaaattatcccgaaagtcagttacaaaaattgtcaaaaatgagcaaaagcacattaatgttacaatggaaaacctagaagactttcttggtgtcaaaaaatttaaatttggcctagccgagcaagacgaccaaataggtgtcgtaacaggattggcgtggacttcggttggtggtgatttgcttcatatagaagctcttaagttgcctggaaaaggcagaatgaaaactactggaaaacttggtgatgt

SEQ ID NO: 262863 - DNA, 802 bp, Unknown
  Bacterial polypeptide expressing nucleotide sequence isolated from the Sargasso Sea
aatgaaaaaatcaaaatcctctaaccctttaattctattagatgaaattgataaacttggttctgattggagaggcgatccttcttctgcacttctagaggtccttgatcccgagcaaaatagtaaatttaatgatcattacttagaacttgactatgatctttctgatgtaatgtttgtatgcacagccaacacacttaatattccacctgctctccttgatagaatggaaatcataagaatacctggctacacagaaaaagaaaaaaaccaaatagcaaaaagatatttggttccaaaacaaataaaaaatcatggaataaaaaaatctgaaatttcatttaattctaaagttttaaatttaattatcagaaattataccaaagaagctggagtcagaagtcttgaaaaagaaatttctaaagtttgcagaaaaactgtaaaaaaattagaaacttcaagattaaaaaaaatgaatcttaatgacaaatccttgcaaaatcttttaggtatagcaaaatatagatctagcgaaattgaaaagaagaacttagttggtgttactaatggtttggcgtggacagaagttggaggagaaattctttcagtagaagttatcttatcaataggtaaaggaaagcttacaattacaggtaaattaggtgaagtaatgagggaatcaattcaagctgcaacttcttatgttaaatctaaatcagttagcttaggtataaatccaaaagattttgaaaattatgatattcatatacatgttcctgaaggagctacacctaaagatggt

SEQ ID NO: 262864 - DNA, 990 bp, Unknown
  Bacterial polypeptide expressing nucleotide sequence isolated from the Sargasso Sea
ttcaatatttgaaaaacaagaattattagagatcatagatttaaagaaaagattagaaaaaattcactcttatattgaaaaagagacaagtgtaatttctgtagagaaaaaaatcagaggaagagtcaaaaatcagatggaaaaaactcaaagagagtactacttaaacgaacaattaaaagctatacagaaagaacttggagaaattgacgagggaaaagatgagctttcctctctttctaaagcgatatcggaagctaaaatgccaaaattagcaaaagataaatgtttatctgaattaaaaaagttaaaatctatgagtccaatgtcggctgaggcaacagttgtgagaaactatcttgattggatgactgatttaccttggtcagtaaaatcaaaaattaatactgatttagtaaatgctcaaaaaattttagatgaagaccattacggtctagaaaaagtaaaagagagaataatcgaatttttagccgttcaaaagagaattaaaaaaatgaaaggacctatattatgcttagtaggcccaccaggagtaggaaaaacatcgttgggtaaatcgattgctaaagcaacaaatagaaaatttataagaatttctttaggaggcataagagatgaggctgaaattagaggccatagaagaacttacataggttctttgccgggtaaaattattcaaatgatgaaaaaagctggaacaagtaacccgctttttcttttagatgaaattgataaagttgggaatgattacagaggtgacccatcttcagctttgttagaagcattagatcctgaacagaataaggaatttaacgatcattacctagaagtagattacgatttgtcagatgtaatgtttgttacaacagcaaatacacttaacatattaccaccacttcttgatagaatggaggtaataagattatcagggtacaccgaagacgaaaaagtaatatatctcaaaaatat

SEQ ID NO: 262865 - DNA, 916 bp, Unknown
  Bacterial polypeptide expressing nucleotide sequence isolated from the Sargasso Sea
agcagagtttgaagagcagttaaagaaaaaagatataccagaagatatcaagaaaagaattgagaaagaaataagaaagctcaaaagcatgtcttccatgtctgccgaagcaacagttgtaaggaattatattgattggcttgttactttgccatggaatagtgatataacaaaagacgaaatatcaattgataaagcacaagaagttttagatgaagaccatttcggacttgaaaagcctaaggaaagaattaccgaatatcttgctgtaagagcattaacttcaaaacaaaaaggaccaatattatgtttagttggaccgccaggagttggtaaaacttctttagctaaatccgttgctagagcaatgggcagaaaatttgtaagaatgtcattaggtggcgttagagatgaagctgaaatcaggggtcacagaaggacatatattggagctcttccaggaaaaataattcaaggaatgaaaaaagctggatctaaaaatccagttttccttcttgatgaaattgataaaattggaactgattttagaggagatccttcttctgctcttctagaagccctcgatccggaacaaaataataatttcaatgatcattacttggaaatagattatgacctttcacaagtgctatttatcacaacggctaacgttctacataccataccttgggcacttcaagatagaatggagatcattaagctttcaggttatacggaactagagaagaacgcgattgcaaagaaatatttaattcctaaacaagttgagaacaatggacttacatcaactaacattaggatttcagacaaagctttgaattttctaattcaaaggtatacgcgagaagcaggtgttagaacactagaaagagagattggaaacatttgtagaaaa

SEQ ID NO: 262866 - DNA, 794 bp, Unknown
  Bacterial polypeptide expressing nucleotide sequence isolated from the Sargasso Sea
cctgaaaaaaaatgaaataaaatttaatgttaaagcattaaatcaaattataagaaattatacaagagaggctggtgttagaaatcttgaaaaagaaatatctaaaatttgcagaaaaactgtaaaattaattgaaacttcaaaaaaaactgatgtaaaacttgataataaaactcttcagaactttttaggcgttatcaaatatagatctaatgaaattgaaaagaaaaatctcattggtatcacaaatggtttggcatggactgaagtaggaggagaaatcttatcaattgaagtattgttgtccatcggtaaaggcaaagtaactacaacaggtaaattaggtgaggttatgaaagagtcaatacaggcagccacctcttatgttaaatcaaaatcattacaacttggaatcaatcctaaagattttgataaatatgatatacatattcatgtaccagaaggtgctacaccaaaagacggaccaagtgctggaatagctatattcaattcacttgtttcatccttaactaataataaaataagaaaagatgttgcaatgactggggaaattactctcagaggacgagtattgcctattggaggtttaaaggaaaaaatatacgctgcttctcgagctggaattaaaaaagttttaatccctgaagaaaactttagagaaattgttgaatttgataaagaagttttaaaatctataaaaataattcctgtatcagatgcattttctatattagaacacacacttttaaaacctgtcattcctataaatttaa

SEQ ID NO: 262867 - DNA, 681 bp, Unknown
  Bacterial polypeptide expressing nucleotide sequence isolated from the Sargasso Sea
gccaactcgatgaacatccccggcccgctgctggaccgcatggaagtcattcgcctgccgggttacaccgaggacgagaaggtcaatatcgccatcaagtacctggcgcccaagcagatcaaggccaacggcctgaagaagggcgagctggagttcgacgaggcggcgattcgcgacatcatccgctactacacccgcgaagcgggcgtgcgcagcctggagcggcagatcgccaaggtctgccgcaaggcagtcaaggagcacgccagcgagaagcgcttccaggtgcgggtgacggcagactcgctcgagcacttcctcggcgtgcgcaagcaccgctatggtctggccgagcagcaggatcagatcggtcaggtcaccggactggcctggacccaggtgggcggcgaattgctcaccatcgagacagccgtggtgccgggcaagggcaatctgatcaagaccggttcgctgggcgatgtcatggccgagtccatgaccgccgccatgaccgtggtgcgcagccgtgccaagagcctggggatccccgccgatttcaacgagaagcgcgacgttcacatccacatgcccgaaggtgccacgcccaaggatggcccgagtgccggtatcggtctgtgcacggcgctggtctcggcgctgacgcagattccggtgcgcgcc

SEQ ID NO: 262868 - DNA, 799 bp, Unknown
  Bacterial polypeptide expressing nucleotide sequence isolated from the Sargasso Sea
attgaaaaagaaacaagcgtactttcagttgagaaaaaaatacgtggaagggtgaaaaatcaaatggaaaaaactcaacgtgaatattatttaaacgaacaacttaaagctattcaaaaagaattaggggaaattgatgaggggaaagatgaattatcttcattatcaaaagcaatatccgatgcaaaaatgcctaaactggctagagaaaaatgtttatcggagttaaaaaaattgaaatctatgagtccaatgtcagcagaggcaacagttgtgaggaactatttagattggatgacagaacttccatggtcaaataaatcaaaaataaatactgatcttaataatgcacaaaaaattcttgatgaagatcattacggtttagagaaagtgaaagagcgaattatagaatttttagcagttcaaaaaagaattcaaaaaatgaaaggtcctattctatgtcttgttggacctccaggagtgggcaaaacatctttaggtaaatcaattgcaaaagcaactaatagaaaatttataagaatttcattaggaggaataagagatgaagctgaaatcagaggccatagaaggacttatattggttctttaccaggcaagattattcaaatgatgaaaaaagctggcaccaaaaatccactttttttattggacgagatagataaagttggaaatgattatagaggagatccgtcatcagctttattagaagccttagatccagaacaaaataaagaatttaatgatcattatcttgaggtagattacgatctttcggatg

SEQ ID NO: 262869 - DNA, 866 bp, Unknown
  Bacterial polypeptide expressing nucleotide sequence isolated from the Sargasso Sea
aacaaatatgttgaaactctagatacaagaaagagactaaatagtattattaaaataatggaaaatgaaacaagtattattggtgttgaaaaacgaatacgtggaagagttaaaacacaaatggaaaaaactcaaagagaatattatttaaatgaacagttaaaagctattcaaaaagagcttggagaaattgaagatggaaaagatgaaacaactaatttaaaaaaatcaattcaaaaagctaaaatgccaaaagaagtagaaaaaaagtgtatggctgaattaaaaaaattaaaaaatatgagcccaatgtctgctgaagccacagttgtaagaaattatcttgattggatgatcgatattccatggtttaaaaaggataaagttgatattaatttaaataaagctctaaaaacacttgatgatgatcactatgggttagaaaaagttaaagagagaataatcgaatttttagctgttcaaaaaagaatggaaaaaattaaaggtccaattctatgtttaataggacccccaggcgtaggtaaaacttcattaggaaaatctattgctaaagcaacaaatagacaatttattagaatgtcacttggaggtgtaagagatgaagctgaggtgcgaggccatagaagaacatatataggttcacttccaggaaaaatcattcaaatgatgaaaaaagcaggaaccaaaaatccactttttttattagatgaaatagataaaattggaaatgattatagaggtgatccttcatcggcattattagaggctttagacccagaacaaaatactacattcaatgatcattatttagaagttgactatgatctttctgatgtaatgtttgt

SEQ ID NO: 262870 - DNA, 643 bp, Unknown
  Bacterial polypeptide expressing nucleotide sequence isolated from the Sargasso Sea
ttcgccagagaaaaatgtttatcagagctaaaaaaactgaagtctatgagccctatgtctgcagaagcaactgtagtaagaaattacttagattggatgaccgaaattccttggtcaacaaaaactaaaattaatactgatttaaaaacagcacaaaaaattttagacgaggatcattatggtttagataaagtaaaagagagaatcattgaatttttagctgttcaaaaaagaattcaaaaaatgaaaggcccaattttatgtttagttggtccgcctggtgtgggaaaaacatctttaggaaaatctatagccaaagccacaaatagaaaatttattagaatttctttaggtggcattagagacgaagctgagatcaggggtcatagacgaacatatattggatctctacctggaaaaattatacagatgatgaaaaaagctggaacaaaaaatccactttttttattagatgaaatagacaaggttggaaatgattacaggggtgacccatcatctgccttacttgaggctttagatccagagcaaaataaagaattcaatgatcattatttagaagtcgattatgatttatctgatgtaatgtttgttactactgcaaacacattaaatattttacctc

SEQ ID NO: 262871 - DNA, 807 bp, Unknown
  Bacterial polypeptide expressing nucleotide sequence isolated from the Sargasso Sea
ggttacatcgaagacgaaaaattgaatatatctaaaaattatcttgttccaaagaataaagaaaaaaatggtttaaaagaaaacgaaattacattcagcgataacgctatcttgaaaattattcgaaactatacaagagaagctggagtaagaaatttagatagacaaattaataaagtttgtagaaaaaaagtaaaagatttatctctaggcgctaaggcgactaagttaatcgacaatagggtagttagaaatatcttaggtgcggagccatttaaatatggtcaacatgatggagaaaattcccttggtcaagtgaatggtttagcttggacttctgttggaggagaattattacaaattgaagcagcagtaacagcaggcaaaggcagggttattaagactggttcgctgggtgatgtaatgcaagagtcaattcaagcagctttaactgttgcaaaaaatattgctaaagataaaaacattaaatctgagtttttcgataagcatgatattcacatacatgtgcctgagggtgctactccaaaagatggaccaagcgcaggcattacaatgtgtacagcaataacttctttagcgactgaaaaaaaagtaaaagctaatttagcaatgacaggtgaaattacgttagcaggtaaagttttaaagattggtggattaaaagaaaagcttattgctgcaaaaagaagtggtattactaatattattattccacatgaaaatttaggtgatgttgaagagatagaatctaatattctaaaagatcttgaaattattccggtgaaa

SEQ ID NO: 262872 - DNA, 799 bp, Unknown
  Bacterial polypeptide expressing nucleotide sequence isolated from the Sargasso Sea
gttcaaaaaagagtaaagaaactaaaaggacctgttctttgtttggttggtcctcctggagtaggaaaaacttcattaggggaatcaatagctcgcgcaacaaatagaaaatttataagaatgtcgttaggcggtgtaagggatgaagcagagataagagggcatagaaggacttacattgggtcgatgcctggaagaattttgcaaaaactttcaaaaacggaagttaaaaaccctctgtttctattagacgaagtcgataaaatgggcatggattttagaggtgatcctgcatcagctcttcttgaagtattggatccagagcaaaaccatacatttaacgatcattacctcgaagtagattacgatttatctgacattatgtttgtttgtactgctaatagtatgaatattcctggccctctgttggacaggatggaaattataagaattccaggctatacagaagacgaaaaagttaatatagctgagaagtacttactaccaaaacaaatgaaaaataatggtttaaatcagaaagagctaaatctcactacagattcattaaaagacctaattagattttttacgagagaggcaggagtaagatcactagaaagagaaatatctaaaatatgtaggaagttagttagaaataattctgataagaaaaaaccaagaaaattaaagttaactccagatttactagaggattattgtggagtcagaaagtttgaatatggtgaggcagtagaaaaagataggattggccaagtgactggactcgcttggacacaag

SEQ ID NO: 262873 - DNA, 849 bp, Unknown
  Bacterial polypeptide expressing nucleotide sequence isolated from the Sargasso Sea
aggtggagtaagggatgaggcagaaataagaggccatagaaagacttatatagggtctatgccaggtagatttattcaatcaatgaaaaaatcaaattcttcaaaccctttaatacttttggatgaagttgataagcttgggtctgattggagaggggatccttcttcagcattattggaagttttagatcctgaacagaataataaattcaatgatcattatcttgaattagattatgatttatccgatgttatgtttatttgtacagcaaatacactaaatatacctcctgccttactagatagaatggaaataattagaattccaggatacacagaaaaggaaaaaaataaaattgctcaaaaatacttagttcccaaacaacttaaaaatcatggacttaagaaaaaagagtcaaaatttaatacatcaataataaatcagatcattagaaactatacaagagaggctggtgtacgaaatcttgaaaaagaaatttcaaaaatttgtagaaaaacagttaaattaattgaaacttcatcaaggaaaaaaattaattatgatagtaaaacacttcaaaattttttaggagtaccaaggtttagatcaaatgagatagagaaaaaaaatcttataggaatcacaaatggtctggcatggactgaagtaggtggtgaaatattatctatagaagttttgctatctattggcaaaggtaagcttactataactgggaaattaggagatgttatgaaggagtcaattcaggctgcaacttcatatgtaagatctcaatgcttgcatttaggtatacatcctcatgattttgaaaatatgatatccatgtt

SEQ ID NO: 262874 - DNA, 886 bp, Unknown
  Bacterial polypeptide expressing nucleotide sequence isolated from the Sargasso Sea
gaagaccactttggtttagaggaggtcaaagaaagaatacttgaatacctcgcagtacaaaaaagagttaaaaaactcaaaggccctgtactttgtttagtaggccctcctggagttggaaagacttctttgggagaatcaatagctagagcaactaatagaaagtttgtaagaatgtctctaggaggagtcagagacgaagctgaaattagaggtcacaggcgaacttatataggctcaatgccaggcagaatattacaaaaactctccaagacaggtgtaaaaaatcccttatttttgttagacgaaatagacaagatgggaatggattttagaggagatccagcctccgccttattagaagtattggaccctgagcaaaatcacacgtttaacgatcattatcttgaggttgattatgatctctcagatattatgtttgtttgtactgcaaatagtatgaatataccttctgccctgctagataggatggagataattactttgccaggctatacagaagatgaaaaggttaatatagctgagaaataccttatagaaaaacaaaagaaaaataatggcttaaaagacgaagaattgtcaattccaaagaatactatcaaagatttaatccgttattttactagagaggcgggagtaagatctttagaaagagagattgcaaagatatgtagaaaagtagtaaagaaaaatactgcactagataaacccaaaaaggtttcaattaaaccaaatactcttgaagactattgtggtgtgaggaaatttgagtttggtgaagctgaagaaaatgaccgtattggacaagtaacaggattagcttggactcaagtcggaggagagctattaactatgaggcctcaag

SEQ ID NO: 262875 - DNA, 715 bp, Unknown
  Bacterial polypeptide expressing nucleotide sequence isolated from the Sargasso Sea
tatcttaagagaagcgaattaaaatttactattaaaataataaatcaaataataagaaattataccagagaggctggggtaagaaaccttgaaaaagaaatttccaaagtttgtagaaaaactgtaaaattattagaaactacaaaaaagaatagtgttaatctcaatgaagaaatgttgagaactttcctgggtattaccaaatttagatcaagtgaaatagaaaagaaaaatttgattggtgtaactaatggtcttgcgtggactgaagttggtggcgaaattttatcaattgaggttattctctcaattggtaagggaagactcactatcactggaaaattaggcgaggttatgaaagaatcagtccaagcagctatttcatatgtcagatcccacagtcttgatcttggtattcatccctttgattttgataagtttgatattcatgttcatgtacctgaaggtgcgactccaaaagatggaccaagtgcaggtatagcaatatttaattctttggtatcttctcttactgcgaataaagtcagaaaagatgttgcaatgacaggagaaattactcttagaggcagagttttacccataggtggattaaaagaaaaaatctatgctgcttcaagagcagggataaaaaaagttttaattcctgaagaaaataaaaaggaaatcacagaatttgacaaagagattttaaagt

SEQ ID NO: 262876 - DNA, 795 bp, Unknown
  Bacterial polypeptide expressing nucleotide sequence isolated from the Sargasso Sea
agtcgatgaattgcaaaacaagatcaatgaagcacgtatgccagaagaggcgttagaaaaggccaatgctgagctgagcaagctcaagatgatgtcgccgatgtcggccgaggcgtctgtcgtccggggttacctcgactggatggtgagtatcccgtggttcaagcgcagcaaagtccgccacgaccttaagcgggcgcaggccgtgttggacgaggatcatttcgggctcgaggaagtaaaggagcgcattttagagtacctagccgttcaaaagcgcgtgcgaaaattgaaaggccccgtgctctgcctcgttgggccgcctggtgttggtaaaacctctttgggcgaatcaattgctcgatcaacaaaccgaaaattcatcagaatggcgctgggcggtgtgcgagatgaagcagaaatcaggggtcatcgacgcacctatatcggctccatgcccggtaaattgttgcagaaaatgtccaaagccggggtgagaaacccgcttttcctgctggatgagatcgacaagatggggatggatcaccgaggtgacccggcttctgctatgctggaagtgctcgaccccgaacagaatcacgcatttaacgaccactatcttgaggtcgactacgatctttccgacgtgatgtttgtctgcacctccaacacgatgaacatccccgggccattactggaccgaatggaggtgattcgcatcccgggctacaccgaggatgagaaactcaacatcgcccagaagtatctgatacccaagcaaatcaagctgaatgg

SEQ ID NO: 262877 - DNA, 895 bp, Unknown
  Bacterial polypeptide expressing nucleotide sequence isolated from the Sargasso Sea
aaagaacttggcgaaatagaagatggaaaagatgaaagtactaatttaaaaaaatctattttgaaatcaaaaatgccaaaagaagtagaaaaaaaatgtttgtccgaacttaaaaagttaaaaaatatgagcccaatgtctgcagaagcaactgttgtaagaaattatttagattggatgatagatctgccttggtataaaaaagataaagttgatattgatcttaataatgcgataaaaacgttggacgaagaccattttggattagaaaaagtaaaagaaagaattatagaatttctagctgtgcaaaaaaggatggaaaaaatcaaagggcccatactttgtttaataggaccacctggtgttggaaaaacttctttaggtaagtcaattgcaaaagctacaaatagacagtttgtgagaatgtcacttggcggtgttagagacgaagcagagataagaggtcatagaagaacctatataggatcacttccaggaaaaataattcaaatgatgaaaaaagctggaacaaaaaatcctctaatccttctagatgaaatagataaagttggaaatgattacagaggtgatccttcttcagctttacttgaggcattagatccagagcaaaatacgaacttcaatgatcactatcttgaagttgattatgacttatcagatgttatgtttgtaacaacagccaacactctaaatatacttcctcctcttttagatagaatggaagtaataagaatccctggttatacagaagatgaaaaaattaacattgcgaataaatatctactacctaaacaaattaaagaaaatggtgtaaaagaaaaagaattagatttaatagatggaactataaaagagattatccgatcttatacaa

SEQ ID NO: 262878 - DNA, 910 bp, Unknown
  Bacterial polypeptide expressing nucleotide sequence isolated from the Sargasso Sea
aaaacatctaatcccattattttattagatgaaattgacaaagtgggtagtgactggagaggagatccatcctctgcactattagaagttttagatcctgagcaaaataaccaatttaatgatcattatctcgaggttgattatgacttatcaaatgtaatgtttatatgtacaggtaatacttacaacatacctggtcctcttcttgacagattagaggtcattgaagtatctggttatacagaaaaagaaaaagttgaaattgcaaaaaaatatttaataccaagaaaaatgaataaaaatattttaaaaaataatgaatttaagcttgataaatcatctattacaaaaatagtaagacactatactagggagtcaggtgtcagagggcttgaaaaagtttttgataagctatttagaaaacttgttttccaattagaaaaaaataaatcaaggtcaaaaaaaccatttgtttttgatgataaagctataaaaaattttttaggcccggaaaagttcaaggatagtgttttagaaaagaaaaatttagtgggcatcaccaatggtcttgcttggactcaggttggtggagatatcttaaatattgaagttaatttatcttcaggtaagggtatgattaatgcaacaggtaaacttggtgacgtgatgaaagaatctattactgctgctttaggttacattaaatctaattccgttgagttcggagtaaatccaaaggttttcgataaaatagacattcatttacatgtacctgaaggagctatacctaaagatggtccaagtgctggaattacaatatttacctcattaatttcatctctaactgatattaaaattaaaagagacattgcaatgactggagaaattacattaaaaggaagagttcttc

SEQ ID NO: 262879 - DNA, 898 bp, Unknown
  Bacterial polypeptide expressing nucleotide sequence isolated from the Sargasso Sea
tggattagataaagtcaaagagagaattattgagtttttagctgttcaaaaaagaatagaaaaattaaaaggccctatactttgcttagtaggcccaccgggagtaggcaaaacttctttaggaaaatctatagccagagctactggaagaaaatttgtaagaatttctcttggcggtgttagagacgaagcggagataagaggtcacaggagaacttatattggttcgctacctggaaaaattattcaaatgatgaaaaaagctggaactaagaatcctttatttttgttagacgaaattgacaaagttggtagtgactatagaggcgatccatcatccgcgttgcttgaagcattagatccagaacagaacaaacaatttaatgatcattatctcgaagtagattatgatttatcagatgtgatgttcgtgactacagctaatactttgaacatactacctcctttattagacagaatggaaattataagaatacctggatataccgaagacgaaaaaactaatatcgctcaaaaatatttaataccaaaacaaagtaaaaataatggtcttaaagatagtgagtggaaaatttctccaaacgttatcaaaaaaattattagagactacacaagagaatctggtgtaagaaatcttgaaagagaaatttccaaaatcgcaagaaagactgttaaaaaaatagactcaagtgaaaaaatcgaaaaagagttgttggaaaaagatgtaaatagctttcttggagttaagaagtataactacggggaaatcgaaagtgaaaataaaattggagtttctactggtctagcttggaccgaagttggtggtgaaattctaaaaatagagtcagtaaatatgccaggtaaaggaaaaatgcaa

SEQ ID NO: 262880 - DNA, 862 bp, Unknown
  Bacterial polypeptide expressing nucleotide sequence isolated from the Sargasso Sea
ttaaagataatgggtgttaaagaaaaagaaatgaagttagatgatgatataattaaagcagttattagaggttataccaaagagtccggtgtaagaaatttagagagagaaatttctaaacttgcaagaaaagtagtaaaaaaaatagtttcaggtgaggaaaaagaagttgagataaacaataaaaatttatctgattttttaggagttcctaaatttaaatttggagaattagaggcagaaaatagagttggtatagttactggtcttgcttggacagagtatggaggggaaattttaaaaattgaaactgcaactatgcctggtaaaggaagaatgcaaattactgggaaattaggcgatgtaatgcaagaatccatcaaagcggccaaatcttttgtaagatcaaaatgtttagaatatggtattattccacctgtatttgaaaaaaaagatttccatatacatgttccagagggagcaactcctaaagacggtccgtccgcaggaatagggatggtaacatctattgtatcctcaattactggtattcctgtaagaagagatgtagcaatgacgggtgaagtaactttgacaggccaagttctaccaattggtggtttaaaggaaaaattattagcagctcatagagccggaattaaagaagtcttaatacctaaagaaaatgaaaaagatttagttgatatgccaaaaaaaattgttgatgatatcaagataacaccagttgaatatgctgatcaggtagtaaaaattgctttaacaaaagaacttaaacctactgagtgggtagaggttgatatatcaaaaaaagacgacaaatctcaagctagtattcaataaa

SEQ ID NO: 262881 - DNA, 857 bp, Unknown
  Bacterial polypeptide expressing nucleotide sequence isolated from the Sargasso Sea
gttaaaaatcaaatgggaaaagacccagagagaatactatttaaatgaattgttgaaagctattcaaaaagaacttggtgagattgaagacggtaaagacgaaactactagtttaaataaagctatcacaaaagctaaaatgcctaaagaagttgaaaaaaaatgtcttcaagagcttaaaaaattgaaaaacatgagcccaatgtcagcggaagctacagtggttagaaactatctagattggatgacagaattaccttggcacaagaaaagtgaagtagatatcgatttgactaaggcattaaatattcttgataaagatcattttggactagagaaagttaaagagagaataatagaattcttagctgttcaaaaaagaatggaaaaaattaaaggcccaatattatgtttagttggtcccccgggtgttggtaaaacatctttaggtaaatctattgcaaaagcaactaatagagaatttgttagaatgtctgttggagggatgagagatgaagcggaaataagagggcatagaagaacttatatcgggtcattaccaggtaaaataattcaaatgatgaaaaaggctggaacaaaaaatcctttgattttactagatgagatagataaaattggaaatgattatagaggtgacccttcttcagcattattagaagcattagacccagagcaaaatacaacttttaacgatcactatttagaagttgactatgatttatctgatgtaatgtttgtaactacggcaaatactttaaatatactacctccattattagacagaatggaagtaataagattagctggttacactgaagatgacaaaattagcatag

SEQ ID NO: 262882 - DNA, 802 bp, Unknown
  Bacterial polypeptide expressing nucleotide sequence isolated from the Sargasso Sea
tcaatcaattgctaatgctacaaaccgtgaattcataaggatgtctcttggtggtgttagagatgaagcagagatcagaggtcatagaagaacttacatcggttcgatgccaggaaaaatcattcaaaaaattacaaaagttgagtctaaaaatccattatttctatttgatgaaattgataaaatgggcatggactataggggcgatcctgcttcagctttattggaagttcttgatcctgagcaaaatacaactttttcagatcattatttagaagttgactttgatctttcagaagtgatgtttgtttgtactgcaaatagtttaaatattccaccaccacttatggatagaatggaaatcatcagaattcctggttacattgaagatgaaaaacttaatatcgccaagcaatatctagttcctaagcaaatggaaagaaatggtctcaaatctggtgaagttgatctaaaagataatgccattcttgacattattaggtactacactagagaggctggtgttaggggtcttgaacgtcaaattgcaaagattttaagaaaaacagttaaagagatagagcttactgataagaaaacaaacactaaaaagcttgctgcaataacttctaagaatttagaaaaatacaatggagtaagaaagtttaaatttggaactgccgagaaagaaaacagtgtaggcaaagtgtcaggtttagcgtggactcaagttggaggtgagttactcacaattgaaacatcgcatgttagcggtaagggtaagattattaaaaccggatcc

SEQ ID NO: 262883 - DNA, 792 bp, Unknown
  Bacterial polypeptide expressing nucleotide sequence isolated from the Sargasso Sea
ggttgtgagggtaatattcttcaacttttaaagttgcctgatggaacggttaaagttttagttgagggtataaaaagagttaagattttagattatcatgataatgaaaagtatattacttgtgattacacaccgcataacgacattctaacagacaaagaagatttatatcctcttgcagtaacggcagtaagaagacttgaaaagcttacctcaataaataaaaaaatttcaggtgaaactttaagcaatattaaacaacttaaggatccttcacaaatagctgacaatattgcctctcatataaccgctacaatttctgaaaaacagcagatctttgagacaattgacgtaaaaaaaagacttaatgcgattatcaaattaatggagaatgagacaagtattataggagttgaaaagagaattagaggaagagtaaaaactcaaatggaaaaaacacagagagagtactacttaaacgagcaattaaaggcaatacaaaaagaattaggagaaatcgaagatggaaaagatgagagcacgaatttaaataaagctattcttaaatctaaaatgccaaaagaagttgaaaaaaaatgtttacaagaacttaaaaaactaaaaaatatgagtccaatgtccgctgaggctactgtagttagaaattacttagattggatgatagatttaccttggcataaaaaaagtgaagttgatatagatctaaaaaaagcgcttaatattcttgataaagatcatttcggattggaaaaaattaaagagagaataata

SEQ ID NO: 262884 - DNA, 907 bp, Unknown
  Bacterial polypeptide expressing nucleotide sequence isolated from the Sargasso Sea
agtgagagatgaggcagaaattagaggtcacagaaaaacatatataggctcaatgcctggaagatttattcaagctatgaaaaaatcgaaaacttcaaatcctttaatacttttagatgaaattgataaattaggttcagattggcgaggagatccttcatctgcattattagaagtattagatcctgagcaaaataataaatttaatgatcattatttagaacttgattatgatttatctgatgtcatgtttgtttgtacagctaatactcttaatataccaccagctcttcttgatagaatggaagttataagaatagcaggttatactgaaaaagaaaaaatttgcattgctcaaaaatatctagttccaaaacaaattaaaaataatggcttaaaaaatactgaaataaagttcaatattaaatctcttaaccaaataattcgaagttacactagagaggcaggagttagaaatttagaaaaagaaatatctaaaatttgtagaaaagcagttaaagaaatcgaaaccaaatctaataaaaaaataatattagataaaaaaactatagaaaaaaatttaggtgtagaaaaatacagacatagtgagattgaaaaaaagaatttagttggtattacaaatggattggcttggacagaggttggtggagaaattttatcaatagaagtattattgtctttaggtaaaggcaaactaacaattactggtaaacttggtgatgttatgaaggaatctatacaagcagcttcctcatatgtaagatcacaatctttgaatttgggtattaatcctttagattttgaaaaatatgacattcatgttcatgttccagaaggtgctactccaaaagatgggccaagtgcaggaattgcaatttttaattct

SEQ ID NO: 262885 - DNA, 777 bp, Unknown
  Bacterial polypeptide expressing nucleotide sequence isolated from the Sargasso Sea
agttagattaattaaagcaaagtttgaagactacattagtgttacaaaaagaattcctccagagatagtttcaacagtagattcattagatgaattatcaagattaatggatacaattactggacacctatcaattgaaacatcaaagaaacaagagattctagaaacacttgatcttaaagaaagagctgaaaaagttttaacttttatagaatcacagctagatgtagttgatgttgaaaaaaaggttcgagacagagttaaaaagcaaatggaaaaatctcaaagagaatattatctcaatgagcaaattaaagccgcacaaaaagagcttggtgaaataggagaagagggcgatgaactagagaatcttgagaaaaaaattcatgaagtaggcatgacaaaagaagccttaaaaaaagcaaagagcgagtttgcaaaatttaaacatatggcaccttcttcagctgaggcttcagttgtaagaacttatcttgattgtctagtggatgtgccatggaaaaagaagtctaaggttaaaactgatataaaagcctcgatggaaattcttgaagaagaccactatggtcttgaagaagttaaagaaagaatcgttgagtatttagcagttcaaaaaagagttaagtcaatgaaggctcctgtcttatgtctcgttggtcccccaggtgtaggtaaaacgtccttaggtgagtctattgctagagcaactaatagagaatttgtgagaatgtctcttggtggtgtaagagatgaatc

SEQ ID NO: 262886 - DNA, 895 bp, Unknown
  Bacterial polypeptide expressing nucleotide sequence isolated from the Sargasso Sea
ggtgtcagagacgaagctgaaataagaggtcatagaaaaacctatattggttcaatgccaggaagatttgtacaatctatgaaaaaagcaaaatcttcaaatcctctaatccttttagatgaaattgataaattaggagctgattggagaggtgacccttcttctgcattgctagaagttcttgatccagaacaaaataacaaatttaatgatcattatttagaagtagactatgacttatcagatgtaatgtttgtttgtacagctaatacattaagtattcctgcccctcttttagatcgaatggaaataataagaatacctggatatactgaaaaagaaaaaaatgtaattgctcaaaaataccttcttccaaaacagctaaaaaaccatgttttaaataaaaacgaaattaagtttggtactaaaattatcaataacataattagaaattatacacgagaagcaggtgtaagaaatttagaaaaagaaatatctaaagtatgcagaaaggttgttaagatactagaaacatcaaataagaaaaaaattgagctaaatgaagatcttttatccaaatttctaggttacagcaagtttagaacaagtgaaatagagaaaaaaaatctagtaggagttactaatggtcttgcctggactgaagttggaggagaaatattatccattgaagtaatattatcaataggaaaaggtaaattatctattactggtaaacttggtgaagtaatgaaagagtctgttcaagcagcgatttcatatgtaaaatctaattctattgatctcggcattcatcccctagattttgataagtatgatattcatgttcatgtacctgagggagctacccctaaagatggacctagtgctggtatag

SEQ ID NO: 262887 - DNA, 943 bp, Unknown
  Bacterial polypeptide expressing nucleotide sequence isolated from the Sargasso Sea
cctagcgctgatgatattcatgatttcggaacaataggttccgttttacaacttttaaaactcccagatggaactgtaaaagttcttgttgaaggagttcaaagagctaaaataactaaatataaagataatgtgaaccattttgaagcatatgtagaaactgtttttgaagataataataatgaaaaagatcttgatgcagtggcaaggtcagttattaatcaattcgagcaatatgttaaactcaacaagaaaatacctgcagaggtattagtttcattaaatcagatagatgatccaagtaaactagcagacactatagcttctcacctctctataaaagtttctgaaaagcaagaattattagaaatcattagtacttctgatcgtttagaaaaaatctatggattaatggaaagtgaaattggtgttcttcaggttgagaaaaaaatccgaggtcgtgttaagcggcaaatggagaaaactcaaagggaatattatttaaatgaacaattaaaagctatacaaaaggaactaggagattctgacgatagcagagatgagtctaatgagttagaagaaaaaataaacaagttaaagttaactaaagaagctaaagaaaaggcccacgcggaattaaagaaacttagaagtatgagtcctatgtctgctgaagcaactgttgttcgaaattatttagattggatacttggaatcccatggaagaaaagaagtagagttaaggcagacctttcatatgctgaaaaagttttagatgctgaccattacggtttagaaaaagtaaaagaaagaattttagagtatctcgcggttcagcatagagtaaaaaaaatgaaaggacctattttgtgccttgtaggtgctccaggagtaggtaaaacatcacttggtaaatctattgctaaagctactgtagaaattt

SEQ ID NO: 262888 - DNA, 829 bp, Unknown
  Bacterial polypeptide expressing nucleotide sequence isolated from the Sargasso Sea
gatgagatagataagatggggcacgattttcgaggcgatccagcaagtgcaatgctagaagttttagatccagaacaaaactcgacctttacggatcattatatggaagttgagtacgatctatctaatgtgatgtttttgactacggcaaacacgtataatatgccgagcccattacttgatagaatggaaattattcctttggctggctacacggaggaagaaaaaattgaaattgcaaagcaacatttgtacgaaaagcagaaaatatctcacggtttaaagaatgatgaatttgaacttgagcgctctggtttggtcgaaataataaggcgttatacgagggaagccggtgttagaaatctggaaagagaaatcgccaagctgtgtcgaaaagcgctaacaaacataataaagaaaaaagaaaaaaaggtagtcatctcggagtcgaatattcaagaattccttggtgtcaaaaaattcaaatatggactagcagaagatgaaaaccaagtaggggtaacaactggtttagcgtggacagaagttggcggtgacctcttgtcagttgaagccctgaaattgcctggcaaaggaagaatgaagaccacaggcaaacttggtgacgttatgaaagaaagtatagacgctgcttcaagttatgttcggtcaatttctccaacaattggagtaaagccacccgtttttgaaaaagtagatattcacgttcacgttcctgagggtgcgacgccaaaagatgggccatcggcgggtattgcgatggtaactgctatagtgtcggttctttctggaattcctgtccgccgag

SEQ ID NO: 262889 - DNA, 867 bp, Unknown
  Bacterial polypeptide expressing nucleotide sequence isolated from the Sargasso Sea
tatggattagaaaaagtcaaagaaagaattatagaattcttagcagtacaaaaaagaatggaaaaaattaaaggacctattttatgtcttattggtcctcctggtgttgggaaaacttcacttggaaaatctatagcaaaagcaacaaatagacaatttgtaagaatgtctttaggtggcgtaagagatgaagcagagattagaggacatagaagaacatacattggatccttgccaggaaaaataattcaattaatgaaaaaagctggaactaagaatccactaattcttcttgatgaaattgacaaagtaggaaatgattatagaggtgatccatcatcagctttgcttgaagctttggatcccgaacaaaatacaaattttaacgatcattatttagaagttgactatgatctttctgatgtaatgtttgttactaccgcgaacacattaaatatactgccaccattgcttgatagaatggaggttatacgaattcctggatacacagaagatgaaaagataagtatcgcaaataaatatttgcttccaaaacaaattaaagagaatggtgttaaaaaagaagaattagaaatagcagatggaactattagagaaattattaagagttatacaagagaatctggtgtaagaaatttagaaagagagatttctaaggtcgcaagaaaagtggtgaaaaaagtagtaaatggtgaagaaaaaaaagtaatagtagataataaaaatataccagattttttaggtgtaaagaaatttaagcaaggcgagatagaaccagaagataaagtaggggtagtaactgggttagcctggactgagtttggaggagagattttaaaaatagaa

SEQ ID NO: 262890 - DNA, 634 bp, Unknown
  Bacterial polypeptide expressing nucleotide sequence isolated from the Sargasso Sea
tgaattagaatcagagaataaagtaggtatagtaactggacttgcatggacagaatatgggggtgaaattctaaaaattgagactgtaactatgcctggaaaaggtaggatgcaaattacaggtaaacttggagatgtgatgcaagagtcagtcaaggcggctaaatcttttgttagatctaaatgcttagaatatggaattattcctcctttatttgaaaaaaaggattttcacattcacgttccagaaggagcaacaccaaaagatggaccatcagctggaattggaatggtaacatcaattgtgtcttcaattacaaatatccccattagaagagacattgctatgacaggagaagtcacattaacaggacaggttttaccaattggtggattaaaagaaaaattattagctgctcatagagctggcattaaagaagtattaattccaaaggaaaatgaaaaagatctagttgatatgcctaaaaaaataattgacgatattaaaattactggtgttgaacacgctgatgaagttttgaaaatagcattaaccaaagagcttaaaaggacagagtgggttgaagttgatatatctaaaaaagatgacaaatcacaagccagcattcaataa

SEQ ID NO: 262891 - DNA, 806 bp, Unknown
  Bacterial polypeptide expressing nucleotide sequence isolated from the Sargasso Sea
aagagaatattatttaaatgagcagttaaaagctattcaaaaagagctaggtgaaattgaagatggaaaagacgagacctcaaatctaaataaagcaattcaaaaagctaagatgcccaaagaagttcaaaaaaaatgtatgtcagaacttaaaaaattaaaaaatatgagtccaatgtctgctgaagctactgtagttagaaattatcttgattggatgattgaccttccttggttcaaaaaagataaagttgatattgatttaaataaggcactaaatacattagatgaagaccattatggtttagaaaaagttaaagagagaattattgaatttttggcagtacaaaaaaggatggataaaattaaaggaccaattttatgtttagtaggtccaccaggtgttggaaaaacttctctaggaaaatcaattgcaaaagctactaacagacagtttgtaagaatgtctttaggtggtgttagagatgaagctgaaattagaggccatagaagaacttatataggatcattaccaggaaaaattatacaaatgatgaagaaagcaggaacaaaaaatcctcttatacttcttgatgaagttgataaagttggaaatgattatagaggggacccttcttcagcactacttgaagctttagatcctgaacagaacacaacatttaatgatcattatcttgaagttgattatgatctttcagatgtaatgtttgttactacggctaatactttaaatattttacctccgttacttgatagaatggaagtaataagaatacctggataca

SEQ ID NO: 262892 - DNA, 748 bp, Unknown
  Bacterial polypeptide expressing nucleotide sequence isolated from the Sargasso Sea
catatgtcattgaagcttgatgagaaacagaagatcttggaacaaatcaacatcaaagagaggcttgagtatgtcattggcctgatagaggttgaaatagacatgattgaagttgagcagaaagtgagaggtcgcgtcaaagatcagatggaaaagagccagaaagaatactatctaaatgaacagatgaaagcgattcaaaaggagctcggtgacctagacaatgccaataatgaatttgatgaacttgaacagaagattaagcaatcaggaatgacaaaagaggctgatgaaaaagcatcatcagaactcaaaaaacttcaaatgatgtccccgatgtcagccgaagcaactgtggttagaaactttctcgatgttttggtttctgcaccatggaaaaagaaaacaaaggcaaaagtaacattggacaaagcacatgaaattttagatgaggatcattatggactaaaaacagttaaggaaaggattatcgagtatctagctgttcaaaaaagggtgaaaaaactaaaagggcccatactatgtctagtaggtcctcccggggttggaaaaacctcattaggggcaagtattgcaagagctactggcaggaaatttgtaagaatgtctcttggtggtgtaagagatgaagctgagatcagaggtcacagaagaacctacatcggagccatgccaggaaagatcatgcagaatctaaataaagtaggcgttagaaacccactttttc

SEQ ID NO: 262893 - DNA, 925 bp, Unknown
  Bacterial polypeptide expressing nucleotide sequence isolated from the Sargasso Sea
gcaactaaaagaaccatctcaaattgcagacaatatagcgtcacatatagcagcttcgatttctgaaaaacaacaaatttttgagaccaatgatgtcaaaaaaagattgaacgccataattaaaattatggaaaatgaaacaagtataatcggtgttgagaagagaattagaggaagagttaaaactcaaatggaaaaaactcaacgtgagtattatttaaatgaacaacttaaagctattcaaaaagaacttggagaaattgaagatggtaaagatgaaacaacaagtataaacaaagcgatctccaaagctaagatgccaaaggatgtagaaaaaaaatgtcttcaggaattaaaaaaattaaaaaatatgagccctatgtctgctgaagcaaccgtagtaagaaattatttagattggatgacagagctgccatggcataaaaaaagtgaagttgacattgatttagctaaagcacaaaatactttagacaaagaccattttggtttagaaaaaattaaagagagaatagtagaatttcttgcagtacaaaaaagaatggaaaaaattaaagggccaattttatgtttagttggaccaccaggtgttggcaaaacctcattaggaaagtcgattgctaaagccactaatagagaatttgtaaggatgtcagttggtggtatgagagatgaagctgaaatcagaggtcacagaagaacatacataggttcattacctgggaaaattatacagatgatgaaaaaagcaggaactaaaaaccctctaattttattggatgagattgataaaattggaaatgattatagaggagatccatcttctgctttattagaggctttagatccagaacgaaacacaacttttaatgatcattatttagaggtagattatgatctctcagat

SEQ ID NO: 262894 - DNA, 892 bp, Unknown
  Bacterial polypeptide expressing nucleotide sequence isolated from the Sargasso Sea
gaagccgataaagagaatgaggagcacaaaacatgtgcatcaaacttgattaaaaaatttgaaaaactttctacgcttaataaaaaagatgtatcagattttacaaaaggattaaaatctctgaaaaacgctaatcaactagcggataatatttgttcaaatttaaacatccaaatatttgaaaaacaagctttgcttgaaactattgatctaaagaaaagattggaaaaaatttatgagctcatagaaaaagaaacaagtgtaattagtatggaaaaaagaattagaggtagagttaaaaaccaaatggaaaaaactcaaagagaatattatttaaatgaacaactaaaagcaattcaaaaggagttaggtgaaatagaggatggaaaagatgaaatttcgaatttaaataaagctatttcaaaagctaaaatgcctaaagaagctcagaccaaatgtttagctgaattaaaaaaacttaaaggcatgagcccaatgtcagctgaagcaactgttgtaagaaattacttagactggatggttgatcttccctggaataataaaagtaaaatcatttcagatttaaatacagcacaaaaagttcttgatgaagaccattatggtttagcaaaggttaaagagagaattattgaatatttagcggtacaaaaaagaattgaaaaacttaaaggaccaattctatgtttagtcggcccaccaggtgtaggcaaaacctctcttggtaaatcaattgctaaagctactgggagaaaatttgtaagaatttcacttggtggtattagagatgaagcagaaattagaggacatagaagaacttatattggttcattacctggtaaaattattcaaatgagaaaaaagctgtacaagt

SEQ ID NO: 262895 - DNA, 1009 bp, Unknown
  Bacterial polypeptide expressing nucleotide sequence isolated from the Sargasso Sea
gttgatatagatttaactaaagctctaaatattttagacaaagatcattttggtttagaaaaagttaaggagagaataattgagtttttagctgttcaaaaaagaatggaaaaaataaaaggaccaattttgtgtttggttggccctcctggagtaggaaaaacctctttaggaaaatctattgcaaaggctacgaatagagaatttgtgagaatgtctgtgggtggaatgagagatgaagctgaaataagaggacatagaagaacttatattggatcattgcctggtaaaataattcaaatgatgaaaaaagctggaactaaaaatccattaattttattagatgagattgataaaattggaaacgattatagaggagatccatcatcagctttgttagaagcacttgatcctgagcaaaatacaacatttaatgatcattatttagaagttgattatgatttatcagatgtaatgtttgttacaactgccaacaccttaaatatacttccacctttattagatagaatggaggttataagattggctggttatactgaagatgagaaaataagcattgccaataaatatcttcttcctaaacaaatcaaagataatggtgttaaagaaaaagaaatgaatttagatgatgatatcataaaagaggtaattagaagttatacaaaggaatcaggggtaagaaatttagaaagagaaatatctaaacttgcaaggaaagttgttaagaaagttgtttctggagaaaaaaaagaagttaagattgataagaataatttatcagaattcttaggtgttccaaaatataaatcaggggaattagaaacagaagatagagttggtattgtaactgggttagcgtggactgaatatggtggagaaattttaaaaatagaaaccgttactatgcctggtaaaggaagaatgcaaattacaggtaaacttggagatgtgatgcaggagtcagtaaaagctgcaaaatcatttgtta

SEQ ID NO: 262896 - DNA, 725 bp, Unknown
  Bacterial polypeptide expressing nucleotide sequence isolated from the Sargasso Sea
actggttgttagaaattatttagactggatgactgaattaccttggtctcaaaaatcaaagattaatacagatctaaataatgctcagaagattttggatgaggatcattatggattggaaaaagtaaaggatagaataattgagtttttagcagttcaaaaaagaattcaaaaaatgaaaggaccaatcttgtgcttagtgggtcctcctggtgtaggcaaaacctctctgggaaaatctattgctaaggcaactaacagaaaatttatcagaatatctcttggaggtattagagacgaggcagaaataagaggtcatagaagaacttatattggttctttgccaggcaaaataattcaaatgatgaaaaaagctggaactaaaaatcctctttttttattagatgaaattgataaagttggaaatgattataggggagatccttcttctgcattattagaagctttagatccagagcagaataaagatttcaacgatcactatcttgaagttgattatgatctttctgacgtgatgtttgttactacagccaatacgttaaatattttacctccactcctcgacaggatggaagtcataaggttatcaggttacaccgaagacgaaaaggttaatatttctcaaaagtttttaattccaaaacaaagtgaaaacaatggattaaagaaagaggaatggagcatatcagaaaaggtaaacagaa

SEQ ID NO: 262897 - DNA, 728 bp, Unknown
  Bacterial polypeptide expressing nucleotide sequence isolated from the Sargasso Sea
agaagcaacagttgttagaaattatttagattggatgattgatcttccatggtttaaaaaagatgatgtagatatcgatttaaataaaggtcttaaaattttagatgaagatcattttggtttagaaaaagtaaaagagagaattattgagtttctagctgttcaaaaaagaatggaaaaaattaaaggaccaattttatgtttagttggacccccaggagtcggaaaaacatcacttggaaaatctatagctaaagctactaacagacagtttattagaatgtcgttaggaggtgtaagagatgaggctgaaataagaggtcatagaagaacatacattggatctttaccaggaaaaataattcaaatgatgaagaaagctggtacaaaaaatcctttatttttgttagatgaagtagataaaattggaaatgactatagaggagatccatcatcagctttgctagaagcattagaccctgaacagaatacggctttcaatgatcactatttagaagttgattatgatttgtctgatgtaatgtttgtaacaacagcaaatactttaaatattttaccaccacttcttgatagaatggaagttataagaattcctggatacacagaagatgagaaaatcaatattgcaaacaaatatcttttacctaaacaggtaaaagaaaatggtgtgaaagagggtgaactaaatttagaagatggacaataaa

SEQ ID NO: 262898 - DNA, 898 bp, Unknown
  Bacterial polypeptide expressing nucleotide sequence isolated from the Sargasso Sea
aaaactaaaattatgaaagctgataaagagaatgaggagcacaaaacatttgcatcaaacttaattaaaaaatttgaaaaactttctacgcttaataaaaaagatgtatcagattttgcaaaaggattaaaatcccttaaaaacgccaatcaactagcggataatatttgttcaaatttaaatattcaaatatttgaaaaacaagctctgcttgaaactattgatcttaagaaaagactggaaaaaatttacgagctcatagaaaaagaaacaagtgtaatcagtatggaaaaaagaattagaggtagagttaaaaaccaaatggaaaaaactcaaagagaatactatttaaatgagcaactaaaagcaattcaaaaggagctaggggaaatagaggatggaaaagatgagatctcaaatctaaataaagctattacaaaagctaaaatgcctaaagaagctcagaccaagtgtttagctgaattaaaaaaacttaaagggatgagtccaatgtcagctgaagcaactgttgtcagaaattatttagactggatggttgatcttccttggaataataaaagtaaaatcatttcagatttaaatacagcacaaaaagttcttgatgaagaccattatggtttagcaaaggttaaagagagaattattgaatatttagcagtacaaaaaagaattgagaaacttaagggaccaattctatgtttagtcggcccaccaggtgtaggcaaaacctctcttggtaaatcaattgccaaagctactggaagaaagtttgtaagaatttcacttggcggtattagagatgaagcagaaattagaggacatagaagaacttatattggttcattaccaggcaaaattattcaaatgatgaaaaaag

SEQ ID NO: 262899 - DNA, 724 bp, Unknown
  Bacterial polypeptide expressing nucleotide sequence isolated from the Sargasso Sea
gaaatagaagatggaaaagatgaaacttcaaatctgaataaggcgatcttaaaagcaaagatgcctaaagaagttcaaaaaaaatgtatgtcagaactaaaaaaattaagaaatatgagcccaatgtctgcagaagctacagttgttagaaattatcttgattggatgattgatattccctggtacaaaaaagatcaggttgatatcgacttaaataaagcaatgaaagttttggaccaagaccactttggcctagaaaaggttaaagaaagaattattgaatttcttgcagttcaaaaacgaatgcagaaaataaaaggtccaatactatgcttagtaggacctccaggagttggaaaaacttctttaggaaaatctattgctagagctactaacagacaatttgttagaatgtctttgggcggcgttagagatgaagcagaaataagaggtcatagaagaacttacataggatcattacctggaaaaattcttcaaatgatgaaaaaagcaggtacaaaaaatcctttattcttattagatgaagttgacaaaattggaaatgattatcgaggagacccatcttctgctcttttagaagctttagatcctgaacagaataaaacttttaacgaccattatttagaagttgattacgatttatctgatgttttgtttgtaactactgcaaatacattaaatattcttccgccattattagata

SEQ ID NO: 262900 - DNA, 706 bp, Unknown
  Bacterial polypeptide expressing nucleotide sequence isolated from the Sargasso Sea
accaggctatactgaaaatgaaaaaaatcaaattgcaaaaagatatttagtacctaaacaaattaaaaataatggattaaaaaattctgaaataaattttagcccttctttaattaaacaaattataagattttatactagagaggctggagtaagaggattagaaaaagaaatttctaaagtatgtagaaaagttgtcaaggatttagaaaccagaacaaaaagaaaaattttattagataaaaaagctataaataattacttaggtgtagaaaagttcagaaataatgaaattgaaaagaaaaatttgataggtgtaactaatggtttagcctggacagaggttggtggtgagatattatcaatagaagttctgctttcgattggaaaaggaaaattaacaataacaggaaagcttggagatgtaatgaaagaatctattcaagctgctagttcgtatgttagatctcaggctttaagtcttggaataaatccattagattttgacaaatatgatattcatgttcatgttcctgaaggagcaactcctaaagatggacctagcgcaggtatagctatctttaatagccttgtttcatcattaactggtataaaaataaaaaaagatattgccatgactggggagataactttgagaggtagggttcttcccataggaggattaaaagaaaaattatatgcagct

SEQ ID NO: 262901 - DNA, 832 bp, Unknown
  Bacterial polypeptide expressing nucleotide sequence isolated from the Sargasso Sea
cataccttggaataacccttcagctatttcaaaaaatattaaaaaagctaaatctattttagaatctgatcattatggcctagaaaaagttaaagatagaattttagaatatttagcagttcaaaaaagaattaataaaattaaaggcccaattctctgtttagttggcccaccaggagttggcaaaacttcactaggtaagtctattgctaattctactggacgaaattttgttagaatgtcgttgggtggtgtaagagatgaagctgaaattcgaggccaccgaaagacatatattggatcaatgcctggaagatttttgcaatctatgaaaaaatctaagacctccaatccacttattttattagatgaaattgataaattaggctctgattggagaggggatccttcttcagcattattggaagtattagatcctgagcaaaataataagtttaatgatcattatttggaacttgattatgatttatcagatgtgatgtttgtatgtacagcaaatactcttaatatacccactgctttattagacaggatggagataataagaataccaggctatactgaaaatgaaaaaaatcaaattgcaaaaagatacttagtgcctaaacagattaagaataatggattaaaaaaatctgaaataaactttaactcaactttaattaaacacattatacgatattatactagagaagctggagtaagaggattagaaaaagaaatctcaaaaatatgtagaaaagttgttaaggatttaaagaccaagacaaaaagaaaaaatttattagacaaaaaatccatacaaaattat

SEQ ID NO: 262902 - DNA, 940 bp, Unknown
  Bacterial polypeptide expressing nucleotide sequence isolated from the Sargasso Sea
ttagaagctctagacccagaacaaaatactacatttaatgatcattatttagaagttgattatgatttatctgatgtgatgtttgttacaacggcaaatacattaaatattctcccacctttgttagacagaatggaagttataaggattcctggttatacggaagatgaaaaaattaatatagcaaataaatatcttctgcccaagcaaatcaaagataatggtgtcaaggatggagaattaaatttagaagatggtacaattaaagaaataattagaagctatacaagagagtcaggtgtcagaaatttagaaagagaaatctccaaagtaacaagaaaagttgtaaaaaaagttgtaaatgctgaagaaattaaagttgatgtaaatgataaaaatatttcagattttttaggaattaaaaaatttaaatttggagaattggaaaatgagaataagattggaattgttattggtttggcatggactgaatttggaggtgaaatacttaaaatcgaaactgttaatatgcctggaaaaggtagaatgcaaataacaggaaagcttggtgatgtaatgcaagaatctgttaaagcagcaaaatcatttgtaagatcaaaaagtcttgaatatggaattattccacctttttttgaaaaaaaagattttcacattcatgttcctgaaggagcaactcccaaggacggtccatctgcaggtatagccatggttacatctattgtgtcttcaatgacaaatattcctgttaatagagaaattgcaatgacaggtgaggtaactgttacaggacaagttttacctattggcggcttgaaagaaaaattgttagctgcacatagggctggtgttaaaaaagttttaattacgaaagaaaatgaaaaagatcttgtagatataccaaaaaaggtggagagaagat

SEQ ID NO: 262903 - DNA, 796 bp, Unknown
  Bacterial polypeptide expressing nucleotide sequence isolated from the Sargasso Sea
tactcaaaaaaattcagaaattgatgatccaaaaagtactgatattttttcttacggatgtgaaagcaatatacttcaattacttaaattacctgatggaacagttaaagttttagtagaaggaaataaaagagttaaaattgttggatttaaagaagaagaacagtttatttcttgcaattatgaatatcaaaatgaaattattggtaatgaagaagagctaaaacctttagcactatctgctataaaaaaattagaaaaattaaattttgtaaataaaaaaatatccaatgaaacaattaacaatattaaacaacttaaagaacctttaaaaattgtagataatattgcagcacatataacaaccacaattactgaaaaacaacagttgttcgaaacttttgatgttaaaaaaagattggaaagtattattaaaattattgagaatgaaacaagtataatcggtgttgaaaaaagaattaggggaagagttaaaacccaaatggaaaaaacacaaagagaatactatttaaatgaacaattaaaggctatccaaaaagaactaggtgagattgaagatggaaaagacgaaacatcaaatttaaataaatcaatactaaaagcaaaaatgcctaaagaagttcaaaaaaaatgcatgagtgaacttaaaaaattaagaaacatgagcccaatgtccgcagaagctaccgtggtaaggaattatcttgattggatgattgatataccttggtataaaaaagataaagttgatattgatttaaacaaagcatcgaaa

SEQ ID NO: 262904 - DNA, 717 bp, Unknown
  Bacterial polypeptide expressing nucleotide sequence isolated from the Sargasso Sea
tataactgcaactatatctgaaaaacaacaaatttttgagactgttgatgtaaagaaaagactaaattccataattaaaataatggaaaatgaaacaagtattattggtgttgaaaaaagaattagaggaagagttaaaaaccagatggaaaaaactcaaagagaatattatttaaatgaacaattaaaagctattcaaaaagaattaggtgaaattgaagatggtaaggatgaaagtacaagtttaaataaagctatccttaaagctaaaatgcctaaagaagttgaaaagaaatgtttacaagaactcaaaaagttaaaaaatatgagtccaatgtcagcagaggcaacagttgttagaaattatcttgattggatgaccgaacttccatggtataaaaagagtgctgttgacatagatctaaaaaaagctctagaaattttagataaagatcattttggtttggaaaaagttaaagagagaataatagaattcttagcagttcaaaaaagaatggataaaatcaaaggaccaatattatgtttagtaggacctcctggtgttggtaaaacatcattaggcaaatctattgcaaaagctactaatagagagtttgttagaatgtctgttggtggaatgagagacgaagcagaaattagaggtcatagaagaacttatataggatctctaccaggaaaaataattcaaatgatgaa

SEQ ID NO: 262905 - DNA, 840 bp, Unknown
  Bacterial polypeptide expressing nucleotide sequence isolated from the Sargasso Sea
tggcgtaaatccagccgtctgaagagagatattgatgatgctcgcgctattttagatgcggatcattatgggctcgacaaggttaaagaccgaattgtcgagtttctggctgtacaacagcgcacaaaggcacttcgtggtccgattttgtgtttagtcggtccgccaggcgttggtaagacctcgctcggcaaatcaattgcgaaagcgaccgggcgtaattacgtgcggatggcgctgggtggtgtgcgcgacgaggcagaaattcgtggtcatcggcgaacgtacatcggttcaatgcccggtaagatcctacaaggcatgaaaaaagccggtaccagaaacccgctgtttctacttgacgaggtcgataagcttggtgcggattggcgtggtgacccgacgtcggcacttctcgaggtgttagatcctgcacaaaataacaacttccaggaccattatcttgaggttgattttgatctctcgaatgtgatgttcattaccacagcaaacaccttgaacatgccgcaacctctaatggaccgcatggaaattatccgcttgtcagggtacactgaagatgaaaagttagaaattgccaaacgtcacctaataacaaaacagattaaagatcacggcctgaaagatggagagctgacaatcgacgacaatgcattgcgcaacgctatccgtctgtacacccgtgaagctggagtgcgtaatctggaacgcgaaattgcgaagattgctcggaaaaccgtaactgcaattattagtggtaaggtgtcgtcagtcactgtaacggctaataatcttggtgactatcttggggttcaaagt

SEQ ID NO: 262906 - DNA, 818 bp, Unknown
  Bacterial polypeptide expressing nucleotide sequence isolated from the Sargasso Sea
agcgggggtaagggcattggagcgccagattgccaaagtgtgccgcaagatggtcaaggccttcgctctgggcgagcgagaattggggcagacaattagctcggaatccctgccggatattctcggcgtgaggaaatttaacttcggcacggccgagcaggaaaacaaggttggtcaggtcacgggcctagcctggacgtctgttggcggtgagcttctgacggttgaggtcgcggcgacccggggtaagggccgcgttgtgaaaacgggttctctgggtgacgtcatgcaggagtcgatccaggctgccaatacagtcgttagagccaagtcgcaaaccttggggattcctgcgcgctttcatgacacgcgcgacatgcatattcacgtccccgagggtgcgacccccaaggatggccccagcgcgggcattgcgatgtgcaccgcactggtgagtagtttcacggaaattcctgtgcgagctgacgtcgccatgacgggggaaatcactctccgcggagaggttctccctattgggggcttgaaggaaaagctcctggcggctcgccggggtggtattggcacggtcgtgattccccacgaaaacgaacgagatctgcaggaagttcctgataatataaaagaaaatttggatatccggccagtgaagtggatcgatgaagtgctggcgatcgcgctcgagagcctgcccgagcccctcgatgatgacacctatctagcagattctgaaaatattgggcggggcgatgaagcgggccaagactctacggacgctaatcggcccagatcccactgat

SEQ ID NO: 262907 - DNA, 659 bp, Unknown
  Bacterial polypeptide expressing nucleotide sequence isolated from the Sargasso Sea
taccaacaatcttaaaaatcttaaaaacccatctcaaattgcaaataatatttcatcgaatttaaatattcaaatatttgaaaaacaagaacttttagaaattacagatttaaagaaaaggttagaaaagatacattctctaatagagaaagaaataagcgttctttctgttgaaaaaaaaatacggggcagagtaaaaaatcaaatggaaaaaactcaaagggaatattatttaaatgaacaattgaaagcaatccaaaaggagttaggtgagatagatgaaggaaaggatgaattatcatctctttcaaaagctatctcagatgctaaaatgccaaagttagcaaaagaaaaatgcttatctgaattaaaaaaattaaaatcaatgagccctatgtcggcagaggctactgtagtgagaaactatttggattggatgacagagcttccatggtcaaataaatcaaaaattaacactgacctcaagaatgctcagaaaattcttgatgaagatcattatggacttgaaaaggtaaaagagagaattattgaatttttagcagttcaaaaaagaatgcaaaaaatgaaaggaccaattttatgtttagtaggcccacctggtgtaggaaaaacttccctagggaaatcaatagctaaag

SEQ ID NO: 262908 - DNA, 883 bp, Unknown
  Bacterial polypeptide expressing nucleotide sequence isolated from the Sargasso Sea
aaagaacttggtgatcttgacaatgccaacagtgaatttgatgaacttgaagaaaagataaaaaagtctggaatgacaaaagaagctgacgaaaaagcatcatctgagcttaagaagttacaaatgatgtctcccatgtctgctgaagccacagtcgtgagaaattttctggatgttttgctttctgcaccttggaaaaagaaaacaaaagcaaaagtatccttagatcaagctcataaaatccttgatgaggatcattatggattaaaaacagtaaaagaaagaatcatcgaatacctagctgtccaaaaaagggtcaaaaaactcaaaggaccaattctttgtttagtaggtcctcctggggttggtaaaacatccttgggggcaagcattgcaagggcaactggtagaaaatttgtgagaatgtctctaggtggtgtgagagatgaagcagagatcagaggtcacagaagaacttacataggggcaatgccaggtaagatcatgcagaacctgaataaagcgggcgttagaaacccactttttttgcttgatgaaattgataaaatgtcgatggacttcagaggcgacccatcatctgcgcttcttgaagtactagatcctgagcaaaataccacctttaatgatcactacatggaagtcgattttgatctttctgatgttatgttcatttgcactgccaatacacttaatatacctcctcctttgctggatagaatggaagttatacgtattgaaggttatacagaagatgaaaaaatgaatattgctgagaagtatctagtcaacaagcaaacagaagccaatggcctcaaagattcggagatcaaaattacaaatagcgcaattctgtcaattattc

SEQ ID NO: 262909 - DNA, 847 bp, Unknown
  Bacterial polypeptide expressing nucleotide sequence isolated from the Sargasso Sea
agcaaggatgcctatgccaaggcccaggcggagctgaacaagctcaagcagatgtcaccgatgtcggccgaagcgacggtagtgcggacctatatcgactggctggtgaacgtgccttggaaagccgccagtaaggtccggctggacctcgccaaggcagaagaggtgctcgacgccgaccactatggtctggaagaggtcaaggaccgcatccttgagtatctcgccgtgcagaagcgtgtgaagaagctcaaggggccggtgctctgcctggtagggccgcccggtgtcggcaagacgtccctcgccgagtccattgcgcgttcgaccaatcgcaagtttgttcgcatggcgctgggcggtgtgcgtgacgaagccgagattcgcggccatcgccgcacctacatcggttccatgccgggccgtctgatccagaaaatgaccaaggtgggcgtgcgcaacccgctgttcctgctcgacgagatcgacaagatgggcagcgacatgcgcggcgatcctgcctcggcactgctcgaggtgctggacccggagcaaaaccacaacttcaacgatcactatctggaggtcgactatgacctctcggacgtgatgttcctctgtaccgccaactcgatgaacattccggcgccgttgctcgaccgcatggaagtcatccgcctgcctggctataccgaggacgagaaggtcaacattgccacacggtatctggcgcccaagcagatcgaggccaatggtctgaagaagggcgagctggagttccaggaagccgctatcagggacatcatccgctactacacccgcgaggccggtgttcgcagccttgagc

SEQ ID NO: 262910 - DNA, 436 bp, Unknown
  Bacterial polypeptide expressing nucleotide sequence isolated from the Sargasso Sea
tcacgttcatgttcctgaaggagcaactccaaaagatggtccatcagctggtattgcaatggtcacatccatagtttctgttcttacagaaatctcagtacgtagagatatagctatgactggagaagtgactctaaggggcaatatactaccaattggaggtctcaaagaaaaattattggcagctttacgtggaggtataagaacggttttgataccaaaagaaaatgccaaagatctaagagaaattcctgatcaagtaaaaaatggacttgaaataattccactttcacatgttagtgaggttttaaatattgcactcactgataaacctaaaccaatagaatgggattcagaatcaataattggaacaggttcagacagtaatggtaaaggtgaagatgaattagatggtgagacctcaatagctcattaa

SEQ ID NO: 262911 - DNA, 871 bp, Unknown
  Bacterial polypeptide expressing nucleotide sequence isolated from the Sargasso Sea
aggtctactaatagaaaatttattagaatgtctctcggcggagtaagagatgaggctgaaataagaggtcatagaaggacatatattggctctatgcctggaaaaataatccaaaaactaactaaagttggtgttaaaaatccacttttcctattggatgaggtagataaaattggtatggaccatagaggagatccagcctctgcattattggaagttctagatcctgagcaaaatacatcatttagcgatcactatcttgaagtggattatgatttatcagaagttatgtttgtatgtactgctaacagcttaaatattcctggaccacttttagatagattggaaattattagaattcctggatatatcgaagacgaaaagctacaaattgctcagaactatcttcttcctaaacagcttgaaagaaatggattagaaaacaaggaactaaatctaaataaaaaagttcttttagacctaataagatattacactcgagaagctggtgttagaggtcttgaaagacaaatctcaaagattttaagaaaggttgttaaagaaagactgctctctaaaaagaaaacagcaacaaaaatagattctaaaaacttagaaaaatattctggagttagaaagttcaagtttggcgaagctgaatcttcaaacactataggtcaagtttgtggattagcctggaccgaggttggtggcgaacttcttactattgaggcatctaaagtctcaggtaaaggtaaaacgattaaaactggttcactgggtgaagtaatgcaggaatcaattcaagcagctttaacagtagtaagatcaagatcagactcattaggtattaagaaagatttctatgaaa

SEQ ID NO: 262912 - DNA, 724 bp, Unknown
  Bacterial polypeptide expressing nucleotide sequence isolated from the Sargasso Sea
cttgaagttttagatcctgaacaaaataataaatttaatgatcattatttagagctagattatgatttgtctgatgttatgtttgtttgtactgcaaatacactaaatatacctccggcattattagatagaatggagataataagaatacctggctatactgaaaatgaaaaaaatcaaatagcaaaaaaatatttagtaccaaaacaagttaagaataatggattaaaaaattctgaaataaattttaattctagtttaatcaaacaaattatcagatactataccagagaagctggagtaagaggtttagaaaaagaaatttcaaaaatttgtagaaaagttgttaaagatttagagacgagaaaaaaaagcaaaattttattaaataaaaaatctataaaaaattatttgggcgtagaaaagtatagaaacaatgagattgaaaagaaaaatttgataggtgtaacaaatggtttagcatggacagaggtaggtggagagatattatctattgaagttcttttatcaattggaaaaggtaaattaactataacaggaaagcttggtgaagtaatgaaagagtctattcaagctgccagttcatatgttagatctcaagctctaactctcggaataaatccattagattttgataaatatgatatacatgtgcatgttcctgaaggagcaactcctaaagatggtccaagcgcaggtatag

SEQ ID NO: 262913 - DNA, 658 bp, Unknown
  Bacterial polypeptide expressing nucleotide sequence isolated from the Sargasso Sea
tatggactagccgaagagtcagatcaaataggtgttgctacgggtctggcatggacagaggtcggcggcgatcttctttcgattgaagccataaagttacctggaaagggcagaatgaaatctactggcaagttgggtgaagttatgaaagaaagcatagatgctgcttcgagttttgtacgctctaagtctccatcgcttggtattatcccaactttattcgacaagtatgatatacacgttcatgttcctgaaggtgcgacgcctaaagatggcccatcagctggaattgcgatggtcacgtctatagttagcatgctaacagagataccaattagaagggatgtcgcaatgactggagaggtaactcttagaggaaatgttttaccaattggtggtttaaaggaaaaactcctcgctgctttgcgtggaggaataaaaaaggtcattattccgatcgaaaatgtaaaagatttggccgaaattcctgaaaatgtaaaaaacgacttagaaattattccagcgacaagcatagatgaggttcttaaagttgctctttcggaaaacgtacaaagtattgattgggacttctccgaatatgaaaatagtgacaaccttaaaagcaaaaagtcaggggaaatagagctacccaactaag

SEQ ID NO: 262914 - DNA, 850 bp, Unknown
  Bacterial polypeptide expressing nucleotide sequence isolated from the Sargasso Sea
tgattatagaggtgatccttcttcagctttattagaagctctagatcctgaacaaaatactacatttaatgatcactatctagaagttgattatgatctttcagatgtaatgtttgtaactactgctaatactttaaatatactaccaccactgttagatagaatggaagttattagattagctggttatactgaagatgaaaaaattaatattgctaacaaatatttacttccgaaacaaataaaggacaacggtgttaaagaaaaagaaatgaaacttggtaatgacataatcaaagaaattattagaagctacacaaaagagtcaggagtaaggaatttagaaagagaaatttctaaagttgcaagaaaagttgtgaaaaaagtagtagcaggtgaagaaaaagaggtaagtgttgacatcaaaaatttatctgattttcttggagtaccgaagtttaaatttggtgagttagaaagtgaaaatagagtaggtattgttacaggtttagcttggacagaatacggtggtgaaatattaaaaattgaaacagttactatgcctggaaaaggtagaatgcaaattacaggaaaattaggtgacgtaatgcaagaatctgtaaaagctgctaaatcttttgtaaggtcaaaatgtcttgaatacggaattattccgcctttatttgaaaaaaaagattttcatattcatgttcctgaaggagcaacaccaaaagatggtccctcagctggcataggtatggttacatcaatcgtatcatcgataacaaacataccagttagaagagatattgctatgacaggtgaagttaccttaacaggacaagtacta

SEQ ID NO: 262915 - DNA, 951 bp, Unknown
  Bacterial polypeptide expressing nucleotide sequence isolated from the Sargasso Sea
tgtagatgttaagaaaagattaaatgcaatcatcaaaataatggaaaacgagacaagcattattggagttgaaaaaagaattagaggtagagttaaaactcaaatggaaaaaactcaaagagagtattatctaaatgaacaattgaaagctattcaaaaagaattaggagaaatagaagacggtaaagatgaaaatacaagtttaaataaagccattcttaaatctaaaatgcctaaggatgttgaaaaaaaatgtctacaagagttaaaaaaattaaagaatatgagcccgatgtcagctgaagcaacagttgtaagaaattatctagattggatggtagatctcccttggcataaaaaaagtgatgtagtaatagatttaaaaaaagcacttgaggttttagataaagatcattttggtttggaaaaagttaaagagaggattattgaatttttagctgtccaaaaaaggatggataaaattaaaggacctattttatgtttagttggaccacccggggttggaaaaacttccttaggaaaatcaattgctaaagcaacaaatagagaatttgttagaatgtcagttggtggaatgagagatgaagcggaaattagaggtcacagaagaacttatataggttcattacctggaaaaattattcaaatgatgaaaaaagctggaactaaaaatccacttatacttttagatgaaattgataaagttggaaatgattatagaggtgatccctcatccgctttactagaagctttagacccagaacaaaatacaacatttaatgatcactatcttgaagttgactatgatttatctgatgtaatgtttgtaacaacagctaataccttaaatattttacctccactattagatagaatggaagttattagattagcaggctacaccgaagatgaaaaaataaatattgcaaa

SEQ ID NO: 262916 - DNA, 935 bp, Unknown
  Bacterial polypeptide expressing nucleotide sequence isolated from the Sargasso Sea
ggatcggattggcgtggcgatccatcatcagccttattggaggtattagatcctgagcaaaacgacacctttcaggatcactatctcgaggtagattacgacctctctgacgttatgtttgtaacaactgccaacagtttgcgtattcctggtcccttaatggatcgaatggaaataattcgaatacaaggttacaccgaggacgagaaggtcgaaattgctcgacggcacttgatcgacaagcagctggaagcgcatgggctcaatgacgaagagtggtcaatctctgaccctgccctccgtgatctgatacgctactacacacgggaggccggcgtgcgaaatttagagcgtgagctggcgaatctcacgcgcaaggcgaccaaggaaatattgatggatggcgtaacgacagtgtccgtttcgcgccggaacctggaaaaatacgcaggtgtccagaaatatcgttttggagaggtggagacagaggacatagtcggggtcacaaatggacttgcctggactgaagtggggggagaaatcctcacaatcgaggccgtcatggtaccgggtaagggcaagatggtaatcacaggtaagcttggggaggtgatgcaagaatccatacaggcagcccggtcttttgttcagtcacgatctgtcgagtttggggttaagccgacgatctttgacaaacgagatatccatgtgcacgtgccagaaggggcgacgccgaaagacgggccgtcagcgggtgttggaatggtgacctcgatcgtgtcggtacttaccggtgttgcagtctgtaaggatgttgcaatgacgggggaggtaacccttagaggtagagtgcttcctatcggcggtttaaaagaaaagttactggcggcacttcgagggggtatcaggaaggttctcattcccaaagaaaacga

SEQ ID NO: 262917 - DNA, 862 bp, Unknown
  Bacterial polypeptide expressing nucleotide sequence isolated from the Sargasso Sea
aagtgaggttgatatcgatttaacaaaagctttaaatattcttgataaagatcattttggattagaaaaaatcaaagaaaggatagtagaattccttgcagttcaaaaaagaatggaaaaaattaaaggtccaattttatgtttagtcggacctcctggtgttggtaaaacttcattaggtaaatcaattgcaaaagctacaaatagagaatttgttagaatgtctgttggaggaatgcgtgatgaggctgagataagagggcatagaagaacatatattggatcattacctggaaaaataattcaaatgatgaaaaaagctggaactaaaaaccctttaattttattagatgaaattgataaagtaggaaatgattatagaggagacccttcttctgctttattggaggctttagatccagaacaaaatacaacatttaatgatcattacttagaggttgactacgatttatctgatgtaatgtttgtcacaactgctaacacattaaacatattaccacctttgttagatcgaatggaggtaattagattggctggttatacggaagatgaaaaaattaatatagctaataagtttttattaccaaaacaaattaaagataatggtgtaaaagaaaaagagatgaaattagatgatgatatcattaaagaagtaatcagaggatacacaaaagagtctggtgtgaggaatttagaaagggaaatatcaaaaattgcaagaaaagttgtaaaaaaagtagttgctggagaagaaagcgaagtaaatataaataataaaaatttatcagatttccttggtgtgcctaaatttaaattttggagaattagaagcagagaataa

SEQ ID NO: 262918 - DNA, 742 bp, Unknown
  Bacterial polypeptide expressing nucleotide sequence isolated from the Sargasso Sea
aaaagattagagaaaatttatgaaattttagaaaaagagaccagcgtaatcagcatggaaaaaagaattcgaggaagagttaaaaatcaaatggaaaaaacccaaagagagtattatttgaacgaacaattaaaagctattcaaaaagaacttggagaaatcgaagaaggcaaagatgagatttctaatttaagcaaagcaattacgaaagctaaaatgacaaaagatgcccaaaataaatgccttgcagaattgagaaaattaaaaactatgagtccaatgtcagctgaggctacagttgtaagaaactatttagattggatggtcgatttgccttggagtaataaaagtaaagttataaaggatttaacagcagcacaaaaaatattggatgaagatcattttggtttagagaaagttaaagagaggatcattgaattcttagcagtacaaaaaagagttgaaaaacttaaaggaccaatactttgtcttgtaggtcccccaggtgtcggcaaaacttctttaggtaaatcaatagccagagcaacaggtagaaaatttgttagaatatctcttggaggaatcagagatgaagctgagattagaggtcacagaagaacatacataggttcattgccaggaaaaattattcaaatgatgaaaaaagctggaactaaaaatccattatttttattggatgagattgataaggttggaagtgattatagaggtgatccctctt

SEQ ID NO: 262919 - DNA, 781 bp, Unknown
  Bacterial polypeptide expressing nucleotide sequence isolated from the Sargasso Sea
aataaaagagtaaaaattaatgactttgcagatcaagaaaaatttataaaatgtagttatgagtattttaatgatgttcttgataaaaatgaagatctaaatgcactagctggaactgcattaaaaagacttgaaaaactatcatcagtaaataagaaaatttctaacgaaactatttcaagtattaaggatttaaaagacccttcgaagattgcagataacatagcttcacacttgaacaccaccatctctgaaaaacaacatatctttgaaactgcagatgttaaaaaaaggttaaatgctgtcataaaaataatggataacgaagctagcattataggagtggagaaaagaattagaggcagagttaaaactcaaatggaaaaaacccaaagagaatactacttaaatgagcaattaaaagctattcaaaaggagttaggtgaaattgaagatggaaaagatgaaagttcaagtttaaataaatcaatattaaaagcaaagatgccaaaagatgttcaaaaaaaatgcatgtcagaactcaaaaaattaagaagcatgagtccaatgtcggccgaagcaacagttgttagaaattatttagactggatgattgatttaccttggcacaaaaaggacaaagttgatattgatttaaacaaagctttaaaaatcctagatgaagatcattttggtctagataaagtaaaggaaagaattgtcgaatttttagctgttcaaaaaagaatggaaaaatcaaaggccccattctctgtttagt

SEQ ID NO: 262920 - DNA, 887 bp, Unknown
  Bacterial polypeptide expressing nucleotide sequence isolated from the Sargasso Sea
cacaagagatgttccataaacaaaattattgataaagattcatatacagtggcaagagttatcgagctagaagacccagtcttaaaagataatgaatcggctaatctggtcagattgataaaagcaaaatttgaagattacattggtataacgaagagaatacctccagaaatagtttcgactgttgattctttagatgatttatccagactcatagatacaatcactggacatctgcctattgagacctcaaaaaaacaagatgtacttgaaacgattgatttgaaagaaaggtctgagaaaattttaacttttattgaatctcaactagatgttgtagatgttgagaagaagattagagatagagttaaaaaacaaatggagaaatctcaaagagaatattatcttaacgagcaaataaaagctgctcaaaaagaacttggagagattggagaagagggtgatgaattagaaaaccttgagaagaaaatccatgaagttggaatgactaaagaggcattaaaaaaagctaagagcgaactagcaaaatttaaacatatggcaccttcttcggctgaagcatccgttgtaagaacttatttagattgtcttgtagatgttccttggaaaaagaaatcaaaaattaaaacagatattaaagcttcgatggatattttagaggaagatcattacggactagaagaagttaaagagagaatagttgagtatcttgcagtgcaaaaaagagttaaatctatgaaagctccagttttatgtcttgtcggccctccaggtgttggaaaaacttcacttggtgaatcaattgctcgtgcgactaacagaaagtttgtaaggatgtccttaggtggagtaagagatgagtcaga

SEQ ID NO: 262921 - DNA, 874 bp, Unknown
  Bacterial polypeptide expressing nucleotide sequence isolated from the Sargasso Sea
ggagacccatcttctgcactcttagaagttctagacccagagcaaaatacaacattcaatgatcactatatggaagttgattttgatctctctgatgtaatgttcatttgtacagccaacactcttaatatacccccacctttattggatagaatggaagtcattcgcatagagggctatacagaagatgaaaaaatgaatatcgctgagaagtacttagtgaataagcaaacagaagctaatggcctcaaagattctgagattaaaatcacaaatagcgcaattctctcaattattcgtcactatacgcgagaggcaggggtcagaaacttggatcgtgaaatcgctaaaatttctaggaaagtagtgaaatcattggtgatgaagtctaaagatgaaacagttcatgttagaccgggaagccttgaaaaataccttggtgttcaaaaattcaaatatggcattgctgagaaagataatcaaatcggtcaagtgactggtttggcttggactcaggtgggcggagaattactaacaattgaatcaacagcgattcctggtaaaggtaagttaattaatacaggacagcttggtgatgttatgaaagagtcaattcaagcagctacaactgttgtcagaagtcgttccaaagcactaggtataaaagaggattttcatcagaaaatggatatgcatattcacgtcccagagggcgccacgcctaaggatgggcctagtgcaggtattggaatgtgcactgctctgatttcgtctttgaccgatattcctgttaaagcaaacgttgctatgacaggagagatcaccctcagaggtgaggtacttccaatcggtggattaaaagagaaattactcg

SEQ ID NO: 262922 - DNA, 715 bp, Unknown
  Bacterial polypeptide expressing nucleotide sequence isolated from the Sargasso Sea
gggctatgcccgcgaggccggcgtacgccagttggagaaacagctgggcaagctggtgcgcaagtcggtggtgaaactgctggacgatcccgagacgaagatccgcatcggcgccaaggatctcgaggaagccctgggcatgccggtgttccgcaacgagcgggtgctggccggcaccggggtcatcaccggtctggcctggaccagcatgggcggcgctaccctgccgatcgaggcgacgcgcatccatacgctcaatcgcggcttcaagcttaccggccagctcggtgacgtcatgaaggagtcggcggagatcgcctacagctacgtcagctcgcatctgaaacagttcggtggtgacccgaccttcttcgaccaggccttcgtccacctgcacgtaccggaaggcgccacgcccaaggacggccccagcgccggcatcaccatggccagcgccctgctctccctggcgcgcaaccaggcgccgaagaagggcgtggccatgaccggcgagctgaccctgaccggccaggtgctgcccatcggtggcgtacgcgagaaggtgatcgcggcgcggcggcagaagatcttcgaactgatcctgccggaggccaaccgcggcagttacgaggagttgccggactacctcaaggaaggcctgaccgtgcacttcgccaagcgctacggcgatgtggcgaaagtgctattcgactaa

SEQ ID NO: 262923 - DNA, 712 bp, Unknown
  Bacterial polypeptide expressing nucleotide sequence isolated from the Sargasso Sea
gaaagagtaaataatccaataaacgagaaggatcttaaagatttattaggtgtccaaaaatttaattatggagaaattgaagaagaaaatagaattggggttgtaacaggtttagcatggactgaagtgggtggagagatattaaaaatagagtctgcagtaatgcctggaaagggaaagatgcagatcactggaaaattaggtgatgtgatgcaagagtctgttaaggcagccaaatcatatattagatctaaaagtttagattatgggataattcctccaatatttgacaaaaaagattttcacattcatgtacctgaaggagcaacacctaaagatggaccatcagctgggatcggaatggtaacatcaattatttcagctatcacagagataccagtagacaaaaatgttgcaatgacaggagaaattactttgagggggttagtattgcctattggaggattaaaagaaaaattacttgcagctcatagagcgggaattaaaaaagtgttgatacctacagaaaatcaaaaagatttagtagaggtgcctaaaacaattttaaaatcaatggaaataattccagttaagaatgttgatgaagttttaaaggtggcattaaccaagccatttaaaagagtcgaatgggttgaagtagatcaaatatcaaaaaaagataaagacaaaaaagaacttagtactcactaat

SEQ ID NO: 262924 - DNA, 671 bp, Unknown
  Bacterial polypeptide expressing nucleotide sequence isolated from the Sargasso Sea
taaagtttgcagaaaaaaagttaaagatttatctctaggggctaaagctactaagttgattgataatagggtagttagaaatattttaggcgcggaaccttataaatatggtcagcatgatgcagaaaattctcttggacaagtaaatggtttagcctggacttctgttggaggagaattattgcaaattgaagcagctgtaactgcaggcaaaggcagggtaattaagactggttcgctaggagatgtgatgcaagagtctatccaagcagctttaacagtctcaaaaaatattgctaaagaaaaaaaaattgaatctgagttttttgataagcatgatattcacatacatgtgcctgagggtgccactcccaaagatgggcctagcgcaggcataacaatgtgtacagcaataacttctttagcaactgagaaaaaagtaaaagctaatttagcaatgacaggtgaaattacattagcaggtaaagttttaaagattggtggattaaaagaaaagcttattgccgcaaaaagaagcggcataactaatgttgttgttccatatgaaaatttaggtgatgttgaagagatagaatcaaatattttgaaagatctagaaattattcctgtgaaaaatatttcagaagtacttaaagtagctctcacttagg

SEQ ID NO: 262925 - DNA, 865 bp, Unknown
  Bacterial polypeptide expressing nucleotide sequence isolated from the Sargasso Sea
ggtgttagagatgaagcagaaataagaggtcatcgaaaaacctatattggttcgatgccaggaagatttattcaagcaatgaaaaaatccaaatcttctaatcccttaatattattggatgaaatagacaagttaggatcagattggagaggggatccctcatcagctctacttgaagttttagacccagaacaaaatagtaaatttaatgatcactatcttgaacttgattatgacctttcagatgtaatgttcgtttgtaccgcaaatactcttaatattcctcctgctttacttgatagaatggaaattattagaattcctggttacacagataaggaaaaaaatcagatagctcaaaaatatttagtaccaaaacaactaaagaacaatggtctaaaaaaaactgaaattagatttaatgtaaaactcttaaatcaaattattagaaattatacaagagaggcgggagttagaaatttagaaaaagaaatttcaaaagtatgtagaaaagcagtaaaagatatagaaacaactagaaaaaagaaaatcaacttagatacaaaaaaacttcagaattatcttggtattacaagatttagatctaatgaaattgaaaagaaaaacttaattggtattaccaatggcctagcttggactgaagttggtggggagatactttctatagaagtaattttatctattgggaaaggtaagttaacaattacaggaaaactaggcgaggtaatgaaagagtcaattcaagcagcaacttcctacgtaaagtctaaatgtcttaatttgggaattaatccaaaagactttgaaaaatatgatatacacatacatgtcccagaaggtgcta

SEQ ID NO: 262926 - DNA, 976 bp, Unknown
  Bacterial polypeptide expressing nucleotide sequence isolated from the Sargasso Sea
gatgtcagttggcggtatgagggatgaagcagaaattagaggacatagaagaacatatatcggatctctcccgggtaaaattattcagatgatgaaaaaagcagggacaaaaaatccgttaattttgttagatgaaatagataaaataggaaatgattatagaggcgatccatcttcagcgttattagaagctttagatcctgaacaaaatacaacatttaacgatcattatttggaagttgattatgatttatctgatgtaatgtttgtaacgacagctaataccctaaatattttacctcctttattggataggatggaagtgattagattagcaggttacactgaggatgaaaaaataagtattgcaaacaagtacttattaccaaaacaaatcaaagataacggtgttaaagaaaaagaaatgaagctagatgataacattataaaagaagttattaggggatatacaaaagagtctggtgtaagaaatcttgaaagagaaatttctaaacttgcaagaaaggttgttaaaaaaattgtatctggtgaggaaaaagaagtaggaataaacaataaaaatttatcagaatttttaggtgttcctaaatttaaatttggggaactagaagctgaaaatagagttggtatagttacaggtcttgcttggactgaatatggtggagaaattttaaaaattgaaactgttactatgcctggaaaaggaagaatgcaaattacaggtaaattaggcgatgttatgcaggagtctgtaaaagctgcaaaatcttttgtgagatcaaaatgcttagaatacggaattattccacctgtttttgaaaaaaaagacttccatatacacgttcctgaaggtgcaactcctaaagatggtccttcagcaggtatagggatggtaacttcaattgtatcctcaatttgcaatattcctgttagaagagatttagcaatgactgga

SEQ ID NO: 262927 - DNA, 787 bp, Unknown
  Bacterial polypeptide expressing nucleotide sequence isolated from the Sargasso Sea
aattagggatgaagctgaaataagaggacacagaagaacttatataggttccttaccaggtaaaattattcaaatgatgaaaaaagcaggaactaaaaatccactatttcttttggatgaaattgataaagttggtagtgattacagaggcgatccatcgtcagctttgttagaagcgttggatccagaacaaaataaacaatttaacgatcattatttagaggtagactatgacttgtctgatgtaatgtttgtaactacagcaaatactttaaatattcttcctcctctgttagatagaatggaaattataagattacccggttacacagaggatgaaaaaactaacatagctcaaaagtttcttattcctaaacaaagcaaagacaatgggttgaaaaatgatgaatggaaaatttctcctgaagttgtcaaaaaaattataagggattatacaagagagtcaggcgtcagaaatttagaaagagaaatatctaaaatagccagaaaaatggttaaaaaaatagactcaagtgaaaaagttaataacgaattattagaaaaagacataaacagttatttaggtataaaaaaatataattacggtgaaattgaaagtgaaaataaaattggtgtttcaacaggtctggcctggacagaagttggtggtgaaattttgaaaatcgagtcagttaatatgcctggaaaaggtaagatgcaaattacaggtaaactcggtgaggttatgcaagagtcagttaaagctgcaaaatcatatgtaagatca

SEQ ID NO: 262928 - DNA, 973 bp, Unknown
  Bacterial polypeptide expressing nucleotide sequence isolated from the Sargasso Sea
aatgatcatcatggattagaaaaagtgaaggaaagaattcttgaatatctagcagtgcaaaaaagaacaaacaaactaaaaggacctatcttatgtctagttggacctcctggcgtgggtaaaacatcacttggaaaatcgatagcaaattctacaggcagaagctttgtgagaatgtcacttggtggtgttagagatgaggctgagattagaggtcatagaaaaacatatatcggttctatgccaggaaggtttattcaagcaatgaaaaaatccaaatcatctaatccactaatcttacttgatgagattgacaaacttgggtcagattggagaggggatccctcatcagctcttttggaggttttagacccagaacaaaatagcaaatttaatgatcattacttagaacttgattatgacctgtcagatgtaatgttcgtttgtacagcaaacactctcaacattcctccagctcttcttgatagaatggaagttattagaattcctggttatactgagaaagaaaaaaatcaaattgctaaaaaatatttagttcccaaacaaattaaaaaccatggtatcaaaaaatcagaaatctcatttaattctaaagttctaaattcaataattagaaattatacaaaagaagctggtgtaagaaaccttgagaaagagatatcaaaagtttgtagaaaaacagtaaaaaaattagaaacctcaagattaaaaaaagttaatctgaacgagaaatcattacaagattttctaggtattgcaaaatttagatcgagtgaaattgaaaaaaagaacttggttggtgttactaatggcttagcttggacagaagttggaggagaaattttatcagtagaggttattttatctataggtaaaggtaaattaactattactagtaaattaggtgaagttatgaaagaatcaattcaagctgctacgtcatatgtaaaat

SEQ ID NO: 262929 - DNA, 592 bp, Unknown
  Bacterial polypeptide expressing nucleotide sequence isolated from the Sargasso Sea
caagttggaggagagcttctaacgattgattcaacagctgttccagggaaaggtaagcttattaacactggccaacttggagatgttatgaaggagtcaattcaagcagccacaactgttgtaagaagcagatctaaatctcttggaattgaagaggattttcaccagaaattagatatgcacatccacgtcccagagggtgctacgcctaaggatgggcctagtgcaggtattgggatgtgcaccgctttagtctcttctttgacagagatttcagtgaaggcaaatgtagctatgacaggcgaaataacactgcgaggagaagtgctccctataggcggcttgaaagaaaaattacttgcggcacaccgaggaggaatagagacagtagttatccctaaagataatgaaaaagatttagttgaaatccccaagaatataaaggaaaagctggatattattcctgttaaatggatcgacgaggtgctagaaatagcgcttgaaaaaatgcctgaaatagcaatttcagagaccaaaacttccggatcatctaaaaacaaaccttcttctgagaaaaatttacctcattaaa

SEQ ID NO: 262930 - DNA, 814 bp, Unknown
  Bacterial polypeptide expressing nucleotide sequence isolated from the Sargasso Sea
aaaaattatattagttactcaaaaaaattctgaaatagatgatccaaaaaaaacagatgtttttatgtatggttgtgaaggtagtattttacaattattaaaactaccagatggaactgtaaaagtattagtagaaggtattaaaagagttaaaattttagactttaatgataacgacaaatttatcacttgtgattatacctattataacgatgtgttaataaaagatgaagatttatttccattagcatcaactgcgttaagacgactagaaaaactttcatccataaataaaaaaatatctaatgaaacaataaacactataaaacaattaaaagatccatcaaagatagctgataatatagcttctcatataacagcaagtatttctgagaagcaacaaatttttgagacagtagatgttaaaaaaagattaaatgccattattaaaattatggagaacgaaactagcattataggtgttgaaaaaagaattagaggaagagttaaaactcaaatggaaaaaactcaaagagaatattatttaaatgaacaattaaaagcgattcaaaaagaactaggtgaaattgaagatggcaaggatgaaactacaagtttaaataaagctatcacaaaagctaaaatgcctaaagaggtagaaaagaaatgtctccaagaacttaagaaattaaaaaatatgtctccaatgtctgcagaagcaacagtggttagaaattatttggattggatgacagaactaccttggcataaaaaaagtgaagttgatattgatctaaaaaaagcattagaaatt

SEQ ID NO: 262931 - DNA, 838 bp, Unknown
  Bacterial polypeptide expressing nucleotide sequence isolated from the Sargasso Sea
agaataatagaatttttggcagtacaaaaaagaatggaaaaaataaaaggcccaatactttgtttggttggtcctccaggtgttggtaaaacatcattaggaaagtctatagctaaagctacaaatagacagtttgtaagaatgtcattaggtggaataagagatgaagctgaaataaggggtcatagaagaacttacataggatctttaccagggaaaattattcaaatgatgaaaaaagctggaaccaaaaatccattaattttattagatgagattgataaagtaggaaatgattaccgtggcgatccgtcatcagcattgttggaagctttagatccagaacaaaatacaacttttaacgaccattatttagaggttgattatgatttgtcagatgtaatgtttgttacaactgctaatacattaaatattttacctcctttgctagatagaatggaagttattagaatacctggttacactgaagatgaaaaaattaatattgctaataaatttcttttaccgaaaacaattaaagaaaatggagttaaaactggagaaatggatttatctgatggcacaataaaagaagttattaggagctatacaaaagaatcaggtgttagaaatcttgaaagagaaatttcaaaaataacaagaaaagttgttaaaaaagttgtcaatgctgaagaaacaaacgttaaagtgaatgaaaaaaatttaatagattttcttggagttaaaaaatttaaatttggagaattagaaagtgaagataaagtgggaattgtaacaggattagcttggacggagttggaggagaaatttaaaaatc

SEQ ID NO: 262932 - DNA, 900 bp, Unknown
  Bacterial polypeptide expressing nucleotide sequence isolated from the Sargasso Sea
caattaaaagatccatctaaaattgtagataatattgtgtcaaacctaaatgcatctatatctgaaaaacaacaaatattcgaaacattggatgttaagaaaagattaaatgcagctattaagatgatggaaagtgagacaagcattattggagtagaaaaaagaattagaggaagagttaaaactcaaatggaaaaaacccaaagagagtattatttaaacgaacaattaaaagccattcaaaaagaattaggtgaaatcgaagatggtaaagatgaaacgacaaatttaaaaaaatcaattcaaaaagcaaaaatgccgaaagaagttgagaagaagtgtatgtcagagcttaagaaattaaaaaatatgagccctatgtctgcagaagcaacagttgttagaaattacttagattggatgatcgatcttccttggtttaaaaaaaatgatgtagatattgatttgaataaaggcttaaagattttggatgaagatcattttggtttggagaaggtaaaagagagaattatagaatttctagctgttcaaaaaagaatggataaaattaaaggaccaattttatgtttagttggaccaccaggtgttggaaagacatcacttggaaaatcaatagctaaggctactaatagacagtttattagaatgtcattgggaggtgttagagatgaagcagaaataagaggtcatagaagaacatatattggatctttacctggaaaaataattcaaatgatgaagaaagctggtacaaaaaatcctttatttttattagatgaagttgataaaatcggaaatgattacagaggagacccttcttcagctttattagaagcattagatccagaacagaatacagcctttaatgatcactattag

SEQ ID NO: 262933 - DNA, 875 bp, Unknown
  Bacterial polypeptide expressing nucleotide sequence isolated from the Sargasso Sea
aatgaaaggtaataaaaaaattatattagtaactcaaaaaaatgctgaaatagatgatccaacagaaaaagatgttttctcttatgcttgcgaaagtaatattttacaattattaaaattaccagatggaacggttaaagttttagctgaaggcatgagaagagttaaaattgcagatctaaagaataatgaaaactttatgtcttgctcgtttgtttatgtaaatgattatactcctaaagaagataatttattaccattagcactaacagcaattaagaaattagaaaagttaactgcaataaataaaaaagtatcaagtgaaataattaataatattaaagaattaaaagaaccgtcaaaaatatgtgacaatattgcttcacatttgaattctactatatctgaaaaacaaaaactatttgaaacccttgatgttagcaaaagactaaatgaagttattaaaattatggataacgaagctagtataattggtgttgagaaaagaataaggggcagggtaaaaactcaaatggaaaaaacacaaagagagtattacttaaatgaacagttaaaagctattcaaaaagaacttggagaaatagaagatggcaaagacgaaacatctaatttaaataaactgattttaaaagctagaatgcctaaagaagttcaaaaaaaatgtttagctgaactgaaaaaattaaaaaatatgagtccaatgtcagctgaagcaactgttgtaagaaattatttagattggatgattgatattccttggtataaaaaatctgaggtcgatatagatttgataaaagcaacaaaaactcttgatgaagatcattttggattggataaagtaaaagagagaatta

SEQ ID NO: 262934 - DNA, 807 bp, Unknown
  Bacterial polypeptide expressing nucleotide sequence isolated from the Sargasso Sea
gatggagaagacgcagcgcgagtactatctaaacgagcagctcaaagcgattcagaaggagcttggtgagacagaggacggacgcgacgaagctggcgaattcgaagagcgcatcgaaaaaacgaaactgtcgaaggaagccaaggaaaaggcgctgcaagagctgaagaagctcaaaagcatgagcccgatgtccgcggaagccaccgttgtgcggaattatctagactggatgcttagcattccgtggggcaagcggtcacgggtgaagaaagacatcaaggccgctgaaaagatcctgaaccaggatcattacggtctggaaaaggtaaaagagcgcatcctggaatatctcgccgtgcagatgcgcgtacgcaagatcaaggggccaatcctttgcctggtaggacctcccggcgtaggtaagacttcgctcggtaagtccgtcgccacggcgacggggagaaatttcgtgcgcatgtcgcttggcggtgtgcgggacgaagcagaagttcgcggccaccggcggacctatatcggctccatgcctggcaaggtcattcagggcatgaagaaggccaagacttcgaacccgctgttcctactcgacgagattgacaaactcggcgctgactggcggggcgatcccagttccgccttacttgaggtgctggatcctgagcagaataacacgttcgcggatcattacctggaagtcgattacgacctctctgatgtgatgttcgtgaccacagcgaatacgctccgcatgccgcaaccgctgctcgaccggatggaaaatcatcc

SEQ ID NO: 262935 - DNA, 880 bp, Unknown
  Bacterial polypeptide expressing nucleotide sequence isolated from the Sargasso Sea
tcagagattaaaaagctcaaaaatatgtctcctatgtcagccgaggcaactgtaatcagaaattatttagactggatcctctcagtaccatggtcaaaaaagagtagattaaaaaataatctagcagaagcccaaaaagttctagatggcgaccattttggaattgaaaaagttaaagaaagaataatcgaatatcttgctgttcaaaaaagaactggaaaaattaagggtccgcttctttgtttagttggccctccaggtgtaggaaaaacttcattaggcaagtcaattgcgaatgctacaggaagaaagtttgtaagaatgtcattaggtggtgttagagatgaagctgaaattagaggtcacaggcgaacatatataggttcaatgcctggaagaataattcaagctcttaaaaaagccggtactaataacccactaatattgttagatgaagttgataagttaggtgctgattggaggggagacccaagttctgcgttgttggaggttcttgatcctgagcaaaataatacatttcaggaccactatttagaagttgattgtgatttatctaacgtaatgtttgtaactacagctaattctcttaatatgcctaaaccacttttagatagaatggaaattattagactttcaggctacacagaacttgagaagcttgaaattgctaaatcacatcttcttcctaaggttattaaagatcacgctctcaagaaagaagagttttctctttctgatagagaaatgttagaggtaataagatcttatacaagagaagctggtgtaagaggtttagaaagagaaatatcaaaattatcaagaaaactaattactgagatactattaaacaagaaaaaga

SEQ ID NO: 262936 - DNA, 897 bp, Unknown
  Bacterial polypeptide expressing nucleotide sequence isolated from the Sargasso Sea
cttgatagagaccactatggcttggaaaaagtaaaggaacggatcctggagtacttggcagtgcagcaaagagttagcaagatgaagggtccgatcttgtgtttagttgggccccctggggttgggaaaacttccctcggtaagtctatagctaaagcaaccaaccgaaaatttgtacgaatgtcccttggaggagttcgggatgaggctgaaataaggggtcacaggaggacctatgtcggttcattgcctgggaagataatacaaaatatggcgaaagcgggtacgaaaaacccacttattttgctggacgaaattgataaaatggcaatggattttaggggggatcctgcatccgccttgttggaagtcttagatcctgagcagaacgataccttcaatgatcactatttggaggttgatttcgatctgtccgacgcgatgtttgtcacaaccgctaacactcttgaaattcctgggcctttaaaagacaggatggagataattcgtatatccggctacacagaagaagaaaaatctcacatagcagatagattcttaattcccaaacaggtcgctaacaatggcttgaagggctccgaattgaaatttggaaaaccagcggttctcgaaataattcggcattacacgcgagaggctggtgtaagaggcttagaaagagagatttcctctgtttgtcgtaaaatagttaggcagctcgttaaaaaggcgtctactgctaaagtatcagtgaccccgaagtcccttgagaaatttttgggggtaaaaaaattccggtacgggttggctggggataagaacagggttggtcaggttacaggactagcatggacgcagacaggaggagatcttctcactattgaggcggtcgctctt

SEQ ID NO: 262937 - DNA, 733 bp, Unknown
  Bacterial polypeptide expressing nucleotide sequence isolated from the Sargasso Sea
ccagtacaaataaacatgttaagcttaatgaagaaaaaacttaaagaatttttaggtgtaagcagatttagatctagtgaaattgaaaagaaaaatttaattggtgtaacaaacggacttgcttggacagaggtaggcggtgaaattttgtccatagaagttatattatcgatcggtaaagggaagttgaccattacaggaaaacttggtgaggtaatgagagaatcagtacaggctgcaatttcatatgttaaatcgcacagtttaaatctaggtatacatccatttgattttgacaaatttgatattcatgtacatgttcctgaaggagctactccaaaagatggtccaagtgcaggaatagcaatttttaactctctagtatcgtctttaacatcaaacaaagtaagaaaagatgttgctatgacaggagaaattacattaagaggcagagttcttcctataggtggacttaaagaaaaaatatatgctgctacgagagcaggaataaaaaaagtattaattccggaagaaaataaaaacgaaattatagaatttgataaagaaattcttaaaacaattaaaataatccctataagtgaggcaaagtcaattttagagcatacacttactaagccagtttcacctctaaatttgaccgaatcagaaatacttgaagtccaaaaaaatagattttctgagactaatccaaaagaaaatctaagacattaat

SEQ ID NO: 262938 - DNA, 916 bp, Unknown
  Bacterial polypeptide expressing nucleotide sequence isolated from the Sargasso Sea
ttctatgatgaagatttatttccattggcagctacagctttaagaagactagagaagctaacatctattaataaaaaaatttctaacgaaacaataaatacaattaagcaactaaaagacccatctcaaattgcagataatatagctgcacatatagcagcttcaatttctcaaaaacaacaaatttttgaaactaacgatgttaaaaaaaggttgaatgcgataattaaaatcatggaaaatgaaaccagtataattggtgttgagaaaagaattagaggtagagttaaaactcaaatggaaaaaactcaacgtgagtattatttaaatgagcaacttaaagcaattcaaaaagaactaggcgaaattgaagacggtaaagatgagacaacaagtataaataaagcaatcgctaaagctaagatgccaaaagatgtggaaaaaaaatgtcttcaggaattaaaaaaattaaaaaatatgagtcctatgtcagccgaagctactgtagtaagaaactatttggattggatgacggaacttccatggcatagaaaaagtgaggttgatatcgatttggcgaaagcgcaaaatactttagacaaggaccattttggcttagaaaaaattaaagaaagaatagtagagtttctagcagtccaaaaaagaatggaaaaaattaagggaccaatattatgtttagttggaccacctggtgtaggtaaaacctcactaggaaagtcaatcgctaaagcaactaatagagaatttgtgagaatgtcagttggaggcatgagagacgaagctgaaatcagaggtcacagaagaacttatatcggttcacttcctggaaaaatcatccagatgatgaaaaaggctggaactaaaaaccctttaattttattagatgagattgata

SEQ ID NO: 262939 - DNA, 784 bp, Unknown
  Bacterial polypeptide expressing nucleotide sequence isolated from the Sargasso Sea
gaagtaaaagagagaattgtagagtatcttgctgttcaaaaaagagttaaatcaatgaaagctcctgtcttatgtttagttggccctcctggagtaggtaaaacttctcttggcgaatcaattgcaagggcaacaaatagaaagtttgtaagaatgtctttaggtggagtaagagatgagtcagaaattagaggacatagaagaacatatataggttctatgcctggaaaaataatacaaaaactttctaaagtaggcgtcaaaaatccattattcttacttgatgaaattgacaaaattggaatggatcacagaggtgatcctgcttcagcattattagaagttcttgatccagagcaaaataatacatttagtgatcactatttagaagttgattatgatttatctgaggttatgtttgtgtgtacagcaaatagtcttaacattcctacacccttactagatagaatggaaataattcgaatacctggttatatagaagacgaaaagataaatattgctaataaatatcttcttccaaaacaaatgaatagaaacgggctcaaagagaaagaaattaaaattaatgagaatgtgattttgtcattaattagatactacacaagagaggcaggtgtgagaggtcttgaaagacaaatagctaggatattaagaaaagttgtaaaggagaggcttgttaataaaaccaagcttgaaaaagcaactacaatcacaaataaaaatcttgaaaaatattctggtgttaaaaagtttaaatatggcg

SEQ ID NO: 262940 - DNA, 819 bp, Unknown
  Bacterial polypeptide expressing nucleotide sequence isolated from the Sargasso Sea
aatgcctggtagaattattcaaagtgtaagaaaatcaggtacatctaatccagtatttgttttagatgaaattgataagatttcaagcggttctcaaggtgatccatcatctgctttgttagaattgcttgatcctgaacaaaataattcttttcatgataatttcttagaaataggttatgacctttcaaaagtaatgtttgtcgcaacggctaataatttatcaacaatgcatcctgctttacttgacagaatggaactaattaacgtatctgggtatacatctgaagaaaaagtctcaattgcaaataagtttttaattaagaaacaattatctgagcatggtatgaattcaagtaattttaaaatatctaataaaatcatcaaagagattattagtagctatacaagagaatctggagttagaaatcttgagaaacaaattgctaaacttattagaaacagagctaaaaatattgtttcaaattctaatttaaataattataatgatgaaaattatctaaagaatgtcttgggacctcagaaattttttagagataaatatgaaaacaataattttgcgggtgtagttacaggtcttgcatggacttctgtaggtggtgaaattttattcattgaatcatcattatcagagggaaaaggaaacctctcaattactggtaaccttggaaaaataatgaaggaatctgctgttattgcattagagtatattaaatctaattatcaagatcttggaataaataaagaaattgactattcaaaatataatattcatattcatgttcctgagggagcaac

SEQ ID NO: 262941 - DNA, 937 bp, Unknown
  Bacterial polypeptide expressing nucleotide sequence isolated from the Sargasso Sea
aaacaaagtgtaataagtgtgaaaaaaagaataagaggtagagttaaaaaccagatggagaaaacacaaagagagtattatttaaatgaacaactaaaagccattcaaaaagaacttggtgagatagaagaaggaaaagacgaagtttcaaatttaaacaaggcaatattaaaagctaaaatgcctaaagacgccgaaacaaaatgtatgtctgaacttaaaaaattgaaagctatgagcccaatgtctgctgaagctactgttgtaagaaattacctagattggatgatcgacctaccttggtccaacaaaagtaaaattattaaggatttagctttagctcagaaaacattagacgaggatcattatggcttagcaaaagttaaagagagaataatagagtatcttgctgtgcaaaagagaattgaaaaactcaaaggaccaatactttgtttggttggacctcctggagttggaaaaacttctttaggaaaatcaattgcaagagctactggaagaaaatttgtcagaatatctcttggagggataagagatgaggctgaaattagaggacacagaagaacatatattggatctttacctggaaagataattcagatgatgaaaaaagctggaacaagaaatccacttttattattagacgagattgataaagttggtagtgattatagaggtgatccttcatctgcattattggaggccctagatccagaacaaaataaacagtttaatgatcattatcttgaagtagattatgacctttctgacgttttatttgtaacaaccgccaatactctaaatattttacccccattacttgataggttagaagtgatcagaattcctggttacacagaagaggaaaaagtaaatatttctcaaaagtttttaatacccaagcaaaaagtgagaacaa

SEQ ID NO: 262942 - DNA, 766 bp, Unknown
  Bacterial polypeptide expressing nucleotide sequence isolated from the Sargasso Sea
tattatttaaatgagcaaatgaaggccattcaaaaagagcttggtgagaccgaagacggggtgaatgaactggatgaaatagaggcgcagctcaaggccttaaaaatgcctaaagctgcgcttgaaaagggtgaagcagagttaaaaaagctacgaaatatggggccaatgagcgctgaggcaacagtcgtccgtaattatcttgactggatcttagcattaccgtggcgcaaatccagccggttgaagaaagatatcgacgcggctcgtgctgtcttagatgcagatcattatggtttagagaaggttaaggaccgcattgttgaatttctggcggttcaacagcgcacaaagactatgaagggcccgatactatgtttggttggcccgccgggcgttggcaagacttcgcttggcaaatcgattgctaaggccaccgggcgcaattatgtgcggatggcgcttggcggtgtgcgtgatgaagcggaaatacgtggacatcggcgcacctacataggttcattgccaggaaaaattctgcaagggatgaaaaaggctggcacgcgaaacccactgtttctactcgatgaggttgataagcttggagcggattggcgtggtgatcccacgtctgcgctccttgaagtgttagatccagcgcaaaatagcagctttcaggatcattaccttgaagttgatttcgacctatcaaacgtgatgtttatcacaacagcaaacacgttaaatatgccacaaccgttgatgg

SEQ ID NO: 262943 - DNA, 862 bp, Unknown
  Bacterial polypeptide expressing nucleotide sequence isolated from the Sargasso Sea
tttagatccagaacaaaatacaacttttaatgaccattatttagaagttgattatgacttatcagatgtaatgtttgttactactgctaacacattaaatattttacctcctttattagacagaatggaagttattagaatacctggctatacagaagatgaaaaaattaatattgctaataaatttcttttaccaaaaacaataaaagaaaatggagttaaaagtggggaaatggatttgtctgacggtacaataaaagaagttattcgtaattatacaagagagtcgggagttaggaatctagaaagagaaatttcaaagataactagaaaagttgttaagaaagttgtgaactctgaagagacaaaagttaaaattaatgagaaaaatttaacagattttcttggagttaaaaaatttaagtttggcgaattagaaagtgaaaataaagtgggaattgtaactggtttggcatggactgaatttggaggtgaaatattaaaaattgaaactgttaacatgcctggtaaaggaagaatgcaaattactggtaaacttggcgatgttatgcaagagtcagtaaaggctgccaaatcttatgtaagatctaaaagtttagattttggcattattcctcctatttttgaaaaaaaagattttcatatacacgtacccgaaggtgcaacacctaaagatggaccttctgctgggatagctatggttacttctatagtttcatcaataactaaaattccagttcgaagagaaatagcaatgactggggaagtaacaattacgggtcaagttttgccaattggtggactaaaagaaaaattacttgccgctcatagagcaggaata

SEQ ID NO: 262944 - DNA, 904 bp, Unknown
  Bacterial polypeptide expressing nucleotide sequence isolated from the Sargasso Sea
aaaagctggcactaaaaatccattaattttacttgatgaggtcgataaaattggaaacgattatagaggtgacccttcatcagccttactagaagctttggaccctgaacaaaatactagttttaatgatcattatttagaagttgattatgatctttcagatgtaatgtttgtgactacagctaatacattaaatattttaccacctttattagatagaatggaagtaataagaatacctggctatactgaagatgaaaaaattaatattgcaaataattttttgcttccaaaacaaattaaagcaaatggagttaaagataaagaatttgaagtaaccgatggaacagttaaagaaattattagaaactatacaagagagtcaggtgtaagaaacttagaaagagaaatttctaaaattacaagaaaagttgttaaaaaagttgtaaacaatgaagaaaaaaaagttgtagtagatcaaaaaaatctttctgattttttaggagttaaaaaatttaagtatggagaactagaaagcaaaaatagagtaggtatagttacgggattagcatggacagaagttggtggagagattttaaaaattgaaacagtaaacatgccgggtaaaggcagaatgcaaattactggtaaattaggagatgtaatgcaagaatcagtaaaagcagcgaaatcttttgttagatcaaaaagcttagaatatggaataattccaccaatatttgaaaaaaaagattttcatattcacgttcctgaaggagcaactcctaaagatggaccttcggctggtattgggatggttacatcaatagtttcgtctattacaaataatccaatcaatagagaaattgcgatgacaggagaagttacagtaacaggacaagtt

SEQ ID NO: 262945 - DNA, 832 bp, Unknown
  Bacterial polypeptide expressing nucleotide sequence isolated from the Sargasso Sea
atgaaattagatgataatattattaaagaggtaataagaggatacacaaaagagtcaggagtaagaaatttagaaagagaaatttccaaacttgcaagaaaagttgttaaaaaaattgtttctggtgaagaagacgaggttgaaataaagaataataatctttcagattttctgggtgttgccaaatttaaatttggtgaattagaggcagaaaatagagtaggtattgtaacaggtcttgcttggacagaatatggtggagaaattttaaaaattgaaacagttactatgcccggaaaaggtagaatgcaaattacgggtaaactcggtgacgttatgcaagagtctgttaaagcagcaaagtcttttgtaagatcaaaatgtttagaatatggaattattccaccaatttttgaaaagaaagattttcatatacatgttccagaaggtgcaactcctaaggatggaccatcagccggaattggaatggtgacatctattgtgtcttcaattacaaatatacctgtcagaagagacgttgctatgacaggtgaagttactttaacaggtcaagtattgcctataggaggattaaaagaaaaattattagcagcccatagagcaggtataaaagaggttttaattccaaaagaaaacgaaaaagatcttgtagatatgccaaagaaaattattgatgatattaaaataacacctgttgaatatgcagatcaagtaattaaaattgctttaacaaaagaacttaaacctactgagtgggttgaggttgaaatttcaaaaaaagacgataaatcacaagctagcattcaataat

SEQ ID NO: 262946 - DNA, 871 bp, Unknown
  Bacterial polypeptide expressing nucleotide sequence isolated from the Sargasso Sea
agagaatttgttagaatgtctgttggtggcatgagggatgaagcagaaatacgtggtcacagaagaacttatattggatcactaccaggaaaaattattcagatgatgaaaaaagctggaacaaaaaacccattaattctattagatgagatagataaaattggaaatgattatagaggagacccatcgtcagcattattagaagctttagatccagaacaaaatacaacatttaatgatcactatttagaagttgattatgatttatctgacgtgatgtttgtaacaactgctaatacgcttaatattttacctcctttattagatagaatggaagtaataagattagcgggttacacagaagatgaaaaaataagtattgctgataaatatttattaccaaaacaaattaaagataatggtgtaaaagaaaaggaaatgaagttagatgatgatatcattaaggaagttataagaggatacacaaaggaatcaggtgttaggaatcttgaaagagaaatttctaaactagctagaaaagtggtaaaaaagattgttgctggcgaggaaaatgaggtaagaataaacaataaaaatttacctgattttttaggagttcctaaatttaaatttggagaactagaaactgaaaatagagttggtatagtaacaggacttgcttggacagagtatggtggtgaaatattaaaaatcgaaactgttacaatgcctggtaagggcagaatgcaaatcactggtaaattaggtgatgttatgcaagagtcagttaaagctgccaaatcttttgtaagatcaaaatgtttagaatacggtattattccacctgtattgaaaaaaaagacttccatat

SEQ ID NO: 262947 - DNA, 518 bp, Unknown
  Bacterial polypeptide expressing nucleotide sequence isolated from the Sargasso Sea
atttgttgaatcaacaatttctaaaggaaaaggaaatttatctttgactggaaatcttggtaaagtcatgaaggagtctgcaactatatcacttgaatacataaaatctaatgcaaaattattgaaaattaaagaaaacatatttaatgattataacttccatttacatgttccagaaggagccacacctaaagatggtccgagcgcaggtgtaacaatgattacatctttagtttcacttttatcacaaagaaaagtgaaaagtaaattggcaatgacaggcgaaataacattgagaggtaaagttttacccgtaggcggaataaaggaaaaaatattagccgccaaaagagcaaaaataaattcgataatattacctgctgataacaaaaaaaatgttgatgaaattgataaaaagtatctcaaaggtttgaattttttctatgttgaaaatattttagaggttgtagaatatgctctactaagaaaaaaagtttctaattttaaaaaattataat

SEQ ID NO: 262948 - DNA, 835 bp, Unknown
  Bacterial polypeptide expressing nucleotide sequence isolated from the Sargasso Sea
cttgtaggtccaccaggtgttggaaaaacttcattgggcaaatcgatagctagagcaacaggaagaaaatttgtaagaatatctctaggaggcattagagacgaagcagaaataagaggccatagaagaacatatataggatctttaccaggaaaaattattcaaatgatgaaaaaagctggaacaaaaaatccattatttttactggatgaaatcgataaggttggtagcgattacaggggcgacccatcatcagctttgttggaagcattagatccggaacaaaataaacaatttaacgatcattacctcgaagtagattatgatttatctgatgtaatgtttgttactactgctaacactttaaatattttaccgccattactcgacaggttagaagttattagacttcctggatataccgaagatgaaaaaataaatatttcacaaaaatatttaatccctaaacagagagaaaataatggacttaagaaagaagagtgggaggtaacaaaagagattaacaaaacaattattagagattatacgagagaatcaggcgtaagaaaccttgaaagagagttgtcaaaaattgccagaaaaattgttaaaaaaattgactctaaggaaaaggtaaatacaacaattgaagacaaggaccttcaaaattttttaggtgttaaaaaatataattttggtgaaattgaaaatgaaaacaaggttggtgtagcgacaggtttagcctggactgaggtcggaggggaaatattaaaaatagaatcagtaaatatgccaggaaaaggcaaaatgcaatcaacaggtaaactgggagagg

SEQ ID NO: 262949 - DNA, 935 bp, Unknown
  Bacterial polypeptide expressing nucleotide sequence isolated from the Sargasso Sea
taatattgggtcacacatcacagctacgatttctgagaaacaacaaatttttgaaacagctgacgttaaaaaaagattaaacgcaatcataaaaataatggaaaatgaaacaagtattattggtgttgaaaagcgaattagaggaagagttaaaactcaaatggagaaaactcaaagagaatattatttaaatgagcaacttaaggcaattcaaaaagaattaggtgaaattgaagacggtaaagacgaaaatacaagtttaaataaatcaattctaaaagcaaaaatgcctaaagaagttgagaaaaaatgtcttcaagaacttaaaaagttaaaaaatatgagtccaatgtcagcagaggcgactgttgtaagaaactatttagattggatgatagatcttccatggcataaaaaaagtgaagtggatatagatttagcaaaagctttaaatattttagataaggatcattttggtttagagaaggtaaaagagagaataattgaatttttagctgttcaaaaaagaatggaaaaaataaaaggtccaattttatgtttagttggccctcctggtgttggaaaaacatctttaggtaaatcaatagctaaagctactaatagagagtttgttagaatgtctgtaggtggaatgagagatgaggctgaaattcgaggacatagaagaacctacattggatcattaccaggaaaaattattcaaatgatgaaaaaagctggtactaaaaatccactaattttattagatgaaattgataaaattggaaatgactatagaggtgacccatcctcagcattattagaagctttagatccagaacaaaatacaacatttaatgatcattatcttgaagttgattatgatctttctgatgtgatgtttgtaactactgctaatacattaaatatcttgc

SEQ ID NO: 262950 - DNA, 892 bp, Unknown
  Bacterial polypeptide expressing nucleotide sequence isolated from the Sargasso Sea
aatgatggaaagtgaaacaagtatcattggagtagaaaaaagaattagaggaagagttaaaactcaaatggaaaagactcaaagagaatattatttaaacgaacaattaaaagcaattcaaaaagaactaggtgaaattgaagacggcaaagatgaaactactaacctaaaaaaatcaattcaaaaagctaaaatgccaaaagaagtcgagaagaagtgcatgtcagagcttaagaaattaaaaaacatgagccctatgtctgcggaagcaacagttgttagaaattacctagactggatgattgatcttccgtggtttaaaaaaaatgatgtagatattgatttaaataaaggtcttaaaattttagatgaagatcattttggtttagaaaaagttaaagagagaattattgagtttctagcagttcaaaaaagaatggaaaaaattaaaggaccaattttatgtttagttggacccccaggagttggaaaaacgtcacttggaaaatctatagctaaagctactaacaggcagtttattagaatgtcattaggaggtgttagggatgaagcagaaataagaggccatagaagaacatatattggttcgttaccaggaaaaataattcaaatgatgaagaaagcaggcacaaaaaatcctttatttttattagatgaagtagacaaaattggaaatgattatagaggagatccatcctcagctttgttagaagctttagaccctgagcaaaatactgcatttaatgatcactatttagaagttgattatgatttgtctgatgtaatgtttgtaacaacagcaaatactttaaatattttacctccacttttagatagaatggaagttataagaattcctggatatacagaa

SEQ ID NO: 262951 - DNA, 861 bp, Unknown
  Bacterial polypeptide expressing nucleotide sequence isolated from the Sargasso Sea
ggaagtaataagaattcctggctatacagaagatgagaagataaatattgccaataaatacctattgcccaaacaggttaaagaaaatggtgtaaaagatggagagctaaacctagaggatggaacaataaaggagataattagaagttacacaagagaatctggtgttagaaatttagagagagaaatttcaaaagtaacaagaaaagttgttaaaaaagtagtaaatggagaagttgaaaaagtaaaagtaaatgacaaaaatattccagactttttaggaattaaaaaattcaaatttggtgaagttgaagataaaaataaaactggaatagtgataggactggcatggactgaggtaggaggtgagattcttaaaatcgaaactgttaatatgccaggtaaaggtagaatgcaaattacaggaaaactaggagatgtgatgcaagaatctgttaaagctgcgaaatcatatgttcgatctaaaagtttagagtatggaattattccacctttttttgagaaaaaagattttcatattcatgtccctgaaggagctacacctaaagatggaccatcagctggtatagcaatggttacatctatagtttcatctattacaaatattccagtaaatagagagattgctatgactggtgaggtaacaattacaggacaagttttacaaattggtggtttaaaagagaaattactagctgcacacagagcaggggttaaaaaagtattaatacctaaagaaaatgaaaaagatttagtagatatccctaaaaaagtaagagaagacattaaaatcatacctgtagaaacggcagatgaagtgcttaaaattgctcttactaa

SEQ ID NO: 262952 - DNA, 856 bp, Unknown
  Bacterial polypeptide expressing nucleotide sequence isolated from the Sargasso Sea
aggtgacccttcgtctgctttacttgaagctttagatccagaacaaaacaaacagtttaacgatcactatttagaggttgattacgatctttcagatgtaatgtttgttacaacagcaaatacattaaatattttacctcctttactagataggctggaagtaattaggttgcccggttatacagaagacgaaaaagtaaatatttcgcaaagatttttaatacctaaacaaagtgaaaataatggtttaaaaaaagatgattgggaaatcagcacagatgtaaacaaaaaaattatcagagactatacaagagagtctggtgttagaaatttagaaagagaaatatctaagatcgcaagaaaaattgttaaaaaaatagattcaaaagaaaaaattaataaaaccttaagtgaaaatgaccttcaaggctatttaggagtaaaaaaatataattttggcgaaatggaaagtgaaaataagattggggtagcaacaggtttggcctggaccgaagttggcggagaaatattaaagatagaatcggttaatatgccaggaaaaggaaaaatgcaaagcactggtaagctaggagaggttatgcaggaatctataaaagctgcaaaatcatacgttagatctaaatcattagattttggaataataccaccgatttttgagaaaaaagattttcatatacacgtgccagaaggcgcaacaccaaaagatggtccatcagcaggtatagctatagtcacttctattatttcatcaataacaggtgttccggttaacaaagatgttgctatgactggcgaagtaactttaagaggaaatgttctgcagattggcggattg

SEQ ID NO: 262953 - DNA, 430 bp, Unknown
  Bacterial polypeptide expressing nucleotide sequence isolated from the Sargasso Sea
tgatattcatgttcatgttccagaaggagcaacccctaaagatgggccaagcgctggagtggcaatatttaactctttagtatcttctatgacttcaaacaaagttaaaagagatgttgcaatgactggtgaaataacgttaaggggaagagttttgcctattggagggttaaaggaaaaaatttacgccgcagcaagagctggaatacggactgtgttaattcctgatgaaaacaaaaatgaaataaaagagcttgataaagaagtacttaaaaatataaaaataattccaatttatgaggcgaaatctatacttgaatacactctcactaaacctattaatcctctaaatataagcgaatcagaattattagatgctcaaaaaagctcacaaattgaaaataatattaaggaaaatctaagacattaa

SEQ ID NO: 262954 - DNA, 692 bp, Unknown
  Bacterial polypeptide expressing nucleotide sequence isolated from the Sargasso Sea
ccttggtgtgccaaaatttaagcattctgaaattgaagataaagatttagttggaattacaactggtcttgcctggactgaagttggtggagagttattaacaattgagtctgctctatcgcctggtaaaggaaagatatcttctactggaaaacttggtgaagttatgaaagaatcaattcaagcagcagaagcatttgtaaaatctagagctaatttatttggtattagttttaaagatattgaaaagtcagatattcatctgcacgtccctgagggagcaactccaaaagatggtccttcagcaggtgttgcaatgataacatctatcatatcctcattaactggtaatcctgtgaagcatttagttgcaatgacaggtgaaatgacactcagaggtagagttttaccaattggcggattaaaagaaaagcttttggcagcttctagaggagggattaaaaccgttataattcctaaagaaaatgagaaagatttgtctgaaatcccagaaaatattaaagatggattagatatcaaaccaatatctgtagttgatgaagctcttgagatagcattgttaaaccccctgattcctatcaaggaagttcataaagataaacaaaagtctacagatgaaagtattaatgtacagtctactgtttcaaaaaatgagattacagcgcattaat

SEQ ID NO: 262955 - DNA, 790 bp, Unknown
  Bacterial polypeptide expressing nucleotide sequence isolated from the Sargasso Sea
attaaatttaatacaaaaattttaaaccaaattatacgaaattatactagagaagcaggtgttcgaagtcttgaaaaagaaatctcaaaaatctgtagaaaaacagtaaaaattttagaaacatcaaataaaaataaaattacattagactcctctaaattaacttcttttcttggagtttcaaaatttagacaaaatgaaatagaaaaaaaacatctcgttggaattacaaatggactagcatggactgaagttggtggtgaaatactatctattgaagtcttattatctattggaaaaggtaagcttacaatcactggtaaattaggcgatgttatgaaggagtcaatacaagcagcatgttcatatgttagatcaaaatctataacacttggaattcatccaaatgactttgataaatatgacattcatatacatgttcctgaaggagctactccaaaagatggcccaagtgctggtattgctatttttaactctctcgtttcttctctaacaaataataaagttagaaaagatgttgcaatgactggagaaattactttaagaggtcgtgtcttaccaattggaggattaaaggaaaaactatatgcagcaactagagcaggaataaaaaaagtactaatacctgaagaaaactttagagaggttagtgagtttgataaagatataattaaatcaattaaaatagttcctgtaagcgaagctatatcaattcttaaacatacattaattaagcgaagtagtaccgttaaatttgagcgaatcagat

SEQ ID NO: 262956 - DNA, 907 bp, Unknown
  Bacterial polypeptide expressing nucleotide sequence isolated from the Sargasso Sea
aaggtgttgtttgtctgcaccgctaaccaactcgacacgattcccggaccgctactcgatcgcatggaagagatccgcctgtcggggtatatcgctgaggaaaaactggcgattgccaaaaaccacttgtggccaaagctgctcgagcgccacggtgccaaaccgagtcagatccgcatcaatgacgccgccattcgtttggtcatcgatgcctatagccgggaggcaggtgtcaggggattggaaaagcggctgagttcactggtgcgagcatctattttgaagatggtggaggaaaacgcccagcgggtgcgcattggtaagcgagaggttaaagacattctcggtcaggcgcgattcaagcccgagcgtgctcagcgcggcagaggtgttgtcacggggctcgcttggaccgcgatgggcggggcgacgcttagcattgagtcttccaagatccataccctgaggcggggcttcaagctgaccggtcagctcggcgaggtgatgaaagagagcgccgagattgcctacagctatatcgtggcacatctccgggagttcggttgcgagacagatttttttgatatgtcgatggtgcacctgcatgtgcctgagggggcgacgccgaaggacggccccagtgccggcgtcaccatggcgactgcgctagtgtcgctggcgcggggggagcgcttaccccggcctctggccatgacgggagaactgacgctcacgggacaggtattggcggtgggcggtattcgcgaaaaagtgattgcggcccgacgcgcgcgcattaccgaggtcattctaccttttgctaacaaaggggattacgaggcgttgcctgattatttgcgtgagggcatcacggtgcattttgtgcgcagcttccgcgaggtattcg

SEQ ID NO: 262957 - DNA, 722 bp, Unknown
  Bacterial polypeptide expressing nucleotide sequence isolated from the Sargasso Sea
attgcaggatggcaaagacgaaatatcaaatttaaacaaatcaattctgaaagccaaaatgccaaaagaagcacaaaataaatgctttgcagaattaaaaaaacttaaagcaatgagtccaatgtccgcagaggcaaccgtagtaagaaattacttggactggatgatagatcttccgtggagcaataaaagcaagattataaaagatttaaaagctgcccaagaaattttagataaagatcattatggtcttggaaaagtgaaagagagaataattgaatttttagcagttcaaaaaagaattgaaaaattaaaaggacctatactttgtttagtcggacctcctggtgtgggaaaaacttccctcggtaaatctattgccaaagcaactggtagaaaatttgttagaatctctttaggcggtattagagacgaggcagaaattaggggtcacagaagaacatatattggatcattaccaggaaaaattattcaaatgatgaaaaaagctggttcaaaaaaccctctgtttctattagatgaaatagataaagttggaagtgattatagaggagatccgtcttcagctttactagaagctttagatccagaacaaaataaacagtttaacgatcactatctagaggtagattacgatctttccgatgtaatgtttgtgaccacagctaacacattaaatattttacctcctttgttagata

SEQ ID NO: 262958 - DNA, 850 bp, Unknown
  Bacterial polypeptide expressing nucleotide sequence isolated from the Sargasso Sea
aggaataagggatgaagccgaaatcagaggtcatagaagaacatatataggttctttgccgggtaagattattcagatgatgaaaaaagctggcactaaaaatcctctttttttattagatgagatagataaggtaggaaacgattatcgaggcgatccatcatctgctttgttggaagctttagatccagaacaaaataaagaatttaatgaccactatctagaagttgattatgacctttcagatgtaatgtttgtgactacagcaaataccttaaatatattacctcctcttttagacaggatggaagttataagactttcaggatacactgaagacgaaaaagtaaatatttctcaaaaatttttaatacctaatcaaagtaaaaataatggattacaaaaaaatgaatggaacttggatgaaaaagtaataagaaaaattgtaagacactataccagagagtcgggagtaagaaaccttgaaagagaaatatctaaaattgccagaaaattggttaaaaaaattgataacagcgaaaaagtaaataacccagttgatgataaagatctgaaagatttactaggagttcaaaaatttaattatggagagatcgaagaagaaaatagagttggagttgttactggtttagcttggactgaggtaggtggtgaaattttgaaaatagagtctgcaattatgccaggtaaaggaaaaatgcaaattactggtaaacttggagacgtgatgcaagagtcagttaaagcagctaaatcatacatcaggtcaaaaagtctagaatttggtatcataccaccaatatttgataaaaaagattttcatatccat

SEQ ID NO: 262959 - DNA, 841 bp, Unknown
  Bacterial polypeptide expressing nucleotide sequence isolated from the Sargasso Sea
tttctggacccggaacagaatcacactttcatggatcattatctcgaggttgaattcgatctttcggatgtccttttcttctgcacggccaatgtggcacaggatattccgcctgcactgcaggaccggatggaagtcatcaatctttcgggatataccgaactggaaaaagtccacattttgaaaagacatttgttgccgaaacagatcgaggaaaacgggctcaattcgagtctactcggatttcagaacaaatctttcgatatcatcatccaacaatacactcgtgaagccggagttcgaaacctcgaacgggaagtcgggaaaatctgcaggaagattgctaccaagttggtgatggatgaaccacagaaaaaaatctccattacaccaaaaagagtcagagagtatcttggagttccaaaatataaacatggaaaggttgaggaaaataacgaaataggcatcacttccggactcgcatggacacaagccggtggagaactgctcaccaccgaagtgaccgtgatgaaaggaaccgggaaagttcaactgaccgggaaattaggtgatgtgatgaaagaatcagctcacgctgcattgagttatgtcaggaccaatgccaaccgcctagggatttattcttcggtattcaaggaaaccgatatccatgttcacgtcccggaaggagcggtgccaaaagacgggccttccgctggagtgacaataaccacttcgttggtgagtgcttttacgggtattcctgtactccgtgaggtcgcaatgaccggcgaggtaaccctgcgtgggaaggttttaccgattggcgggttgaaagaaa

SEQ ID NO: 262960 - DNA, 625 bp, Unknown
  Bacterial polypeptide expressing nucleotide sequence isolated from the Sargasso Sea
cttgatgttatagatgttgaaaagagaataaggtcaagagttaagaagcagatggaaaaatctcagagagaatactatttaaatgaaaagattaaagctgcccaaaaagagcttggtgagatgggagaagagggagatgagtttgaggtattaaaaaataaaattgaagattctgggatgtcaaaagaagcaatgaaaaaagccaagagtgagttctcaaaatttaaaatgatgtctccaacttctgccgaggcttcggtagttcgctcatatcttgagtgtttaattgacgttccatggaaaaaaagaggaaaagttaaatcagatatcaaggctgctctagaaacccttaatgatgatcattacggtcttgaagaggtaaaagatagaattttagagtaccttgcagttcaaaaaagagtgaaaaatcttaaagccccagttttatgccttgtaggacctcctggcgtaggtaaaacatctcttggagagtctatagcaagagctactaacaggaagtttataagaatgtctcttggtggtgtaagagacgaagctgaaataagaggccatagaagaacatatattggttctatgccagggaaaataatccaaaaactaacaa

SEQ ID NO: 262961 - DNA, 868 bp, Unknown
  Bacterial polypeptide expressing nucleotide sequence isolated from the Sargasso Sea
aatgagcaactgaaagcaattcaaaaagaacttggagaaattgaagatgggaaagatgaaactacaagcataaacaaagcaatcactaaagctaagatgcctaaagatgtagaaaaaaaatgtcttcaggaattaaaaaaattaaaaaacatgagtcctatgtcagctgaagctactgtagtaagaaattatttagattggatgacagaacttccatggtataaaaaaagtgaagttgatattgatttggcgaaggcacaaaatattttagacaaggaccattttggcttagaaaaaattaaagagagaatagttgagttccttgcagttcaaaaaagaatggaaaaaattaaaggaccaattttatgtttagttgggccaccaggtgttggtaaaacttcattaggaaagtcaattgctaaagcaactaatcgagaattcgtgagaatgtctgttggaggcatgagagatgaagctgaaatcagaggccatagaagaacctatataggctcactaccaggcaaaattattcagatgatgaaaaaagctggaacaaaaaatccattaattttattagatgaaattgataaaataggaaatgattatagaggagatccttcatctgctttattggaagctttagatcctgaacaaaacacaacctttaatgaccattatttagaagtagattatgatctttcagatgtaatgttcgttacaactgcaaatacattaaatattcttccgccattattagatagaatggaagtcattagactagctggttatacagaggatgaaaaaataaatattgctaataaatatttgttacctaaacaagttaaagataacggtgttaaagataaag

SEQ ID NO: 262962 - DNA, 870 bp, Unknown
  Bacterial polypeptide expressing nucleotide sequence isolated from the Sargasso Sea
gaagaaaaaaaaacatctaatccgattattttactagatgaaattgacaaagtaggtagtgactggagaggtgatccatcctctgcattgttagaagtgctagatccagagcaaaataaccagtttaatgaccattatcttgaggttgattatgacctatcaaatgtgatgttcatttgtactggtaacacctacaacatacctggcccactacttgacagattagaggtcattgaagtgtctggttacacagaaaaagaaaaagttgaaatcgcaaaaaaatatttaattccaagaaaaatgaccaagaatattttaaaaaatagtgaatttaaacttgataaaagttcaattactaaaattgtaagacactataccagagagtcaggtgtcagagcacttgaaaaagtttttgataagctttttagaaaacttgtatttcaattagaaaaaaacaaatcaagatcaaaaaagccatttgtttttgatgataaggctataaaaaattttttaggcccagagaaatttaaagatagtgttttagaaaagaaaaatttagttggaattactaatgggttagcgtggactcaggttggtggagacatcttaaatattgaagttaatttatcatcaggcaagggaatgattaacgcaacaggtaaacttggtgatgtgatgaaagagtctattactgctgctttaggttatatcaaatctaactctgttgagtttggtgtaaatccaaaagttttcgataaaatagacatccatttacatgtacctgagggagctatacctaaagatggtccgagtgctggaataacaatatttacctcattaatttcatctcttactgatattaaaattaaa

SEQ ID NO: 262963 - DNA, 882 bp, Unknown
  Bacterial polypeptide expressing nucleotide sequence isolated from the Sargasso Sea
ttggtatggatcatagaggggacccagcatctgctttgctagaggttcttgatcctgaacaaaacaataccttcagtgatcactatcttgaggttgactacgacttgtcagaagttatgtttgtttgcactgccaatagcttgaatattccaacacctcttttagatagaatggaaattatcagaattcctggttacatagaggatgaaaaaattaatattgcagaaaagtatctattgcccaagcaaatgaaacgaaacggattgaaggatgaagaaattaagttaaacaaaaatgtaattctttcattgattagatactatactcgagaggctggtgttagaggtcttgaaagacaaatagctagaattttgagaaaagttgttaaagaaaggttggtagatagctcaactaaacaaaaacctacatctatttcatctaaaaatcttgaaaaatattctggagtgaagaagttcaaatatggagttgcagaaaaagataatgctgtgggacaagtcaccggcttagcatggactgaagtagggggcgaacttttaacgattgaagcttcaaatattgatggtaaaggaagagttattaaaactggttctttgggagatgtaatgcaggaatcaatacaagcagctctcacagtagtccgttcaagagctgaatctcttggaattcaaccaaatttttatgagaaatatgatgtacatattcatgtcccggaaggagcaactcctaaagacggtccaagtgctggtggtgcaatggctatctctttaatttcaatctttacaggcatcccagtcagagcagatactgcaatgactggagaaataacattaagaggccaaattttaaaaattggggattaaa

SEQ ID NO: 262964 - DNA, 876 bp, Unknown
  Bacterial polypeptide expressing nucleotide sequence isolated from the Sargasso Sea
attttatgtcttgttggaccacctggtgttggtaaaacttctttaggaaaatctattgctaacgcaactggcagaagcttcattagaatgtctttgggaggtgtaagagatgaagcggaaatcagaggccatagaaaaacttatattggttcgatgccaggaagatttattcaagcaatgaaaaaatcaaaatcatcaaaccctcttatacttcttgatgaaattgataagttaggatcggattggagaggtgatccttcttctgctttattagaggttcttgatccagaacaaaataataaatttaacgatcactaccttgagttagattatgatttatctgatgtaatgtttgtctgtactgcaaatactctaaatataccagcagctcttcttgatagaatggaagtaataagaatacccggctacactgataaagaaaaaaatcaaatcgcacaaaaatatcttattccaaagcaaattaaaaatcatgctcttaaaaaaaatgaattgaaatttaacactacaattataaatcaaataattagaaattacacaagagaagctggtgtaagaaacttagaaaaagaaatatctaaaatatgtcgtaaggcagtaaaaattattgaaacttcaaataattcaaagataaatctagatagcaagaagcttcaagatttattaggtgttataaaatatagatcaaacgagatagaaaagaaaaacctagttggaattacaaatggattggcttggactgaggtaggaggtgaaatactatctatcgaagttcttctttctttaggtaagggcaagcttactattaccggaaaacttggcgaagtaatgaaagagtcaattcaggcggccacatca

SEQ ID NO: 262965 - DNA, 750 bp, Unknown
  Bacterial polypeptide expressing nucleotide sequence isolated from the Sargasso Sea
gatgtttattacaactgcgaatactttaaatattttacctccattactagataggatggaagttattagactacccggttacacagaagatgaaaaagttaacatttcacaaaaatacttaataccaaaacaaagagagaataatggtttaaaaaaaggtgagtggggaattaatgaggaagtgaatagaaaaattataagaaattatacaagagaagctggtgtaagaaatttggaaagagagatttctaaaattgcgagaaaaacagttaaaaaaatcgacagtaaagaaaaaatcaatataccttttaaagttaatgacttagtagattatttaggtgtacaaaaatttaactatggagaagttgaagagcaaaatagaattggtgtcgctacgggactagcttggactgaagttggaggagaaatcttaaaaattgaatccgcaattatgcctggaaaaggtaaaatgcaaataacgggaaaacttggggacgttatgcaggagtctgttaaagccgcaaagtcctatattagatcaaaaagtttagaatatggtatcattccacctatttttgaaaaaaaagattttcatatacatgtccctgaaggcgctacaccaaaggacggcccgtctgctggaatagctattattacatcaattatttcagccatcacagaagtgccgattaataaagacgtggctatgactggtgagatcactttgagaggcgtagtcttacaaattgg

SEQ ID NO: 262966 - DNA, 968 bp, Unknown
  Bacterial polypeptide expressing nucleotide sequence isolated from the Sargasso Sea
aatgtttgtttgtactgcaaatacattgaatattccacctgcattgttagatcgtatggaggtaattagaatacctggttatacagaaaaagaaaaaaataaaatagcacaaaaatatttagtacctaaacaactactttaccatgcattacttaaaaaagaagctaaatttaatcaaaaaataatttatcaaataatcagaaattataccagagaggctggtgtaagaaatcttgaaaaagaaatttcgaaagtatgtagaaaaattgttaaaaccttagaaacatcttctaaaaaaactgtagatttagacaataaaaaacttcaagattatctcggagtaacaagatttagatcaaatgaaatagaaaaaagaaatttgataggtgtaacaaatggtttggcttggacagaagttggtggagaaattttatcaattgaagttttgctatcaattgggaaaggtaagcttacaattacaggaaaacttggagaggttatgaaagaatcaatccaagcagctacttcatatgtcagatctaaatgtttgcatcttggtattcatcctttagattttgataaatatgatatccatgttcatgttccagaaggtgcaacacctaaagatggtcccagtgcaggtattgcaatattcaattcattagtttcatctttaacatcaaataaagttcataaggatgttgcaatgacaggagagataactctcagaggaagagttttacctataggaggtctcaaagaaaaaatttatgcagcagttagggcaggaataaaaacagtaataattcctgaggaaaataaaagagaaattgttgagtttgataaagatttattaaaatctcttaaaattatctcagttagtgaggcagattcaatacttgagcatacacttataaaaccagtttgttccattgaatttgaccgaatcagaagtacttcaatctcaa

SEQ ID NO: 262967 - DNA, 873 bp, Unknown
  Bacterial polypeptide expressing nucleotide sequence isolated from the Sargasso Sea
ttatagaggtgatccatcatctgcattattagaagcgcttgatccagaacaaaatacaacctttaacgatcattacttggaggtggactatgatttatctgatgtgatgtttgttacaactgcaaataccttaaatattcttcctccactgttagacagaatggaagtaatcaggattccaggttacacagaggatgaaaaaattaatatagcaaacaaataccttttgcctaaacaaataaaagaaaatggtgttaaagaaaatgaattggatttaaaagatggaacgataagagaaataataagatcttatacaagagagtcaggtgtaagaaatttagaaagagaaatatcaaaaattacaagaaaagttgtgaagaaaattgtaaataatgagcaaaacaaagttgaagtagatgataaaaatatcaatgattttttgggaattaaaaaattcaaatatggtgaagtagaaacagaaaataaagtaggtattgtaaccggtttagcttggactgaatttggtggtgagattttaaaaattgaaactgttcatatgccaggaaaaggcaggatgcaaataactggaaaacttggtgatgttatgcaagagtctgtaaaagcagcaaagtcatttgtacgatcaaaaagtttagagtatggaataatccctcctctttttgagaagaaagactttcatatacacgttccagaaggcgcaactcctaaagatggaccttcagctggaattgcaatggttacttctatagtttcatctataacaaatattcctataaatagagaaatagctatgacaggagaagttacaataacaggacaggttttgcctattggcggtttaaaagaaaaatt

SEQ ID NO: 262968 - DNA, 823 bp, Unknown
  Bacterial polypeptide expressing nucleotide sequence isolated from the Sargasso Sea
gttttagaactcacagatataaaagcaagatgcgaatttcttataaaatcaatggaaggtgaacttgatattttacatgtagagaagaaaatcagaagtcgtgtgaaacaacaaatggaaaagagtcaaagagaatactatctaaatgaacagatgaaagcaatacaaaaagaacttggagagataggtgatgagagtaatgacttagatcagcttctaagtaaaattaaagcattaaaattacctaatgatgcaaacgataaagctatgagcgaattcaataaattgaaaatgatgtcaccaatgtctgctgaggcaacagttgttagaaattatctagacatcttagtcaatcttccttggaatcaatccacagagatatcgaccgatatgaatagagctttcaatgttctagaggaagatcatcatggtttagaaaaagtcaaagagagggtacttgaatacctggctgtcactaagagagttaataaaatcagaggtccaattttgtgtctcgtaggaccacctggtgttggaaaaacatcacttgctaaatcaatcgccagagctacttcgagaaagttcatcaaaatgtctctaggaggcgtgagagatgaggcagagatcagaggacatagaaaaacttacattggttctatgcctggaaaaatcatgcaaaatttatcaaaagtgaaaactaataacccactttttttgcttgatgaaatagacaaaatggctatggatttcaggggtgatccatcatctgcgttattagaagtcctagatccagaacaaaataatgtttttaacgatcattatc

SEQ ID NO: 262969 - DNA, 661 bp, Unknown
  Bacterial polypeptide expressing nucleotide sequence isolated from the Sargasso Sea
aaaggaccaattctgtgtttagtaggtccaccaggtgttggtaaaacttctttaggaaagtcaatagccaaagctacaggcagagaatatatcagaatggctttgggtggagttagagatgaagccgaaataagaggtcacagaagaacttatataggttcacttcccggaaaaataattcatggaatgaaaaaagcttctgcaatcaacccacttttcttattggatgaaatagataaattaggtaatgattatagaggtgatccttcctctgcgcttttagaggtgttagatccagaacaaaacaagacttttcaagatcattatctagagatagattatgacttatcaaaagtactgtttattactacctctaatacattaaatatgcctcaagctttattagataggatggaaataattagactttctggttatacggaggacgaaaaactagaaatagccaaaagacatctaataaaaaaacagatggataattgtaaactaaaagatacagaattttctattaatgaagaagctcttaaaataataattcaatcttacacaagagaggctggtgttagaagtttagagagacaattagcgaaattaactagaaaagtagttaccaaaattgaaaaaaatgaagctaaacattttg

SEQ ID NO: 262970 - DNA, 832 bp, Unknown
  Bacterial polypeptide expressing nucleotide sequence isolated from the Sargasso Sea
ctttaccggcattgttcggtactacacccgagaagctggtgtaagaaatttagagcgtgaaatctcaaaattatcccgaaagtcagttacaaaaattgtcaaaaatgagcaaaaggacattaaggttacaatggaaaacctagaagactttcttggtgtcaaaaaatttagatttggcctagccgagcaagacgaccaaataggtgttgtaacaggattggcgtggacttcggttggtggtgatttgcttcatatagaagctcttaagttgcctggaaaaggcagaatgaaaactaccggaaaacttggtgatgttatgaaagaaagcattgatgcggcaaattcatatgttcggtctatcagtgcagaagttggtatcaaaccacccaagtttgataaaactgatattcacgttcatgttcctgaaggagcgacacccaaggacggacctagtgctgggctagcaatggttacttctattgtttctgtattaaccggtattcctgttagaaaagacctagcaatgacaggagaggttaccttacgtggcaatgcacttccgataggtggtctgaaggagaagttactcgctgccctcaggggtgggattaaaacggtacttatacctgaggaaaatgaaaaggatcttgcagatataccagaaaatgtaaaatcttctttggaaattatacctgtaaaaaatgtttctgaagttttgaaaatcgctctaacggaagctccagttccaattgaatgggatgaagccgccgaagaagcagcagctgcaaaagcccttaaggaacaaaacgatagccaaacaactaaacattaa

SEQ ID NO: 262971 - DNA, 775 bp, Unknown
  Bacterial polypeptide expressing nucleotide sequence isolated from the Sargasso Sea
attgcagataatattgcatctcatataacagctacaatttctgaaaaacaacaaatttttgaaacagttgatgtcaaaaaaagattaaacaccattattaaaataatggaaaatgaaacaagtattattggagttgaaaaaagaattagaggcagagttaaaactcaaatggaaaaaactcaaagagaatattatttaaatgaacagttaaaggctattcaaaaagaacttggtgaaattgaagatggtaaagatgaaaatgctaatcttaataaagctataactaaagctaaaatgcctaaagaagtagaaaaaaaatgtcttcaagaacttaaaaaacttaaaaatatgagtccaatgtctgccgaggcaactgtagtaagaaattatttggactggatgacagaacttccttggcataaaaaaagtgaggttgatatcgatttaacaaaagctttaaatattcttgataaagatcattttggattagaaaaaatcaaagaaaggatagtagaattccttgcagttcaaaaaagaatggaaaaaattaaaggtccaattttatgtttagtcggacctcctggtgttggtaaaacttcattaggtaaatcaattgcaaaagctacaaatagagaatttgttagaatgtctgttggaggaatgcgtgatgaggctgagataagagggcatagaagaacatatattggatcattacctggaaaaataattcaaatgatgaaaaaagctggaactaaaaaccctttaattttattag

SEQ ID NO: 262972 - DNA, 946 bp, Unknown
  Bacterial polypeptide expressing nucleotide sequence isolated from the Sargasso Sea
gatattttgattaaagatgaagatcttttgccactggctcttacggctgtaagaagattagaaaaattaacctctgtaaacaaaaaaatttcatcagaaactattaacaatatcaaacaattaaaagatccatccaaaattgtagacaatattgtatccaatttaaatgcatcaatatctgaaaaacaacaaatattcgaaacattggatgtaaagaaaagattaaatgcagctattaaaatgatggaaagtgaaacgagtattattggggtagaaaaaagaataagaggaagagttaaaactcaaatggagaaaacacaaagagagtattatttaaatgaacaactgaaggctattcaaaaagaattgggtgaaattgaagatggaaaagatgaaacaactaatttaaaaaaatcaatccaaaaagctaaaatgccaaaagaagttgaaaagaaatgtatgtcagagctcaagaaattaaaaaatatgagccctatgtctgctgaagcaacagtagttagaaattatttagattggatgatagaccttccatggtataaaaaaaatgatgtagatattgatttaaataaaggtttgaagatcttggatgaagaccattttggtcttgaaaaagttaaagagagaattattgaatttcttgccgttcaaaaaagaatggataaaattaaaggaccaattctatgtttagttgggcctcctggagttggaaaaacatcccttggaaaatctatagcaaaagctacaaacagacagtttatacgaatgtcattaggtggagtaagggatgaagctgaaataagaggtcatagaagaacatacatcgggtcgttaccaggaaaaattattcaaatgatgaagaaagcaggtacaaaaaatccattatttttattagatgaagttgataaaattggaaacgattatagag

SEQ ID NO: 262973 - DNA, 664 bp, Unknown
  Bacterial polypeptide expressing nucleotide sequence isolated from the Sargasso Sea
tttttaggtgttcctaaatttaagtttggagaattagagtctaagaatagagtaggtatagtaacaggacttgcttggacagagtatggtggtgaaattttaaaaattgagactgttacaatgccaggaaaaggaagaatgcaaattactggtaaattaggtgatgtaatgcaggagtcagtaaaagcagctaaatcttttgtaagatcgaaatgtttagaatatggaattatacctcctatttttgagaaaaaagattttcatatccatgttcctgagggtgcaacaccaaaagatggtccttccgctggtattggtatggtaacatctatagtttcatcaatcaccaacattccagtaagaagagatcttgctatgactggtgaagtaaccttaaccggtcaagtattgccaattggtggattaaaagaaaaattattagcagctcacagagctggtataaaagaagttttaattcctaaagaaaatgaaaaagatttggtagacatgcctaagaaaattactgatgatataaaaattactccagttgaatatgctgatcaagttataaaaattgctcttacaaaagaacttaaaccaaccgagtgggttgaggttgatatatctaaaaaaggcgataaatcccaagcaagcattcaataaa

SEQ ID NO: 262974 - DNA, 834 bp, Unknown
  Bacterial polypeptide expressing nucleotide sequence isolated from the Sargasso Sea
cctgaagtactaacatcagttaaacagatagaagaccccggaaaattagcggatacaatcgcttctcaccttgcagtgaagattttggaaaaacaagaactgttagagttggaaaatatattagctaggctggaaaaagtttacgctcacatggaaggggaaattggcgttttacaagtagaaaagcgtatccggaatcgggttaagcgccaaatggaaaaaactcagcgtgaatactatctcaatgagcaaatgaaagccatccaaaaggagctgggagataatgaagacggaagcgacgaactaacagacatcgcggaaaaaatcaaaaaaactaagcttacaaaagaggctcgtgataaggcaaacgctgaactaaaaaagcttaaaaatatgagccaaatgtccgcggaagcaacggtggttagaaactacttagattggctcttgggcataccgtggaaaaagaagtctaaaataaaaaaagatctaactttagctcagtcggtattggatagggatcaccatggattagaaaaagtaaaggaaagaatcgttgaatatttagccgttcaacaaagaacagggaaagttaaagggcccattttatgtttagtagggcctcccggagttggtaagacttcattaggaaaatctattgctgagtccactggacgaaactttgttagaatgtccctcggcggtgtcagagatgaggcggaaattagaggacacaggcgaacctacataggttctttgcctggcaaaataatccatagtatgaaaaaagcgaaaacctctaaccctttattcctcttagacgaaattgataaa

SEQ ID NO: 262975 - DNA, 830 bp, Unknown
  Bacterial polypeptide expressing nucleotide sequence isolated from the Sargasso Sea
gtaaggaaaatgaaaggtcccatactatgtctggttggcccacctggcgttggtaaaacatcacttggccgttcaatcgctagagcaacacatcgtgaatttgcgcgaatgtccttaggcggcatacgagacgaggcagaaattcgtgggcacagacggacatacataggctctatgccaggaaaaattattcaaggaatgtcaaaaattggtaaaaagaacccactttttcttctggatgagatcgataaaatggcgatggattttcgaggagatccagcttctgcgttgttagaggtgttagacccagagcaaaataatacttttaatgaccattatctagaggtcgattatgatttatctgaagtaatgtttgtaaccactgcaaacagtttaaatataccagctcctctattagatagaatggaagtaataagagtttcaggttacaccgaagatgaaaaagttaatattgcaaaaaattatcttatagataaacagttggagcagaatggattaaaaaagaatgagattacaataagagatagcgctattcgagatattatcagatattacacacgtgaagcgggtgttcgtaatttagaccgtgaaatagcaaatatatgcagaaagattgtaaaaagaatattgcttaaaccttctagtaagaaaaatattgtgacatcgaaaaaactcgagtcgttgcttggagtaaaacaatttcgatatgggatgatggaagatgagaatagaattgggcaggttactggtcttgcatggacagaggtaggcggagaattattaactattgaagctgcaattgtaggagg

SEQ ID NO: 262976 - DNA, 775 bp, Unknown
  Bacterial polypeptide expressing nucleotide sequence isolated from the Sargasso Sea
tataggtgttgaaaaaagaattagaggaagagttaaaactcaaatggagaaaactcaaagagaatattatttaaatgaacaattgaaagcgattcaaaaagaattaggcgaaattgaagatggaaaagatgaaactacaagtttaaataaagctattacaaaagccaaaatgcctaaagaggtagaaaagaagtgtcttcaagaacttaagaaactaaaaaatatgagtccaatgtcagcagaagcaaccgtagttagaaattatttggattggatgaccgatctaccttggtataaaaaaagtgaagttgatattgatttaaaaaaagctttagaaattcttgacaaagatcactttggtttagaaaaagttaaagaaagaattgtagaatttttggcagttcaaaagagaatgaaaaaaatcaaaggtccaattttgtgtttagtaggacctccaggtgttggtaagacttctttgggaaaatcaattgctaaagctacaaatagagaatttgtgaggatgtctgttggaggaatgagagatgaagctgagattagaggacatcgtagaacatatattggatcgttacctggtaaaatcatacaaatgatgaaaaaagctggaacaaaaaaccctttgatattattggatgagatagacaagataggaaatgattatagaggagatccatcttcagctttactcgaagccttagatccggaacaaaatacatcgtttaacgatcattacctagaggtagattatgatctttcg

SEQ ID NO: 262977 - DNA, 748 bp, Unknown
  Bacterial polypeptide expressing nucleotide sequence isolated from the Sargasso Sea
aaagcaaaaatgcctaaagatgcatcaaaaaaatgtttatctgaattaaaaaaattaaaatcaatgagtccaatgtctgctgaagctaccgtggtaagaaattatcttgattggatggtagaactaccttggagcactaaggataaaaaaatagaaaatattgatatacctgaagctaaaaaaatattggacgaagatcattatggcttagaaaaagtaaaggaaaggattttagaatatttagcggtacaaagaagagtgggaaaaattaaaggcgcaattttatgtttagttgggccacctggagttggaaaaacatcattaggaaaatcaatagcaagagctactggaagaaaatttgttagaatgtctttaggaggcataagagacgaggctgaaatcagaggacatagacgaacttatataggatctttgccgggcaaaattattcaacagatgaaaaaagcaggaacaaaaaatccactttttttattagatgaaatagataaagttggatcagactacaggggagatccatcctctgctttacttgaagctttggatcctgaacaaaatatagcatttaatgatcattaccttgaggtagattatgatctttctgatgtaatgtttgttacaactgcaaatacattaaatattttaccaccattacttgatagattagaggttataagaataccgggttacacagaggatgaaaaagtaaatatcgctaacaattatttga

SEQ ID NO: 262978 - DNA, 808 bp, Unknown
  Bacterial polypeptide expressing nucleotide sequence isolated from the Sargasso Sea
tgaatttttagctgttcaaaaaagaatggaaaaaattaaaggtccaatattatgcttagttggtccgcctggtgttggtaaaacatctttaggtaaatctatcgccaaagcaactaatagagaatttgttagaatgtcagttggaggaatgcgagacgaagcagaaataagagggcatagaagaacttatattggatcattacctggtaaaataattcaaatgatgaaaaaagctggaacaaaaaatcctttaatcttattagatgagatagataaaattggaaatgattacagaggtgacccttcttcagctttgttagaggcactagacccagagcaaaacacaacttttaacgatcactatttagaagttgattatgatttatctgatgtaatgtttgtaactacagcaaatactttaaatatattacctccattattagatagaatggaagtaataagactagctggttacaccgaagacgaaaaaattaatatagctaataaatacctacttcctaaacaaattaaagataatggtgttaaagaaaaagaaatgaaattagaagacgacatcataaaagaagtaattagaggttatactaaagagtcgggtgttagaaacttagaaagagaaatctcgaaacttgcaagaaaagttgttaagaaaattgtagctggtgaagaaaaggaagtacaaattaataataaaaacttacctgactttcttggtgtggccaaatttaaatttggtgaattagagtctgaaaatagagtaggtattgtaactggacttgcttggacagaa

SEQ ID NO: 262979 - DNA, 838 bp, Unknown
  Bacterial polypeptide expressing nucleotide sequence isolated from the Sargasso Sea
tttggtttagataaagttaaagaaagaataattgaatttttagcagtacagaaaagaatggaaaaaataaaaggtccaattttatgcttggtaggtccaccaggtgttgggaaaacttcgttaggtaaatctattgccaaagcaacaaacagacaatttataagaatgtcgttaggtggcgtaagagatgaagctgagattagaggtcacagaagaacatacataggatctcttcctggaaaaattattcaaatgatgaaaaaagctggaaccaaaaatcctttgttccttcttgatgaagttgacaaaatcggcaatgattatagaggcgatccatcttcagcattattagaggcattagatccagaacaaaatacaacatttaatgatcactatttagaggtagattatgatttatccgatgtaatgtttgttaccactgcaaatacattaaatatacttccaccactacttgatagaatggaggttattagaataccagggtacacggaagatgagaaaattaatatagcaaataaatatcttttaccgaaacaaattaaagataatggagttaaggaaggagaattaaatttaatagatggaacaataaaagagataattagaagctatacaagagagtcaggtgtaagaaatttagaaagagagatttctaaagtgacaagaaaagttgttaaaaaagtcgtaaatggtgaagaaaataatgtagaagtaaatgataaaaatatttcagaatttttaggagtaaaaaagtttaaatttggcgagctagaagcaaaaagtaaaactggtatagttataggattagcttggactg

SEQ ID NO: 262980 - DNA, 633 bp, Unknown
  Bacterial polypeptide expressing nucleotide sequence isolated from the Sargasso Sea
ggaagttaaaaaaagactaaatagtattattaaaataatggaaaatgaaactagcattattggtgttgagaaaagaattagaggaagagttaaaactcaaatggaaaaaactcaaagagaatattatttaaatgaacaattaaaagctatccagaaagaacttggagaaatagaagatggtaaagacgaaaccactaatttaaaaaaatcaattcaaaaagcaaaaatgccaaaagaagttgaaaaaaaatgcatggcagaattaaaaaaattaaaaaatatgagtcctatgtctgctgaagcaaccgtcgttagaaattatcttgattggatggttgatataccatggtataaaaaagataaagtcgatattaatttaaacaatgctcttaaaattcttgacgaggatcactatggtcttgaaaaaattaaagaaagaattattgaatttttagctgttcaaaaaagaatggataagattaaaggtccaattttatgtttagtcggtcctcctggtgtaggaaaaacatctttaggaaaatctatagcaaaagcaactaacagacaatttattagaatgtcacttggaggagttagggatgaagctgaaataagaggtcatagaagaactta

SEQ ID NO: 262981 - DNA, 823 bp, Unknown
  Bacterial polypeptide expressing nucleotide sequence isolated from the Sargasso Sea
aaaacagatgtatttatgtatggatgtgaaagttctatacttcaattacttaagttgccggatggtactgtaaaagtattagttgaaggattaaaaagagtgaaaattactgattttaaagatgacgaaaaattcatttcttgtacttatgaatacaataacgatgttattaataaagatgaagatctaatgcctttagcaattactgctgttagaagattagaaaagttaacatctataaataaaaaaatttcctctgacacaataacaaatattaaagaattaaaggacccaattaaaatagtagataatattgcttcacacttaaatgcttcaattctagaaaagcaacaaatttttgaaacaactgatgttaaaaagagactaaatggtgttataaaaattatggaaagcgaagctagtattattggtgttgaaaaaagaattaggggaagagtcaaaacacagatggaaaaaacacaaagagaatattatttaaatgagcaattaaaagctattcaaaaagaattgggagagattgaagatggcaaggatgaaacatctaatcttaataaagctattctaaaggctaaaatgcccaaagaagttcagaaaaagtgtatgtcagaattaaaaaaattaaaaaatatgagcccgatgtcagcagaagcaactgtagtaagaaattatcttgattggatgatagatttaccatggtttaaaaaagataaagtagatatagatttgaataaagctttaaaaactttagatgaagatcactacggtttagaaaaagttaaagaaagaattatagagtttctgg

SEQ ID NO: 262982 - DNA, 843 bp, Unknown
  Bacterial polypeptide expressing nucleotide sequence isolated from the Sargasso Sea
gaggctcttgctaaaaatttaaagaactcattcattgaattaataaaaatatctccaaatttaaacgaagagcatgctggaatgttatctaatatagatcgaccatccagactagcagatagagctacttcattattatctgtatctaattctgagaaacagcaagttttagaagagcttgatgtgcgcaagagagttgaaaatgcaattaatcttttacaaaaagaaattcaaagaataaaacttggagaagaaattcaatcggaggttcaggacgaaatttctaaaactcaaagagaatattatttacgtgagcaaatgaaaactattcaaaaagagttaggcgaggatagccaaactgtagagcttgacgatttgaaaaagaaaattgaagacgtgaaaatgagcgatgaagcaaataaagttgcaaataaggagcttgatcgtcttggaagaatttcacctcagtctccagaatactctgtagcaagaacatatttagaatggttaactgaactaccttggagcaaatcaagtaaggataatttaaacgttaaagaagctcaaaaaacattagaccaagatcattatggtttacctaaagtaaaagaacgagtattagagtatttagctgttaggtcactaaagaaaaaagttactaaagaagaaacagttagaggtcctatactttgttttactggccctccaggtgttggaaaaacatcattaggtaagtctatagcaaaatcaatgggtagagagtttgtaagaatatccctaggcggagttagagatgaagcagaaattcgaggacatagaaggacttacattggagcacttccg

SEQ ID NO: 262983 - DNA, 895 bp, Unknown
  Bacterial polypeptide expressing nucleotide sequence isolated from the Sargasso Sea
aaaaacccaaattgctaaaagatatttagttcctaaacaaatacaaaatcatggtttaaaaaaaacagaaatttcatttaactcgaaggttttaaattcaatagttaggaattatactaaagaggctggagtaagaaatcttgaaaaagaaatatcgaaagtttgcaggaagacagtaaaaaaattagaaactacaaaattaaaaaaaataaaactaaatgacaaatccttacaagatttcttaggtgttgcaaaatttagatcaagtgaaattgaaaaaaagaatttaattggtgtaactaacggtttggcatggacagtagttggtggagaaattttatcagttgaggttatcctttcaattggtaagggaaaacttaccattacgggtaaattaggtgaagttatgagagaatcaattcaagctgctacttcatacgttaagtcaaaatcaattagcctaggaataaatccaaaagattttgaaaattatgacattcatatacatgtccctgagggtgctactcctaaagatggcccaagtgcaggtatagctatttttaattctcttgtgtcatctctaacgaataacaaaataaaaagagatgtagcaatgactggagaaattacacttagaggtagggttcttccaattggcggcttaaaagaaaaaatatatgcagctagtagagctgggataaagaaagttctaataccgcaggaaaactttagagaagtatctgagtttgacaaagaagttatcaaagatattaagataatccctgtttcagaagcattctcaattcttgaacatactttaattaagccagttatttcattaaatctaaccgaatctcaaataaaaaataatcaaaacactactagtactcactaa

SEQ ID NO: 262984 - DNA, 424 bp, Unknown
  Bacterial polypeptide expressing nucleotide sequence isolated from the Sargasso Sea
tgataaaaatgattttcatattcatgttcctgaaggtgcaacacctaaagatgggccttcggcaggtgtaggaatggtgacctcaataatttcagcaattactgaaattccggttaataaaaatgtagctatgacaggagagattactttaagaggtttggttttacctatcggtggtttaaaagaaaaactactagctgctcacagagcaggtataaaaaaagttctgatacctattgaaaataaaaaagatttaattgaagtcccaaaaacaattttagataatatggaaataattactgtaaaaaacgttgacgaagttttaaaagttgctcttaccaaaccctttaagagagttgagtgggtcgaggttgatcagatttcaaataaaggaaaatcaaaagaggaattaagcacacactaa

SEQ ID NO: 262985 - DNA, 791 bp, Unknown
  Bacterial polypeptide expressing nucleotide sequence isolated from the Sargasso Sea
tggtggtgtaagagatgaagcagaaattagaggacatagaagaacctacattggtgctcttccgggaagaattatacaaaatattaaaaaggctggtactaataaccctgtcttcatgcttgatgaggttgacaaattgggttctgattttagaggagatccttcatcagctctacttgaggttttagacccggagcagaatcattcattcaatgaccactatttagaacttgattttgatttaagtaaagttatgtttatagctacagcaaataattatggaaatattccacctgccttacgtgatcgtatggaaattcttgagttctcaggctatatccaagatgaaaaggttcaaattgcaaaacggcatcttattccaaaacagataaaagaaaatggattgaagaattctgaagtaactctagatcttaattcaataaaagaattaattagtgcatatactcgagaagctggcgttcgtcagctagaaagacaagttgctaatgttttacgaaaagttgcaagggatattgttgagtcgaagaaaaaacagattaaagtaacaaagacaaaagttcataaactattgggtgcttccagatttcattctgaattagctgaaagggctactgaaccaggtgttgttaccggtttagcatggacagctgctggtggtgatattttatttatagaatcaacaaggatgaagggtaaggggaaactcacattaaccggtcaacttggcgatgtcatgaaagaatcagctacagcggggttaacttttgtta

SEQ ID NO: 262986 - DNA, 939 bp, Unknown
  Bacterial polypeptide expressing nucleotide sequence isolated from the Sargasso Sea
atttctctaggaggtataagggatgaggcagaaattagaggtcatagaagaacctatataggttctttacctggaaaaattatccagcaaatgaaaaaagctggttcaaaaaatccactttttttattagacgaaattgacaaagtaggttctgattatcgtggagatccatcttctgcattgttagaggcactagatccggagcagaacgtaaattttaatgatcattatttggaagtagattacgatctttcagatgttatgtttgtaacaacagctaacaccttaagtattttgccacctttactagacagactcgaagtaattagaattcctggatatacagaagatgaaaaagttaatatagcaaataattatttgataccaaaacaggtcaaagataatggattgaaggaaaatgaattcaatttagattcaaatgttttaaaagatataattagaagttataccaaagaagctggcgttcgtaatcttgaaagagaaatttcaaaaattgcaagaaaaactgtcaaaggaattttaactaatgaaaatggtgctaaaaaaattggtacagaaaatttacatgattttttaggtgtaaagaaatttaaatatggcgaaattgaaaatgacaacaaggtaggaattgttactggtctagcgtggaccgaatttggtggtgaaatattaaaaattgagtctgctgtaatgccaggaaaaggtaaaatgcaaataactggtaagttgggagatgttatgcaagaatcagttaaagctgcaaaatcatatgtaagatcaaaatctttagaatttggaattataccaccaatttttgaaaaaaaagattttcatatacacgttcctgagggtgctacgccaaaagatggcccttcagcgggaatagcaatggtgacatctatagtttcatcaataaca

SEQ ID NO: 262987 - DNA, 920 bp, Unknown
  Bacterial polypeptide expressing nucleotide sequence isolated from the Sargasso Sea
taaaaatgatacaagttttctaaaatgtgatgttgaaatagctgacgacattaatacaacaaaagatcttgatgtttatgcacaaagccttgttaaaagatttgaaaaattaattgtattaaacaaaaaagattttaatgaaaatttaaatattatcaaaaattcaaaagatgcaaaaataattgctgacaatattgcagcaaacttaaatgttaagatttttcagaagcaagaaatacttgaaattagagatttaagaaaaaggctagaaaaaatttatgagatagtaaacaaagaaacaagtgtaatctctgtagagaagaaaataagaggaagagtaaaaaatcaaatggagaaaactcaaagagaatattatttaaatgaacaattaaaagctattcaaaaagaacttggggaaattgatgaaggtaaagatgagattgctaatatctcaagagctataacaaaagctaaaatgcctaaaattgcgcaagaaaaatgtttttcagaattaaaaaagttaaaatctatgagtcctatgtcagcagaagcaactgtagtaagaaactatcttgattggatgacagaactcccatggtctgaaaaaacaaaaataaatactgatttaagttcagcacaaaaaattcttgatgaggaccattatggattagaaaaagttaaggagagaattatcgaatttttagctgttcaaaaaagaattcaaaaaatgaaaggacctatactttgtttagttggccctccaggtgttggaaaaacttctttaggaaagtcaattgcaaaagcgacaaatagaaaatttataagaatttctttgggtggaataagagatgaggctgagataagaggtcatagaagaacttatattggatctctgccaggaaaaataattcaaatgatga

SEQ ID NO: 262988 - DNA, 814 bp, Unknown
  Bacterial polypeptide expressing nucleotide sequence isolated from the Sargasso Sea
aattcaaaaacttaaaggtccaatattgtgtctagtgggcccgcctggagtaggtaaaacatctttgggtaagtcaattgcaaaagcgactaacagaaagtttataaggatctctttgggaggaattagagatgaggctgaaataaggggacacagaagaacttatattggttcattgcctggtaaaataattcagatgatgaaaaaagctggatcaaaaaatccattatttttactagacgaaattgataaagtgggtaacgattatagaggagatccatcctctgctttattagaagcattagatcctgaacaaaataaagaatttaacgatcattacctcgaagttgattatgatttatctgatgttatgtttgtcacaacagctaatactttaaatattctcccacctcttcttgatagaatggaagtaatcagattatctggttacacagaggatgaaaaagtaaatatctcacaaaagtttttaattcctaaccaaagtaaaaataatggattaaaagaggaggaatggtcaattgatgaagatataaacagaaaaattataagacactacacgagagagtcaggtgtgagaaatctagagagagagatttctaaaatagccagaaaattagtaaaaaaaatcgataataaagaaataattagtaacccaatcaatgaaaaagatttaaaagatttattaggagttcaaaaatttaattacggtgaaatcgaagaagagaatagaattggagttgtcaccggattagcttggactgaagtaggtggtgaaattttaaaaattgagtca

SEQ ID NO: 262989 - DNA, 736 bp, Unknown
  Bacterial polypeptide expressing nucleotide sequence isolated from the Sargasso Sea
gctcccagtgtgggtaaaacatccctggcggaatcgattgccagcgcgactaaccgcaagttcgtgcgcatggccttgggtggcgtgcgtgacgaagcggaaatccgtggtcatcgccgtacctacatcggttcgatgccaggaagattgattcaaaagatgacaaaggtgggtgtacgcaacccgctgttcctgctcgatgaaatcgacaaaatgggcagcgatatgcgtggcgatccggcgtcggccttgctcgaagtgcttgatcccgagcaaaaccataatttcaacgaccattacctggaagtcgactacgacttgtctgacgtaatgttcttgtgcacctccaactccatgaacattccgccagccttgctggatcggatggaggtgattcgtctgccgggctacaccgaagacgagaagatcaacatcgcagtcaagtacctggcgcccaagcagatttcggcgaacggcctgaagaagggcgagatcgaattcgaggtcgaggcgatccgtgacatcgtgcgctactacacccgcgaggccggtgtacggggccttgagcgccagatcgcgaagatctgccgcaaggcggtgaaggagcacgcgctggaaaaacgcttctctgtgaaggtagttgccgattccctggaacacttcctgggcgtgaagaaattccgctacggcctggccgagcaacaggatcaggtcggccaggtgactggtttggcgt

SEQ ID NO: 262990 - DNA, 958 bp, Unknown
  Bacterial polypeptide expressing nucleotide sequence isolated from the Sargasso Sea
gagcaatatcagtttatttaattccaaaaatgattatttatctgctaattactcattattaaagattaaatctcaaaataactctaatattagagcattaattaaaataatattagaacaatttgaatcttatcaaaaaattaacaaaaaaatatcacctgagataattagtaatttaaaaaattacagagattatataaaattagcagacgtagtaagtgctaatttaaatataaatttaactcaaaagcaagaattattagaaacagcttctttagaaaaatctttggataaaatttatggatatttaattgctgaaattgattcaatgcaaattgaaaaaaagattaaaggtcgagtaaaaagacaaatggaaaaaacacaaaaagaatattacttaaatgaacaaatgaaagctattcaaaaagaattaggagacaatgaagaagttgatgatattgttgaaattgaaaacaaactaaaaaaattaaaactcagttctgaagctcgagaaaaatgcaaatctgaattaaaaaaattaaaaaatatgagcccgatgtctgcagaagctacagtgataagaaattatctagattgggttattagtataccttggaataatccatcagctatttcaaaaaatattaaaaaagctaaatctattctagagtctgatcactatggtttagaaaaagtaaaagatagaattttagaatatttagccgttcaaaaaagaattaataaaattaaaggcccaattctctgtttagtaggtcctccaggagttggtaaaacttctttaggtaaatctattgcaaattctacaggaagaaattttgtaagaatgtcattaggaggtgtaagagatgaagctgaaattcgaggtcatagaaaaacatatatcggatccatgcccggaaagattttgccagctatgaaaaaatccagatctttctat

SEQ ID NO: 262991 - DNA, 904 bp, Unknown
  Bacterial polypeptide expressing nucleotide sequence isolated from the Sargasso Sea
aaatatctgattccaaaacagcttaaaaatcatgcattaaaatcaaatgaaataaaatttaaatctactattattaataacattataagaggttacactagagaagctggggttagaaatttggaaaaagaagtttctaaaatttgtaggaaaactgtaaaaaatattgaaacaagttctaaaaagcgtgtcaaattagattctagtactcttaaaaattatttaggtattcctcgttttagaaataatgaaatagaaaaaaagaatcttgtaggagttacaaatggtttagcttggacagaagttggcggtgaaatattgtccgtagaggttcttctttctttaggtaagggaaagcttactataactggaaaacttggtgaagttatgaaggagtctattcaagccgcaacatcttatgtaagatctcagtgtctgagcttaggtatacatccacatgattttgaaaaatatgatattcatgttcatgtgcctgaaggagccacaccaaaagatggccctagtgctggaatagctatttttaactcattagtatcatctttgacttcaaataagattaaaaaagatgtagccatgactggtgaaattactttacgtggcagagtcttaccaattggtggattaaaagaaaaaatttacgcagcagttagggcaggaataaagacagtactaattcctgaagaaaactataatgagcttgaagaatttgataaagatgtaataaaagcattaaaaattattccagttagtgatgctacttcaattcttaagcatacactcacaaaatcgataatacctctaaatttaagcgaatcagatattttaagagctcaaaaaagctcatttcagtcagaaaatgttaatgaaaaaataacccattaat

SEQ ID NO: 262992 - DNA, 827 bp, Unknown
  Bacterial polypeptide expressing nucleotide sequence isolated from the Sargasso Sea
ggctttagatcccgagcagaacacaacattcaatgatcattatttagaagttgattatgatttatctgatgtgatgtttgtaacgacagcaaatactttaaatattttacctcctttattagatagaatggaagtaattagattagcaggttacaccgaggatgaaaaaataagtatcgcaaacaaatatttattaccaaaacaaatcaaagataatggtgttaaagaaaaagaaatgaagctagataatgacattataaaagaagttatcagaggttacacaaaagagtcgggtgtaagaaatcttgaaagggaaatttccaaacttgcaagaaaagttgttaaaaaaatagtagctggtgaagaaaaagaagtcggaataaataacaaaaacttatcagaatttttaggtgttcctaaatttaagttcggagaattagaggctaagaatagagtgggtatagtaacaggacttgcttggacagaatatggtggcgaaattttaaaaattgagactgttacaatgccaggaaaaggaagaatgcaaattactggtaaattaggtgatgtaatgcaagagtcggtaaaagcagctaaatcttttgtaagatcgaaatgtttagaatatggaattatacctcctatttttgagaaaaaagattttcatatccatgttcctgagggtgcaacaccaaaagatggtccttccgctggtattggtatggtaacatctatagtttcatcaatcactaacattccagttagaagagatcttgctatgactggcgaagtaaccttaaccggccaagtattgccaattggcggat

SEQ ID NO: 262993 - DNA, 911 bp, Unknown
  Bacterial polypeptide expressing nucleotide sequence isolated from the Sargasso Sea
tatggatctggagaaaaaacagactcttcttgaaatcactgaacctcgccgcaggctggaaattgtatatgaacggatgcttgaggagagtgaattcaaaaaagtcgagcgcaagctcaaggaaagagttcaggggcaaattggtaagactcaaaaggagtattacttaaacgagcagattaaagccattcagaaagaacttggacagggtgaggatggaaaagcggaacaggaagaatacgaaaaacgtttggaagatatctctctttcccaagaagcccgtgagattgccgaaaaagaactaaagaagcttaagatgatgccgcccatgtctgcagaagctaacgtggtgcgaaactacatcgactggctgcttgatatgccctggggtgataaaaccgaagatcggtttgatcttgatgcggcagaaaagattctgaataaggggcactacggacttgaaaaaataaaagagcggattattgaatacctcgcagtcgctcaaaaagtgggttccctgaaaggtcctatcatctgtctggttggacctcctggggttggaaaaacatcacttgcccgttccgtcgccgatgcgttgggtagaaattttgccagaatgagtctgggtggtgtacgggatgaggcagaagtccgaggccatagaagaacctacgtcggtgcaatgccgggaaaaatcatccaatccctgcgtaaggttaaatcaaaaaatccgctactgctgcttgatgaagtggacaaaatgacacgtggagtgatgggagatccctcctcagccttgcttgaggttctggacccggaacagaatcacactttcatggatcattatctcgaggttgaattcgatctttcggatgtccttttcttctgcacggccaatgtggcacaggata

SEQ ID NO: 262994 - DNA, 964 bp, Unknown
  Bacterial polypeptide expressing nucleotide sequence isolated from the Sargasso Sea
agacgaggcagaaataagaggacatagaagaacttatattggtgctctgcctggaagaattattcaatcacttaagaaggcaaaaactaataatcctgtatttatgttagatgagattgataaacttggttcagatttcagaggagatccttcatcagcaatgctcgaagtattagacccagaacaaaatcatgcttttagcgatcattatcttgaagttgattttgatttaagtaaagtaatgtttattgctacagcaaattatccagataacattcctcctgcactttatgatcgtatggaaatgattgattttagaggatatatcgatgatgaaaaagtacagattgcaaaaaaacatttaattcctaaacaggttaaagaaaatggacttacttctaaacaagtcaaattcaatgatactggtattaaagaaattatctcttcatacaccagagaatctggagtgagaagcttggaaagagaaatttctaatgtattacgtaaaatagcggtagatgtcgtcaataaaaaactcaagactgctagtatttctaaaaaatctgtaaatgaatatcttggaattccaaaatttcaatcagacttagcagaaagaactacaaaacctggagtggtaacaggtatggcatggactgctgctggcggagatatattattcattgaatctagtaaaatgaaaggtaaaggtattttaaccttaaccggtcagcttggagatgtgatgaaagaatccgcatcagctgcatttacctatgtaaaatcgcatactgatattttaaatcttaaagatgattttgctgataaaatggatatacatgttcattgtcctgctggagcaattccaaaagatggaccatcagcaggggttggaatgtttacttctcttgtttcgttattaactaataagccagtaaagagtaaagttgcaatgactggagaaatt

SEQ ID NO: 262995 - DNA, 859 bp, Unknown
  Bacterial polypeptide expressing nucleotide sequence isolated from the Sargasso Sea
attcaaaaagaacttggtgaaatcgaagatggtaaagacgaaactacaagcataaacaaagcaattactaaagctaagatgccaaaagatgtagaaaaaaaatgtcttcaggaattaaaaaaattaaaaaatatgagcccaatgtcagctgaagctactgtagtaagaaattatttagattggatgacagaacttccatggcataaaaaaagtgaagttgatattgatttgacgaaggcacaaaatactttagacaaggaccattttggcttagaaaaaattaaagagagaatagtagagttccttgcagttcaaaaaagaatggaaaaaattaaagggccaattttatgtttagttggaccaccgggtgttggtaaaacttcattaggaaagtcaattgctaaagcaactaatcgagaattcgtgagaatgtctgttggaggcatgagagatgaagctgaaatcagaggccatagaagaacttatataggctcactaccaggcaaaattattcagatgatgaaaaaagctggaacaaaaaatccattaattttattagatgaaattgataaaataggaaatgattatagaggagatccttcttctgctttattggaagctttagatcctgaacaaaacacaacctttaatgaccattatttagaagtagattatgatctttcagatgtaatgttcgttacaactgcaaatacattaaatattcttccgccattattagatagaatggaagtcattagactagctggttatacagaggatgaaaaaataaatattgctaataaatatttgttacctaaacaaattaaagataacggtgttaaagataaagaaatgaatt

SEQ ID NO: 262996 - DNA, 850 bp, Unknown
  Bacterial polypeptide expressing nucleotide sequence isolated from the Sargasso Sea
tgtgatttacaaatcgcaaatgacttaaatgcttcaaaagatttagatgataatgctattggaatggttaaaaaatttgaaaaacttcaaattttaaacaaaaaagattttgatgaaaatctaagtaatttaaaaaatttaaaaagcgctgaacaaataactaacaatatttctgcaaacctaaatatagaaataagtgaaaaacaagaacttttagaaactagagatcttaagagaaggctagaaaaagtttaccaatacatagaaaaagaaaccagtgttatttcagttgaaaaaaaaataagaggaagagtaaaaaatcaaatggaaaaaacacaaagagagtattacttaaatgaacaattaaaagccatccaaaaagaacttggtgaaattgatgaaggaaaagatgaaatatctaatatatctggagccatagcgaaagcaaaaatgccaaaaatagctcaagagaaatgtatgtcagagcttaagaaattgaaatcaatgagcccaatgtcagcagaggctacagtagtcagaaattatcttgattggatgactgaacttccttggagcaataaaagtaaaataaatactgatttaaagaatgctcaaaaaatattagatgaagatcattacggccttgaaaaagttaaagagcgtattattgaatttttggctgttcaaaaaagaattcaaaaaatgagaggaccaattctttgtctagtagggccccctggagtagggaaaacttctttgggaaaatctattgctaaggcaactaacaggaaattcataagaatttcattaggaggtataagagatgaagctgaaattagaggtcacagaa

SEQ ID NO: 262997 - DNA, 901 bp, Unknown
  Bacterial polypeptide expressing nucleotide sequence isolated from the Sargasso Sea
ataattttagtaactcaaaaaaattctgaaatcgatgatcccaagaaaacagacatatttatgtatggatgtgaaggtagtatcttacaacttttgaaactcccagatggaacagtgaaagttttggttgaaggtgttcgtagagtaaaaattattgattttaaggataatgaaaagtttataacttgtgattttacacctcacaatgatgtgattgatggtgatgaagatttgtacccattagccgttacagcaatcagacgaatggaaaaattaacttctataaataaaaaagtttctagtgagactattaatacaattaaacaattaaaagatccttctcagattgcagataatattgcttcacacatcactgcaacaatttcagagaaacaacaaatttttgagactattgatgtaaagaaaagattaaatgcaatcataaaaataatggaaaatgaaacaagcattattggagtggaaaaaagaattagaggaagggttaaaacccaaatggaaaaaactcaaagagagtattatttaaatgaacaattaaaagctattcaaaaagagttaggtgaaatagaggatggcaaagatgaaaatacaagtttaaataaagcaatccttaaatctaaaatgccaaaagatgttgagaaaaaatgtcttcaagaattaaaaaaattaaaaaatatgagcccgatgtcagcagaagccactgtagtgagaaattacttagattggatgatagatcttccttggcataaaaagagtgatgttgttatagatttaaaaaaagcacttgaagttttagataaagatcattttggtttagaaaaagttaaagagagaattattgaatttttagcagtccaaaaaagaatggataaaattaaaggcc

SEQ ID NO: 262998 - DNA, 811 bp, Unknown
  Bacterial polypeptide expressing nucleotide sequence isolated from the Sargasso Sea
aaaatagttgataccaaattaaaaaataacaataatctaaaagctttgattaaagttgttttagaaaattttgaggaatattcgagagtgaataaaaaaattccatctgaggttgtaaccaacctcaattctatgagtgacgccaataaaatatcagacatagtttctataaatttaacaattaatatggagcagaagcaggaactgcttgagatgattaacatagaagaaagattaaataaaattcacttatacttagtatcagagatagactcttttcagatggaaaaaaagatcaaaggaagagtaaaaagacaaatggaaaaaactcaaaaagaatattatctaaatgagcaaatgaaagctattcaaaaagagctaggtgataatgaagacactgatgatattgctgagattgaaaaaaaactggacacagttaagctttcaaaagaagcaaaagaaaaatgtaagtcagaaataaaaaaattgaaaaatatgagccctatgtcagcagaggcaactgtaataagaaattatctagactgggttctatctattccctggaataactcttctgcagtttcaaaaaatataaaaaaagctaaatctattttagagaatgatcattatggacttgataaagttaaagagagaattttggagtatttagcagttcaaaaaagaactgataaaataaaaggaccaattttatgtttagtaggcccaccaggtgtaggtaaaacatctcttggtaaatcaattgctactgcaactggtagaaatttcgtaagaatgtccctagggggggtaa

SEQ ID NO: 262999 - DNA, 928 bp, Unknown
  Bacterial polypeptide expressing nucleotide sequence isolated from the Sargasso Sea
aggcaaagatgaattaacttctctatccaaagctatcgccgatgctaaaatgcctaaattagctaaggataaatgtttatctgaacttaaaaaactcaagtctatgagccctatgtctgcagaggcaacagttgtaagaaactatttagactggatgaccgagcttccatggtcaaataaatctaaaattaatactgacttaaataatgcacaaaaaatacttgatgaggatcattatggattggaaaaagttaaagagagaattattgagtttttagcggtgcaaaaaagaattcaaaaaatgaaaggtccaatattatgtttagttggtcctccaggagtaggtaaaacttcacttggtaaatccatagcaaaggccacaaatagaaaattcataagaatttctcttggaggaatccgtgacgaagctgaaataagaggacacagaaggacatacataggatctttacctggaaaaataattcaaatgatgaaaaaagcaggaactaaaaatccactttttttattagatgaaatagacaaagtaggcaatgactatagaggagatccctcatcagctttattagaagcattagacccagaacaaaataaagagtttaatgatcattatttagaagtagattatgatttatcagatgtaatgtttgttacgaccgctaacactctaaacatacttccaccattattagacagaatggaagtgataagattatctggttatacagaagacgaaaaagttaaaatttcacaaaaatatttaattccaaatcaaagtaaaaataatggattaaataaagaagaatggacaatagacgaagatataaatcgaaagataattagaaattacactagagagtcaggtgtgagaaacttagaaagagagatctcaaaagtagcccgaaattag

SEQ ID NO: 263000 - DNA, 880 bp, Unknown
  Bacterial polypeptide expressing nucleotide sequence isolated from the Sargasso Sea
ctatcttctgaaaaacaacaaatatttgaaactgttgatgtaaagaaaagattaaatgccatcattaaaataatggaaaatgagacaagtattattggtgttgaaaaaagaattaggggaagagttaaaacacagatggagaaaactcaaagagagtattatttaaatgaacagctaaaagctattcaaaaagaacttggcgaaattgaagatggtaaagatgaaacaactagcctaaataaagcaattacaaaagccaagatgccaaaagaggttgagaagaaatgtttacaagaattaaaaaaattaaaaaatatgagcccaatgtctgctgaggcaacagttgtgagaaattatttagattggatgacagaacttccttggcataaaaaaagtgaggtagacatagatttaaagaaagctttagatattcttgataaagatcattttggattagaaaaagttaaagaaagaataatagaatttttagctgttcaaaaaagaatggaaaaaattaaaggaccaattttatgtctagtgggccctccaggtgttggaaaaacttcattaggaaaatcaattgcaaaagctacaaatagagaatttgttagaatgtcagtcggtggaatgagagatgaagcagaaatacgtggtcatagaagaacttatattggatctttgccaggaaaaattattcagatgatgaaaaaagctggaacaaaaaacccgttaattttattagatgaaattgataaaattggtaatgattatagaggagacccgtcttcagcgttattagaagccttagatcctgaacagaacacaacattcaatgatcattatttagaggttgattatgatttatctgatgtgatgtttg

SEQ ID NO: 263001 - DNA, 555 bp, Unknown
  Bacterial polypeptide expressing nucleotide sequence isolated from the Sargasso Sea
agggaaaacttactattacagaaaagttaggagatgtaatgaaagagtcaatccaagctgcaacttcttatgttagatctcaaagtttgaacttgggtatacatccacatgactttgataagtatgatattcacgttcatgttccggaaggcgccactccaaaagatggaccaagtgccggaatagcaattttcaactctttagtttcctctttgacttcaaacaaagttataaaggatatcgcaatgacaggtgaaatcactctcagaggcagggttttacctattggcggtttgaaagaaaaaatttatgctgctgttagggctggaattaaaaaagttttaattcctgaagaaaacaaaagtgaaattgttgaatttgataaagatgttgttaaagctattaaaattatacctgttagtgaagcaacttcaattttgaaacattcacttaccaagcctataattccattgaatttgagcgaatcagagatttctcaagcccaaaaaagtacttttagagcagataatcttaatgaaaatataacccattaat

SEQ ID NO: 263002 - DNA, 889 bp, Unknown
  Bacterial polypeptide expressing nucleotide sequence isolated from the Sargasso Sea
aaaaattctgaagttgatgatccaaaaaaaaatgacgtattttcttacggatgtgaaagcaatatattacaacttttaaaacttccagacggcacagtaaaagttttagttgagggaattaaaagagtaaaaattattgatttcaaagatgatgaaaaatttattacttgtacatatgaaaatcaaaaagatgtcttaaacaaagatgaagatctactaccactagcacttacagcagtaagaagattagaaaaattaacatctgtaaataaaaaagtttcatcagaaacgattaacaatattaaacaattaaaagatccatctaaaattgtagataatattgtgtcaaacctaaatgcatctatatctgaaaaacaacaaatattcgaaacattggatgttaagaaaaggttaaatgcagctattaaaatgatggaaagtgaaacaagtatcattggagtagaaaaaagaattagaggaagagttaaaactcaaatggaaaagactcaaagagagtattatttaaacgaacaattaaaagcaattcaaaaagaattaggtgaaatcgaagatggtaaagatgaaactactaacttaaaaaaatcaattcaaaaagctaaaatgccaaaagaagttgagaagaagtgcatgtcagagcttaagaaattaaagaacatgagcccaatgtctgcagaggcaacagttgttagaaattacttagattggatgattgatcttccgtggtttaaaaaaaacgatgttgatattgatttaaataaaggtcttaaaattttagatgaagatcattttggtttagaaaaggtaaaagagagaattattgagtttctagcagttcaaaaaagaatgaaaaaattaaaggaccaatttt

SEQ ID NO: 263003 - DNA, 696 bp, Unknown
  Bacterial polypeptide expressing nucleotide sequence isolated from the Sargasso Sea
ccgccggaagtcctcacctctgtaaagcagatagaggacacagcaaagctagctgacactattgcctctcatttggcggtaaagatatctgaaaaacaggagcttttagagttggatagcatcctgggtaggttggaaaaaatttacgcccatatggaaggggaaatcggtgttcttcaggtagaaaaacggattcgaaatcgcgtaaagcgacagatggagaaaacgcagcgagagtattatctaaatgagcagatgaaggccatccaaaaagagttgggggaaagtgaagacgggagtgatgagctcagtgatatcgctgaacggataaaaaaagtacggctcacaaaggaggctcgcgaaaaggcaacagcggagcttaaaaaattaaaaaatatgagccaaatgtcggcggaagcaacagttgtaagaaattacttggactggttgctgggtataccttggaaaaagaaatcaagagttaaaaaggacttatccgcggcccagcaggtattagatagggaccatcatggcttagagaaagtcaaagagagaatagtagagtaccttgccgtacaacaaaggaccggaaaggtaaagggtcccatcctatgcttggtggggccaccgggagttggtaaaacctcgttaggcaagtcaatagcagagtcaactggccgaaacttcgttaggatg

SEQ ID NO: 263004 - DNA, 774 bp, Unknown
  Bacterial polypeptide expressing nucleotide sequence isolated from the Sargasso Sea
gttattagaattcctgggctacacagaaaatgaaaaagagagtattgctaataaatatttaatgcctaagcaattggataataacggtcttactgaaaaagatataaaatttaataagaatatctttttagaaattattagatcttatactagagaagcgggtgtaagaaatcttgaaagagaaatttcaaaaatatgtcgaaaagttgtaaaaaaacttcttctaaataaaaaactgaaaaatatcaagttagataaaaataatttaaaagattatcttggagttaagagatttaagcatggtgaaattgagaaggaaaacgttattggtcttgttaacggtttagcatggactgaagttggcggcgaaatgctaagtgttgaaacagcggtcattcctggtaaaggtaaatatattttaactggtcaacttggcgatgttatgcaagagtcaattagggcagctatgacaattgtcagaaaaagggcattaaatattggaattgataaagatttttatgagacaaaagatattcatgttcattttcctgaaggcgcgacaccaaaagatggcccaagtgctggagttggaataacaacttccttagtgtctgctcttacagaaaatcctgtaaaatcatctgttgctatgaccggcgaagttaatcttcacgggcaagttttgccgattggaggccttaaagaaaaaatgttagcagcatcaagagcaggtattaaaaccgtaattatacctcttgaaaatgaaaaagattt

SEQ ID NO: 263005 - DNA, 683 bp, Unknown
  Bacterial polypeptide expressing nucleotide sequence isolated from the Sargasso Sea
aaaaagaattgctgccatcgctcgttgggtcgccctacaaactgcttgggtaaaggaatacgatgctagaatttcaattgaaaaggttgacgaaatcttaggtgttcccagaccgaaaagcctgtcagaactaacggacgttccgggagttgtaaccggcttagcgtggacaagcgtcggaggtgatattttattcattgaaagcattatcagcaacggaaaaggaaatcttaccatgaccggaaatctcggaaccgtaatgaaagaatctgcaacgattgctcttgagtatattaaagcaaaacatcttgatctgggaattgatgaagagcatattgaaaagaaaaatatccacgtgcacgttccggaaggcgcaacaccaaaagacggaccatctgcaggaattgcaatgctgacctcaatggtttcttcgtttaccaacaggaaagtgaaacctcatcttgccatgacaggagaaattacattacgcggaaaagtacttcctgtaggcggaattaaagaaaaactactcgctgcaacaagagccggaataaaagaagttattctttgtgaagccaaccgaaaagatgtggaagaaataaaacaggattatcttaaaaaccttaaagtacattatgtaggatggatgagagaagttctgcaaattgctcttgaaaagtaat

SEQ ID NO: 263006 - DNA, 919 bp, Unknown
  Bacterial polypeptide expressing nucleotide sequence isolated from the Sargasso Sea
gttgttagaaaattatttagactggttggtaagtgttccttgggacgataagtcaaaaattaacacagatcttaaaaaggctgaaaatatattgaacaatgatcattatggattggaaaaaattaaagaaagaatcattgaattccttgctgtacaaaaaagagtagaaaagatacaaggccccatactttgccttgttggccccccaggagttggtaaaacctctcttggaaaatcaatagctaaagcaacaggtagggaatttgttagaatatcattaggtggcattcgcgatgaatctgaaataagaggacataggagaacatatataggttcaatgccaggaaaaattattcaaggaatgaaaaaagttaaaaaaagtaacccgttatttttattagatgaagttgataagatgggatacgattttagaggcgatccatcatcagcgttgctggaagcattagattcagaacaaaatagtaaatttaacgatcattatttagaagtagattacgatttgtctagcgttatgtttattacaacagcaaatactttaaatattccacctgctttattagatagaatggaagtaattagattacctggttatgtagaagatgaaaaaattgaaattgcaaaaaaacatttaataccaaaaaatatttctaatcatggtttaaagagatcagaatggaaaataaatactaatactttaaaagaattaattaaattttataccaaggaagctggtgtaagaaatttagaaagagaattaagtaatttaattagaaaagcaattagagaactatcaacttctaggaaaaacaatattaatataacatcaaagaatcttgaaaaatacgctagaataaaaaagtttagaaagaacgaattagaagataaagatttagttggt

SEQ ID NO: 263007 - DNA, 843 bp, Unknown
  Bacterial polypeptide expressing nucleotide sequence isolated from the Sargasso Sea
aaaacccagagagaatattatttaaatgaacaactaaaggctatacaaaaagaattaggtgaaattgaagacggtaaagatgagactactaatttaaaaaaatctattcaaaaagctaagatgccaaaagaagttgaaaagaaatgtatgtcagagctcaaaaaattaaaaaatatgagccccatgtctgcagaagcaacggttgttagaaattatttagattggatgattgatcttccatggtttaaaaaagacaatgtagatattgatttgaataaaggtctaaagattttagatgaagatcattttggtttagagaaagtaaaagaaagaattattgaatttctagctgttcaaaaaagaatggaaaaaattaaaggaccaatattgtgtttagttggacccccaggtgttggcaaaacatctcttggaaaatctatagccaaggctactaatagacaatttattagaatgtcattagggggtgtacgagatgaggctgaaataagaggacacagaagaacatatattggatctttaccaggaaaaattattcaaatgatgaagaaagctggcacaaaaaatcctttatttttattagatgaagttgataaaatcggaaacgattatagaggagatccatcctcagctttactggaagcattagatcctgagcaaaatacagcattcaatgatcattatttagaggttgattatgatttgtccgatgtgatgtttgtaacaacagcaaacacactaaatattttaccaccgcttcttgacagaatggaagtaataagaattccaggatacacagaagatgaaaaaataaatatagcaaac

SEQ ID NO: 263008 - DNA, 415 bp, Unknown
  Bacterial polypeptide expressing nucleotide sequence isolated from the Sargasso Sea
aaaatctaatacaaaattattgaacattaaagaaagtatatttaatgattataactttcatttacacgttcctgagggagccacacctaaagatggtccgagtgctggtgtaacaatgattacatctttagtttcacttttaacccaaagaaaagtgaaaaataaatttgcaatgacaggcgaaataaccttgagaggtaaagttttgcctgtaggcggaataaaggaaaaaatattagcagccaaaagagcaaaaataaattcaataatattacctactgataataaaaaaaatgttgatgagattgataaaaagtacctcaaaggtttgaattttttctatgttgaaaatattttagaggttgtagaatatgcattgctaagaaaaaaagtttctaattttaaaaaattataa

SEQ ID NO: 263009 - DNA, 874 bp, Unknown
  Bacterial polypeptide expressing nucleotide sequence isolated from the Sargasso Sea
aaagaaagaattgttgagtatctagctgttcaaaaaagagttaagtcgatgaaggctcctgttttatgcttagttggtcctccaggcgtaggtaaaacatctctgggtgaatcaattgctagagcaactaatagaaaatttgtaagaatgtccctaggtggtgttagagatgaatctgaaatcagaggtcacagaaggacttacatcggatcaatgcctggaaaaattattcaaaaactttcaaaagtgggtgtaaaaaatcccttatttcttttagatgaaattgataagattggcatggatcacagaggtgatccagcatctgctttgctagaggttcttgatccagaacaaaacaatacctttagtgatcattatcttgaagttgattacgatttgtctgaggttatgtttgtttgcacagccaatagcttgaatattccaacacctcttttagatagaatggagatcataagaattcctggttatatagaggatgagaaaattaatattgcggaaaaatatttattgcctaagcaaatgaaacgaaatgggttaaaagatgaagaaattaaatttaataaaaatgtaattctttcattgattagatactacactcgcgaggcaggtgtaagaggtcttgaacgtcagattgcaagaattttaagaaaggttgttaaagaaagattgttagaaaataagacaaaagtaaaacctacgtctatttcttcaaagaatttaaagaaatactctggtgttaaaaaattcaaatatggagttgctgaaaaagataacgctgtgggacaggttactggattagcttggacagaagttggtggagaacttcttacaattgaagcgtcaaacatcgatg

SEQ ID NO: 263010 - DNA, 919 bp, Unknown
  Bacterial polypeptide expressing nucleotide sequence isolated from the Sargasso Sea
tggggcggattggcgtggtgacccgacgtcggcgcttctcgaggtgttagatcctgcacaaaataacaacttccaggaccattatcttgaggttgatttcgatctctcgaatgtgatgttcattaccactgctaacaccttgaacatgccgcaacctctaatggaccgcatggaaatcatccgcttgtcaggatacactgaggatgaaaagttagaaattgccaaacgtcacctagtaacaaaacagattaaagaccacggcctgaaagatggagaactagcgattgacgatgatgctttgcgcaacgccatccgtctttacactcgtgaagctggagtgcgtaatctggaacgtgaaattgcgaaaattgctcggaaaacagtgactgcgattattagcggtaaagtgtcatcagtcactgtcacggctaacaatcttggtgattatcttggggttcaaaagttccgttttggcgaggttgaacatgctgatcaggtcggcgtaaccactgggttagcatggactgaagttggcggtgaattgcttaatattgaagcagtaaaagttcctggaaaaggcaaagtgacagcaacaggtaagcttggcgaggtaatgaaggaatcaattcaagccgccgaattctttattaagtcacgtgcgcggtcatatggtatagatctaatggaactggccaagcatgatgtccacgttcatgtgccagaaggcgccacaccgaaagatggcccatcagcgggtgtcggtatggctacatccattatttccgctatcaccggtgttgaagtgcgacgcgacgttgctatgaccggcgaaattacgttgcgtggacgcgttttgcccatcggcgggttgaaggaaaaaatactggctgctcagcgaggtggtctgaaaaccgtcttg

SEQ ID NO: 263011 - DNA, 933 bp, Unknown
  Bacterial polypeptide expressing nucleotide sequence isolated from the Sargasso Sea
aaaaagaataagaggacgagttaaaaaccaaatggaaaaaactcagagagagtattatttaaacgaacaaatgaaagctattcaaaaagaactgggagacattgaagatggaaaagatgaaattacacaattacaaaaagctataattaaagcgaaaatgccaaaagaagctgctaaaaaatgtttagcagaattaaaaaaactaagatcaatgagctccatgtcagccgaagccacagttgtaagaaattatcttgattggatggttgaattaccatggaataacaaagataaaaaattagataacataaatattaacgacgctaaaaaagtattagacgaagatcactatggactagaaaaagttaaagaaagaattttagagtatttagctgtgcaaaaaagagttggaaaaatgaaaggtgcgatactgtgcttagtaggtccacctggagttggaaaaacttctcttggaaaatccatagctagagcaactggaagaaaatttgtcagaatgtctttgggaggaataagagatgaagcagaaatcagaggtcatagaagaacttacataggatcacttcctggaaaaattatacaacaaatgaaaaaggctggtacaaaaaatcctttatttttattagatgaaatagataaggttggaaacgattatagaggagacccatcttcagctcttttggaagcgcttgatcccgaacaaaacattgcgtttaacgatcattacttagaagtagattacgatttgtctgacgtaatgttcgtaaccacggctaatacattaaatattttaccccctttgctagacagattagaagttattagaatccctggttatactgaggatgaaaaaattaatatagcaaataattatttgataccgaaacaattaaaagataatggggttaaaaaaca

SEQ ID NO: 263012 - DNA, 712 bp, Unknown
  Bacterial polypeptide expressing nucleotide sequence isolated from the Sargasso Sea
gctgagtgaagaaaatgaagttgaaataaataacaaaaatctttcggattttcttggtgttgcaaaatttaaatttggtgaattagagacagagaatagagtaggtatagtaacaggcttagcatggacagaatatggtggtgaaattcttaaaattgaaacagtagtaatgcctggtaaaggcagaatgcaaatcacaggtaaattaggtgatgtcatgcaagaatctgttaaagcagcaaaatcctttgtaagatcgaaatgtttagaatatggaattattcctccggtatttgagaaaaaagatttccatattcacgtaccagagggtgcaactcctaaagatggaccatctgctggtattggaatggtgacatctatagtatcatcaataacaaatatacctgttagaagagatgttgctatgacaggtgaagttactttaacaggtcaagttttacctatcggtggattaaaagaaaaactgttagcagcccatagagcaggcattaaggaagtattgatccctaaagaaaatgagaaagatctcgtagacatgccaaagaaaattattgatgacattaaaataacaccagttgaatacgcagatcaagttattaaaatagctttgataaaagaattaaaaccaactgagtgggtagaggttgatatttctaaaaaagatgacaaatctcaggccagtattcaataa

SEQ ID NO: 263013 - DNA, 875 bp, Unknown
  Bacterial polypeptide expressing nucleotide sequence isolated from the Sargasso Sea
tattatttaaatgaacaaatgaaagctatacaaaaagagttgtcagaagaggatgatagtaaagatgagattactgaatttgaagaaaaaattaataaattgaagctttctaaggaagctaaagtaaaagctaagtctgaacttaaaaaattaaaaggaatggggccaacatctgcagaatcttcagttgttagaaattatttagattggttaatttctattccatggaaaaagttcactagagtaaaatatgatttaagtgaggcagaaaatattttaaatgaagatcattttggattggataaagtaaaagataggataatagaatacctagctgttcaaagtcgaactaggaaactaaaagggccaattatatgtcttgtaggtgcacctggagtgggtaaaacttctttagggaagtctttggctagagcaacaggtagaaaattcgtgagaatatccttaggcggtgtcagagatgaatcggaaattagaggtcatagaagaacttatataggttctatgccaggaaaaataattcaaagtcttaaaaaaggcaagtcttcaaatcctttatttcttttagatgaaattgataaaataggttctgattggagaggagatccagcatcagcattattggaagttttagaccctgagcaaaacagtacttttaatgatcattatttagatttagattacgatctatcagatgtaatgtttgtaactactgctaactctttaaatatgcctagaccactcttagatagaatggagattataaatttatctggttatttggaaaatgaaaaaatagaaatagcaaaaagacatctaatttcaaaacaattagaaagaaatggtttaaaaaataa

SEQ ID NO: 263014 - DNA, 781 bp, Unknown
  Bacterial polypeptide expressing nucleotide sequence isolated from the Sargasso Sea
cttccaaaacaaataaaagataatggagtaaaggaaaaagaaatgaagttaagtgatgatattataaaagaggtaattaggagctacacgaaagagtctggagtgagaaatcttgagagagaaatatctaaaattgcaagaaaggtagtaaaaaaagttgtctctggagaggaaaaagaagtcaatattgatacaaaaaatttaccagattttttaggggtaccgaaattcaaatctggtgagttagaatctgaaaatagagtgggtatagtaacaggattagcttggactgaatatggtggagagattttaaaaatagagacagtaacaatgccaggtaaaggccgtatgcaaattacaggtaagcttggagatgttatgcaagaatcagttaaagctgcaaagtcgtttgttagatcgaaatgtttagaatatggaattattcctcctttatttgagaaaaaagactttcatattcatgtacctgaaggagcaactccaaaggacgggccatctgcaggaataggtatggtcacgtctatagtttcatcaattactaacattccagtaaaaagagatgttgctatgactggtgaggtaactttgactggtcaagtattacctattggtggtctaaaagaaaagctattagcagctcatagagcaggtataaaagaggttttaattccaaaagaaaatgaaaaagaccttgtagatatgccaaaaaagattatcgatgaaataaaaattactccagttgagtttgctgatgaggttttaa

SEQ ID NO: 263015 - DNA, 628 bp, Unknown
  Bacterial polypeptide expressing nucleotide sequence isolated from the Sargasso Sea
atgggattagcatggacacaggtaggtggtgatatcttaaatattgaagtcaacttatcctcaggaaagggaatgattaacgccactggtaaactcggtgatgttatgaaagagtcaattactgcagcacttggttatattaaatctaattctgttgaatttggtgttaatccaaaggtttttgataaagtagacatacatcttcatgtcccagagggagctattccaaaagatggtccgagtgccggtataactatatttacatcactaatttcatcacttactgaaattaaaatcaaaagagatatagctatgactggtgaaattactttaaagggtagagtccttccaattggcggtttaaaggaaaaactccttgccgctataaggtacggtataaaaactgttatcattccaaaagagaatgagaaagacttggctgaaatacaaaaggatattcaaaataaacttgttataaaaaaagttgagtttgctaaagaggtgctggacttagctctcgatggaaaaatcagtaaaatcaacaaaaaattagactggagacacctagttactgagtctatgaagcctaaaaaccaacaaaatcaagaaaaaacattcgttaactagc

SEQ ID NO: 263016 - DNA, 544 bp, Unknown
  Bacterial polypeptide expressing nucleotide sequence isolated from the Sargasso Sea
aaaggcaagatgcaaattacaggaaaattaggtgatgtcatgcaagagtctgttaaagcagcaaaatcatatattaggtctaaaagtttagaatatggaattatacctcctttatttgataaaaaagattttcatattcatgttcctgaaggagcaacccctaaagatgggccttcagctggaataggaatggttacttctataatttcagctattactgaaataccagttgataaaaaagttgcaatgactggtgagattactttaagaggaattgttcttcctattggaggtttaaaagaaaaattattagctgcccatagagcaggaattaaaaaagttataatacctatggaaaacaaaaaagatttagctgaagttccaaaaaccatactagagacaatggaaatcattcctgtaaaaaatgtagatgaggttctaaaagttgctttgattaaacctttaaaaagagttgagtgggttgaagttgatcagatttcaaaaaaagaaaaatctaaaaaagaagaacttagtactcattaag

SEQ ID NO: 263017 - DNA, 889 bp, Unknown
  Bacterial polypeptide expressing nucleotide sequence isolated from the Sargasso Sea
aagagaatattatttaaatgagcaacttaaagctatccaaaaagagttaggagaaattgaagatggcaaagatgaaacttcaaatttaaacaaagctatacaaaaagcaaaaatgccaaaagaagtccaaaaaaaatgtttaacggaattaaaaaaattaaaaaatatgagtccaatgtcagcagaagctaccgttgtgagaaattatttagattggatgatagatataccttggtacaaaaaagacaaagttgatattgatttaaataaaggtttaaaaactttagatgatgatcactacggattggaaaaagtaaaagagagaattatagaatttttagcagttcaaaaaagaatggaaaaaataaaagggccaattttatgtttggtaggtccaccaggagttgggaaaacatctttaggtaaatcaattgcgaaagctactaacagacaatttgttagaatgtcattaggtggcgtaagagatgaagcagaaattagaggtcatagaagaacttatattggatctttaccaggaaaaattattcaaatgatgaaaaaagctggaacaaagaatcctttgatactacttgatgaagtggataaagttggaaatgactatagaggtgatccatcttctgctctgcttgaagcattagatcctgaacaaaacacaaattttaatgatcattatttagaagtagactatgatctttctgatgtaatgtttgtaactacagcaaatactttgaatattttgccgccactattagatagaatggaagttataagaatccctggttatacagaagatgaaaaaataaatattgctgataaatatttactgcctaaacaaataaaggaaaatggtgttaagaatgaggagcta

SEQ ID NO: 263018 - DNA, 966 bp, Unknown
  Bacterial polypeptide expressing nucleotide sequence isolated from the Sargasso Sea
tctttggacgtgattaacaatgtcaaaacactaaatgatcctgataagatcgttgacataattgtatcaaatatttcaatttcattatctcaaaaacaagaaattttagaaataataaaaactgaagagagacttaacaaagtttatggttatttagtttctgaaattgactcttttcaagttgaaaaaaagattaaaggtcgagttaaaagacaaatggagaaaacccagaaagaatattatttaaatgaacaaatgaaagcaattcaaaaagaattaggagataatgaagatttggatgagatagctgagctagagaaaaaattaaatgaatatgacttatccaaagaagctaaagagaaatgtgtatcagaaattaaaaaattaaaaaatatgagcccaatgtcagctgaggcaactgtaattagaaactacctagactgggtagtgtcaataccatggaacaatcctcatcaaatctctcaaaatatcaataaagcatctacaatattagagaacgatcactatggattagataaggttaaagaaagaattcttgaatatttagcagttcaaaaaagaaccaataaactaaaaggtcctatattgtgtttagttggaccacccggtgttggaaagacgtctcttggtaaatctattgcgaattcaacgggaagaagtttcgttagaatgtccttaggaggtgtaagggatgaggctgaaataagaggtcatagaaaaacatatattggttcaatgcctggaaggtttatccaagcaatgaaaaaatcaaaatcttctaatccactaatattacttgatgaaattgataaacttggatcagattggagaggagatccgtcttctgcacttctagaggtacttgatcctgaacaaaatagtaaatttaatgatcattacttagaacttgactatgatctttctgatggtaatgtttgtgtgcac

SEQ ID NO: 263019 - DNA, 689 bp, Unknown
  Bacterial polypeptide expressing nucleotide sequence isolated from the Sargasso Sea
tttggcggttcaaaaaagaatggaaaagttaaaaggtccaattttatgtttaataggtcctcctggagttggaaaaacttcacttggaaaatctatagctaaagctacaaatagacaatttgtaagaatgtctttaggtggagttagggatgaagcagaaattagaggacatagaagaacatacattggttcattgccaggtaaaattattcaaatgatgaaaaaagctggaacaaagaatcctttaatacttcttgatgaaattgataaagttggaaatgattatagaggcgatccatcatctgcgttgttggaagctttggatcctgaacagaatgtaacatttaatgatcattatctagaagttgattatgatctttctgatgtcatgtttgttacaaccgcaaatacattaaatattttacctccattattagacagaatggaagtaattagaattcctggatacactgaagatgaaaaaataaatatagcaaataaatatttattaccaaaacaaattaaagaaaatggtgttaaaactgaggaactagaactaaaagatggtacagttaaagaaataattagaagctacactagagagtcaggagtgagaaacttagaaagagaaatatccaaagtagcaagaaaagtcgtcaaaaaagtagtcagtggagaagaaaagaaag

SEQ ID NO: 263020 - DNA, 913 bp, Unknown
  Bacterial polypeptide expressing nucleotide sequence isolated from the Sargasso Sea
cttggttcagattttagaggagatccttcttcagcaatgcttgaagtgctagatcctgagcaaaatcatgcctttagtgatcattacctcgaagttgattttgatttaagtaaagtaatgtttatttccacagcaaattatccagataacattcctccagcactttatgatcgtatggaaatgattgattttagaggttatatagatgatgaaaaagtacaaattgcaaaaaaacatttgatcccaaaacaggttaaagaaaatggacttacttcgaaacaagtcaagtttaatgacactggaattaaagaaattatttcttcatacactagagaatctggagttagaagtttagaaagagaaatttctaatgtgctacgtaaaatagctgtagatgtagtaaacaaaaaacttaagactgctagtatttctaaaaaatcagtcaatgaatatcttggaattccaaaatttcaatcagatttagcagaaagaactacaaaacctggagttgtcactggaatggcatggactgctgctggtggagatatattatttgttgaatctagtaagatgaaaggaaagggtgttttgaccttgactggtcagctcggagatgtaatgaaagagtcagcttcggctgcttttacatatgtgaaatcacatactgatattttgaatttgaaagatgattttgctgataagatggatattcatgttcattgtcctgcaggggcaattcctaaggatggtccatcagctggtgttggaatgtttacttctcttgtctcattattaactaataagccggttaaaagtaaagtagctatgactggtgaaattactttgagaggaaacgtattagctatcggcggagtaaaagaaaaagtaactgctgcacatagagctggtatta

SEQ ID NO: 263021 - DNA, 934 bp, Unknown
  Bacterial polypeptide expressing nucleotide sequence isolated from the Sargasso Sea
tgtagatgtaaagaaaagattaaatgccattattaaaataatggaaaacgaaacgagcattattggtgttgaaaaaagaattagaggcagagttaaaacccaaatggaaaaaacacaaagagagtattatttaaatgaacaactaaaagcaattcaaaaagaacttggcgaaattgaagacggtaaagatgaaacaactagcctaaataaagcaattacaaaagccaagatgccaaaagaggttgagaagaaatgtttacaagaattaaaaaaattaaaaaatatgagtccaatgtctgcagaggcaacagttgtcagaaactatttagattggatgacagaacttccttggcataaaaaaagtgaggtagatatagatttaaagaaagctctagatgttcttgataaagatcattttggattagaaaaagttaaagagagaataatagagtttttagcagttcaaaaaagaatggaaaaaatcaaaggcccaattctatgtttagtgggacctccaggagttggaaaaacatctttaggaaaatcaattgcaaaagctacaaatagagaatttgttagaatgtcagttggtggaatgagagatgaagcagaaatacggggtcacagaagaacttatattggatctttgccaggaaaaattattcagatgatgaaaaaagccggaacaaaaaacccactaattttattagatgaaattgacaaaattggaaatgattatagaggagatccatcttcagcattattagaagctttagatcctgaacagaacacaacatttaatgatcattatttagaagttgattatgatttgtctgatgtgatgtttgtaacaaccgctaatactttaaatattctgcctcctttgttagatagaatggaagtaattagattagcaggttacactgaggatgaa

SEQ ID NO: 263022 - DNA, 809 bp, Unknown
  Bacterial polypeptide expressing nucleotide sequence isolated from the Sargasso Sea
aaaattattcaaatgatgaaaaaagctggtactagcaatccgttatttttattagacgaaatcgataaggtaggtagtgattatagaggagacccatcttctgcattattagaagcactagatcctgaacaaaataagactttcaatgatcattatctggaagttgattatgatttatcggacgttctttttgtaactaccgcaaacacgttgaatatattgccacctttgcttgatagaatggaaataattagacttcctggatacactgaagatgaaaaaattaatatttcacaaaaatttcttatacctaaacaaagtgaggacaatgggttaaaaaaagaggagtgggaaattactgagaaggtaaataaaaaaattataagagattatacaagagaatctggtgttagaaatttagagagagaaatttctaaaatagctagaaaaatggttaaaaaaattgattcaaaagaaaaagtcaataaaacaatatctgaaggtgatttaagtaaatatttgggtattaaaaaatttaattttggcgagattgaaaaagaaaatcaaattggtgtagtcactggtttggcttggacagaagtaggtggagaaatattaaaaatagagtctgtcaatatgcctggtaagggtaaaatgcaaattacaggaaaattaggagaagttatgcaagagtctgtaaaagcggcgaaatcttatgttagatcaaaatctttagaatacggaataattccgcctttttttgaaaaaaaagattttcacattcatgttcccgaaggagcaacacctaa

SEQ ID NO: 263023 - DNA, 935 bp, Unknown
  Bacterial polypeptide expressing nucleotide sequence isolated from the Sargasso Sea
tacagcttttaaattacctgatggtactgttaaagttttagtagaaggtttaaaaagagttaagataattgatttccaggatgatgaaaaatttataacatgtgcttatgaacattgtaacgacgtatttcttaaaaacgaagatttaatgccattagctatcactgctgtcagaagattagaaaaactttcttcaataaataaaaaaatatcttcagaaacaataactaaaatcaaagaattaaaagatccagctaaaattgctgataacatagcctctcatttaaacgtaacaatttctgaaagacaacaaatttttgaaacaaccgatgttaaaaaaagattaaacagcgttataaaaataatggagaatgaaacaagtataattggtgtagagaaaaaaattagaggcagagttaaaactcaaatggaaaaaacccaaagagagtactacttaaatgaacaattaaaagccatccaaaaagaactgggtgaaattgaagaaggtaaagatgaaacatcaaatttaaataaagctatacaaaaagcgaaaatgccaaaggaagtacaaaaaaaatgcatgtctgaactaaagaagttaaaaaacatgagtccaatgtctgccgaagctacagtggttagaaattatctagattggatgattgatataccttggtacaaaaaagataaaattgatatagatttaaataaagcacttaatcaacttgatgaagatcattatggtttagaaaaagttaaagaaagaattattgaattcttagctgtacaaaaaagaatggataaaataaaaggcccaattttatgtttaattggcccaccaggagttggcaaaacatctcttggtaaatcaattgcaaaagctactaacagacagtttgtaagaatgtctttaggtggtgttagagatgaagctg

SEQ ID NO: 263024 - DNA, 896 bp, Unknown
  Bacterial polypeptide expressing nucleotide sequence isolated from the Sargasso Sea
agaggcctctgtagtaagaacgtatcttgattgtttagtagacgttccctggaaaaagaaatcgaaaattaaaactgatattaaagcctcaatggatattctagagaaagaccattatggtcttgaagaggtaaaagaaagaatagtagagtatttagctgttcaaaaaagagtgaaatcgatgaaagcacctgttctatgtttagttggacctccaggagttggtaagacctcgcttggagagtcaattgctagagctactaacagaaaatttgtaagaatgtctttgggtggggtaagggatgaatctgaaatcagaggccataggagaacatatatcggctctatgccaggaaagataatacaaaaactttctaaagtaggcgtaaaaaatcctttatttcttttagatgaaattgacaagataggcatggatcatagaggtgatccagcgtcagctttactcgaggttcttgatcctgagcaaaataatacatttagtgatcattaccttgaagttgattatgatttatcagaagtaatgtttgtatgtactgctaatagtttaaatatcccaactccattgcttgataggatggaaattatacgcatacctggatatatagaggatgaaaaaattaatatcgctaataaatatttacttccaaagcaaatggaaagaaatggcattaaagaaaatgaaataaaaattaataaaaatgttatcttgtctttaatcaggtattacaccagagaagcaggtgttaggggtcttgaaagacagattgcaaagattttaagaaaagttgttaaagaacgacttgtgactgaaactaaatcagataaggctacatcaattacaccaaaagaatttagagaagtattcgggagttaaa

SEQ ID NO: 263025 - DNA, 607 bp, Unknown
  Bacterial polypeptide expressing nucleotide sequence isolated from the Sargasso Sea
atttttattagatgaagttgataaaattggtaacgactatagaggagacccttcctcagcattattagaagccttagaccctgagcaaaatacagcgtttaatgatcattacttagaagttgactatgacttatcagatgtaatgtttgtaacaaccgcaaacactctaaatattctaccaccacttcttgatagaatggaagttataagaattccaggctatacagaggacgagaagataaatatagctaataagtacctgttacctaaacaggtaaaagaaaatggtgtgaaaaatggagagcttaacttagaggatgggacaataaaagagataatcagaagctacacaagagagtctggtgttagaaatttagagagagaaatttctaaagttacaagaaaagttgttaaaaaagttgtgagtggtgaagttgaaaaagttcaagtaaacgacaaaaatattccagattttttaggaataaaaaaattcaaatatggtgaagttgaggataaagataaaactggaattgtgatagggttggcatggactgaagtaggaggagaaattcttaaaatcgaaactgttaatatgccaggtaaaggg

SEQ ID NO: 263026 - DNA, 1075 bp, Unknown
  Bacterial polypeptide expressing nucleotide sequence isolated from the Sargasso Sea
cactctagtaaaaaggaactggaggttgcccggctgcaaagcgaaatttctgacgaggtgaacgaaaaggtaagtcagcatcagcgtgagttcttcctgcgcgaacagctgaaaattattcagcgggaattgggcctgagcaaagatgacaaaaccgcggaagccgatacttttcgcgaacgcatggacgccttgtcaccgcctgagccagtaaaaaagcgttttgatgacgaattgcataagctttccgtgttggaaaccggctcgccagaatacggcgttacccgcaattatcttgactggctaaccagcgtgccctggggacagtacactgatgataatctagacctagcacacgcacaggctgtgctttcagagcatcacactggtttgaatgatgtcaaagatcgcatcattgaattccttgccgtgggagccctacggggggaagtcaaaggctcaatcattcttttggtaggcccacccggggtgggcaaaaccagtatcggtaaatccattgccgatgcactgggtcgccgtttctaccgatttagcttgggcggtatgcgtgacgaagccgagatcaaggggcaccggcgcacctatatcggcgccatgcccggcaagctggtccaggctttgaaagaaaccggcactagcaatccggtgattatgctcgacgaagtcgacaaactgggccagtcctttcaaggcgatccggcctcagcgctgttggaagtgctggacccggaacaaaatcaggattttctcgaccattacttggacgagcgactggacctgagccatgcccttttcatctgtaccgccaacacactggacagcatccccggccctctgctcgatcgcatggaggtcattcgcctctccggttacatcaccgaagagaaagtggccatcgcccggcaacacttatggcctcggtcactggaacgcgctggagtaaaacccgctcagctacgaatcagtgacagtgccctgcgccaggtggtcgaaggctatgcccgcgaagcaggggtaaggaatctagaaaaacagctcaacaagatgatccgaa

SEQ ID NO: 263027 - DNA, 844 bp, Unknown
  Bacterial polypeptide expressing nucleotide sequence isolated from the Sargasso Sea
aaattttaatgatcattaccttgaagtagattatgatctttcagatgtgatgtttgtgactacggcaaatacacttagcattttaccacctttacttgataggctagaggttattagaattccaggatacacagaagatgaaaaagttaatattgcaaacaaatatttgataccaaaacaaatagaaagcaatggattaaaaaatgaagaatggaatttagaaaaagatgcgcttaaagatataatacgaaactacacaaaagaatctggcgtacgtaaccttgaaagagagatatctaaattagcgagaaaaactgtaaaaaatattttaactagtgttgaagaaaaaaattttgaaattaattcaaaaaatttaccagattatttaggtgttaaaaaatttaaatatgacgagatagagtctgataacagagtaggaatagtgacagggttagcctggacagaatttggaggcgagatattaaaaatagaatcagctatgatgcctggaaaaggaaagatgcaaataacaggtaagttaggagatgttatgcaagagtcagtcaaagctgcaaaatcatacgtaagatctaaatctttagaatttggaatcatacctccaatttttgagaaaaaggattttcacgttcatgttcctgaaggagccactccaaaagatggaccatctgcagggatagcaatggtaacttcaataatttcaacaataactggaatacctgttaataaaaaaattgctatgactggtgaagtgacgctaagaggaaatgttctaccaatcggaggacttaaagaaaagcttttagcagcgcacagagcgagaatt

SEQ ID NO: 263028 - DNA, 792 bp, Unknown
  Bacterial polypeptide expressing nucleotide sequence isolated from the Sargasso Sea
atgatttatctgacgtacttttttgtaactactgcaaacactttaaatattcttccaccattgcttgatagaatggaaataatcagacttcctggttacacagaagatgaaaaaattaatatttctcaaaaatttcttatacctaaacaaagtgaggacaatgggttaaaaaaagaggagtgggaaattacagagaatgtaaataaaaaaattattagagattatacaagggagtctggcgttagaaatttagaaagagaaatttctaaaatagcaagaaaaatggttaaaaaaattgactcaaaggaaaaggttaataaaaatatttcagaagacgacttaagttcatacttaggtgtaaaaaaatataatttcggagagattgaaaaagaaaatcaaattggtgttgtcactggtttggcttggacagaagtgggtggagaaatactaaaaatagagtctgttaatatgcctggaaagggtaaaatgcagattacaggaaaattaggagaagttatgcaagagtctgtcaaagcggcaaaatcttatgttagatcaaaatctttagaatacggaataataccacctttttttgaaaaaaaagattttcacattcatgttcccgaaggagcgacacccaaagatgggccgtctgcagggatagcaattgtaacttcgatcatttcatcaataactggagtgccagttagcaaagatgttgcaatgactggggaagtcacattaaaaggaaatgttctccaaattggagggttaaaagaaaaactcttagca

SEQ ID NO: 263029 - DNA, 804 bp, Unknown
  Bacterial polypeptide expressing nucleotide sequence isolated from the Sargasso Sea
tttaaaaaagataaagtagatatagacttgaaaaatgctcttaaagttttagacgatgaccattatggcctagataaggttaaagaaagaataattgaatttctggcagtacaaaagagaatggacaagataaaaggaccaatattatgtttgataggacccccgggtgttggaaaaacttcattaggcaaatctattgctagagcaacaaatagacaatttgttagaatgtcattaggaggcgtaagagacgaggctgaaattagaggacacagaagaacttatataggatcattgccaggaaaaattattcaattaatgaaaaaagctggaacaaaaaatccattaattttactagatgaaattgataaagttggaaatgattatagaggcgacccatcatcagctttactagaagcattagacccagaacagaacacgacttttaatgatcactatctagaagttgactatgatttatcagatgtaatgtttgtaacaactgcaaatactttaaatattttaccaccattattagatagaatggaagtaattcgaattcctggttacaccgaagatgaaaaaattaatattgcgaataaatatttgctacctaaacaaataaaagaaaatggagttaaaacagaggagttggaactagaagatggaactattagagagattataagaagttttactagagagtcaggcgtaagaaatttggaaagagaaatatctaaagttgctagaaaagtcgttaaaaaagttgttagtggtgaagaaaaaaaggttgttgttactaat

SEQ ID NO: 263030 - DNA, 932 bp, Unknown
  Bacterial polypeptide expressing nucleotide sequence isolated from the Sargasso Sea
tgatgtgcttttcttctgcaccgcgaatgtggctcaggacatccccccctccctccatgaccgcatggaggtcatcaacctctctggatacactgaactagaaaaatttcatatactcaaacggcacttgattccaaaacagatcgaggaaaacggattgacaggtaagcagattcaatttcaaaaaaaatcaatagaaaacatcattcagcaatacactagagaagcaggagtgcggaaccttgaaagggaagtagctaaagtctgtagaaaggcagcaacccaactggtgatagatccctctatagagaaaattacggctacacctgttcgaatccgtgagtttctcggagttcctaaatataaattcggcaaaatcgaggaacagaatgagatcggtatcacatcgggactggcatggactcaggctggtggagaactgatgatgactgaggtatcgattatgaagggaacggggaaattgaacctgaccggtaagctgggagaagtaatgaaagaatctgcccacgcagcactgagttatgtcaggaccaatgccaaccgattaggaattttttcctcagttttcaaggaaacggatatccatatccatgtgcccgagggggcagtaccgaaggatggtccttcagcaggagttacaataactacagctctagtcagtgcttttactgaaattcccgtgcgtcgtgaagttgccatgactggagaaataactttgcgagggaaagttctcccaattggaggattgaaggaaaaacttttggcagcaaaaagaggactaatcaaaacggttcttattccctcaaagaatgaaaaagatctccaggaaataccagatgagatcaagaaccaacttgatatccttagtactgatactgtagataaagtccttgaaaatgctttagaaaaac

SEQ ID NO: 263031 - DNA, 524 bp, Unknown
  Bacterial polypeptide expressing nucleotide sequence isolated from the Sargasso Sea
taaaactggctcactaggcgaagtaatgcaggaatcaatccaagctgctttaacagtcgtaagatcaagatcagactcgctgggtatcaagaaagacttttatgaaaagttcgatacacatatacatgttcctgagggcgctactccaaaagatggacctagtgctggagttggcatgacaactgcactgatatctgcttttacagaaattccagtaagatcagatgtcgccatgactggtgaaataactttgagaggtcaagtcttgaaaattggcggtctaaaagaaaaattacttgcagcgaagcgtggcggcataaaaaaagtgatcatacctttagacaataaagcggatttaaaagaaattcctgacgtaataactgacaaacttgaaataattcctgtcgaatggattgatgaagtaatattgcattcacttgagtcgcagccaaaagcaattaacaaatcttcaagctttaaatctaaatcaaaaaaatcgacaaaaactgttagcaaacactaat

SEQ ID NO: 263032 - DNA, 860 bp, Unknown
  Bacterial polypeptide expressing nucleotide sequence isolated from the Sargasso Sea
aataattgaaaacgaggcaagtattattggagtagaaaaaagaattagaggaagagtaaaaaatcaaatggaaaagactcaaagagaatattatttaaatgaacaattgaaagcaatacaaaaagaattgggtgaaatagaggatggaaaagatgaaacttcaaatctgaataaggcaatcttaaaggcaaagatgcctaaagaagttcaaaaaaaatgtatgtcagaactaaaaaaattaagaaatatgagcccaatgtctgcagaagccacagttgttagaaattatcttgattggatgattgatattccttggtacaaaaaagatcaggttgatatcgacttaaataaagcaatgaaagttttggaccaagaccattttggcctagaaaaggttaaagaaagaattattgaatttcttgcagttcaaaaacgaatgcagaaaataaaaggtccaatactatgcttagtaggacctccaggagtgggaaaaacttctttaggaaaatctattgctagagctactaacagacaatttgttagaatgtctttgggtggcgttagagatgaagcagaaataagaggtcatagaagaacttacataggatcattacctggaaagattcttcaaatgatgaaaaaagcaggtacaaaaaatcctttattcttattagatgaagttgacaaaattggaaacgattatcgaggagacccatcttctgctcttttagaagctttagatcccgaacagaataaaacttttaatgaccattatttagaagttgattacgatttatctgatgttttgtttgtaactactgcaaatacattaaatattcttccacccattattagataga

SEQ ID NO: 263033 - DNA, 875 bp, Unknown
  Bacterial polypeptide expressing nucleotide sequence isolated from the Sargasso Sea
atcttcagctttatttgaagctttggacccagaacaaaacacaacgtttaatgatcattatttagaagttgattatgatttatcagatgtattgtttgttacaactgcaaatacacttaatatacttccgccattattagatagaatggaggtaattagaataccaggttacactgaggatgaaaaaataaatattgccaataaatatttactacctaaacagattaaagataatggagtcaaaaagggggagctacaattatctgaaggaacaatcaaagaaattattagaagttatacaaaagaatctggggttagaaatttagaaagagaaatatctaaaattgcaagaaaagtagttaaaaaaattgttgcctatgaagaaaccaaagtaaacgtaaatgaaaataatatttctaattttttaggagtgaaaaaacataaatttggtgaacttgaaagtgaaaataaaattggaatagtaaccggtttagcatggactgagtatggaggtgaaatattaaaaatcgaaacagttaatatgccaggaaaaggaaaaatgcaaatcacaggtaaattaggtgatgttatgcaagagtcagttaaagctgcaaaatcctacgttagatctaaaagtttagaatatggaattattcccccaacttttgaaaaaaaggattttcacattcacgtacccgaaggagctacaccaaaagacggaccttcggccggaatagcaatggttacctctatagtttcttcagttaccaatattcctgtaaataaagaaattgctatgacaggagaagttacaattactggacaagtattacccataggtggactaaaagaaaagcttttagcagccccataga

SEQ ID NO: 263034 - DNA, 899 bp, Unknown
  Bacterial polypeptide expressing nucleotide sequence isolated from the Sargasso Sea
tggatacattgaagatgagaagctgcaaattgctcaaaactatcttcttcctaaacagcttgaaagaaatgggcttgaagataaagaattgaacttaaataaaaatgttcttttagacttaattaggtattacactcgtgaagctggtgttagaggtcttgaaaggcaaatctcaaagattttaagaaaggttgtcaaagagagactactatctaaaaagaaaacagctacaaaaatagattccaaaaacctagaaaaatattctggagtcagaaaattcaagtttggcgaagctgaatcttcaaacactattggtcaagtttgtggactagcatggactgaggttggtggcgaacttctcactattgaggcatcaaaagtctcaggcaaaggtaaaacaattaaaactggctcactaggcgaagtaatgcaggaatcaattcaagcagctttaacagttgtgagatcaagatcagactcgcttggtattaagaaagacttttatgaaaagtttgacacacatattcatgttcctgagggagctactccaaaagacggacctagtgctggagtaggtatgacaactgcgctgatatctgcttttacagaaattccggtaagatcagatgttgcaatgactggtgaaataactctgagaggccaagtcctaaaaattggtggtttaaaagaaaaattacttgctgcaaagcgtggcggtataaaaaaagtgatcatacctttagataataaggccgatttaaaagaaattcctgatgtaataacagacaagcttgaaataattccagtcgaatggattgatgaggtaatattgcattctcttgagtcgcagccaaaagcaattaataaatcctcaagcttcaaatctaaatcaaaaaaat

SEQ ID NO: 263035 - DNA, 916 bp, Unknown
  Bacterial polypeptide expressing nucleotide sequence isolated from the Sargasso Sea
ttcaaaaattgctgacaatatagcttcgcatttaaatacaactatttctgagaaacaacaaatttttgagacaattgacataaaaaaaagattgaatggtgtaattaaaattatggaaaatgagacaagcattattggtgttgaaaaaagaattagaggcagagttaaaacccagatggaaaaaactcaaagggagtattatttgaatgagcaacttaaggccattcaaaaagaactaggggaaattgaagatggaaaagatgaaacctcaagtttaaataaggctattcaaaaagctaaaatgccaaaagaagttcaaaaaaaatgtatgtctgaattaaagaagttaaaaaatatgagcccaatgtcagctgaagctactgtagtaagaaattatcttgattggatgattgacataccttggtttaaaaaagataaagttgatatagatttaaacaaagctttaaaaatattagatgaagatcactttggattagaaaaggttaaagaaagaatcgtagaatttttagcagtacaaaaaagaatggaaaaactaaaaggtccaattctttgtttggtcggtcctccaggagtaggaaaaacatcattagggaaatcaattgcaagagctacaaatagacagtttgttagaatgtctttaggtggaataagagatgaagctgaaattagagggcatagaagaacttatataggttctttacctggaaaaataattcaattgatgaaaaaagctggtactaaaaatccattaatattactagatgaaattgataaagttggcaatgattatagaggagatccttcttccgcgctgttagaagctttagacccagaacaaaatactacttttaatgaccattatttagaagttgattatgatttatcagacgtactg

SEQ ID NO: 263036 - DNA, 937 bp, Unknown
  Bacterial polypeptide expressing nucleotide sequence isolated from the Sargasso Sea
attaaaaaataatttagttgatgctcaaaaggttttagatgatgatcattttggaatcgaaaaggttaaagaaagaataattgaataccttgctgtccaaaaacgaacaggaaaaataaaaggtcctttactttgtttagttggtcctccaggagttggtaaaacatcattaggtaaatcaatggcaaatgctacaggacgtaagtttgtccgtatgtccttgggtggtgtcagagatgaggccgaaattagaggacatagaagaacatatataggttcaatgcccggtagaattattcaagccttgaaaaaggctggtaccaacaatcctctaattttgttagatgaagttgataaattaggtgctgattggcgtggtgacccaagctctgctttattggaggttttagatcctgagcaaaataattcatttcaagaccattatttagaagttgattgcgatttatcaaatgttatgtttgttacaaccgccaactctctaaatatgcctaaaccacttttggatagaatggaaattattcgtttgtctggttatactgaattggaaaaactcgagattgccaaacagcatttgttacctaaagtgattaaagaacacggtcttaaaaataatgaattctcattaactgataaagaattattagaagtcatacgttcttacacgcgtgaagctggcgttcgaggcttagaacgtgagatctctaaattatcaagaaaattgataactgagattttaataaaaaataagaaaaaaattaaggttgaccataaggctattaataaatttcttggtgtaccaaaattcaagcattctgaaattgaggataaagacttagttggtattacaactggacttgcttggactgaagttggtggtgagctgctgacaattgagtctgctctttcacctggcaaa

SEQ ID NO: 263037 - DNA, 791 bp, Unknown
  Bacterial polypeptide expressing nucleotide sequence isolated from the Sargasso Sea
gcgcggtgatccgacgtcggcactgcttgaggtgcttgatcccgaacagaacgacactttcaatgaccattatctcgaggtggattacgatttgtccgatgtgatgtttgtgacgacggcgaacacgctacggatgccaccaccactcttggatcgcatggaaatcattcgaattcctggatacacggaagacgaaaaagttgaaatcgcgaagcgccatttgctgcctaaacagttaaaggaaaatggcctcaaagagaacgaatggtcaatttcagatggtgccatgcgggacctgatacgctattacacgcgtgaggcgggtgtccggaatctggagcgcgaaattgcgaacgttgcgcgcaaatctatcaaggaaattttgatggaagagcacgtgaccgagattaaggtcactagtcgtaacgttgataaatacgccggtatccgcaaattccgctttggcgaggctgaggaggaaaatatcgtaggtgtggtgaccggtctggcgtggacggaagttggcggggaactactgacgattgaatcagcaaagacgcctggcaagggaaaaatacaaaagacaggtaagctaggcgacgttatgcaggaatcggttcaggcagccgaaacctacgtaaagagccgcgccgcagagttcggcatcaagccaacaacctttgaatcaatcgacattcacgttcacgtcccggaaggcgcaacaccgaaagatggtccgtccgccggtgtcgcgatggttacatcgatcgtttccgtcctgaccggcattc

SEQ ID NO: 263038 - DNA, 840 bp, Unknown
  Bacterial polypeptide expressing nucleotide sequence isolated from the Sargasso Sea
agtagatctgtcggaccgttttgataagattatgaactttattcaagctgaacttgatgtgatgcaagttgaaaagaaaattaggggcagggtgaaaaatcaaatggagaaaactcaacgcgaatattatttgaacgagcaaatgaaagctattcagaaagagcttggcgaaggtgaagacggtaaggacgatgtccaagaatacgaggaaaaaattgaggcaacaaaattgtcaaaggaagctcgcgaaaagtgctacgctgaaatgaaaaaattgaggtcgatgagtcctatgtcagctgaatcaggtgttatacgtaattaccttgattggatcttatccataccttggaacaaaaaaactaaagttaaaaaagatataaattttgctgaaaaagtccttaatcaagatcattatggcttagaaaaagtaaaagaaagaattcttgaatacttagcggttcagcaaaggattaaaaaaatgaagggaccaattttgtgtcttgtgggagcccctggtgttggaaaaacgtcattaggtaaatccattgcacgctctacaggaagaaagtttgttcgcatgtcacttggaggcgtacgtgatgaggcagagattagaggccataggagaacttatattggatccttacctggcaaagttttacaaatgatgaaaaaagcaggctcttctaatcctttattcttattagacgagattgataagcttggagcggactataggggagacccctcttcagctttgcttgaggtattagatccagagcaaaataattcattcaatgaccattatcttgaggttgactacgacttgtcagacac

SEQ ID NO: 263039 - DNA, 931 bp, Unknown
  Bacterial polypeptide expressing nucleotide sequence isolated from the Sargasso Sea
ctaggagagtctatagcaaaagccactggacgagagtttacagagttttctctaggaggagttagagacgaagcagaaataagaggtcatagaagaacctacatcggatctatgccaggaaaaattttacaaaaaatgtcaaaaactggcgttaaaaatccattattcttactagacgaaatcgataagatgggcgctgattacagaggagatccttcttctgctttattagaagttttagatcctgaacaaaatcatacttttaacgatcattttcttgaagttgattatgatttatctgacgttatgtttgtttgtactgctaattctttggatattcctggtccacttttagataggatggaaattatcagacttcccggttacacagaagatgagaaacttagtattgctaaaaattacttggttccaaaacaattgaaaaataacggacttaaagaaaacgaaatcaaatttgaagattctggtttattagatgcaattagatattttactagagaagctggtgtaagagcgcttgaaagagaaatagctaaaatttgtaggaaaacaattaaaaaaatagctgatataaaaaagaaaactattcaaaaagttaatgctaaaaacttagaagactatttaggagtcaaaaaatttgattttggtgaagcgaaagaaaaagataaaataggtcaggtcacgggccttgcttggactcaagttggtggtgagttattgactattgaagcggcaactttcaaaggcaaaggaagaataattaaaacaggaagacttggcgatgttatgcaagaatctattcaggctgcggtatccgttattcgatcaagagccgaaggtttaggtattaatcctgagttttctgatttgaacgacatccatattcatgttccggaaggagctacgccaa

SEQ ID NO: 263040 - DNA, 341 bp, Unknown
  Bacterial polypeptide expressing nucleotide sequence isolated from the Sargasso Sea
aaaacaggatctgcatattcatgtgccagaaggagctacacccaaagacgggcctagtgctggtattacaatgtgtacagccatagcttcacttattcttgataagaaggtgaaagcgaatctagcaatgacgggagaaattacattggctggcaaagttttaaaaattggtggtctcaaagaaaagctcattgcagccaaaagaagcggcattactaatgtaatcatccctcatgaaaacaagggtgatcttgaggaaatagaagccaatattttgaaagatgtgaatatacaccctgtaaaagctattgaagaagttcttgaaaaagcacttgtttagc

SEQ ID NO: 263041 - DNA, 892 bp, Unknown
  Bacterial polypeptide expressing nucleotide sequence isolated from the Sargasso Sea
aaaacatctttagttaaatcaatggcaaattctaccggaagaagctttgttaggatgtcacttggtggtgtaagagatgaagccgaaatcagaggtcatagaaaaacatacattggttcaatgcctggtaggtttattcaagctatgaaaaaatctaagtcatccaaccctttaattttactagatgaaatagataaactaggatcagattggagaggtgacccatcgtcagcactacttgaagtccttgatcctgagcaaaatagcaaatttaatgatcattatcttgagctggattatgacctttcagatgttatgttcgtttgtacagcaaatacactcaatataccgccagcacttcttgacagaatggaagtaattagaattcctggttatactgaaaaagaaaaaaatcaaattgcaaaaaaatatctagtaccaaagcaaataaaaaatcacggaattaaaaattctgaaattgcatttagtgttaaagttttaaactcaataattagatattatacaaaagaagccggggtaagaaatctcgaaaaagaaatttctaaagtttgtagaaaagccgttaagcgattagaaaccacaagattgaaaaaagttaatttaaacgaaaaatctttaaaagattttttgggtatatctaaatttagaacaagtgaaattgaaaaaaggaatttagttggtgttaccaatggtttagcatggacagaggttggaggagaaatcttatctgtagaggttattttatcaattggaaaaggtaaacttaccataacaggtaagttaggagaagttatgagagaatctattcaggcagctacttcatatgttaagtctaaatctgttaatcttggaatcaatccaaaagattaga

SEQ ID NO: 263042 - DNA, 925 bp, Unknown
  Bacterial polypeptide expressing nucleotide sequence isolated from the Sargasso Sea
acatcgccactattaccactaagagatatagtggtattcccaagcatggttattcctttatttgttggaagagataaatctatttcagctttaaatgaagtaatgaaaaataataaaaaaattgttttagttactcaaaagaattctgaagttgatgatcctaaaaagacagatgtatttttatacggatgcgaaagctcaatacttcaacttcttaaactacctgatggaacagtaaaagttttagttgaaggaattaaaagagtaaaaattgttgatttcaaagatgatgaaaagttcattacttgttcatatgagtacaataatgaaattatttcagaaaatgaagatttaataccattagctatgacagcagtaagaagattggaaaaacttacttcaataaataaaaagatatcctcagagacaatttctaatattaaagaattaaaagatccttcaaaaattgctgataacatagcatctcatttaaattctactatttctgaaaaacaacaaatttttgaaactgtagacgttaaaaaaagattaaatggtgttataaaaattatggaaaatgagacaagcatcattggtgttgaaaaaagaattagaggcagagttaaaacacaaatggaaaaaacacaaagagaatattacttaaatgaacagttgaaagctattcaaaaagaattaggtgaaattgaggatggcaaggatgaaacttctagcttaaataaagctattcaaaaagcaaaaatgccaaaagaagttcaaaaaaaatgtcttactgaattaaaaaaattaaaaaatatgagtccaatgtcagctgaagctacagttgtaagaaattatcttgattggatgattgatataccttggtttaaaaaagacaaagttgatatagagttaaacaaagcttcaa

SEQ ID NO: 263043 - DNA, 748 bp, Unknown
  Bacterial polypeptide expressing nucleotide sequence isolated from the Sargasso Sea
aatgtttgtaactactgcaaatacattaaatatattacccccattactagatagaatggaagtaataagaataccaggttatacagaagacgaaaaaataaatattgcaaacaagtatttattacccaaacaaataaaagaaaatggtgttaaaaaagaagagctagaactagtagatggtacaattaaagaaataattagaagctatacaagagagtctggagtgagaaatcttgaaagagaaatatcaaaagttgcaagaaaagtagttaaaaaagtagttaatggagaagaaaaaaaagtaacagtgaatgacaaaaatgttcatgattttttaggggttaaaaaatttaaatatggagaagttgaatcagaagataaagttggaatagttacaggtcttgcttggactgagtttggtggagaaattttaaaaatagaaactgttcacatgccaggaaaaggtagaatgcaaataacagggaaattaggcgatgtaatgcaggagtcagtaaaagctgcaaaatcatttgttagatcaaaaagccttgaatatggaattatacctccaatttttgaaaagaaagattttcatatacatgttccggaaggagcaacgcctaaagatggtccttcagctggaattgcgatggtaacttcaatagtttcagcaataacaaataatccagttaataaacatatagcgatgactggtgaagttacattactgggccagtactacaaatag

SEQ ID NO: 263044 - DNA, 781 bp, Unknown
  Bacterial polypeptide expressing nucleotide sequence isolated from the Sargasso Sea
gtagggcctcccggtgtgggcaagacctcgctggggcagtccatcgccaaggctaccaaccggaaatacacccgcatggccctgggtggcgtgcgtgacgaagcggaaatccgcggtcaccgcaaaacctatatcggcgccttgccgggcaagctgttgcagaagctggccaaggtagaggtgaagaacccgctgttcctgttcgatgaaatcgacaagatgggtatggatcatcggggtgacccggcgtcggccctgcttgaggtcctggacccggaacagaaccacaccttcaacgaccattacctggaagtggattatgacctttccgatgtgatgttcgtgtgtacctccaactccatggatattccgccggcgttgctggaccgtatggagatcatccggattccgggttacaccgaagacgagaaggtcaacattgccctgcgttacctgctgcccaagcagatcaaggccaatggcctgcgtaagcacgaactcaagttaccggaagagaccctgcgcgacctgatccgctactacacccgggaagccggtgtgcgtggcttggagcgggagattgccaagatctgccgtaaggtagtgcgtgagcacgtagagagcagtgataacgcttctattaccctgacgccggacatgctggaagattattccggcgtgaagaagttcaagtacggcctggccgaggaaagcaatcaggttggccaggtgacgggcctggcctggacccaggtgggcggcgaactgctgaccatcgaat

SEQ ID NO: 263045 - DNA, 283 bp, Unknown
  Bacterial polypeptide expressing nucleotide sequence isolated from the Sargasso Sea
aatgcaaggaaaaggaagaaggcaggttacagggcgtcttggagatgtaatgaaagagtctatacaggcagcagtatcctatgtacgttttaatgcaccagctttgggaattattcctcctgagtttgaaaagaaagatattcatgtgcacgttccagaaggtgcaactcctaaggatggaccttcagcaggagtggcaattgtaacttctatcgtttccatactaacaggcatccctgtcaactataaggttgccatgacaggagaaattaccttaagaggc

SEQ ID NO: 263046 - DNA, 482 bp, Unknown
  Bacterial polypeptide expressing nucleotide sequence isolated from the Sargasso Sea
atcaattcaagcagccacctcatatgtaaaatcaaaatctgtgagtttaggaataaacccaagagattttgaaaattatgatattcatattcatgtacctgaaggagctactcctaaagatgggccaagtgcaggtatagccatttttaattctttagtgtcatcattgacaaataataaaattaaaagagatgttgcaatgaccggagaaattactcttagaggtcgtgttttacctataggcggtttaaaagaaaagatctatgctgctagtagagcgggtattaaaaaagtccttatacctcaagaaaattttagagaagtttctgagtttgataaagaagttcttaaaggaattaagataatacctgtttctaatgctttttcaattcttgagcacacattagtaaaatcaataattccattaaatttaagcgaatcacaattaaaaaataatcaaaatacaacaagcacacattaat

SEQ ID NO: 263047 - DNA, 871 bp, Unknown
  Bacterial polypeptide expressing nucleotide sequence isolated from the Sargasso Sea
gcattacttgaagctttggatccagaacaaaacaaacaatttaacgatcattacttggaagttgattatgatttatcagatgtaatgtttgttactacggcaaatacattaaatattcttccaccactattagatagaatggagataattaggattcctggttatacggaagatgagaaaataaatatatcacaaaaatttttaattccaaaacaaagtaaaaataacggattaaaagataacgagtggaaaatttcggagaaattaaataaaaaaataataagagattatactagagagtcgggagtgagaaatcttgagagagaaatatcaaaaatagcgagaaaaatagttaaaaaaatagatgcacaggaaaaagttaatcatgaaattttagagtccgaattgagtaattatttaggagttaaaaaatttaattttggtgaaatggaaacagaaaataaagttggtgttgctacaggcttagcttggacagaagtaggtggagaaatacttaaaatagagtcagtcaatatgccaggaaaaggtaagatgcaaataacaggcaaattaggtgaagtaatgcaagaatcagtaaaagcagcaaaatcttatgtaagatctaaatcgcttgaatatggtataattcctcctttgtttgaaaaaaaagattttcacgtacacgtacctgaaggcgctacaccaaaagacggtccttcggcaggaatagcaattgtaacatctataatctcctcaataacaggagtgtcggttaacaaagatgttgcgatgaccggagaagtaactttgagaggaaacgttcttcaaataggaggcttaaaggaaaaacttttagctgctcatagagcgg

SEQ ID NO: 263048 - DNA, 916 bp, Unknown
  Bacterial polypeptide expressing nucleotide sequence isolated from the Sargasso Sea
cgattggctggttatactgaagatgaaaaaataagtatcgcaaataaatatttattacctaaacaaataaaagataatggtgttaaagaaaaagaaatgaagctagatgacaatattataaaagaagtcattagaggatacacaaaagaatcaggtgtaagaaatcttgaaagagaaatttctaaacttgctagaaaggtcgtaaaaaaaattgtagctggtgaagaaaaagaggttggaattaacaataaaaatttatcagattttctaggtgttcctaaatttaaatttggagaattggaggctgaaaatagggtaggtatagttaccggtcttgcttggacagagtatggcggtgagattttaaagatcgagacagttacaatgcctggaaaaggcagaatgcagattactggtaagttaggtgatgttatgcaagaatcagttaaagctgcgaaatcctttgtaagatcaaaatgtttagaatatggaataataccaccaatctttgaaaagaaagatttccacatccatgttcctgaaggcgcaacacctaaagatggtccatccgctggtattggtatggtaacctcaattgtttcctcaattaccaatattccggtaagaagagatgtagctatgacaggagaggtaactttaacaggtcaagttttaccaattggtggtttgaaagaaaaattattagctgctcacagagctggaattaaagaagtattaataccgaaggagaatgagaaagatcttgtagatatgccaaaaaaaattattgatgatataaagatcactcctattgaatatgctgatcaggtaataaaaatagctcttacaaaggaactcaaaccaactgagtgggttgaggttgaaatctcaaaaaaagacgacaaatctcaagcta

SEQ ID NO: 263049 - DNA, 795 bp, Unknown
  Bacterial polypeptide expressing nucleotide sequence isolated from the Sargasso Sea
ttaaaaacaatgagtcctatgtcagcagaggccacagttgttagaaattatttagattgggttctatcaattccttggaataatccaaaaccaatatcaaaaaacatttctaaagcatctaaaattctagaaattgatcattatggacttgaaaaagtaaaagatagaatcctagaatatctagccgttcagaagagaatggataaacttagaggaccaattttatgtttagtgggccctccaggagtgggtaaaacttcattaggtaaatctattgcaaatgcaactggtagaaattttgtaaggatgtctttaggtggtgtgagagatgaagctgaaataagaggtcacagaaaaacctatataggctctatgcctggaagatttattcaatcaatgaaaaaatctaaatcatcaaatcctttaatattacttgatgaaatagataaacttggatcagattggagaggtgatccatcctcagctctattagaggtattagatcctgaacaaaacagcaagtttaacgatcattacttagaaatggattacgatctttctgatgtaatgtttgtttgtacagcaaatacattaaatattcctcccgcgcttttagacagaatggaaattataagaataccaggttatacagaaaaggaaaaaaatcaaatagctcaaaaatatcttgttcccaaacaaattagagatcatggacttaagaaaagtgaactaaaatttaatacgaagatcttaagttatattattagaaattataccagggaagctggagtgaga

SEQ ID NO: 263050 - DNA, 804 bp, Unknown
  Bacterial polypeptide expressing nucleotide sequence isolated from the Sargasso Sea
ttaaatgaagtaatgaaaaatgacaaaaaaataattttagtcactcaaaaaaattctgagattgatgatccaaaaaaaacagatatttttatgtatggatgtgaaggtaatatacttcaattattaaaattaccagatgggactgttaaagttttagttgagggtgttaaaagagtaaaaattttagattttaaagataatgataagtttattgtctgcgaatattccgcattgaacgatataattaataaagatgaggatttataccccttagcagctacagcagtaagaagattagaaaaattaacatctattaataaaaaaatttctagcgaaactattaataatattaagcaattaaaagacccttctcaaattgcagataatattgcttctcatatatcggcgaccatttctgagaaacaacaaatatttgaaaatgtagatgttaaaaaaagattgaattctataatcaagataatggaaaatgagactagcattattggagttgaaaagaggataagaggaagagttaaaactcagatggaaaaaactcaaagagaatactatttaaatgaacaacttaaagctattcagaaagaattaggtgaaattgaggatggtaaagatgaaagtacaagtttaaataaagcaatccttaaagctaagatgcctaaagaagtagaaaagaaatgcttacaagagcttaaaaaattaaaaaatatgagcccaatgtctgctgaggcaactgttgtgagaaattatttggattggatgacagaactaccttggtttaaaaaaagt

SEQ ID NO: 263051 - DNA, 922 bp, Unknown
  Bacterial polypeptide expressing nucleotide sequence isolated from the Sargasso Sea
attgagaggagatctttcatctgcttgctggagggtattagacccagaacaaaatgataaatttaacgatcattacctagagttagattatgatctatctgatgtcatgtttgtttgtactgcaaatactcttaatatacctccagctttgctcgacagaatggagattataagaattcctgggtatacagaaaaagaaaaaaataaaatagctcaaaaatatttaattccaaagcaacttaaaaatcatcacttaaaaagaaatgagctaaaattctcaaatcaatctattaatcaaattattaggaattatactagagaagctggagtaagaaatcttgaaaaagaagtttctaaagtatgcaggaaaactgttaaattacttgaaacaagcaataagaaaactgtaattcttaatgataaaataatgcaagattttttgggtataagtagatttagatcaagtgaaattgaaaagattaatcttgtcggtgtaacaaatggtcttgcatggacagaggtaggtggtgagattttatcaattgaagttattcttgcaattggaaaaggcagattaacaattactggaaagctaggtgaggtaatgaaagagtctgtgcaggcagctatatcttatgtaaaatctcatagtttaaatcttggtatacatccttttgattttgataaatatgatattcatgtccatgttcctgaaggtgccaccccaaaagatggtccaagtgctggtctagcaatatttaattcacttgtttcatctcttacctcaaataaagtaagaaaagatgttgccatgactggtgagataacactaagaggaagggttttgcctattggtggattaaaagagaaggtttatgctgcatcaagagcgggtataaaaaaagttctaatcctgaggaaa

SEQ ID NO: 263052 - DNA, 903 bp, Unknown
  Bacterial polypeptide expressing nucleotide sequence isolated from the Sargasso Sea
atgaagtggataaagttggaaatgactacagaggagatccatcatcagccttattggaagctttagatcctgagcaaaatacaacttttaatgatcattatttagaagttgactatgatttatcagatgtaatgtttgttacaacggctaatacattaaatattcttccacctttgttagacagaatggaggttataagaataccaggttacacagaagatgaaaaaattaatattgcaaacaaatatcttttaccaaaacaaatcaaagataacggtgtaaaagatggagaattgaacttggcagatggaacaataaaagaaataattaggagctacacaagagagtctggagttagaaatttagagagagaaatatctaaagtaaccagaaaggttgtaaaaaaggttgttaacaatgaacaaaataatgttgaagtcagcgaaaaaaatatttcagattttttaggaattaaaaaatttaaattcggagaattagaaactgaaaataaaattggaatagttattggtttagcatggacagaatttggtggtgaaatactaaaaatagaaactgttaatatgccaggaaaaggtagaatgcaaataactggaaaacttggtgatgtaatgcaagagtcagttaaagcagcaaaatcattcgtaagatccaaaagtttagagtacggtattattccacctttttttgaaaaaaaagactttcatattcatgtcccagaaggagcaacaccaaaagatggaccttcggctggtattgcaatggttacttcaatagtttcttctatgacaaacattcccgttgatagaaatatagcaatgactggagaagatacagttactggtcaagttttgccaattggaggtcttaaagaaaaactttagc

SEQ ID NO: 263053 - DNA, 966 bp, Unknown
  Bacterial polypeptide expressing nucleotide sequence isolated from the Sargasso Sea
gtaggaaaaacgtctttaggtaaatcaatagcaaaggcaactaacagacaatttgtaagaatgtcattgggcggagtaagagatgaagcagaagtcaggggtcacagaagaacttatattggttcacttcctggaaaaataattcaaatgatgaaaaaagctggtactaaaaatcctttatttttattggacgagatagataaagttggaaacgattatagaggtgatccttcatcggctttattagaggccttagaccctgaacagaatactacatttaacgatcattatcttgaagtagattatgacttatcagatgttatgtttgtaacaacagcaaacacattaaatattcttcccccacttttagatagaatggaagttataagaataccaggatatacagaagatgagaagattaatattgctaacaaatatttacttcctaaacaaatcaaagacaatggcgttaaagaaggtgaaatgaagttagctgacgatacaattaaagaaattataagaagttatacaagagaaagtggtgttagaaatttagaaagagaaatatcaaaagtaacaagaaaagttgttaaaaaagttgtaaataatgaagaaaagagtgttgatgttaatgaaaaaaatatacctgactttcttggaattaagaagtttaaatttggtgaactagaaacaaaagataaagtcggaatagtcataggtttagcttggacagagtttggtggagaaatattaaaagttgagacagttaacatgccaggcaaaggcagaatgcaaataactggtaagttaggtgacgtaatgcaagagtctgtaaaagctgcaaaatcttatgtcagatcaaaatgtttagagtttggtgtaacaccaccactattcgagaaaaaagattttcatatacatgttccagaaggagcaactcctaaagatggaccttcagcaggtata

SEQ ID NO: 263054 - DNA, 859 bp, Unknown
  Bacterial polypeptide expressing nucleotide sequence isolated from the Sargasso Sea
agacaatttgtaagaatgtcattaggaggggttagggacgaagctgaagttcgtggacatagaagaacatacatagggtcattacctggcaaaattatacaaatgatgaaaaaagcaggaactaaaaacccactttttttattagatgaaattgataaaattggaaatgattacagaggagacccatcatctgcattgttagaggctcttgatcctgagcaaaatacaacatttaatgaccattatttagaagttgattatgatttgtccgacgttatgtttgttactacggctaatacactgaatattttaccaccacttcttgataggatggaagttataagaattcctggatatacagaagatgaaaaaataaatatagcaaataaatttttacttcctaaagcacttaaagagaacggtgtaaaagagggtgaaatggatttgcaagagggaacttttaaagaaattataagaaactacaccagagagtctggagtaagaaatttagaaagagaaatctcaaaaattaccagaaaggttgttaaaaaagttgtgaactcagaggaaacaaaagtaaaggttgaacctaaaaatattaatgattttcttggcgtcaaaaaatttaagtttggagaattagaaaatgaggataaagttggtatcgtaacaggacttgcgtggacagaatttggtggagaaattcttaagattgaaacagtaaatatgccaggaaaaggtcgtatgcaaataactggaaaacttggtgatgttatgcaagagtctgttaaagctgcaaaatcctatgtaaggtctaaaagtttggattttggtatcatacctccaatttttgaaaaaa

SEQ ID NO: 263055 - DNA, 742 bp, Unknown
  Bacterial polypeptide expressing nucleotide sequence isolated from the Sargasso Sea
ttaaccgctattagaagattagaaaaacttacttctataaataagaaaatttcttcagaaactataaatagtattaaacaattaaaagatccttcaaaaattgctgataatgttgcatctcatttaaatacatcaatttctgaaaaacaacagatatttgaaactctagatgttaaaaaaagattgaacggtgttataaaaataatggaaaacgaagctagcattatcggagtagaaaaaagaattagaggtagagttaaaaatcaaatggaaaaaactcaaagagaatattatttaaacgaacaattaaaagctattcaaaaagaattaggtgaaattgaagatggtaaggatgaaacaacaaatttaaaaaaatcaattcaaaaatctaaaatgccaaaagatgttgaaaaaaaatgcttatctgaattgaaaaaattaaaaaacatgagccccatgtcagctgaggcaacagtagttagaaactacttagattggatgattgatttaccgtggtacaaaaaagataaggtcgatatagatttaaataaagcattaaaaattcttgatgaagatcatttcggtttagaaaaaattaaagagagaattattgaatttttagcagtacaaaaaagaatggaaaaaattaaaggaccaattttatgtttggttggtccccctggagttggaaaaacatctttaggaaaatctattgcaaaagctaccaatagacaattcatta

SEQ ID NO: 263056 - DNA, 764 bp, Unknown
  Bacterial polypeptide expressing nucleotide sequence isolated from the Sargasso Sea
tttctttccagtttgcttgaagcgcaaatagagcttattgaagtggagcagagaatcagaggaagggtcagaaagcagatggagaaatctcaaaaagaatattttttaaatgagcagatcaaagcagcacaaaaagaattgggagacataagtgatgagaagaatgagcttgatgaactacagaaaaaaattgaagaaacaaaattatcaaaagaagctttagaaaaagttagttcagaattttcaaaattaaggcaaatgtctccaatgtctgctgaagcaactgttgtaagaacttatatagaaactttgcttgaagttccatggaataagaccacaaaaataaatgtagatctaaacaaagctaaagaaatattagatgaagatcactatggcttaaaggaagtaaaagaaaggattcttgaatatctagctgtacaaaaaagagtaaagaagatgaaagcaccagtgttgtgttttgttggtcctccaggagttggaaaaacatcacttggtgagtcaattgcaagatcggtgaacagagaatttacaaggttatctcttggaggagtgagagatgaagctgagataagagggcatagaaagacatatatcggctccatgccaggcaaaattattcaaaagctttctaaaggcaaagtaaaaaaccctctcttcttgctagacgagattgataagataggaatggaccataggggagacccaagctcggctttactagaagttcttgacccagaacaaaa

SEQ ID NO: 263057 - DNA, 940 bp, Unknown
  Bacterial polypeptide expressing nucleotide sequence isolated from the Sargasso Sea
gtagggaatgactatagaggagacccttcatcagctttgttagaagcactagatccagagcaaaacaaagaattcaacgatcattatcttgaggtggattatgatttatcagatgtcatgtttgtaactactgccaatactcttaatattttgccaccattattggatagaatggaagttataagattagcaggatatacagaagatgaaaaagtaaacatttctcaaaaatatttgattccaaatcaaagtaaaaataacggattaaaaaaagatgagtggaaaattgatgaaaatattaatagaaaaattattagacattatactagagagtccggtgtgagaaacctggaaagagagatttctaaaatagccaggaaactagtaaaaaaaatcgataataatgaaaaggtaaataatccaataaaagataatgatctaaaagatttacttggtgttcaaaaatttaaatatggggaaattgaagaggaaaatcgaataggtgttgttacaggtttagcttggacagaggtagggggagagattttaaaaattgaatctgtagttatgcctggtaaaggaaaaatgcaaattactggaaaactaggagacgtaatgcaagagtctgtaaaagcggctaaatcttacataagatcaaaaagtttagactatgggatcataccaccaatttttgataaaaaagattttcacattcatgttcctgaaggagctactcctaaagatggcccatctgcaggtataggaatggtaacatcaatcatttccgctataacagagatacctgtaaacaaagatgtagctatgactggtgaaattaccttaagaggtttagtgcttcctattggaggtcttaaagaaaaactattagctgcacatagagctggcatcaaaaaagttttaattcctaatggaaaataaa

SEQ ID NO: 263058 - DNA, 847 bp, Unknown
  Bacterial polypeptide expressing nucleotide sequence isolated from the Sargasso Sea
actaatagagaattcgtgagaatgtcggttggaggtatgagagatgaagctgaaatcagaggtcatagaagaacttatataggctcactacctggcaaaattatccaaatgatgaaaaaagctggaaccaaaaaccctttaattttattagatgaaattgataaaataggtaatgattacagaggagatccttcatctgcattattggaggcattagacccagagcaaaacacgtcttttaatgatcattatttagaagtagattatgatctttcagatgtaatgtttgttacaactgcaaatacactaaacatactaccgcccttattagacagaatggaagttattagacttgctggttatacggaggatgaaaaaattaatattgcaaataaatatttattacccaaacaaattaaagataatggtgttaaagataaagaaatgaacttaagtgataacattattaaagaggtaattagaggttacacaaaagagtctggggttagaaatttagaaagagaaatttcgaaaatagcaagaaaagtagttaagaaaatagttgccggagaagaaaaggaagtcactgttaataacaaaaatctatctgattttcttggagttgcaaaatttaattttggagaactagaatctaataataaagttggtattgttgttggactagcttggacagagtatggtggagaaatacttaaaattgaaacagtaaccatgcctggtaaagggagaatgcaaattacaggtaagcttggagatgtgatgcaagagtctgtaaaagcagcaaaatcttttgttagatctaaatgtttagaatatggaattattc

SEQ ID NO: 263059 - DNA, 805 bp, Unknown
  Bacterial polypeptide expressing nucleotide sequence isolated from the Sargasso Sea
ttggatgaaatagataaaatggaaaatgattataggggcgatccttcttctgcattattagaggctttagatccagaacaaaatactacatttaatgatcattatttagaagttgattatgatctttctgatgtaatgtttgtaactactgcaaatacacttaatatattgcctccactactcgatagaatggaagttataagaattcctggttacaccgaagatgaaaaaattaatatagcaaataaatatttattacctaagcaaattaaagaaaatggtattaaggatggagaaatgaatttaaaagaaggcacaattaaagaaattattagaaactataccagagagtcgggagttagaaatttagaaagagaaatatccaaagttacaagaaaagtggtcaaaaaagtagttaatgaggaagaaaaaaaagttgaaattaatgataaaaatatttcagactttttaggagttaaaaaatttaaatttggtgaattagaatcggaaaataggataggtatagttattggtttagcttggactgagtttggtggtgaaattctgaaagttgagacagttaatatgcctggcaaaggtagaatgcaaattacaggtaagttaggtgatgttatgcaggaatctgttaaagcagccaaatcatttgttagatccaaaagtttagaatatgggattatacctccagtttttgaaaaaaaagattttcatatacatgttcctgaaggagcgacaccaaaagatggaccctctgctggtattgctatggtaacttcaaatagtttca

SEQ ID NO: 263060 - DNA, 952 bp, Unknown
  Bacterial polypeptide expressing nucleotide sequence isolated from the Sargasso Sea
ttttccaatattggtgatcccattgtttgtaggcagagacaaatcaattaatgctctcaatgaagtaatgaaaaaagaaaagaaaataattttagtaacgcaaaaaaactctgaagttgatgatccaactaaaaatgacgtattttcttatggatgcgaaagtaacatccttcaacttttaaaattaccggatggaacagttaaagttcttgttgagggaataaacagagtaaaaattactgattatactgataataaagactttataacttgctcttatgaaaaagtaaccgatcaaattaacaaagaagaagatttaatgcaaacagctctctctgcagtaaaaaaacttgaaaagctaacctctattaacaaaaaaatttcaagtgaaacaatcaacaatattaaagttttgaaagatccttcaaagattgcagacaatattgcatcacatttgaacgcatctatttcagagaaacaacaaatttttgaaactcaggacgtcaagaaaagattaaatttaattataaaaataatggaaaatgaaacaagtattattggtgttgaaaaaagaattagaggtcgagttaagacccagatggaaaaaacacaacgcgagtactatttgaatgaacaactaaaagcgattcaaaaagagttaggcgaaattgaagatggaaaagatgaaacatcaaatttaaataaatcaattcttaaagctaaaatgccaaaagatgttgagaaaaagtgcttatctgaattaaaaaaactgaaaaatatgagtccaatgtctgctgaagctacagtagtgagaaattatttagattggatgatagatttaccatggtttaaaaaagataaaactgaaatagacttaaacaaagctcaaaaagttttagatgaggatcattttggactggaaaaagtaaaagagagaataattgattcttag

SEQ ID NO: 263061 - DNA, 877 bp, Unknown
  Bacterial polypeptide expressing nucleotide sequence isolated from the Sargasso Sea
ccaatgtcagcagaggctacagttgtaagaaactatctgatttggatggtagatttgccttggggcaataaaagcaaagttataaaagatttaaatactgctcaaaaaattttagatgaagatcattatggtttagaaaaagttaaagagagaataattgaatttttagcagttcaaaaaagaattgaaaaattaaaagggccaatcctttgtcttgtagggccaccgggtgttggaaaaacttcactaggaaaatcgatagcaagagcaactggcaggaagtttgttagaatttctttaggaggaattcgtgatgaagcagaaattaggggccatagaagaacttatattggatcccttccaggcaaaataattcaaatgatgaaaaaagctggaacaaaaaatccactttttttattagatgaaattgacaaggttggaagtgattatagaggcgatccatcctctgccttattagaagctttagatcctgaacaaaacaaacaatttaatgatcattatttagaggttgattatgatttatcagatgtaatgtttgttacaactgcaaacactttaaatatacttccgccattattggatagaatggaaattataagaatacctggttataccgaagatgaaaaaacaaatatagctcagaaatttttaattccaaaacaaagcaatgataatggattaaaaagtaatgaatggaagataactaaagaggtaattaaaaaaattattagggattatacaagagagtctggagtaagaaatcttgaaagagagatttcaaaaatagcaagaaaaatggttaaaaaaattgattcaagtgaaaaaataaataatgaattaatgaaaaagacataaa

SEQ ID NO: 263062 - DNA, 862 bp, Unknown
  Bacterial polypeptide expressing nucleotide sequence isolated from the Sargasso Sea
tcctttgcttgatagaatggaagtaataagaatacctggttacaccgaagatgaaaaaataaatattgcaaacaaatatttattaccaaaacaaataaaagaaaatggtgtaaaaaaagaagaattagtattagctgatggcacaattaaagaaataataagaagctatactagagagtctggtgttagaaatttagagagagaaatatcaaaagttgcaagaaaagtagttaaaaaagtagttagcggcgaagataagaaagtaacagtcaatgattcaaatgttcatgatttcttaggtgtcaaaaaatttaaatatggcgaagtagagtcagaagacaaggttggaatagttactggtcttgcctggacagaatttggaggtgaaattttaaaaattgaaacagtccacatgccaggcaaaggtagaatgcaaatcacaggtaagttaggcgatgttatgcaagagtcagttaaagcagcaaaatcttttgttagatctaaaagtgtagaatatggaattatacctccaatttttgaaaagaaagattttcatattcatgtgcctgaaggagcaacaccaaaagatggtccctcagcaggtatcggaatggttacttcaatagtttcagcaataacaaacaatcccgttaataaagatatagctatgactggagaggttacaattacaggccaagttttacctataggtggtttaaaagaaaagttactagcagctcatagagcgggaattaaacaagttataattccaaaagataatgaaaaagatttaactgatattccaaaaaaagttcgtgaagatataaaaatcacagttgtcgaaagtgtagatgaagtttaa

SEQ ID NO: 263063 - DNA, 733 bp, Unknown
  Bacterial polypeptide expressing nucleotide sequence isolated from the Sargasso Sea
cgtccagaaaaaattagtagaggtgaaggttggtcggcgaaatcttggcaatatgcgggaatacgacgttttaggtatggcgaaatcgaagctgaagacatggtcggcgtggtaactggtttagcatggacagaggttggcggcgagctactaacgattgaatctctagttttgccgggaaagggtaatatgaaatataccggtaaattaggtgatgttatgcaagaatctattcaagccgctgccagttacgtacgtgcccgcgctgttgatttcggtattaagccaactgtctttgagaaacgtgatattcatgtgcatgtaccggaaggggcaacaccgaaggatggcccttcggcaggcgtggcgatgtgtgtctcaattgtatctacgctaacgcgtattcccattcgccgggatatcgctatgaccggtgaaattactctgcgaggtcgggtcctgcccatcggaggtttaaaagaaaagcttttggctgcctcccggggcggtattaagactgtgctgatcccacatgaaaatgaaaaggatctagccgatataccggaaaatgtgaaaaaagagctagaaattatttctgtttcagatcttgatgaggttatcgaacattcctttgtaactcgtccagttgctatagactggcctgaatttgaagatgatgacgaaatcaatgtatctgaaagtaaagaaaaggatagtgtagttactcattgac

SEQ ID NO: 263064 - DNA, 925 bp, Unknown
  Bacterial polypeptide expressing nucleotide sequence isolated from the Sargasso Sea
aaaaagattaaaggcagagtaaaaagacaaatggaaaaaactcaaaaagaatattatctcaatgaacaaatgaaagccattcagaaggaattaggagataatgaagattttgatgacaatgctgaattagagaaaaaaattaataaaataaatttaacttcagaagccaaagaaaaagcaaagtctgaactaaaaaaattaaaaagtatgagtcctatgtccgctgaatcaacggtaattaaaaactatcttgattggataattaatattccatggaataatccttcctcaatttcaaaaaatattttcaaagctaaatctattttagattttgatcactatggcttagatgaagttaaggacagaattatagaatatctggcagttcaaaaaagaatgaataaaattaaaggtcctatattatgcttagttggaccaccaggtgtaggtaaaacttctcttgggaaatctatagcaaatgctactggaagaaattttgtcagaatgtctttagggggagtaagagatgaggctgaaattagaggtcatagaagaacatacattggttctatgccaggaaaatttattcaagcaatgaagaaatctaaatcatctaaccctttaattttacttgatgaaattgacaaattaggtcaggactggcgtggtgacccttcatctgctttgttggaggttttagatcctgaacaaaacaatacatttaatgaccattatttagaagttgattacgatttatccgatgcgatgtttgtttgtacagctaacacgcttaatattcctccagctcttttagatagaatggaaataattagaattgcaggttatactgaaaaagaaaaaagtcagattgcaaagagatttctaataccaaagcagttcaaagtgaatgggcttaaaaaatcag

SEQ ID NO: 263065 - DNA, 763 bp, Unknown
  Bacterial polypeptide expressing nucleotide sequence isolated from the Sargasso Sea
ggatcaataaaagaaattataaaaaattatacaagagaatctggtgtaagaaatttagaaagagaaatatctaaaatagcaagaaaagtagttaaaaaagtcgtcaatggtgaagaaaaaaaagtaacgattaatgataaaaatctttccgattttttaggtgtgaagaagtttaaatatggagaattagaaaatgaagatagagtaggtatagttacaggtttagcctggacagagtttggaggtgaaatattaaaaattgaaacagttcacatgcctggaaaaggtaaaatgcaaataactggtaaattaggtgatgttatgcaagagtctgtgagagctgcaaaatcatttgttagatcaaaaagtctagaatatggaattattcctccattatttgaaaaaaaagattttcatattcacgtccctgaaggagcaacacctaaggatggcccatcagcaggaataggaatggtaacttcaattgtttcatcaataacgaataaccctgtgaataaagaaattgctatgactggagaagttacactcacaggtcaagttttaccaatcggaggattaaaagaaaagttattagctgctcacagagccggaataaaacatgtgattataccaaaagataatgaaaaaaatcttgttgatatacctaaaaaagtaaaagaagatattaaaatttcagcagttgaaaatgttgatgaagtattaaagattgcattaaaaaaagaacttaaaaaaatagagtgga

SEQ ID NO: 263066 - DNA, 886 bp, Unknown
  Bacterial polypeptide expressing nucleotide sequence isolated from the Sargasso Sea
aaaaattattttagttacacaaaaaaattcagaggttgatgaccctagtagaaatgatttatttaattttggatgtgagagtactattttacaattacttaaattacccgacggaacagtaaaagttttagtggaaggtttaaaaagagttaaaattgtagattttaaagatcaagagaaatttatcaattgtgtatatgaatatcaaaatgatattttagatgcagaagaaaatttaaacccactagcgtcaatagcggttagaagattagaaaaacttaattcaataaataaaaaaatttcttcagaaacaataaatactattaagcagctgaaagaaccaagcaaaatagctgacaatatagcctcacatttaaattgtacaatttctgaaaaacaacaaatttttgagaataatgatgttaaaaaaagattaaatggagtcattaaaattatggaaaatgaaaccagcattattggtgtagaaaaaagaattaggggaagagttaaaactcaaatggaaaaaacacaaagagaatattatttaaatgaacagctaaaagctattcaaaaagaacttggcgaaatagaagatggaaaagatgaaacatcaaatcttaataaagcaattttaaaagctaaaatgcctaaagaagtgcaaaaaaaatgtatgcaagagttaaaaaaattaaaaaatatgagtccgatgtcagctgaagcaactgtagtaagaaattatctagattggatgatagatttgccttggtataaaaaagataaagttgatattgatttaaacaaagcattaaaaactttagacgaagatcattatggattagaaaaagtaaaagaaagaattattgaatttttagctgttcaaaaaaga

SEQ ID NO: 263067 - DNA, 913 bp, Unknown
  Bacterial polypeptide expressing nucleotide sequence isolated from the Sargasso Sea
ggcaatattaaaagcaagaatgcctaaagaagttcaaaccaagtgtatgaatgagttgaaaaaattaagaaacatgagtcccatgtccgcagaagctacagtagtaagaaattacttagattggatgattgatcttccatggtacaaaaaagataaggttgatattaatttagataaagcattaaaagttcttgagctagatcattatggtttagaaaaagtaaaagaaagaattatagaatttttggcagtgcaaaaaagaatggaaaagataaagggtcctatactttgtttagttggaccgccaggtgttggaaaaacttcattaggaaaatctattgcgaaagcaaccaatagacaatttgttagaatgtctttaggtggaattagagatgaagctgaagtaagaggtcatagaagaacttatataggttcattacctggtaagataattcaaatgatgaaaaaagcaggaacaaaaaatcctttaatacttttagatgagatagataaagttggaaatgattatagaggcgatccatcatctgcattgttagaagcattagatcctgaacaaaatacaacctttaatgatcattatctggaagttgattatgatttatcagatgttttgtttgttacgactgccaacacattaaatatactaccaccattacttgatagaatggaggtaataagaattccgggatatacagaggatgaaaaaattaatattgcaaataattttctacttccaaaacagataaaagaaaatggagtaaaagatggtgagttaaaactatcaaacggtactgttaaagaaataataagaaactataccagagagtcaggagttagaaacttagaaagagaaatatcaaaagtaactagaaaagttgtaaaaaaagtagtt

SEQ ID NO: 263068 - DNA, 505 bp, Unknown
  Bacterial polypeptide expressing nucleotide sequence isolated from the Sargasso Sea
gcggcagaattcttcatcaagtcacgcgctggctcctacggtatcgatctgagggaattggccaagaccgaccttcatgttcatgttccggaaggcgcgacaccgaaagacgggccctctgcgggcgtcgccatggtgacctcgatcgtgtccgcggtgactggcatcgaggtgcgccgtgatatcgccatgaccggcgaaatcacccttcgcggacgggtgcttccgatcggtggtctcaaggagaaattgcttgctgcgctacgcggtggcttgaaaacagtgttgattcctctggaaaatgagaaggatctggccgaaattccagataatgcgaaggaagggctggagatcatttccgtcggcatggttgacgaggtgctgtccgaggcccttgtgcgcgagccgttgcctatgggcatatctagtgggtcgggcgaagatgccgcatcggtcgccattggcgatgccaacgatggcagcgacgatatcactgcgcattaga

SEQ ID NO: 263069 - DNA, 826 bp, Unknown
  Bacterial polypeptide expressing nucleotide sequence isolated from the Sargasso Sea
aatgacaaaggaagcccaatctaaatgtctatcagaacttaaaaaattaaaatctatgagtccaatgtcggcagaagcaacagttgttagaaactaccttgactggatggttgatcttccttggtttaataaaagtaaaactatcaaggatctaaaagctgcacaaaaaattttggacgaagatcattatggtttagaaaaagtgaaggaaagaattatagaatttttagcagttcaaaaaagaatagaaaaattaaaaggaccaattctttgtttagttggaccacctggagtgggaaaaacttctcttggaaagtctattgctagagcaacaggaagaaaatttgttaggatttctttaggaggtattagagatgaagctgaaattagaggtcacagaagaacttatattggttctttaccaggaaaaataattcaaatgatgaaaaaagctggtacaaaaaaccctttattcttattagatgaaattgataaagtaggaagtgactatagaggggatccatcatctgctttattagaagctttagatccagaacaaaataaacaatttaacgatcattatctcgaagtagattatgatttatcggatgttatgtttgtgactaccgcaaacactttaaatatccttccgccgttattagacagaatggaaattattagaatacctggatacacagaggatgaaaaaacaaatatcgcccagaaatttttaatacccaaacaaagtaaggacaatggtctcaaaaaagaagaatggaaaattaatcatgaagtagttaaaaaaattattagagactacacaaga

SEQ ID NO: 263070 - DNA, 739 bp, Unknown
  Bacterial polypeptide expressing nucleotide sequence isolated from the Sargasso Sea
tcctatattattttgaaaattagtatgaagcaaaaactattagaaatcgattctacacaaaaacttttagataaattgttagtgcatatagaaaatgaaataggaatacttgaagttgagaaaaaaataaaatctcgtgttagacgtcaaatggaaaaaacacaaagggaatattatttaaacgaacaattaaaggccgtgcaaaaagaattaggtgatttagaccatggaaaaaatgaattttctgaaatagaagaaaaaattaaaacacttaaattaactaatgaagctaaagaaaaagctgaagcagaattaaaaaagttagtttctatgagtgcaatgtctgcagaagcctcagttgttagaaattatttagattggcttttaagtgttccatgggatgaaaaatctaaaataaacacagatttaaaaaaagctgaaaatatattgaataacgatcactatggattggaaaaagtaaaagaaagaatcttggaatttcttgctgttcaaaaacgcgttgaaaagattcaagggccaattttatgcttggtaggacctcctggtgtcggaaaaacatcattaggtaaatctatagcaaaagcgacaggtagagaatttgtaagaatttctttaggtggaataagagatgaatcagaaataagaggacatagaagaacatatatcggatcaatgcctggaaaaattattcaaggtatgaaaaaaataaagaaaagta

SEQ ID NO: 263071 - DNA, 794 bp, Unknown
  Bacterial polypeptide expressing nucleotide sequence isolated from the Sargasso Sea
gaaaaaaagtaaattaaagaataacctacccgatgctcaaaaaatcttagacaatgatcattttggaattgaaaaagtaaaagaaagaataattgaatacctcgctgttcagaagcgaacaggaaaaattaaaggtccattactttgtttagttggacctcctggtgttggaaaaacttcactaggtaaatccatcgctaatgctacaggtagaaaatttgtcagaatgtccttaggcggagtaagagatgaggctgagattagaggtcatagaaggacttacattggatctatgcctggaagaataattcaagctctcaaaaaagctggtactatcaaccctttaatattattggacgaagttgataagttaggtgctgattggagaggagatcctagttctgcattacttgaggttcttgaccctgagcaaaacaacacatttcaagatcattatttagaagttgattgtgacctatcaaatgtcatgtttgtaacgactgctaactccttaaatatgcccaaaccattattagatagaatggagataataaggttgtctggttacactgaattggaaaaacttgaaattgctaaacatcatttgcttccaaaagttattaaagaacatggccttaataaaagtgaattttcactatcagataaagaattattagaagttattcgttcatatactcgagaagctggagttagaggcttggaaagagaaatttctaaattatcaagaaagttaattactgaaatcttaactaaagataagaaaaaaattaaag

SEQ ID NO: 263072 - DNA, 907 bp, Unknown
  Bacterial polypeptide expressing nucleotide sequence isolated from the Sargasso Sea
agcaccaaaggcgcgatcctctgtttcgtcggtcctccaggagttggaaaaacatctcttggacgttccatcgccagggctttggggcgggaattctatcgattttcagttggcggcctgaccgatgaatctgaactgaaaggacatcgaagaacctacattggagctatgccgggacgcttcattcaggctctaaaatcagtcaagacggaaaatccggtgatcctcctggatgaactggacaagatggggcaaagctaccgtggcgatccgctctcggtcttactcgaggtgctagacccggaacagaatcgtgaattcatggaccattaccttgatcttcaatacgatctttccaatgtactcttcattgccacagcaaatgtgttggataccattccagccgcattaaaagaccgtttagaaatcatcaatctttcgggttacatcagtgaagaaaaaatccagatcggcaccaaatatctgattcccaaagttttagaagaatctggtctgaacaagggacaatttcgacttcctaaaaaatccttggagaaactgattcaggaatacacacgggaaactggagtccgtggactggaaaaacaattgaaagctctcagccgtggtgtcgccctgaaggttgcaaaaggagaaaaatcttcaaaaaccgtcacacctggggatctcaaatcattgctcggccctgccctcttcccgaaagatgccttcaaacccccggaacatccaggcatagcccagggactagcttggactcccagcggaggttcgattttgaacatcgaagcaatagccctccagggagagaaggcagaattgaaactcaccggtcaactcggcgaagtcatgcaggaatcttcaaaaattgcccatagcctggtacgtt

SEQ ID NO: 263073 - DNA, 871 bp, Unknown
  Bacterial polypeptide expressing nucleotide sequence isolated from the Sargasso Sea
aaagttggaaatgattatagaggggacccatcatcagctttactagaggcactagatcctgagcagaataaagaatttaatgatcattatcttgaagttgactacgatctttcagatgtaatgtttgtaaccacggctaatactttaaacattcttcctccacttctagatagaatggaagtaataagattgtcaggatataccgaagatgagaaactaaaaatatctcaaaagtttcttatcccaaatcagagcaaaaataacggcctacaaaaagaggagtggaatatcgatgaaagtttaataagaaaaataattaggcactatactagagagtctggagtaagaaatttagaaagagaaatctcgaaaattgcgaggaaactagttaaaaaaatagataataaagaaaaagtgaacaatcctatttctgaaaaagatctaaaaaacttgcttggcgttcagaaatttaattacggagagatagaagaggaaaatagaattggtgtagttacaggtcttgcttggactgaagttggaggggaaattctcaaaattgagtcagcagttatgcctggtaaaggaaaaatgcagataacaggaaaattaggtgatgtaatgcaagagtctgttaaagccgctaaatcttatataaggtcaaaaagtttagattacggaataattcctccagtgtttgataaaaaagattttcatattcatgttccagagggagcaacaccaaaagacggtccatcagcagggattggaatggtaacttctataatatccgctataactgaaataccagtaaacaaagatgtagcgatgactggtgagataactcttagaggtctagtcttgcctataggcg

SEQ ID NO: 263074 - DNA, 866 bp, Unknown
  Bacterial polypeptide expressing nucleotide sequence isolated from the Sargasso Sea
tggtaaagatgaaatatcaaatttaactaaggcaatagctaaagctaaaatgcctaaggaagcacaaaataaatgtatggctgaacttaaaaaattaaaaggaatgagtccgatgtcagccgaggcaactgtagtaagaaactatcttgactggatgattgatttaccatggggcaataaaagcaaaattatttctgatttaaattcagctcaaaaagttttagaccaagaccattatggattagctaaagtaaaagaaagaattattgagtatttagctgtccaaaaaagaatagaaaaactcaagggaccaatactgtgtttagttggacctccaggtgtaggaaaaacttcactaggtaaatcaattgcaaaagctacaggtagaaaatttgtaagaatatctctaggtggtattagagatgaagctgaaattagaggtcacagaagaacatatataggttcattaccaggaaaaattattcaaatgatgaaaaaagctggaactagtaatccactttttttattagatgaaattgataaagtcggtagtgattacagaggtgacccgtcctcagctctactagaagcattggatcccgaacaaaataaaacttttaacgatcactatttagaagttgattatgatttatctgacgtactttttgtcacgactgcaaacacattaaatattttacccccgctcttagatagaatggaaattataagacttcctggttatacagaagacgaaaaaattaatatttctcagaaatttttaatacctaaacagagtgaagataacgggcttaaaaaagatgagtgggaaataagtgagaatgttaataaaaaaattataagagatt

SEQ ID NO: 263075 - DNA, 762 bp, Unknown
  Bacterial polypeptide expressing nucleotide sequence isolated from the Sargasso Sea
aaagggtccaattttatgtttggttggtcctccaggtgtaggaaaaacttttttaggtaaatcaattgcaaaatcaacaaacagacaatttgtaagaatgtcacttggaggcgtaagagatgaggcagaaattaggggacatagaagaacttacattggatcattaccaggtaaaattattcaaatgatgaaaaaagcaggcacaaaaaaccctcttatactacttgatgagattgataaggtaggaaatgattacagaggagatccttcttcagctttgttagaagctttggatccagagcaaaacacatcttttaatgatcattatttagaagttgattatgatttatcagatgtaatgtttgttactaccgctaatactttaaatattttaccaccactccttgacagaatggaagtaataagaattcctggatacacagaggatgaaaaaattaatatttcaaatagatttttgttacccaaacagataaaagaaaatggtgttaaagatggtgaattaaaaattaaagatggaacaattaaagagataataagatcttacacaagagagtctggcgtcaggaatttggaaagagagatatcaaaaataaccagaaaagttgtaaaaaaagtagtcaataaagaagaaactgaagttgaagttaatgataaaaatatttctaatttcttgggtgtcaaaagatttaaatatggtgaagcagagagtaaagataatataggtgtagttacaggattggc

SEQ ID NO: 263076 - DNA, 937 bp, Unknown
  Bacterial polypeptide expressing nucleotide sequence isolated from the Sargasso Sea
ggccatagacgtacatacattggttcaatgcctggaaaaatcattcagggaatgtcaaaaattggcaaaaaaaacccactatttcttttagatgaaatcgacaaaatggcgatggattttcgtggcgatccggcttcagcattacttgaagtattagatccagagcaaaatcattcattcaatgatcactacatggaggttgactatgacttatctgaagttatgtttgttacgactgctaatagtttaaatattcctccgcctttgttggatcgaatggaagttattcgtttatctggttacaccgaagatgaaaaagtgaatattgctaaaaaatatctcattaaaaaacagctagaacaaaatggattaaaaaaagatgagataacaataagagataatgctgtacgcgatattattcgatattacactcgtgaagcaggagtacgtaatttagatcgtgaaatagctaatatatgtagaaaaattgtaaagcgaattttactcaaacctatagataaaaagtatattgttacccctaagaaattagaatcactcctgggtgttaaacaatatcgatatggaatgatggaagaggaaaatagagtcgggcaagttacaggacttgcttggactgaggtcggtggtgaattattgaccattgaggctgcgattgtagatggtaaaggtaagattactcgaacaggtaaattaggtgatgttatgcaagaatcaatagaagctgcaatgactgttgttagaagtcgcagcgagcttttaggaatagaacatgaattttacaaagagcatgattttcacattcatgtacctgaaggtgcaacaccaaaagatggtccaagtgctggtgtcgcaatgtgtacagcaatggtatcggcgttatgcggtatacccgttagatccaatgtgcaagacaggc

SEQ ID NO: 263077 - DNA, 673 bp, Unknown
  Bacterial polypeptide expressing nucleotide sequence isolated from the Sargasso Sea
aatagacagtttataagaatgtcattaggaggcgttcgagacgaggctgagattagaggtcatagaagaacatatattgggtctttgccaggaaaaattattcaaatgatgaaaaaggctggtactaaaaaccctttatttttgctggacgaagttgacaaaattggaaatgattacagaggagatccatcttcagctttgttagaagcattagaccctgaacaaaatactgcatttaacgatcattatttagaagttgattatgatttgtctgatgtaatgtttgtaacaactgcaaatacattaaatattttaccaccgcttcttgatagaatggaggtaataagaattccgggatatactgaagatgaaaaaataaatattgctaataaatatctattgcccaaacaaataaaagaaaatggtgtaaaagaaggtgagatgaaactagaggatggaacaattaaagagataataagaagttacacaagagagtcaggtgtaagaaatctagaaagagaaatttctaaagtaacaagaaaagttgtcaaaaaagttgtgagtggtgaagtagaaaaagtgcaagtaaatgaaaaaaatattccagattttttaggaatcaaaaaattcaaatttggtgaggtagaagataaagataaaactggagtagtga

SEQ ID NO: 263078 - DNA, 946 bp, Unknown
  Bacterial polypeptide expressing nucleotide sequence isolated from the Sargasso Sea
aattttacaattgcttaaattaccagacggaacagtaaaagttttagttgaaggaattaaaagagtaaaaattgttgattttaaagacgaaaaagaatttatttcatgcgcatttgaatacaataatgatattttaagtacccaagatgatttacttgctttaggactaaccgcgataagaagattagaaaaattaacgtctataaataaaaaaatttcgtcagaaacaattacaaatataaagaacctaaaagatgcatctaaaatagctgataatatagcgtctcaccttaattgcactatttctgaaaaacaacaactatttgaaactttagatgttaagaaaagattaaacaacgttatcaaaataatggaaaatgaaacgagtattataggcgttgaaaaaagaataagaggcagagttaaaactcaaatggaaaaaactcaaagagaatattatttaaatgagcaattgaaagctatccaaaaagaattaggtgaaattgaagatggaaaagatgaaacgtcaaatttaaataaatcaattttaaaggcaaaaatgccaaaagaagttcaaaaaaaatgcatgtcagaattaaaaaaattaaaaaatatgagtcctatgtcagccgaagcaactgttgttagaaattatttagattggatgattgatattccatggttcaaaaaagataaagtagatatagatctaaataaagcgcttaaacaattggatgaagatcattatggtcttgaaaaggtaaaagagagaattattgaatttttagcagttcaaaaaagaatggaaaaattaaaaggtccaattttatgtttggttggtcccccaggtgtaggaaaaacttctttaggtaaatcaatagcaaaagctactaatagacaatttgtcagaatgtctttaggcggtgttagagatgaagcagaaatt

SEQ ID NO: 263079 - DNA, 814 bp, Unknown
  Bacterial polypeptide expressing nucleotide sequence isolated from the Sargasso Sea
caaggtgtaggaaaaacttctcttggaaaatctattgcaaaagcaactaacagacaatttgtaagaatgtcattaggaggcgttagagatgaagctgaaattagaggacatagaagaacctacataggttcactacctggaaaaattattcaaatgatgaaaaaagcaggaacaaaaaaccctctttttttacttgatgaaatagataaagttggaaatgattatagaggggatccttcctcagcattattagaagctttagatccagaacaaaacactacatttaatgatcattatctagaagttgattatgatctttctgatgttttgtttgtaacaactgcaaacacattaaatatactaccaccacttcttgacaggatggaagtaattagaattcctggatacactgaggatgaaaaaataaatatagcaaacaaatatttattacctaaacaaattaaagacaacggagtaaaagagggagagatgaaatttgatgatgacactatcaaagatgttatcagatattatactaaagaatctggagttagaaatttagaaagagagatatccaaaatatctagaaaagttgtgaaaaaagttgttaataaagagtcagaaactgtcaaagttgatagtgaaaatttatcagattttttaggtgtgagaaaatttaagtttggagaaattgaagatacagacaaaattggtattgtaactggtttagcttggacagaatttggtggcgaaatattaaaaatagaaacagttaatatgcctggtaaaggtagaatgcaaataactggtaaat

SEQ ID NO: 263080 - DNA, 808 bp, Unknown
  Bacterial polypeptide expressing nucleotide sequence isolated from the Sargasso Sea
gtctttgggaggtgttagagatgaggctgaaataagaggtcatagaagaacatacattggatctttaccaggaaaaataatccaaatgatgaagaaagctggtacaaaaaatcctttatttttactagatgaagttgataaaattggaaacgattacagaggagatccatcatcagctttactagaagcattagaccctgaacagaatacagctttcaatgatcactatttagaagttgattacgatttgtctgatgtaatgtttgtaacaacagcaaatactttaaatattttaccaccacttcttgacagaatggaagttataagaattcctggatatacagaagatgaaaaaataaatattgcaaacaaatatttgctacctaaacaagttaaagaaaatggtgtgaaagagggcgaactaaatttagaagatggtacaatcaaagaaataattagaagttacacaagggagtctggagttagaaatttagaaagagaaatttctaaagtgacaagaaaagttgttaaaaaagtagtaagtggtgaagttgaaaaggttcaagtaaatgataaaaatattccagactttctaggaattaaaaaattcaaatttggcgaagtagaaaataaaaataaaactggaatagtaatagggctagcgtggactgaagtaggaggcgaaattcttaaaattgagactgttaatatgccaggtaaaggcagaatgcaaataacaggtaaactcggtgatgtgatgcaagagtctgttaaggctgcaaaatcgtatgtcagatcaaaaagttta

SEQ ID NO: 263081 - DNA, 874 bp, Unknown
  Bacterial polypeptide expressing nucleotide sequence isolated from the Sargasso Sea
gattatgcttgatgaggaccacttcggactagatgaggtaaaagagagaattatagagtatctagcagtccagaaaagggtaaaaaaaccaaaaggcccaattttgtgcctcgtagggccaccgggtgtaggaaaaacctccttaggtaagagtattgctagggctgcaaatagaaaatatgtacgaatgtctcttggcggcgtaagagatgaagctgagataagaggccaccgaagaacatacattggttcaatgcccggaaaaataatacaaagtttgtccaaggctaaatcaaacaatccgctatttcttttagacgaaatagataaaatgactatggatttcagaggtgatccatcgtcagcactccttgaggtgcttgatccggagcagaatcattctttctctgatcattatcttgaggttgattatgacttatcaagtatcatgtttgtttgtactgcgaatacactggatatacctgcaccactacttgatagaatggaagttattcagttatctggatatacagaggatgagaaattaaatattgctgaaaaataccttgttcctaaacaatttaacgaaactggaataaaggataatgagttaagcatttctcgatcggcattaactgaaatcattcaaagatataccagagaggctggcgtgagaagtttagagagaatgatttctaaaatatgtagaaaatcccttaaattgatcatcactaaaccttcaaaaattaaaaaaagggtctcaagcaagaatttagcaaaatatttgggcgctcataaatataactatgaatcaatatcgaaagataaccaaattggccaagtaaatggtttagcatggacaagagtaggaggt

SEQ ID NO: 263082 - DNA, 847 bp, Unknown
  Bacterial polypeptide expressing nucleotide sequence isolated from the Sargasso Sea
ggttacacagaagaggaaaaaattagtattgctaataattatttgataccaaaacaaattaaagataatggattgaagaaggaagaatggagcttagaaaattctacgcttaaagaaataatacaaaattatacaaaagaagcaggagttcgtaatttagaaagggaaatttctaagttagcaagaaaaactgtaaagaaaattttaattaatgaggatactaaaacatccatcaattcacaaaatttatccgaatacctaggtgtaaaaaaatataaatatggagagatagagacagataataagattggaattgttactggtttggcatggactgaatttggtggagagatattaaaaatagaatctgcagtaatgcccggaaaaggaaagatgcagataacaggtaaattgggagatgttatgcaagaatcagttaaggccgccaaatcttatgtgagatccaaatctttagaatttggtataattcctccaacttttgaaaaaaaagattttcatatacatgttccagagggagctactcctaaggatggaccatcagctgggatagctatggtaacatcaatagtgtcttcaattactggggtcccagtaaataaagatattgcaatgactggagaagtaactttaagaggtcgtgtccttcaaatcggggggttaaaagagaagcttttggcagcacatcgcgcaggaattcctcacgttctaatacctgaggacaatagaaaagacttagtagatataccaaaaaatgttttagacgatattaaaattacttctgtgaataatgtagacgaggttttaaaaattgctttagtagatgagc

SEQ ID NO: 263083 - DNA, 859 bp, Unknown
  Bacterial polypeptide expressing nucleotide sequence isolated from the Sargasso Sea
gttgtaagaaattatcttgactggatgatagatataccatggtttaagaaagatgaagttgatatagatttaaaaaaagcattaaaaactttagatgaagatcattttggactagaaaaagttaaagaaagaattgtagaattcttggctgtacaaaaaagaatggaaaaaataaagggtcctattctttgtttagtaggccccccaggagtaggaaaaacttcacttggtaaatcaattgctaaagcaactaatagacaatttgttagaatgtctcttggtggagtaagagatgaggcagaaattagaggtcatagaagaacttatattggatccttgcctggaaaaataattcaaatgatgaaaaaagctggaactaaaaatcctttaatattgttagatgaagtagataaaattggaaatgattatagaggcgatccatcatcagctttgcttgaagcattagatccggagcaaaatactacatttaacgatcattatcttgaagtcgattatgatctttcagatgttatgtttgtaacaacagcaaatactttaaatattttaccaccattacttgacagaatggaggttataagaatttcaggttatacagaagatgaaaaaataaatatttcagataaatttttaataccaaaacaaataaaggaaaatggtattaaagacggtgaaatggatttaaatgatggcactgttaaagagattattagacattatactagagaatctggtgttagaaatttggagagggaaatttctaaaataaccagaaaagttgttaaaaaagttgtaagtggtgaagaaaaaaaaatcacagttaatagcaaaaatatctcag

SEQ ID NO: 263084 - DNA, 537 bp, Unknown
  Bacterial polypeptide expressing nucleotide sequence isolated from the Sargasso Sea
aagttgtactgactgggaaactaggagaagttatgcaggaatcagctaaggctgctttttcctatgtacgtagcaattctgattatttaggaattgatcctgaagtattcgcaaaaactgatttacacgtgcatctacctgagggagcaacacctaaggatgggccttctgccgggctacctctcatcatggccataataagtagctttacaaaaatttctgtcaagcacaacgtaggcatgacaggagaaattacattgcggggacatgtaactgagatagggagtttgaaagaaaaacttatagcggcaaagagaggacttcttgatacagtgctgattcctgatgaaaatcaaaaagatcttgtagatgttcctgatgagattaaaaaaggtttggacataaatattgtcaaaaatgtcaaggaagccttagtaatggcactggttgctcatcctaaggaaatgaaagatcagcaaaaaaatgtttctgatattacatggacaagtgattcaggttcccagcctgctgcatgaa

SEQ ID NO: 263085 - DNA, 829 bp, Unknown
  Bacterial polypeptide expressing nucleotide sequence isolated from the Sargasso Sea
tgatccagagcaaaataattcatttaacgatcactatttagaagttgattatgatttgtcagatacaatgtttattacgactgctaatacattaaggatgcctcccgcacttttagacagaatggaaattataagaattgcaggttacacagaagatgaaaaagtagagattgtaaaacaacatttagccccacagatgttagagaagcatggtttaaaaagtggtgagcttgtacttgatgatagtgcgataactggattaataagatattatactagggaagcaggtgtaaggagtttagaaagagaacttgcaaacctcgctcgcaaaacagttaaaaaaattgtagctggtgatattgaatcactaactataaatgaggataatctgcatgagtttgcaggtgttagaaaatttaaatttggcgagattgataatgacgaccaggttggaatagttacaggacttgcttggacagaagttggcggagatatattgccgatagaatcggttataatgcctggaaaaggccgcatgactattacaggaaaattaggtgatgtaatgaaagagtctattcaagccgcaaaatcttatgtacgctcaagatgcattgagtttggaataaagccaactatctttccgatacgggatattcatattcatgtaccagaaggtgcaattccaaaagatggtccatccgctggcctaggaatggttacttctatagtttcagtgttgacaggtataccggttagaaaagatattgctatgacaggtgaagtaacacttcgtggaaaggcacttggaattggtggtttaaagaaa

SEQ ID NO: 263086 - DNA, 934 bp, Unknown
  Bacterial polypeptide expressing nucleotide sequence isolated from the Sargasso Sea
attagacagaatggaagtaataagattagcaggttatacagaagatgaaaaaatcaacatcgctaataaatatcttcttccaaaacagattaaagacaacggtgtaaaagaaaaagagatgaatttaagtgatgatattattaaagaagtgataagaagttatactagggagtctggcgtaagaaatcttgaaagagaaatttctaagattgcaagaaaagtagttaaaaaggttgtatctggagagaaaaaagaaatagatattgatacaaaaaatttaccagattttttaggtgttccaaaatttaaatcaagcgaattagaaactgaaagtagagtgggtgtagttacaggtttagcatggacagcgtatggtggagagattttaaaaatagagacagttaccatgcctggtaaaggtcgtatgcaaataactggtaaacttggtgatgttatgcaggaatcggttaaggcggcaaaatcttttgtaagatcaaaatgtttagaatatggaattattcctccattatttgaaaaaaaagattttcatattcatgttcctgagggagcaacaccgaaagatggtccatcagctggaataggtatggtgacttcaatagtttcatcaatcaccaacattcctgtgaagaaagatgttgcaatgactggtgaggtaactttgactggacaagtattacaaattggtggcttgaaggaaaaattattggctgctcacagagctggaataaaagaagtgttaattccaaaggaaaatgaaaaagatcttgttgatataccaaaaaagatcatagaggctattaaaattactccagtcgagtttgcagatgaagttctaaaaatcgctctaactaaagagttaaaaaagacagagtgggttgaggttgatttgtctaaaaaagatgaaaatctcaag

SEQ ID NO: 263087 - DNA, 958 bp, Unknown
  Bacterial polypeptide expressing nucleotide sequence isolated from the Sargasso Sea
tggtatgattatcgaggtgacccatcttctgcattactggaagcattagatcctgaacaaaacacaacttttaacgatcattaccttgaagttgattatgatttatctgatgttatgtttgttaccacagctaacactttaaatattcttccacctttattggatagaatggaagttataagactcgcgggttatacagaagatgaaaaaataaatattgcaaacaaatatttattaccaaaacaaattaaagataatggtgtcaaagataaagagatgaatttacaaaatgatataattcaagaaattattagaagttatacaaaagagtctggtgttagaaatttagaaagagaaatttctaaagtagcaagaaaagtagttaagaaggttgtttctggagaagaaaaagaggttaaaattaataaagaaaatttgtcagattttttaggtgttcctaagttcaaatcaggtgaattagaaactgaaaatagagtaggaatagttacaggattagcatggaccgaatatggtggtgaaattttgaaaattgaaactgctacaatgccaggtaaaggcagaatgcaaataacaggtaagcttggtgatgtaatgcaagaatctgtcaaagctgcaaaatcttttgttagatctaaatgtttagagtatggaataatacctccattgtttgagaaaaaagactttcatattcatgttccagaaggagctacaccaaaagatggtccgtctgcaggtattggaatggttacttccatagtatcttctattacaaacatcccagttaaaagagatgttgcaatgacaggtgaggttactttaacaggtcaagtgttacctattggtggcttaaaagaaaaacttattgcagctcatagagcgggaattaaagaagttttaattcctaaagaaaatgagaaagatttagttgatatgccaa

SEQ ID NO: 263088 - DNA, 893 bp, Unknown
  Bacterial polypeptide expressing nucleotide sequence isolated from the Sargasso Sea
ttagaggtagagttaagacacaaatgggagaagactcaaagagaatattatctaaatgaacagctcaaagctatccaaaaagaacttggagaaattgaagatggaaaagacgaaagcgcaagtctaaataaagcaattttaaaatcaaaaatgccaaaagaagttgaaaaaaaatgtttgcaagaacttaaaaagcttaaaaatatgagtccaatgtcggcggaggcaactgtagtaagaaattatttagattggatgacagaactgccttggcataaaaaaagtgaagttgatattgatttaacaaaagctttaaatgttctagataaagatcattttggattagaaaagattaaagaaagaattatagaatttttagctgttcaaaaaagaatggaaaaaattaaaggtcctattttatgtttagttggccctccaggtgttggtaaaacttcattaggaaaatcaatagctaaagctactaatagagaatttgtacgaatgtcagttggaggcatgcgagatgaagcagaaataagaggtcacagaagaacatatattggttcattgcctggaaaaattattcagatgatgaaaaaagctggaacaaaaaatccgcttattttattagacgagattgataagattggtaatgattatagaggagatccttcatcagctttactagaagctctagaccctgaacagaatactacttttaatgatcattacttagaagttgattatgatttatcagacgtgatgtttgtaacaactgctaatacattaaatatacttcctccattattagatagaatggaagtaattagactcgctggttatactgaagatgaaaaattaatattgctaataaatttcttcttcctaaacaa

SEQ ID NO: 263089 - DNA, 970 bp, Unknown
  Bacterial polypeptide expressing nucleotide sequence isolated from the Sargasso Sea
gtaacaacagctaataccctcaacatacttccaccattgttagacagaatggaagttattagaatccctggttatactgaagacgaaaaaattaatatagcagataaatacttactacctaaacaaattaaagaaaatggagttcaaagtggtgagcttgatatgttagacggaactattaaagaaatcattagaagttacactagggaaagcggtgttagaaatttagagagagagatttcaaaagttataagaaaagttgtgaaaaaagttgttaataaagaaaaagataaagttgaagtaaattcaaaaaatttaaatgattttttaggcgttaaaaaatttaaatatggagaacttgaaagtgagaacaaagtaggaattgtaattggattagcatggacacaagttggtggagaaattcttaagattgagacagtaaacatgcctgggaaaggaaaaatgcagataacaggaaaactgggtgacgttatgcaagagtcagtaaaagctgcgaaatcttttgtaagatcaaaaagtttagaatatgggataattccaccgacatttgaaaaaaaagactttcatattcacgttcctgaaggagctactccaaaagatggaccttcagcgggaattgcaatggttacctcaatagtttcatcgatcacaaaaattccagttaataaagaaattgctatgacaggagaagttactataactggacaagtgcttccaataggcggattaaaagaaaagttattggctgcgcatagggctggtattaaaaaagttcttattccaaaggaaaatgaaaaagatttaatagatgttccaaaaaaagtaaaagaagatattaaaattttaccagttgaaacagccgatgaggttttaaaaattgcgcttactaaagaattaaaaccgacagagtgggtcgaagttgaaaaaatttctgaggagaaaaaagaag

SEQ ID NO: 263090 - DNA, 760 bp, Unknown
  Bacterial polypeptide expressing nucleotide sequence isolated from the Sargasso Sea
gccaaaatgcctaaagatgtagaaaaaaaatgtcttcaggaattaaagaaattaaaaaatatgagtccaatgtcagcagaggcaacggtagtaagaaattatttagactggatgaccgaacttccttggcataaaaaaagtgaaattgatatagatttaaccaaagctttaaatattctggataaagatcattttggtttagaaaaagtaaaagaaagaataattgaatttttagctgttcaaaaaagaatggaaaaaataaaaggtccaattttatgtttagtaggtcccccaggagtaggaaaaacatcacttggtaaatcaatcgcaaaagcaactaatagagaatttgtaagaatgtctgttggtggcatgagagatgaagctgagataagaggtcatagaagaacttatattggatcattgccaggaaaaataattcagatgatgaagaaagcaggaacaaaaaatcctttaattttattagatgaaattgacaagattggtaatgattataggggtgatccttcatctgctttgcttgaggctttagatcctgaacaaaacacttcatttaatgatcattatttagaggttgactatgatttatctgatgtaatgtttgttacaacagctaatactttaaatatattgccacctttattagatagaatggaggtaattagattggcaggttatacagaagatgaaaaaataagtattgctaataaatttttattaccaaaacaaataaaggata

SEQ ID NO: 263091 - DNA, 760 bp, Unknown
  Bacterial polypeptide expressing nucleotide sequence isolated from the Sargasso Sea
aatgtttgtaactactgcaaatactcttaatattttgccgccacttctcgatagaatggaagtaataagattatcaggttacacagaagacgaaaaagtgaacatatctcagaagtttcttatacctaatcaaagtaataataatggtttgaaaaaagaggaatggaatatcgatgaagatatcataagaaaaattgtaagacactatacaagggagtctggtgttagaaacttagaaagagaaatatctaaaattgcaagaaaattggttaaaaaaatagataataaagaaaaagttaataatcctatcaacgaaaaagatttaaaagaattattgggagttcaaaagtttaattacggagagatagaggaagagaacagagtgggagtagtaacaggccttgcatggacggaagtaggtggagaaattttaaaaatagagtctgtagttatgcctggaaaaggaaaaatgcaaattactggtaaacttggagatgtgatgcaagagtcagtaaaagctgctaaatcatatattagatcgaaaagtttagagtttggaattatacctcctatatttgataaaaaagattttcatatacatgttcccgagggcgccactcccaaagatggcccttcagccggtgtaggtatggttacatcaataatctcagcaattactgaaattccagtagataaaaacgttgctatgacaggagagataacgttaagaggtttagttttaccaataggtgggttaaaa

SEQ ID NO: 263092 - DNA, 857 bp, Unknown
  Bacterial polypeptide expressing nucleotide sequence isolated from the Sargasso Sea
gatggttgatttaccatggtataaaaaagataaagtatatgtagatttaaataaagctttagaaacattagataaagatcattacgggctagaaaaagttaaagagagaattatcgaatttttagctgttcaaaaaagaattgaaaaaataagaggtccaattttatgtttagtaggaccaccaggagttggaaaaacttctttaggaaaatcgatagcaaaagctacaggaagacaattcgttagaatgtctttaggaggaataagagacgaagctgagataagaggacatagacgaacttatattggatcattaccaggaaaaatagttcaaatgatgaaaaaagcaggtacaaaaaatcctttattcttacttgatgaaattgataaggtaggtgcagattatagaggcgatccatcatctgcattattagaggctttagaccctgaacaaaattcaacatttaatgatcattatttagaagttgactatgatttatcagatgtaatgtttgtcactacagcaaacacattaaatattttaccacctttgttggatagattggaagttataagaatacctggttatacagaagatgaaaaaattagcattgctaataaatatttattaccaaaacaaattaaagataacggaataaaagacggagaaattaagtttaatgatggaactatccaagaaattattagaagctatacaaaagaagctggtgttcgtaatttggaaagagaaatttctaaaatttcaagaaaaacagtgaaaaaaattgtttctggtgaaagctctaacgttaacattaataaagaaaatttatctaaatttttaggaattaaaaaaa

SEQ ID NO: 263093 - DNA, 889 bp, Unknown
  Bacterial polypeptide expressing nucleotide sequence isolated from the Sargasso Sea
gaaaaaattaatatagcgaataaatatttaattcctaaacaaataaaaaataatggtcttaaggaaaacgagtggaatttagataaagatgctcttaaggatataatacaaggttatacaaaagaatctggagttcgaaatcttgaaagagaaatatcaaaattagcaagaaaaactgtaagaaatattttaacagatgagtctaaaaaatttgaaatcaatctaaagaatttatctgaatatttaggggtaaaaagatttaaatttgatgaaatggaaacagataataaaattggagtagcaacaggattggcttggactgaatttggaggagaaatattaaaaatagaatctgctgtaatgcctggaaaagggaaaatgcaaatcacaggtaagttaggtgatgttatgcaagagtctgtaaaagcagccaaatcttatgtaagatcaaaatctttagaatttggaataataccaccaatttttgaaaaaaaagattttcacgtacatgttcctgaaggtgccactccgaaggatggaccttcggcaggtatagctatggttacttccataatttcatcaataactaatataccaataaataaaaaagtagctatgacaggtgaggtgactttaagaggacacgttctacctattggaggtcttaaagaaaaacttttagcagctcatagagcaagaattccattagttataatacccgaagaaaataaaaaagatttagctgatataccaaaaaacatattggataacattgaaataaaacctgtgaaatctgttgacgaggttttaaaaattgcgctagttaaagaattaaaacctgtagaatggatagaagttgacagtttaccaaaaacaaaaggtcagaaaa

SEQ ID NO: 263094 - DNA, 943 bp, Unknown
  Bacterial polypeptide expressing nucleotide sequence isolated from the Sargasso Sea
gtaagagatgaggcagaaatcagaggtcatcgaagaacatatattggttcacttccaggaaaaattatacaaatgatgaagaaagcgggaactaaaaatcctttaattttattagatgagattgataaagttggaaatgattatagaggagatccctcatcagctttattagaggctttggatccagaacagaatacaacgttcaatgatcattatcttgaggtagattatgatctttctgatgttatgtttgttacaactgcaaatacattaaatattcttcctccattgctcgacagaatggaagtaataagaataccaggttatacagaagatgaaaaaataaatatttcagagagatttttacttcctaaacaaataaaagaaaatggcgtaaaggaaggtgaattagatattaaagatggaactattaaagaaattataagatcttacacaagagagtcaggagtaagaaatcttgagagagaaatttcaaaaattacacgtaaagtagttaaaaaggtagtgaataaagaagagacaaaagtaattgttaatgacaaaaatatttcagattacttaggtataaaaaaattcaagtatggtgaagctgaaaatgaaaataaagtgggtgttgtaacaggccttgcttggactgaattcggtggtgaaattcttaagattgaaacggtgaatatgcctggcaaaggtaggatgcaaattactggtaaacttggagatgtaatgcaagagtcagctaaagctgcaaagtcatttgttagatcaaaaagtttggattacggtataatcccaccaacttttgaaaaaaaagattttcatattcacgtgcctgaaggtgcaactccaaaagatggaccatctgctggaattgcaatggtaacatctatagtttcttcaataacggaaatacctgttgatagaa

SEQ ID NO: 263095 - DNA, 883 bp, Unknown
  Bacterial polypeptide expressing nucleotide sequence isolated from the Sargasso Sea
gccactaatagagaatttgtaagaatgtctgtcggtggtatgagagatgaggcagaaataagaggtcacagaagaacttatattggatcgttaccaggaaaaattattcaaatgatgaaaaaagctggaactaaaaatccattaattttgttggatgaaatagataaaataggaaatgattatagaggagacccctcttcagcattgttagaggctttagatccagagcaaaacacaacttttaatgatcactatctagaagttgattatgatttatctgatgtaatgtttgttactacggcaaatacactaaatattttacctcctttattagatagaatggaagtgattagacttgcaggctacacagaagatgaaaaaataaatattgctaataagtttttacttccaaaacaaattaaagataatggtgtgaaagaaaaagagatgaaattgggcgatgatattattaaagaaataattagaagttatactaaagagtcaggtgtgagaaatcttgaaagagaaatttccaaggtagcaagaaaagttgttaaaaaagttgtagctggagaagaaaaagaagttaatattgatactaaaaatttatctgatttcttaggtgttccaaagtttaaatttggagaattagagagtgaaaatagagtaggtattgttacaggtttagcttggacagaatatggtggtgaaattttaaaaatcgaaactgtaactatgccaggaaaaggtagaatgcaaattactggtaaattgggtgatgtaatgcaagagtcagttaaagctgcaaaatcttttgtgagatcaaaatgtttagaatatggaattattccccctttatttgaaaaaaaggattttcatattc

SEQ ID NO: 263096 - DNA, 852 bp, Unknown
  Bacterial polypeptide expressing nucleotide sequence isolated from the Sargasso Sea
acggtattgcaattattaaaattaccagatggtacagttaaggttctagtagaaggggaggcccgtgctagagttattaggtttacggaaaatgacaattactatgaagtttatgcagatatagttcctgaacaattgggtcctgatgaggaattagaagcgctgtcaagatctgtaatagctcaatttgagaaatatattaagcttaataaaaaggttccaactgaggccctagcatcaataaaccagatagaagaaccgggtaaacttgtggatactgttgcatcccatatttcacttaaaatttctgagaaacaagaacttttagagatagacgaattagccgaaaggatggaaagagtaatagcctttatggaagcagagataggcgtgcttagagtggagaaaaaaataagaacccgtgtaaaacggcagatggaaaaaactcaaagagagtattatttgaacgagcaaatgaaggccattcaaaaagagctcggggaaactgaggaaggtaaggacgagactcaggagctagaagaaaaaataaataaaacaaaattgtcaaaagaagcgcgagaaaaggccctaactgaattaaaaaaactcagaaatatgagcccaatgtcggcagaggctacagttgttcgaaattatctagattggatggtaagcattccgtggcgtaaacaaactaaaattgaaaaagatattaataatgcccaatctattttagaagccgaccattatgggcttgaaaaggttaaagagagaattctcgaatatctcgctgttcagcagaggacaaaaaagttaaaaggccctatattatgtttggttgggccacccagg

SEQ ID NO: 263097 - DNA, 820 bp, Unknown
  Bacterial polypeptide expressing nucleotide sequence isolated from the Sargasso Sea
ttgtctgtagattctgacgagccgcatatcttagctgacagaattgctccgcttttaaacatggaattaagaaagaagcaggatttgctagaaaatgctgatccaaaaagacgtttagaaatagtctatggaagaatgctcgaggagaaagaatttaaaaaagtagaaagaaaactgaaggaaagagtccagggacagatcggaagaactcaaaaagaatattaccttaatgaacaagtcaaggccattcaaaaagaattggggcatggggaagacggtaaagcagaaatggaagagtatgctaaaaaaattgaggagataaagctttcagttgaagcaaaagaaatggcggagaaagagttaaagaaaataaaaatgatgccatcaatgtcttctgaagcaaacgtagtacgtaattatcttgactggttactttctatgccatgggaagaaaaaactgaagataattttgacttaggaaaagccgaaaaagttttagattcacagcactacggactggaaaaagtaaaagaacgtattgttgaatatcttgcagtcgcaaagcaggttggaaaaatgaaagggcctattatttgtctagtaggaccgccaggtgttggtaaaacatctcttgctcgttctgttgcggaagctttaggaagaaaattcgctcatgtaagcctaggaggagttcgtgacgaagctgaaattagagggcaccgaagaacctacataggtgctatgcctgggaaagtgattcagtctttgcgcaaagtaaaatacaaaaatccactgctgctttttgatgaaattgataaaa

SEQ ID NO: 263098 - DNA, 874 bp, Unknown
  Bacterial polypeptide expressing nucleotide sequence isolated from the Sargasso Sea
attgcagaagatataaatacctcaaaagacttagacgtctatgctcagggtttagtaaaaagatttgaaaaattgattgttttaaacaaaaaagattttaatgaaaatcttaatattattaaaaattcaaaagatgcaaaaataattgcagataatattgcagcaaatttaaatataaaaattttccaaaaacaagaaattcttgaaatcagagacttaagaaagagattagaaaaaatttatgagatagttaacaaagaaacaagcgtgatatccgttgaaaagaaaattcgtgggagagtaaaaaaccaaatggaaaaaacacaaagagaatattatttaaatgaacaactaaaagctattcaaaaggaacttggagagattgatgagggtaaggatgaaatagctaatatttcaaaagctattacaaaagcaaaaatgcccaaaatcgcgcaagaaaaatgtttttccgaattgaaaaaacttaaatctatgagtccaatgtctgcagaggcaactgttgtcagaaattatttagattggatgactgaacttccttggtccgaaaagacaaaaattaacaccgacttaatttcagcacaaaagactctagacgaagatcattacggattagataaagttaaagagagaataattgagttcttggcagtacaaaaaagaattcaaaaaatgaaaggtcctatactttgtctagtcggccctcctggagtaggcaaaacttctttaggtaaatcaattgccaaagctacaaatagaaaatttataagaatttcattaggtggaattagagatgaagcagaaataagaggtcacagaagaacttacattggttctctaccaggcaaaataatac

SEQ ID NO: 263099 - DNA, 924 bp, Unknown
  Bacterial polypeptide expressing nucleotide sequence isolated from the Sargasso Sea
agtatatcatctaaagaccgtatcgatcttaaaaaagctttaaaaattttagatgaggatcattatggtctagaaaaagtaaagcagaggatcatagaatatcttgcagttcgaactttaaaacagaaaaaagaccctaacggaactgttcgtggtccaattttatgctttggtggacctcctggagttgggaagacttctctaggaaaatctattgctagagcaatggggagagagtttgttagactttcattaggaggtgttcgagatgaagctgaaattagagggcatagaagaacgtatattggagctttaccaggcagagtaattcaaagtataaaaaagtcaggtaaaaataatcccatttttatgctagatgaaattgataaattaggttctgattttagaggagatccgtcctcagcattattagaggttttagatccagaacaaaaccactcttttagcgatcactatttagaggttgactttgatttaagcggtgttatgtttattgctactgctaattatcaagatgcaatacctccagctttaagagatagaatggaaatcattgatttctctggttatatcgtagatgaaaaaattgagatcgccaaaagacatcttgtacctaagcaaatagaagaaaatggactttctaaagataatgtgtcctttgataatacatctttgaaagaattaataagttcctacactagagaagctggagttaggaacctagaaagagaaattgctaatgtattgagaaaagctgctagagaagttgtagaagatgaaactaagaaaattaagattaataaaaagaaagttggtgaatatcttggtgctgcaagattttactcagaattagcagagcgtacaacaaaaccgggtgtagtaactggcttagcttggactgca

SEQ ID NO: 263100 - DNA, 737 bp, Unknown
  Bacterial polypeptide expressing nucleotide sequence isolated from the Sargasso Sea
agtttgcagaaaaactgtaaaaaaactagaaactacaagattaaaaaaaattagtttaaacgacaaatcacttcaagatcttttaggtattgcaaagtttaggtcaaatgaaattgaaaaaaagaatttaataggtattacaaatggattggcatggacagaagtagggggagaaatattatcagtggaggttattttatctataggaaaggggaaactaactattactggtaaattaggagaagttatgaaagaatcaatccaagctgctacatcatatgttaagtcaaaatcaattagtttaggaataaatccaaaagattttgagaattacgatatacatatacatgttccagaaggagcaaccccaaaagatggacctagcgctggtattgcaatatttaattccttagtctcttccttaaccaacaataaagttaaaagagaagtcgctatgacaggagaaattacactaagaggtcgggtacttccaattggcggtcttaaagaaaaaatctatgcagctagtagagctggaataaaaaaagtactcataccacatgaaaattatagagaaatttctgagtttgataaagaggtcattaagagcattaaaattataccaatttctgatgcatttgccattcttgagcacaccctaacaaaaccaataatttcattaaatttacccgaatctcaattaaaaaataaccaaaacactactagcacgcattaat

SEQ ID NO: 263101 - DNA, 869 bp, Unknown
  Bacterial polypeptide expressing nucleotide sequence isolated from the Sargasso Sea
ggacaaagttgatattgatttaagcaaagctttaaaaactttggatgaagatcattttggtttggaaaaagttaaggaaagaattatagaattcttagctgttcaaaaaagaatggaaaaaattaaaggtcctattttgtgtttggtcggacctcctggtgtcggaaaaacatctttaggtaaatctatagccaaagctacaaacagacagtttataagaatgtctttaggtggagtaagagatgaggcagaaataagaggtcatagaagaacttatataggatctctcccaggaaaaattattcaaatgatgaaaaaagctggtactaaaaatccattatttttacttgatgaagttgataaaattggaaatgattatagaggagacccatcctcagctttattggaggccttggatcctgagcagaatactacttttaacgatcattatttagaggttgattatgacttatctgatgtaatgtttgttacaactgcaaacactttaaatattcttccaccattattagacagaatggaagttataagaataccaggatacacagaagatgaaaaaattaatattgctaataagtatcttttgccaaaacagattaaagataatggtgttaaggaaggagaattaaacttagaagaaggtacgataaaagaaataataagaagttatacaagagagtctggagttagaaatttagaaagagaaatatctaaagtaaccagaaaagtagtaaaaaaggttgttaatggtgaacaaaataaagttgaagttagtgaaaaaaatgtttcagattttttaggaattaaaaaatttaaatttggtgaattagagcctaaaaataaaattggaa

SEQ ID NO: 263102 - DNA, 877 bp, Unknown
  Bacterial polypeptide expressing nucleotide sequence isolated from the Sargasso Sea
tctttagatcaagctcataaaatccttgatgaggatcattatggattaaaaacagtaaaagaaagaatcatcgaatacctagctgtgcaaaaaagggtcaaaaaactcaaaggaccaattctttgtttagtgggtcctcctggggttggtaaaacatccttgggcgcaagcattgcaagagcaacaggaagaaaatttgtgagaatgtctctaggtggtgtgagagacgaagcagagataagagggcatagaagaacttacataggggcaatgccaggaaagatcatgcaaaatctgaataaggcgggcgttagaaacccactttttttgctagatgagattgataaaatgtccatggactttagaggcgacccatcatctgcacttcttgaagtattagatcctgagcaaaacaccaccttcaatgaccattacatggaagtcgattttgatctttctgatgttatgttcatttgcactgccaatacacttaatatacctcctcctttgctggatagaatggaagtgatacgaattgaaggttatacagaagatgaaaaaatgaatattgctgagaagtatctagtcaacaagcaaacagaagccaatggcctcaaagattcggagatcaaaattacaaatagcgcaattctgtcaattatacgtcactatacccgtgagtctggagttagaaatctagaccgtgaaattgcaaaaatcgctaggaaagtggtgaagtcgttgatcatgaagtcaaaagatgaaacagttcacgtaagacctggcagcctagaaaaatatcttggtgtcaaaaaatttaagtatggcatcgcagaaaaagaaaatcagattggacaagtcactggtttggctggac

SEQ ID NO: 263103 - DNA, 967 bp, Unknown
  Bacterial polypeptide expressing nucleotide sequence isolated from the Sargasso Sea
atgatgataaattttattatgtgtgcttatgagcatcaaaaggattttaattataaggatgaggatttattaccattagcattaactgcggtaagacgattagaaaaacttacctctgtaaataaaaaaatttcgtccgagacaattaataatattaagcaattaaaagatccatcaaaaattgtagacaatattgcttctaatctaaattcatcaatttcagaaaaacaacaaatattcgaaacaatggatgtgaagaaaagattgaatgctgttattaaatcaatggaaagtgaaacaagcataattggagttgaaaaaagaattagaggaagagttaaaactcaaatggagaaaactcaaagagagtattatttaaacgagcaattgaaagctatacagaaagaattaggtgagattgaagatggaaaagatgaaacgacaaatcttaaaaaactaatccaaaaagctaaaatgcctaaagaagttgaaaaaaaatgtatgtctgaacttaaaaaattaaagaatatgagtccaatgtcagctgaagctactgtagttagaaattatttagattggatgactgatcttccatggtttaaaaaagacaatgttgatatagatttaaacaaaggacttaaaatattagatgaagatcattttgggttagaaaaagtaaaagaaagaattattgaatttttagcagtccaaaaaagaatggacaaaataaaaggcccaattttatgcttagtgggccccccaggtgtaggaaagacatctttaggaaaatcaattgccaaagctacaaatagacagtttattagaatgtctttaggtggggtaagagatgaagctgaaataagaggtcatagaaggacgtatattggctcacttccaggaaaaattattcagatgatgaaaaaagctggtacaaaaaatccattatttttattagatgaagttgata

SEQ ID NO: 263104 - DNA, 778 bp, Unknown
  Bacterial polypeptide expressing nucleotide sequence isolated from the Sargasso Sea
aattttaaataaaaaagaaattaacgatggtacaaataatttaagaaatcttaaaaacgcttctcaaatatcacataacatctcttcgaatttaagtctccagatatttgaaaaacaagagcttttagaaataacagacctaaaaaaaaggttagagaaaatacattcatttattgaaaaggagactagcgttttatctgttgaaaaaaagatacgtggaagagtaaaaaaccagatggaaaaaactcaaagagagtattatttaaacgaacaattaaaggctattcaaaaagagttaggtgaaattgatgaaggaaaagacgaattatcttctctatcaaaagctattacggaagctaaaatgcctaaattagcaaaagacaaatgtttatcggagcttaaaaagcttaagacaatgagtccaatgtctgcagaagctactgtggttcgaaactatttagattggatgactgaattaccttggtcacaaaagtcaaaaataaactctgatttaaataatgctcaaaaaattttagatgaggatcattatggtcttgaaaaagtaaaagagagaattatagaatttctagcagttcaaaaaagaattcaaaaaatgaaagggccaattctatgtttggtaggcccaccaggcgttgggaaaacatctttgggaaaatcaattgcaaaagcaacaaacagaaagtttataagaatttcacttggaggaataagggatgaagctgaaatcagaggtcatagacgaacatatataggttct

SEQ ID NO: 263105 - DNA, 871 bp, Unknown
  Bacterial polypeptide expressing nucleotide sequence isolated from the Sargasso Sea
gtagacgatccaaaaaaaaatgatatttttaattacggatgtgaaagtagcatattacagcttcttaaacttccagatggaacagttaaagttttggtggaaggtataactagagttaaaataaatgaattccaagataataatgagtatttgtcttgtggttacgagaaactttcagatgttttaagtaaagatgaagatttaatgaccctagcattaaattcgattaaaaaattagaaaaacttacatcaataaataaaaaaatttctaatgaaacaataaacaatatcaagcttttaaaagatccgtcgaaaatttctgacaatatagcttcacacttgaatgcaactatttctgaaaagcaacaagtttttgaaactttagacttaaaaaaaagactcaatcttataaacaaaataatggataacgaaacgagtataataggagttgaaaaaagaattcgtggaagagtaaaaactcaaatggaaaaaactcaaagagagtattacttaaatgaacaacttaaggctatacaaaaagaattaggtgaaatagaggatggtaaagatgaaacatcaagtttgaataaagctatcttaagatcaaaaatgccaaaagatgtagaaaaaaaatgtatgtcagaattaaaaaaacttaaaaacatgagcccaatgtctgcagaagcgactgttgtaagaaattatttggattggatgattgacattccatggtttaaaaaagacaaagtggatataaatctcaataatgctcttaagattttagatgaggatcattttggtttagagaaagtaaaagagagaataatagaatttttagcagttcaaaaaagaatgaacaaaattagaggtc

SEQ ID NO: 263106 - DNA, 583 bp, Unknown
  Bacterial polypeptide expressing nucleotide sequence isolated from the Sargasso Sea
agatgaaagcactagcctaaataaatcaattcttaaagctaaaatgcctaaagaagtagaaaagaaatgtttacaggaactcaagaaattaaaaaatatgagtccaatgtcagcagaagcaacagttgtccgaaactacttagattggatgacggaacttccatggcataaaaaaagtgcagtagacattgatttaaaaaaagccctagaaattttagacaaggatcattttggtttagaaaaagttaaagagagaataatagaatttctggcagttcaaaaaagaatggaaaagattaaaggaccaatattatgtctggtagggcctccaggtgttggaaaaacttctcttggaaaatctattgcaaaagcaactaacagagaatttgtaagaatgtccgtaggtggtatgagagatgaagcagaaattagaggtcacagaagaacatatatcggttcattacctggaaaaataattcagatgatgaaaaaagctgggactaaaaatccattaattttattagatgaaattgataaaattggaaatgattatagaggtgatccatcatcagctttacttgaa

SEQ ID NO: 263107 - DNA, 736 bp, Unknown
  Bacterial polypeptide expressing nucleotide sequence isolated from the Sargasso Sea
ctgcaaacaccccttaatattcctcctgctttattagataggatggagataataagaatacccggatatactgaaaatgaaaaaaatcaaatcgcaaaaagatatttagtaccaaaacagattaagaataatggattaaaaaattctgaaataaactttaactcaactttagttaaacaaattattagatattatactagagaagctggagtaagagggttggaaaaagaaatttcaaaaatatgcagaaaagttgttaaagatctagagaccagaactaaaagaaaaattttattagataaaaaatctatacaaaactatttaggtgtagaaaaatatagaaataatgaaattgaaaagaaaaatttaataggtgtaacaaatggtttagcttggactgaggtaggtggtgaaatattatcaattgaagttcttttatcaattggcaaaggaaaattaactataactggaaaacttggagatgtaatgaaagaatctattcaagctgctagctcgtatgtaagatctcaagctctaagacttggaattaatcctttagattttgataaatatgacatacatgtacatgtcccagaaggcgcaactcctaaagatggtcctagtgcaggaatagctatctttaatagtcttgtatcttcactaactggtattaaaataaagaaagatatagcaatgacaggagaaataactttaagaggcagagtcttcctatagg

SEQ ID NO: 263108 - DNA, 177 bp, Unknown
  Bacterial polypeptide expressing nucleotide sequence isolated from the Sargasso Sea
ctcttattttattagatgaaattgataaattaggctctgattggaggggggatccttcatcagcattacttgaagtattagatcctgagcaaaataataaatttaatgatcattatttagaattagattatgatttgtccgatgttatgtttgtatgtactgcaaacaccccttaat

SEQ ID NO: 263109 - DNA, 865 bp, Unknown
  Bacterial polypeptide expressing nucleotide sequence isolated from the Sargasso Sea
agatgttcttgataaagaccattttggcttggaaaatgttaaagagagaataatagaatttttagcggtccaaaaaagaatggaaaaaataaaaggacctattctttgcttagttggcccaccaggagtaggaaaaacttctttaggaaaatcaatcgctaaagcaaccaacagagaatttgtgagaatgtcagtaggtggtatgagagatgaagctgaaatacgtggtcacagaagaacttatattggatcattgcctggtaaaattattcaaatgatgaaaaaagctggtacaaaaaatccactaattttattagacgaaatagataaaattggtaatgattatcgtggcgatccctcatctgctcttttagaagcattagatccagagcaaaatacttcttttaatgaccattatttagaagttgattatgatctttctgatgtaatgttcgtaactactgcaaatactttaaatattcttccaccattattagatagaatggaagtaattagacttgcaggttatactgaagatgaaaaaattagtatcgcaaataaatttttattaccaaaacaaattaaagataatggtgttaaagaaaaagaaatgaaacttgaaaaagacatcattaaagaaattattagaagctatacaaaagaatcaggggttagaaatttagaaagagaaatttcaaaacttgctagaaaagtagttaaaaaggtaattgcaggtgaggagaaagaagtagagataaataataaaaatctttcagattttttaggtgttcctaaacataaatttggtgaattagagcaggataatagagtaggtatagtaacgggattagcttggacagagtat

SEQ ID NO: 263110 - DNA, 236 bp, Unknown
  Bacterial polypeptide expressing nucleotide sequence isolated from the Sargasso Sea
caacagaaaattcgtgcgaatgtcccttggaggagttagggatgaggcggaaataaggggtcataggagaacctatgttggttcattgcctgggaaaataatacaaaatatggcgaaagcgggcacaaaaaatccgcttattctgctggatgaaatcgataaaatggcaatggatttcaggggtgatcccgcgtctgccttattggaggttttagatccagagcagaatgatacct

SEQ ID NO: 263111 - DNA, 934 bp, Unknown
  Bacterial polypeptide expressing nucleotide sequence isolated from the Sargasso Sea
tcagatgttatgtttgtttgcaccgctaatactctaaacataccagctccattgttagacagaatggaaattattagaattcctggatatactgaaaaagaaaaaaatcagattgcacaaaaatatttaattcctaaacagcaaaaaaatcatggtattaaaaacagtgaaataagacttaattcaaaattaattaatcaagttataagaaattatacccgagaagctggagttagaaatttagaaaaagaaatatctaaaatctttagaaaagccgtcaaaataattgaaacaacaaaaaagaaaaaaattctacttaacaataaaaacatacaaaactttttaggagtttttaaattcagatctaatgaaattgagaagagaaatcttgttggaattacgaatggattagcttggacagaagttggaggagaaattctctccatagaagttcttttatctcttgggaaaggtaggcttacaattacaggtaaacttggggaagtaatgaaggaatcaattcaagcagcaacaacatatgttaaatctaaatctctaagtcttggtattaatccaagagattttgataaatatgatatacatgttcatgtgcctgagggtgctacacctaaagatggacctagcgctggtattgcaatatttaattcacttgtttcatcattaactaacaacaaaataagaaaagatgttgcaatgacaggtgaaatcacacttagaggcagagttttgccgattggaggacttaaagaaaaaatttacgcagcatccagagcaggcattaaaaaagttttaatacctgaagaaaatcatagagaaattattgaatttgataaagatatacttaaaaatattaaaattattccagtatctgaagctatttcaatacttgaacatactttgaccaacctataat

SEQ ID NO: 263112 - DNA, 908 bp, Unknown
  Bacterial polypeptide expressing nucleotide sequence isolated from the Sargasso Sea
tacattgggtcgcttccgggtaaacttttgcagaaactatctaaagtaggcgttaaaaatccactatttcttttagatgaaatagataaaatgagcatggacaatagaggtgatccggcttctgcattgctcgaagtattagatccagaacagaaccatagctttaacgaccattatttggaaattgactatgatttatctgaggtaatgttcgtatgcacttctaatagcatgaatatacctgcgcctttactggataggatggaggtgatcagaattccagggtatacagaagacgaaaaagcaaatattgcggagcgttaccttgtgcctaaacaaaccaataataatggattgcagggagacgagatcgaatttaatcaagaatcgatatttgatttgattcgtttttatactaaagaagcgggtgtgaggggtttggaaagagaaatcgcgaagatttgtagaaaagtggtaaaagagcatactctttcgaaaaggacgaagttaaaaaagaaactaagtagagaggatctagaaaagtattccggtgtgcagaaatatgacttcgggaaagctgaagaccaaaacaaagttggccaagttaaaggtttagcatggacgcaggtaggaggagaattattagatatagaagctattgctatggatggtaagggaaaaactattaagacagggtccctaggcgatgtgatgcaagaatcaattcaagcagcgttgacagttgttagaagtcgtgccaaatctttggggttgaattcgaattttcacgagaaactcgacttgcatattcacgtaccggaaggagccacccctaaagatggcccgagtgcagggatcggtatgtgcacagctctcgtttctgtcctttacagcattcctgtaaaggc

SEQ ID NO: 263113 - DNA, 814 bp, Unknown
  Bacterial polypeptide expressing nucleotide sequence isolated from the Sargasso Sea
agaggttgattttgatttaagtaaggtaatgtttatagcaacggcaaattatcaagaccctattccgccagctttaaaggatagaatggaggtcatagatttttcaggttatattgaagacgaaaaattacaaattgcaaaaagacatcttattccgaaacagttgaaggaaaatgctttatcaaccaaagacgtttctcttgatgatgcttcaattaaagaattgatgagctcatatacaagagaggctggtgttagaaatttagagcgtgagatcgcaaatgtttttagaaaagttgcaagagataagatagaaaaaaatacaaaaaaaattagagtcacaaagaaaaagatttcagaatatctaggcgcccctagattttattctgacatcgctgaaagaacaactaagcctggcgttgtaactggattagcttggaccgctgcagggggagacattctttttgtagaggcttcacaaatgaaaggcaaaggagctctcacgttaactggtcagctaggagacgttatgaaggagtctgctaccgctgcaatgacatatgttagatcaaattctgatcttcttggtttttctagcgacttcaatgagaaaactgatatacatgttcatgttcctgcgggagcaataccaaaagatgggccttctgctggtgttgggatgtttacatcaatagtttcacttctttctaataagccagtcaaaagcaaattggcaatgactggcgaaattacattgcgtgggaatgttcttcccattggtggcgttaaagaaaaagtaactgccgcacataga

SEQ ID NO: 263114 - DNA, 682 bp, Unknown
  Bacterial polypeptide expressing nucleotide sequence isolated from the Sargasso Sea
gtgaagtcattgatcatgaagtcaaaagatgaaacagtgcacgtaaggcctggcagcctagaaaaatatcttggtgttaaaaaattcaagtacggaattgcagagaaagataatcaggttggacaagtcaccggtttggcttggacacaagttggaggagagcttctgaccattgaatcgacagcgattgcaggcaaaggcaagttaatcaatacaggacagcttggtgatgtaatgaaagagtcaattcaagcagcaactacagtagttagaagtcgtgccaaagcgcttggaataaaagaggattttcatcagaaaaaggacatgcacattcacgtcccagagggcgccacgcctaaggatgggcccagcgcgggcatcggaatgtgtactgctctaatctcatctttgaccgatattccggtcaaagcaaacgttgcaatgacaggagaaataaccctaagaggcgaggtgcttccaattggcggtttgaaggaaaaattacttgctgcacacagaggtggaatagagatcgtaattattcccgaagagaataagaaagacctcactgaaatacccaaaaacatcaaagaaaagcttgatattgtgcctgttcagtggatcgatcaggttctagaaattgctaaagaaagaatgccagaaattaagattcagggctcaa

SEQ ID NO: 263115 - DNA, 867 bp, Unknown
  Bacterial polypeptide expressing nucleotide sequence isolated from the Sargasso Sea
gtatttatgtatggctgtgagggaaatattttacaactgttaaaattaccagatggtactgttaaggttttagtagaaggtatcaaaagagtaaaaattttagattttaaggataatgaaaaatttataacatgtgattatacccatcataatgatgtatcacctgaagatgaggatttatttcccttagcggctacagctttaagaagattagaaaaactaacatctattaataaaaaaatttctaacgaaactataaacacaattaaacaattaaaagacccatcacaaattgcagataatattgcatcacaaataactgcaactatttctgaaaaacaacaaatatttgaaaccgtagatgtaaagaaaagattaaacgccatcatcaaaataatggaaaatgaaacaagcattattggtgttgaaaaaagaattaggggtagagttaaaactcaaatggaaaaaacacaaagagagtattatttgaatgagcaattaaaagctattcaaaaagaacttggtgaaatagaagacggtaaagatgaaacaactagtttaaataaagcgattacaaaagccaagatgccaaaagaggtagagaagaaatgtctacaagaattaaaaaaattaaaaaatatgagcccaatgtctgcagaagcaacagttgtaagaaattatttagattggatgacagagttaccttggcataaaaaaagtgaagtagacatagatttaaagaaagctctggatattcttgacaaagatcattttggattagaaaaagttaaagaaagaataatagaatttttagctgttcaaaaaaggatggaaaaaattaaaggtccaattttgtgtttagtagga

SEQ ID NO: 263116 - DNA, 889 bp, Unknown
  Bacterial polypeptide expressing nucleotide sequence isolated from the Sargasso Sea
tgaaggtaaggacgaactaacaagtctttctaaagccattgctaatgctaaaatgccaaaattagcaaaagaaaaatgtttgtcagaattaaagaaattaaaatcaatgagtccaatgtctgctgaagctacagttgttagaaattatttagattggatgacagaattgccttggtcagaaaaatcaaaaattaatactgatttaaaaaatgcacaaaaaatattagacgaagaccattatggtctagaaaaagttaaagaaagaataattgaatttttagcggtgcaaaaaagaattcaaaaaatgaaaggccctattttatgcttagtaggcccaccaggtgttggaaaaacatctctaggtaagtcgatagcaaaagcaacaaatagaaaatttattagaatctcacttggaggcataagagatgaagcagaaattagaggccacagaagaacttacataggatctttgcctggaaaaattatacaaatgatgaaaaaggctggaactaaaaatccactttttttgttagatgaaattgacaaagttggaaatgattatagaggcgatccatcttcggctttattggaagcacttgatccagaacaaaacaaagaatttaatgatcattacctagaagtagattatgacttatcagatgttatgtttgtgacaacagcaaatacattgaatattttacctccactcttagatagaatggaagttattagattatctggttatacagaagatgaaaaagtaaaaatttctcaaaaatttttaattccaaaacaaagtgtaaataatggattgaaaaaagaagagtggaatatagatgaaaaggttaatagaaaaattataagagactatactagagagtcaggcgtc

SEQ ID NO: 263117 - DNA, 880 bp, Unknown
  Bacterial polypeptide expressing nucleotide sequence isolated from the Sargasso Sea
aaatgaagtgatgaaaaaagacaaaaaaataattttagttacacaaaaaaattcagagattgatgacccaaaaaaaacagatatttttatgtatggctgtgaatgtaatattttgcagcttttaaaattaccagatggaacagttaaagtattagttgaaggaaataaaagagttaaaattttaaattttatagataatgaaaaatttatcacatgtgatttttctcattacaacgatgtaattattaaaaatgaagatttatttccacttgcagcaacagctttaagaagattagaaaaattaacatcaattaataaaaaaatctctagtgaagcaattaattcaattaaagaattaaaaaacccttcacaaattgcagataatattgcatctcatataacagctactatttctgaaaagcaacaaatttttgaaacagttgatgtcaaaaaaagattaaacaccattattaaaataatggaaaatgaaacaagtattattggagttgaaaaaagaattagaggcagagttaaaactcaaatggaaaaaactcaaagagaatattatttgaatgaacagttaaaggctattcaaaaagaacttggtgaaattgaagatggtaaagatgaaaacgctaatcttaataaagcaatagctaaagctaaaatgcctaaagaagtagaaaaaaaatgtctacaagaacttaaaaaacttaaaaatatgagtccaatgtctgctgaggcaactgtagtaagaaattatttggactggatgacagaacttccttggcataaaaaaagtgaagttgatattgatttaaccaaagctttaaatattctcgataaagatcattttggattagaaaaaatcaaagaaaga

SEQ ID NO: 263118 - DNA, 646 bp, Unknown
  Bacterial polypeptide expressing nucleotide sequence isolated from the Sargasso Sea
tttgccagaatgagtctgggtggtgtaagggatgaggcagaaatccgaggccatcgaagaacctacgtcggtgcaatgccgggaaaaatcatccagtccctgcgcaaggttaaatcaaaaaatccacttctacttcttgatgaagtggacaaaatgacacgcggagtgatgggagatccctcctcagccttgcttgaggtcctggacccggaacagaatcacactttcatggatcattatctcgaggttgaattcgatctttcggatgtccttttcttctgcacggccaatgtggcacaggatattccgcctgccctgaaagatcggatggaagtcatcaatctttcgggatataccgaattggaaaaagtctacattttgaaaagacatttgttgccgaaacagatcgaggaaaacgggctcaattcaagccaactcggatttcaaaacaaatctttcgatatcatcatccaacaatatactcgtgaagccggagttcgaaaccttgaacgagaagtcgggaaaatctgcaggaagattgcaaccaagttggtgatggatgagccacagaaaaaaatctccattacaccaaaaagagtcagggagtatcttggagttccaaaatataaacatggaaaggttgagg

SEQ ID NO: 263119 - DNA, 540 bp, Unknown
  Bacterial polypeptide expressing nucleotide sequence isolated from the Sargasso Sea
gcaaaatgcaaattactggtaaactaggtgaagtaatgcaggaatctgtaaaagcagcaaaatcttatataagatcaaaaagtttagattatggaattattcctccagtttttgaaaaaaaagattttcatattcatgtaccagaaggagccatacctaaagatggaccttcagctggagtggcaatggttacttcgataatttctgccataacagaaataccagtaaataaagatgtagcgatgaccggagaaattactttaagaggaattgttttaccaataggtggtttgaaagaaaaattattagcagcacatagagccggaattaagaaagttcttattcctaatgaaaatcaaaaagatttaatagaaattcctgaaataattaaaaaaagtattgaaattaaaccggttaaaaatgttgatgaagtacttaaaatagctcttacaaaaaatctaaaaagagttgagtgggtcgaggtagaacaaatttccaaaaaaaataatcaaaaaactactaccacaagaaaacattaat

SEQ ID NO: 263120 - DNA, 721 bp, Unknown
  Bacterial polypeptide expressing nucleotide sequence isolated from the Sargasso Sea
agcattcttgatgccgatcactacggtctggaggaggtcaaggagcgcattcttgaatatctcgccgtgcagaagcgggtgaagaagctcaaggggccggtgctgtgcctggtcggcccgcccggtgtgggcaagacctcactggccgagtccatcgccaccgcgaccaaccgcaagttcgtgcgcatggccctcgggggcgtacgtgacgaggccgagattcgcgggcaccgccgtacctacatcggctcgatgccgggtcgcctgattcagaagatgaccaaggtcggcgtgcgcaacccgttgttcctgctcgacgagatcgacaagatgggccaggacatgcgcggcgatcctgcctcggcattgctcgaagtcctcgacccagagcagaaccataatttcaacgatcactatctggaggtcgattatgacctgtcggatgtgatgttcctttgcaccgccaactcgatgaacatccccggcccgctgctggatcggatggaagtcattcgcctgccgggttacaccgaggacgagaaggtcaatatcgccatcaaatacctggcgcccaagcaaattcaggccaatggtctgaaaaaaggcgagctggagttcgatgagtcggcgattcgcgacatcattcgttactacacgcgtgaagctggtgtgcgcagtctggagcgacaaatcgccaaggtctgccgcaaggtggtcaagg

SEQ ID NO: 263121 - DNA, 907 bp, Unknown
  Bacterial polypeptide expressing nucleotide sequence isolated from the Sargasso Sea
gaaaaacaagaactgttagagttgaaaagtatattagctagactggaaaaagtttatgcccacatggaaggggaaattggcgttttacaagtagaaaagcgtatccgcaatcgggtcaagcgccagatggagaaaactcagcgtgaatactatctcaatgagcaaatgaaagctatccaaaaggagctgggagataatgaagacggaagtgacgaactaacagacatcgcggaaaaaatcaaaaaaactaagcttacaaaagaggcgcgtgataaggcaaatgctgaactaaagaagcttaagaatatgagccaaatgtccgcagaagcaacggtggttagaaactacttggattggcttttggttataccgtggaaaaagaagtctaaaataaaaaaagatctaactttagctcagtcggtattggatagggaccaccacggactagaaaaagttaaggaaaggatcgtcgaatatttggcggttcaacaaaggacggggaaagtaaaagggcccattttatgtttggtaggccctcccggagttggcaagacttcattaggaaaatctattgctgagtccactggacgaaacttcgttagaatgtccctcggtggtgtcagagatgaggcagaaattagaggacacaggcgaacctatatcggttctttgccgggcaaaataatccatagtatgaaaaaagcaaaaacctctaaccctttatttcttttagacgaaattgataaacttggaaatgattataggggagatccgtcatcggcgttgctagaggtgttggatcccgaacaaaataatagctttcaggatcactatttagaggttgattacgacttgtcggacgttatgtttgtaacgacggccaatactttgagaatgccgcaaccac

SEQ ID NO: 263122 - DNA, 862 bp, Unknown
  Bacterial polypeptide expressing nucleotide sequence isolated from the Sargasso Sea
accgcttctacctttaagagacatagtggtattcccgagcatggtaatacctttatttgttggtagagacaaatctatttcagcactaaatgaagtgatgaaaaaggataaaaaaataattcttgttactcaaaaaaattctgaaattgatgatcctaaaaaaacagacgtttttatgtatggttgtgaaggaagtattttacaattattaaaattacctgatggaacagttaaagttttagttgaaggtattaagagagtaaaaattttagattttaaagataatgagaaatttatcatatgtgattatacaccatataatgacagtgtagataaagatgaagacctttatcctcttgcagctacagcaattagaagacttgaaaaactaacttcgattaacaaaaaaatttctaatgaaactattaattcaataaaacaattaaaagaaccgtcacaaattgctgacaatattgcatctcatataactgcaacaatatctgaaaaacagcaaatatttgagacaatcgacgttaaaaaaagattgaatgctattattaagattatggaaaatgaaactagcattattggagttgaaaaaagaattagaggtagagttaagacacagatggaaaaaactcaaagagaatactatttaaatgagcaattaaaagctatccaaaaagaattgggtgaaattgaggatggaaaagatgagaacacaagtttaaataaatcaattttgaaagcaaaaatgcctaaagaggtagaaaaaaaatgtcttcaagaattaaaaaaattaaaaaatatgagccctatgtctgcagaagcaactgtcgtaagaaatatcttgattggatga

SEQ ID NO: 263123 - DNA, 951 bp, Unknown
  Bacterial polypeptide expressing nucleotide sequence isolated from the Sargasso Sea
agagctacgggaagaaaatttgttagaatgtcactcggaggagttagagatgaagctgaaattagaggtcatagaagaacttatataggatctctgcctggaaaggttcttcaaatgatgaagaaagcaggttcatctaatccactatttctattagacgaaattgataagttaggagccgattacagaggtgatccttcatcagctttattggaagtgcttgacccagagcaaaataattcattcaacgatcactatctagaagttgattatgacttatccgatacaatgtttattacaactgctaatacattaaggatgcctcccgcactattagacagaatggaaattattagaattgcaggctacacggaagatgaaaaggtagaaattgtaaaacaacatttagcaccacagatgttagagaagcatggtttaaagagtggtgagcttatactggacgatagtgcgataactgggttaataagatattatactagggaagcgggtgtaaggagtttagaaagagaacttgctaacctcgctcgtaaaacagttaaaaaaattgtagcaggtgatattggatcattaacaataaacgaagataacctgcatgagtttgcaggtgttagaaaatttaaatttggcgaaattgataacgacgaccaggttggtatagttacaggacttgcttggacagaagttggtggcgatattttgccaatagagtccgttataatgcctggaaaaggccgaatgacaattactggaaaattaggcgatgtaatgaaagagtctattcaagctgcaaaatcctatgttcgctcaagatgcatcgagtttggaattaaaccaactatttttccgatacgcgatattcatattcatgtgccagagggtgcaatcccaaaaagatggcccatccgctggcctaggaatggttacatccat

SEQ ID NO: 263124 - DNA, 940 bp, Unknown
  Bacterial polypeptide expressing nucleotide sequence isolated from the Sargasso Sea
tgaggatcaaaatgctttaaaagaactagatatttttgctttaggtttagtaaagaaatatgaaagattattagttttaagcaaaaaagattttaatgatggtacaaataacataaaaaatttaaaagatgcttcacaaatagcaaataatatttcttcaaatttaagtattcaaatttttgaaaaacaggaactgttagaaattcttgatttaaaaaaaaggctagaaaaaatttatgcatttattgaaaaagaaacaagcgttttatcagttgagaaaaaaattagaggaagagttaaaaaccaaatggaaaaaactcaaagggaatattatttaaatgaacaattgaaagctattcagaaagaactaggggaaatcgacgaaggcaaagatgaattaactaacctttcaaaagccattactaatgctaaaatgcctaaattagctaaagagaaatgcttatcagaattaaagaaattaaaatccatgagtcctatgtccgcagaagctacagtagttagaaattatttggattggatgacagaattgccttggtccaataaatctaaaataaatacagatctaaataatgctcaaaaaatactagatgaagatcattatggtttagaaaaagttaaagaaagaataattgaatttctagctgtacaaaaaagaatacaaaaaatgaaagggcctattttatgtttagttggcccaccaggtgttggaaaaacatctttaggtaaatcaatagcaaaagctactaatagaaaatttattaggatttcacttggcggcattagagatgaagcagaaatcagaggacatagaagaacttatataggttctttgcctggaaagattatacaaatgatgaaaaaagctggtactaaaaatccactttttttattagatgagattgacaaagtggaaatgatt

SEQ ID NO: 263125 - DNA, 820 bp, Unknown
  Bacterial polypeptide expressing nucleotide sequence isolated from the Sargasso Sea
acatctaataaaaaaacagatggataattgtaaactaaaagattcagaattttctattgatgaggaagctcttaaaataataattcaatcttacacaagagaagctggtgttagaaatttagagagacaattagcaaaactaactagaaaaatagttactttaattgaaaaaaaagaagctaaatctttcaatattacaaaagaaaatgttaaagatattttgggtgtacccatatatcatagacatgaaatcgaaaaagataatcttgtaggtataactacggggttagcttggactgaagtgggaggcgaattattatctattgaatcagttaaagttaggggtaagggtaaggttacagcaacaggtaaattaggtgatgttatgaaggagtctgttcaggcagctgaattttttataagatctaaagctttatcttatggcttaaacccaattgatttagaaaaaaatgacatacacgtgcatgtcccagagggtgctactccaaaagatgggccatctgcaggtgttgcaatggtaactagcatagtctcagctttaacagatataaagatcaaaagtaatgttggtatgacgggagagataactttaagaggaagagtacttccaattggtggcttaaaagaaaaattattagcagctaaacgaggcggcttaaaaacagttttaatcccgattgataataaaaaagatttagtagaaataccaaataatataaaaaagcaattaaatattatacctgtagattcaatcgatcagggtattgaaaatgctttggttcatcacctccagaaataa

SEQ ID NO: 263126 - DNA, 813 bp, Unknown
  Bacterial polypeptide expressing nucleotide sequence isolated from the Sargasso Sea
aacacaaaaagaatattatttaaatgaacagatgaaagctattcaaaaagaattaggagataatgatgaagtagatgatataaccgacatagaaaacaaattaaacaaactaaagcttagttctgaagctcgtgagaaatgcaaatctgaaataaaaaaattaaaaaatatgagcccaatgtctgcagaagctacagtgataagaaattatcttgattgggtattaaatataccttggaataacccatcaactatttctaaaaatattaaaaaagctaaatctattttagagtctgatcattatggattagaaaaagtaaaagatagaattttagaatatttggcagttcaaaaaagaattaataaaatcaaaggcccaattttatgtttagtaggacctccaggtgttggtaaaacttctttgggaaaatctattgctaactctaccggaagaaattttgtcagaatgtcactcggaggagtaagagatgaagctgaaattcgaggtcatagaaaaacatatattggatcaatgcctggtaggtttttacaagctatgaaaaagtcaaagagttctaatcctttaattttattagatgaaattgataaattaggttctgattggagaggagatccttcttcagctttacttgaagtattagatcctgaacaaaataacaaatttaatgatcattatttagagttagattatgatttgtctgatgttatgtttgtttgtactgctaacacccttaatattcctgctgccttattggatagaatggaaattattaggataccaggttatactga

SEQ ID NO: 263127 - DNA, 847 bp, Unknown
  Bacterial polypeptide expressing nucleotide sequence isolated from the Sargasso Sea
agatgaagctgagataaggggtcatagaagaacttatataggatctttaccaggaaaaattattcaaatgatgaaaaaagctggaactaaaaatccacttattttattagatgaaattgataaagtgggaaatgattatcgtggagatccatcctcggcattgttagaagctttagacccagagcaaaatacaacttttaatgatcattacttagaagttgattatgatttgtcagatgtgatgtttgttacaactgcaaatacattaaatattttaccacctttgttagatagaatggaagtcattagaatacctggttatacggaagatgaaaaaattaatattgctaataaatttcttttaccaaaaacaatcaaagaaaatggtgttaaaactggagaaatggatttgtctgatggtacaattaaagaagttatccgtaattatactaaagagtcaggagttagaaatttagaaagagaaatttcaaagataactagaaaagttgttaagaaagttgtgaactctgaagaaaccaaagttaaaataaatgaagaaaacttagtagatttccttggagttaaaaaatttaaatttggtgaattggaaagtgaagataaagtgggaattgtaacagggttagcttggactgaatttggtggagaaatattgaagattgaaactgttaatatgccaggtaaaggaagaatgcaaattactggaaaacttggtgatgttatgcaagagtctgttaaagcagcaaaatcatatgtaagatctaaaagtttagattttggtattattccacctatttttgaaaaaaaagattttcatatccatgtacct

SEQ ID NO: 263128 - DNA, 877 bp, Unknown
  Bacterial polypeptide expressing nucleotide sequence isolated from the Sargasso Sea
actttggatgaagatcattatggattagaaaaagttaaagaaaggataatagaatttttagctgtacaaaaaagaatggataaaattaaaggtccgatactatgtttaattggcccccccggagttggtaaaacatctttaggtaaatctattgcaaaagcaacaaatagacagtttgtaagaatgtctttaggtggagttagagatgaagctgaaattagaggtcatagaagaacttacattggatctttaccaggaaagattattcaactaatgaaaaaagctggaacaaaaaacccgcttatacttcttgacgagatagataaagtaggaaatgactacagaggagatccatcatctgctttactagaagctcttgatccagaacaaaataaaacattcaatgatcattatttggaagtagattatgatttgtcagatgtgatgtttgtaactacagcaaatacattaaatatacttccgccattattagatagaatggaagtaataagaattcccggttatacagaagacgaaaaaataaatatagcaaataaatatttattaccaaaacaaataaaagaaaatggtgtaaaaaatgaagaacttgaattggaaaatggaacaataagagaaattataagaagttatacaagagagtctggagtaagaaacttagaaagagaaatttcaaaagttgccagaaaagttgttaaaaaagttgtaaataatgaggaaaaaaaagtaaaagttaataataaaaatgttcatgattttttaggtgtcaaaaagtttaaatatggggaagttgagtcagaggatagagtgggtattgtgactggattagcttggactgaatttggtggagaaatttgaa

SEQ ID NO: 263129 - DNA, 850 bp, Unknown
  Bacterial polypeptide expressing nucleotide sequence isolated from the Sargasso Sea
tgctgatgtaattgcagttaatttgaatattaacttatctcagaaacaagaaattcttgaaattatttctttagaaaaacgtttagataaaatttatggttatttgttatcagaaattgactctctacaagttgaaaagaagattaaaggtagagttaaaaggcaaatggaaaaaactcaaaaggaatattatttaaatgagcaaatgaaagctattcagaaagaattgggtgataatgatgatttagatgatatttctgaaatagaaaaaaagatcgatgagatatatctaactgatgaagcaaaagaaaaatgtaaatcagaattaaaaaaattgaagactatgagcccaatgtctgcagaagcgactgtaattagaaactatttagactgggtgctttcaataccttggaatattccaacatcaatttcgaaaaatataaaaaaggcaaaatctattcttgaagcagatcattatggtttagataaagttaaagaaagaattcttgagtatctagctgtgcaaaaaagaataaataaaatcaaaggaccaattttgtgtttagttggccctccaggtgttggcaaaacttctcttggaaaatcaattgcaactgctacaggaagaagttttgttcgtatgtctttaggtggagtaagagatgaggcagaaattcgagggcataggaaaacatacatcgggtctatgccaggaagatttattcaatctatgaaaaaatcaaaatcatcaaatcctttaattttgttagatgaaattgataaacttggttctgattggagaggtgacccttcatctgcgcttttagaagttttagaccctgagcaaaat

SEQ ID NO: 263130 - DNA, 832 bp, Unknown
  Bacterial polypeptide expressing nucleotide sequence isolated from the Sargasso Sea
tatagaacacctggccgtacttaaattaagaaatgatatgagatcaccaatactttgtctctatggcccacctggtgttggtaaaacttcattaggaaaatctgttgcagaggcattaggtagggaatatgttagaatttcacttggtggaatgagagacgaagctgaaattaggggccatcgaaaaacatatattggggcacttcctggaaggatcttacaaagtttaaaaaaagctggcacctcaaatccagtttttgttttagatgaaattgataaattatcaacaagttttcagggtgatcctgcctcagcattattagaggtattggatccagaacaaaatgtagatttttacgacaactttttagagctgggatatgatctatcaaaagtaatgtttattgcgacagcaaatagtctagcacccatacatccagccttaagagaccggatggaaatgattaatgtcagcggatatactttagaagagaaaaccgaaattgctcaaaaatttcttttacctaaacaacttgaagaacatggaatgaatactaagcatttgaagcttagaaagacagtacttaaaaaaatagttgaaggatatacccgtgagtctggggtaagaggcttggaaaagcaagtcgctaaaactgttcgatttgctgctaagtcattagcaatggaagaagattataacaaaaacccaaatatttctgatttaatttcaatattaggtcctaacaaagttcacctcgatttatacgaaaacaaccatgtagcaggagttgtaactggtcttgcatggactgctgttggaggagatattctt

SEQ ID NO: 263131 - DNA, 868 bp, Unknown
  Bacterial polypeptide expressing nucleotide sequence isolated from the Sargasso Sea
atggatgtaaaaatttcattaccgctattacctttgagagacattgttgtttttcctagtatggtaataccgttgtttgtcggtagagataagtctatctcagcgctgaatgaagtgatgaaaaaagaaaagaaaattattttagttacccaaaaaaactcagagattgatgaccctaaaaaaacagatgtttttatgtacgggtgtgagggcaacattttgcaacttttaaaacttcccgatggtacagttaaagtattggttgagggtattaaaagagtaaaaattcttgatttcaaagacaatgaaaaatttataacatgtgagtatacatcttataatgatttaattgacgaaaaagaagatttgtatccgttagcagctacatcaatacgaagattagagaaactaacttccattaataaaaaagtttctaatgaaacaatcaatagtattaaacaattgaaagacccatcacaaatagctgacaatatagcttcacatatcactgcaactatctctgaaaaacaacaaatttttgagacagcagacgttaaaaaaagattaaattcaattataaaaataatggaaaacgaaactagtataattggtgttgaaaaaagaattagaggaagagtaaaaactcaaatggaaaaaactcaaagagagtattacttaaatgaacaattaaaggcgatacaaaaagaattgggtgagattgaagatggtaaagatgaaaatacaagtttaaacaaagcaatcttaaaatctaaaatgcctaaagaagttgaaaaaaaatgcttacaagaattaaaaaaattaaaaaatatgagtccaatgtctgctgaagcaactgtagtaagaaatt

SEQ ID NO: 263132 - DNA, 831 bp, Unknown
  Bacterial polypeptide expressing nucleotide sequence isolated from the Sargasso Sea
tctttaggtggagttagagatgaggcagaaattcgtggtcatagaagaacttatattggttctttgcctggaaaaattattcaaatgatgaaaaaagcaggtacaaaaaacccacttattttattagatgagattgataaagttggtaatgactatagaggtgatccatcatcagcattactagaggctcttgatccagaacaaaatactacttttaacgaccattatttagaagttgattatgatctttcagatgtaatgtttgttacaacagcaaataccttaaatattttacaacctttattggacagaatggaagtaataagaatacctggttatacagaagatgaaaaaattaatattgctaacaaatatcttctaccgaaacaaataaaggaaaacggagttaaagcaaacgaattagacctagaagatggcacaataaaagaaattattagatcctacactagagaatctggagtaagaaatcttgaaagagagatttcaaaagtctctagaaaagttgtgaaaaaagtagttaatggtgaaaaagaaaaagtaaacgtaaataaaaataatttatcagattttttaggtgttaaaaaatttaaatatggtgaagtggaagcacaagatagagtaggaattgttacaggattagcatggacagaatttggaggagaaattttaaaaattgaaaccgttaatatgccaggcaaaggaagaatgcagataactggtaaacttggtgacgtaatgcaagagtctgtaaaagctgcaaaatcttttgtaagatctaaaagtctcgactatggaattatacctcctgtt

SEQ ID NO: 263133 - DNA, 899 bp, Unknown
  Bacterial polypeptide expressing nucleotide sequence isolated from the Sargasso Sea
tggttgtttgagtaaagtacttcaactgcttaaacttccagatggaactgtaaaagttttggttgaaggcgaaaaaagagttaaaattattaatcacgaagagaaaaatgagaattacttaacctgcgaagttgaagtggttgaagatcaaaatattaccaaagatcttgatcaattagctataggacttgttaagaaatttgaaagacttcaggttttgagtaaaaaagatttaggcgaaggttctaataatcttaaaaatttaaaagacccctcattaattgctaataatatctctgcaaacctaagcattcaaatttttgaaaaacaagagttacttgaaatatttgatcttaagaaaaaacttgagaaaattcacgcatttatagagaaagagacaagtgttttatctgttgagaaaaaaattagaggaagagttaaaaatcaaatggaaaaaacacaaagagaatattatttaaatgaacaactaaaggctattcaaaaagagcttggtgaaatagatgaaggtaaagatgaattaacatctttatctaaagcaattactgaagctaaaatgccaaagttagcaaaagaaaaatgcctttcagagttaaagaaactaaaatcaatgagtcctatgtcagcagaagctacagtagttagaaattatttggattggatgactgaactaccgtggactaataaatccaaaataaacaccgatttaaataacgctcaaaaaattttagatgaggatcattatggccttgaaaaagtaaaggagagaattattgagtttttggcggttcaaaaaagaattcagaaaatgaaaggtcctatcttatgtttagttggccctcctggagttggaaaaacatctttgggcaatcaattgctaa

SEQ ID NO: 263134 - DNA, 598 bp, Unknown
  Bacterial polypeptide expressing nucleotide sequence isolated from the Sargasso Sea
ggacagaagtggagggcgaaatacttaaaaattgaaactgttaatatgccaggaaaaggaaaaatgcaaagcacaggtaaattaggagaggttatgcaagagtcaataaaggcagctaaatcatatgttagatcaaagtctattgattttggtattataccgccactttttgagaaaaaagattttcacatacatgttccggagggtgcaacacctaaagatggaccatctgcaggaatagcaatggttacatctattatatcttcaattactggagtgcctgttaataaagatatagctatgacgggggaggtaactttgagaggaaatgttttacaaatagggggtttgaaagaaaaattattagcggcccacagagctggtataaaaaaagttataataccaattgacaataaaaaagacctagtagaaatacctgaaaatataaaaaaaaatatggaaattgtttgtgtaaaaaacgtagaagacgttttaaagaatgccttaacaaaagagttaaaaccagttaagtgggctgaaattgaccaggcaacaaacaaaaataaagaaaaatctgaagttacaagcacacattaat

SEQ ID NO: 263135 - DNA, 919 bp, Unknown
  Bacterial polypeptide expressing nucleotide sequence isolated from the Sargasso Sea
aggctaaaatgccaaaacaagcaaaagaaaaatgtttatcttgagctaaaaaaattaaaatctatgagcccaatgtctgcagaggcgaccgttgtaagaaattatttagactggatgacagagttaccttggtcaaataaatcgaaaatcaatactgatttaaataatgctcaaaaaattttagatgaagatcattatggacttgaaaaagtcaaagaaagaataattgaattcttagcagttcaaaaaagaatacaaaaaatgaaaggtcctatactatgtttagttggccctccaggtgttggaaaaacatctctaggaaaatcaatcgctaaggctactaataggaaatttattagaatttcattgggtggtatcagagatgaagctgagataaggggtcacagaagaacgtatatcggttctcttccaggaaaaataatacaaatgatgaaaaaagctggtacaaaaaatcctttatttcttcttgatgaaatagacaaagttggaaatgattatagaggagacccctcttctgctttattagaggctttagaccctgagcaaaataaagaatttaacgatcactacctcgaggttgattatgatttatcagatgtcatgtttgttacaacagctaacacattaaatattttacctccactcttagatagaatggaagtgataaaattatcaggctatacagaggacgaaaagttaaatatttcacaaaaatttttaattccaaatcaaagtaagaacaatggattaaaaagagaagaatggaatattgatgaagaaataattagaaaaattattagacactacacaagagagtctggagttagaaatttggaaagggaaatttcaaaaattgcaagaaagttagtcaaaaaaattgatagcaaagaaaaagtta

SEQ ID NO: 263136 - DNA, 912 bp, Unknown
  Bacterial polypeptide expressing nucleotide sequence isolated from the Sargasso Sea
acaaagtagatatagatttaaataatgcgatgaaaacccttgatgaagatcattacggtttagaaaaagtcaaagaaagaattattgaatttttggctgttcagaaaagaatggataaaataaaaggtccaattttatgtttaattggtccaccaggagttggaaaaacttctcttggtaaatcaattgcaaaagcaacaaatagacagtttgtaagaatgtctctaggtggtgttagagatgaagctgaaattagaggacacagaagaacttatattggttcattgccaggtaaaatcattcaaatgatgaaaaaagctggaacaaaaaacccacttattcttttagatgaagttgataaagttggtaatgattacaggggtgatccttcttcagcattgctcgaagctttagatcctgagcaaaatacaacatttaatgatcattaccttgaagttgattatgatctttcagatgtaatgtttgttactacagctaacactttaaatatacttccgccattactagacagaatggaagtaataagaatacctggttacacagaggacgaaaaaataaatattgcgaataaatacttattaccaaagcaaattaaagaaaatggtgttaaaaaagaagagttagatcttattgatggaactattaaagaaattataaggagctatacaagagagtcaggtgtaagaaatctagaaagagaaatatctaaagttgcaagaaaagttgtaaaaaaagtagttagtggtgaagaaaaaagagtagtagtaaacaataataatgttcatgattttttaggtgttaaaaaattcaaatatggtgaagtagaatctgaagataaagttggaaaaggtacaggcttagcctggacagaattggaggagaaattttaaa

SEQ ID NO: 263137 - DNA, 875 bp, Unknown
  Bacterial polypeptide expressing nucleotide sequence isolated from the Sargasso Sea
gatgaaacgactaagcttaaaaaaatcgatattaaaagcaaagatgccaaaagaagtagaaaagaaatgcatgtcagaattaaaaaaattaaaaaatatgagtccaatgtcggcagaggctactgttgttagaaattatctggattggatgatagatttaccatggtttaaaaaagataaagtagacattgatttaaataaagctttaaaaattttagaagaagatcactttgggttagaaaaagttaaagaaagaattatagaattcttagccgtacaaaaaagaatggataagataaaaggtcctatactttgtttggtaggcccaccaggtgtaggaaaaacttctttaggtaaatcaatagctaaggcaactaacagacaatttgtaagaatgtctttaggtggagtaagagatgaagcggaagttaggggtcacagaagaacttatattggttctcttcctggaaaaattattcagatgatgaaaaaggcaggcactaaaaatcctttatttttattagatgagattgataaagttggaaacgattatagaggtgatccatcatcagctctattagaggctttggatcctgaacagaatacaacatttaatgatcattacttagaagttgattatgatttatcagacgttatgtttgtaacaactgcaaacacattaaatattcttcccccacttttagatagaatggaagtaataagaattccaggatacacagaagatgagaagattaacattgctaacaaatatttgcttcctaaacaaatcaaagacaatggtgttaaagaaggtgaaatgaagttagctgacgacacaattaaagaaattataagaagttatacacgagaaagtg

SEQ ID NO: 263138 - DNA, 611 bp, Unknown
  Bacterial polypeptide expressing nucleotide sequence isolated from the Sargasso Sea
gaatcaggtgtgaggaatttggaacgagaaatagcaaatgtattaagaaaagttgctcgagatttagttgaaaaaacagcaaagaaaattcgtgttactagcgctaaagtaattgaatatttaggtgcaccaagattctattctgaattagctgaaagaacaacaaagcctggtgttgtaacaggattagcatggactgctgcaggtggagatattctatttgttgagtcatcaaaaatgaaaggaaaaggtggcctaacattaaccggacagcttggtgatgttatgaaggagtcagccacagctgcattaacatatgttagatcgcacactgatatcttaggtataccggatgattttcatgaaaaaacagatatacatgttcatgtacctgctggcgccataccaaaagatggtccttcagctggagtaagtatgtttacatcaattgtttcattgatgacaggaaaaccagttaaagataaagttgcaatgactggtgagattacgcttcgtggtaatgtattacctattggtggtgtgaaggaaaaagtaacagcagctcaccgttcagggattaaacatattatcttacctgatcataataaaaa

SEQ ID NO: 263139 - DNA, 913 bp, Unknown
  Bacterial polypeptide expressing nucleotide sequence isolated from the Sargasso Sea
aattaattttaataaagaatttattacagcatcaattagagaaattaatcaaaaaactaaaaaaaatacaaaaatacgagcattgcaaaaacttattattgagcagtttgttgagtttcaaaaaattaacaaaaaagtttctttggatgtgattaacaatgtcaaaacattaaatgatcccgataagattgttgacataattgtatcaaatatttcaatttcattatctcaaaaacaagagattttagaaattataaaaacagaagatagacttaacaaagtctatggttatttagtttctgaaatcgactcttttcaagtagagaaaaagataaaaggtcgagttaagagacaaatggagaaaacacagaaagaatattatttaaatgaacaaatgaaagcaattcaaaaagaattaggggataatgaagatttggatgaaattgctgagcttgagaagaaattaaatcaatataatttatctaaagaagctaaagagaaatgtgcctcagaaattaaaaaattaaagaatatgagccctatgtcagctgaggcaactgtaattagaaattacctagactgggtaatgtcaataccatggaacaatcctgatcaaatttctcaaaacataaataaagcatcaacaatattagagaatgatcactatggattagacaaagttaaagagagaattttagaatatttagcagttcaaaaaagaacaaataaactaaaaggtcctattttgtgtttagtcggaccacctggtgttggaaagacatctcttggtaaatccattgcaaattctacaggtagaagttttgttagaatgtcccttggaggtgtaagggatgaagcggaaataagaggacatagaaaaacatatataggttcaatgcccgggagatttatc

SEQ ID NO: 263140 - DNA, 908 bp, Unknown
  Bacterial polypeptide expressing nucleotide sequence isolated from the Sargasso Sea
attgccactaagagatatagttatttttccatcaacagtagttcctttatttgtaggaagaaaaaagtctattaaagccttagaggaagtaatgaaaactgataaatctatagtattggttgctcaaaagaattcagaagttgacgacccacaagaaaaagatatttattcgtttggttgtttgagtaaaatattacaattattaaaacttcctgacggaacagtaaaagttttggtggaaggtgttcaaagagtaaaaataaaatctataaaaaaagaggaaaaaaaatatttaaattgcgaagttgaaatattatcttcaacggaagacagccaagaaagtaagaatttagctgctactttaattaagaaatttgaaagactgtcaaatttaagcaaaaaagaggttgtagattttgctaaaaatttaaaatctttgaaaaaaacctctgatatagctgataatatttcttcaaacctgaatattcaaatctttgaaaaacaaaatttacttgagatgattgagttaaacaaaagactagaaaaaatttatgaaataattgaaaaagaaacaagcgttattaatgtagagaaaaaaattagaggtagggttaaaaatcaaatggaaaaaacccaaagagagtattatttgaacgaacaactgaaagctatccagaaagaacttggtgaaattgaggatggaaaagacgaagtatctaatcttagtaacgctatattaaaagctaaaatgactaaggaagctcaaagcaaatgtttagcagaattgaaaaaattaaagtcaatgagtccaatgtctgctgaagccacagttgtgagaaattatttagactggatgatagatttaccttggagcaacaaaagcaaaataataaaagatttaaatgcag

SEQ ID NO: 263141 - DNA, 823 bp, Unknown
  Bacterial polypeptide expressing nucleotide sequence isolated from the Sargasso Sea
aaagttgatattaatctaaacaatgcattaaaaacattaaatgatgatcattatggtttagaaaaagttaaagaaagaattatcgaatttttagctgtacaaaaaagaatggataaaatcaaaggaccaattttatgcttggttggacctccaggtgtaggaaaaacttctttaggaaaatctattgctaaagcaaccaatagacagtttgttagaatgtcactcggtggtgtcagagatgaagctgaagtacgcggccatagaagaacatacataggttctcttcctggaaaaattattcaaatgatgaaaaaagcaggaactaaaaatccattatttttacttgatgaagtggacaaaataggaaatgattatagaggagatccctcatcagcgttattagaagccctagacccagagcagaatactacatttaatgatcattatttagaagttgattatgatctttcagacgtaatgtttgtaacaacagctaatacacttaatattttaccgccattattggataggatggaagttattagaatacctggatatacagaagatgaaaaaataaatattgctaataaatatttgttgcctaaacaaattaaggataacggtatcagagatggggagatgagtttaaaagatggtacaataaaagaaattattagaaattatacaagagagtctggagtaagaaatttagaaagagaaatttcaaaagttacaagaaaagttgttaaaaaaatagtaaatgaagaagaaaaaaacgttgaagttaatgaagaaaatttatcaaatttcttaggtgtcaaaa

SEQ ID NO: 263142 - DNA, 774 bp, Unknown
  Bacterial polypeptide expressing nucleotide sequence isolated from the Sargasso Sea
gatgaggatcacttttggattaattaaagtgaaagatagaattattgaatatttagctgttagaaatctaaaacaaaaaaaagatccaaaaggagtcttaagaggtccaattttatgttttggaggtccaccaggtgttggtaaaacttcattaggtaagtctattgcaagatcgatgggacgagagtttgttcgtctttcacttggtggtgtaagagatgaagctgaaattagagggcaccgtagaacatatataggagctttgccaggaagaattatacaaagtataaaaaaagcaggtacaaataaccccgtatttatgctcgatgaaattgataaattgggttctgatttcagaggagacccttcttctgctttgttggaagtgcttgaccctgaacaaaatcattcattcagtgatcattatttagaagttgattttgatttaagtaatgttatgtttattgcaacagcaaattatcaggacgccattcctcctgcacttagggataggatggagattcttgattttactggatatattgaagatgaaaaggttcaaattgctaagcgtcacatacttcctaaacagattgaagaaaatggacttaccaaagatgaagttttttttgatattcattccataaaagaattaattagatcttacactagagaagcaggagttaggaaccttgaaagagaggtggcaaatgtattgaggaaggtcgccagagatttagttgaagaaaataatagtaaaattaaaattaccaa

SEQ ID NO: 263143 - DNA, 775 bp, Unknown
  Bacterial polypeptide expressing nucleotide sequence isolated from the Sargasso Sea
tttaataccaaaaaatattacatcacacggattaaaaaaatcagaatggaagatcaatgattctgctttaaaagatgtaataaaattttatacaaaagaagcgggtgttagaaatcttgaacgtgaattaacgagtttgattagaaaagctgtaagagaattatcaacatctaaaaaaaataaaatttcattatcgccaaaaaatattgaaaaatatgctggaattaaaaagtttaagaaaaatgaactagaagataaagatttagttggtataacaactggcctagcatggacagaagttggaggagaacttttattaattgaagctgtgtcagtaaatggcaaaggcagaattataagtactggaaaattaggagaagtaatgaaagaatctgttaaagcagctgaaagctatgttaaatcaagatcagatgattttggaattaattcaaatttttttaatacaaaagatattcacgttcatgttcctgaaggtgcaacaccaaaagatgggccatctgctggaatagcaatgtgtacatcaattgtttctgtaatgacaggaataccagtgaaaagaaatgtggcaatgactggagaaataactttaagaggtagagttttaccaattggtggcttaaaagaaaagttgatagctgctagcagatcaaatataaaaatagtattaatacctaatgataataaaaaagatataactgaaattccaaaaaaattaattaaaggtttaaaaataattacggtttccaatcttgat

SEQ ID NO: 263144 - DNA, 694 bp, Unknown
  Bacterial polypeptide expressing nucleotide sequence isolated from the Sargasso Sea
tatttagaagttgattatgatctatcagacgtgatgtttgttactactgcaaatacattaaatattttaccaccattacttgatagactagaggtaattagaattcctgggtacacggaggacgaaaaaattaatattgctagtaattatttaatcccaaaacaaataaaagataacggactaaaagaagctgaattgaatctagatcaaggagtacttaaagatgtaattagaagctacactaaggaggcaggagttagaaatctggaaagagagatatctaagttggcaagaaaaacagttaaaaaaatattaactgacaattctggtagtcataaaattgatttgaaaaatttacctgactatttaggtgtaaaaaaattcaaatatggaatgatagaatccgataatagagttggagttgttacaggtttagcctggacagaatttggtggagaaattttaaaaattgaatctgctatgatgcctggaaaaggaaaaatgcaaattacaggaaagttaggtgacgtgatgcaggaatcagttaaagccgctaaatcatatgtaagatctaagtccttagaatttggaattattccaccagtttttgaaaaaaaagattttcatatacacgtaccagaaggagccacacctaaagatggaccatctgcaggcatagctatggttacatcta

SEQ ID NO: 263145 - DNA, 631 bp, Unknown
  Bacterial polypeptide expressing nucleotide sequence isolated from the Sargasso Sea
atctatcgccaaggcaactggaagagaatttgttagagtatccttaggtggtatacgtgatgaatctgaaattagaggtcatagaagaacttatataggttcaatgccaggtaaaattattcaaggaatgaaaaaagttggtaaaagtaatcctctatttttattagatgaaattgataaaatgggttttgattttagaggtgatcctgcagcagctttattagaagcgcttgactcggaacaaaataataaatttaacgatcattatttagaagttgattatgatttatcagatgtaatgtttgtaacaactgctaatactttgaatattccaccggctttattagatagacttgaaataataagactgcctggttatgtagaagatgaaaaagttgaaattgcaaaaaaacatttgataccaaaaaatacattaaatcatggtattaaaaaagcggaatggaaaattaatgataaagctcttaaagaattaattaaattttatacaaaagaagctggcgttagaaatttagaacgtgaaattacaaatttaattagaaaagcaattagaaaattaactacttcaaataaaaaaagtatttcaataactccaaccaatttagaaaaattt

SEQ ID NO: 263146 - DNA, 841 bp, Unknown
  Bacterial polypeptide expressing nucleotide sequence isolated from the Sargasso Sea
gaagcaatttacgaaaagattcagtccgagcttgaaatactccaggtagagaaaaaaatcagaaatagagtaaaaaaacaaatggaaaaagctcaaaaagaatattatttaacagaacaaatgaaagcaattcaaaaagagcttggtgacaaagatgattttaaaagtgagattttagaatttgaagattctttgaagaaaaaagtaatgccggatgatattagaaccagaatagaaaaagagataaaaaaattgaaaggtatgtcatcaatgtctgctgaggctacagtagttaggaattatattgattggctagttaatcttccatgggattcagaagtttctgaggatgagatatcaattgataatgctcagaaagttttagatgaagatcattttggtttagagaaaccaaaggaaaggattactgaatacctcgcagtgagagcattaacaactaaacaaaaaggtccaatcatgtgcttagtgggaccaccaggagtaggtaaaacatctcttgctaaatctgttgctaatgcaatgggaagaaaattcgtaaggatttcgctaggtggagttagagatgaagctgaaataagaggtcatagaagaacttatattggagctcttcccggtaagattattcagggaatgaaaaaagctggtactaaaaatccagtttttctattagatgaaattgataaaattggtgctgattttagaggagaccctgcttcagcacttcttgaagctctagaccctgaacaaaattcaacctttaatgatcattatatagaagttgactacgacttgtcacaagttttattcattacaacagcaa

SEQ ID NO: 263147 - DNA, 867 bp, Unknown
  Bacterial polypeptide expressing nucleotide sequence isolated from the Sargasso Sea
tggtttggaaaaaatcaaagaaagaataattgtttttttagctgttcagaaacgaatggaaaaaattaaaggtccaattttgtgtttgataggtccaccaggtgttggaaaaacttctcttggtaaatctattgcaaaagctaccaatagacaatttataagaatgtcacttggaggtgttagagatgaggcagaagtaagaggtcatagaagaacttatataggttctcttcctggaaaaattattcaaatgatgaaaaaagctggaactaaaaatcctcttttcttacttgatgaaattgataaaattggaaatgattacagaggagatccatcatctgcattacttgaagctttagacccagaacaaaatactacatttaatgatcattatttagaagtcgattatgatttatcagatgttatgtttgtgacaacagctaatactcttaacatattaccacctttacttgatagaatggaagtaattagaattcctggttatacagaagatgaaaaaatcaatatagctgacaaatatttattacctaaacaaataaaagataatggtattaaagatggtgaaatgaatttaaaagacggtacaatcaaggaaattataagaaattatacaagagagtccggagttagaaacttggaaagagaaatctctaaagtcacaagaaaagttgttaaaaaagtagttaatgatgaagaaaaaagtgttgaagtaaatgataaaaatatttctgattttcttggtgttaaaaagtttaagtttggcgaactagaaactgaaaataaaattggtatagttattggattagcttggacagaatttggtggagaaatcttaaaaattgaaaa

SEQ ID NO: 263148 - DNA, 610 bp, Unknown
  Bacterial polypeptide expressing nucleotide sequence isolated from the Sargasso Sea
aagcattataggtgtagagaaaagaattagaggtagagtaaaaactcaaatggaaaaaacccagagagaatattatttaaatgaacaactaaaggctatccaaaaagaattaggtgaaattgaagatggcaaagatgaaactactaacttaaaaaaatcaatccaaaaagccaaaatgccgaaagaagttgaaaagaagtgcatgtcagagcttaagaaattaaaaaacatgagtccgatgtctgcagaagcaacggttgttagaaattacttagattggatgattgatcttccatggtttaaaaaagatgatgtagacatcgatctaaataaaggtctaaaaattttagatgaagatcattttggtttagaaaaagttaaagagagaattattgagtttctagctgttcaaaaaagaatggacaaaattaaaggaccaattttatgtttagttggacctccaggtgttggtaaaacatcacttggaaaatctatagctaaagctactaatagacagtttattagaatgtcgttaggaggcgttagagatgaagctgaaataagaggtcatagaagaacatacattggatctttgccaggaaaaataatt

SEQ ID NO: 263149 - DNA, 888 bp, Unknown
  Bacterial polypeptide expressing nucleotide sequence isolated from the Sargasso Sea
catgtttgtcacaactgctaacacactaaatattttacctccattacttgatagaatggaagtgataagaatacctggttatacagaagatgaaaaaattaatattgcaaacaaatttcttttaccaaaaacaattaaagaaaatggtgttaaaactggagaaatggatttgtctgatggcacaatgaaggatgttattcgtaattatacaaaagagtcaggagttagaaatcttgaaagagaactttcaaaaattactagaaaagttgttaaaaagattgtgaatgccgaagaaacaaaagttagaatagatgaaaaaaatttaatagatttccttggtgttaaaaaattcaaatttggtgaattggaaaatgaagataaggtaggaattgtaacaggtttagcatggactgagtttgggggagaaatattaaagatagaaactgtaattatgccaggtaaaggaaaaatgcaaattaccggaaaactaggtgatgtaatgcaagaatctgttaaggctgctaaatcttatgtaagatctaaaagtttagattttggcataatccctcctatttttgaaaaaaaagattttcatattcatgttcctgaaggagcaacaccaaaagatggtccttcagcaggcatagctatggttacttctatagtttcttcaataactaaaattccagttcgtagggatatagcaatgactggagaggtaacaattactggacaagttttaccaattggtggtttaaaagaaaaattattagctgctcacagagcaggaattaaagaagttttaatacctaaagataatgaaaaagatttaacggatattccaaaaaaagttaaagaagatattaaacttacaactgtagaaatagt

SEQ ID NO: 263150 - DNA, 919 bp, Unknown
  Bacterial polypeptide expressing nucleotide sequence isolated from the Sargasso Sea
tgaattagcaaaatttaaacatatggctccatcttctgcagaggcatctgtcgttagaacatatcttgattgtttggttgatgttccatggaagaaaaaatcaaaagtaaagtctgatattaaagcatcaatgaaaatccttgaagaagatcattatgggctcgaagaagttaaggaaaggattgttgagtacttggctgtccaaaaaagagtaaaatcaatgaaagctccagttctatgcttagttgggccacctggagtgggaaaaacatctttaggggagtccatagcaagagccactaatagaaagtttgtaagaatgtcacttggtggtgttagagatgagtctgaaattagaggacatagaagaacttatataggttcaatgccaggaaaaataattcaaaaactttctaaggttggagtaaagaacccactttttttgttagatgagatagataaaatcggtatggatcataggggcgatcctgcatcagctttattagaggtattagatcctgaacaaaacaatactttcagtgatcattaccttgaggttgattatgacttatctgaagtaatgtttgtttgcactgcaaatagcttgaatatcccaacacctcttttagacaggatggaaattattagaattccaggttacatagaagatgaaaaaatcaatatagctgagaaatatttattaccaaaacaaatgaccaggaatggtctcaaagataatgaaattaaatttaataaagatgtaatactttctctaattagatattacacaagagaagctggtgtgagaggacttgaacgacaaatagctagaattttaagaaaagttgttaaacaaagattaattgaagataaatcaaaaacaagagcaactgcaatatcaacaaaaaacctagagaaa

SEQ ID NO: 263151 - DNA, 845 bp, Unknown
  Bacterial polypeptide expressing nucleotide sequence isolated from the Sargasso Sea
tgaaatgattgatgttaaaaagagattagaaaagatttatgaaattatgaaaaaagaaactagtgttataactatggagaagaagattagaggaagagtaaaaaatcagatggaaaaaacacaaagagaatattacttaaacgagcaacttaaagctattcaaaaggaacttggtgaaattgaagaaggaaaagatgaagttaccaatctaagtaaagctattgttaaagcaaaaatgagtaaagaagctcaaagcaaatgtatggctgaactaaaaaaacttaaagctatgagtccaatgtctgctgaagctacagtggtaagaaattatttagactggatggtagacttgccatggacaaataaaagcaaaataataaaagatttaaattcagctcaaaaaattctagatgaagatcattatggtttagaaaaagttaaagagagaataattgagtttttagcagttcaaaaaagaattgaaaaattaaaaggccccattctttgtttagtgggccccccaggagttggaaaaacatctttgggaaaatcgattgcaagagcaacaggaagaaaatttgtaagaatttctcttggtggtattagggatgaagccgaaataagaggacacaggagaacttatattggttcattaccgggtaaaattattcaaatgatgaaaaaagcaggaacaaaaaatcctctttttttattagatgaaattgataaagttggaagtgattacagaggtgacccatcttctgctttattggaagcgcttgatcctgaacagaacaagcaattcaatgatcattatttagaagtagattatgatttatcatgat

SEQ ID NO: 263152 - DNA, 907 bp, Unknown
  Bacterial polypeptide expressing nucleotide sequence isolated from the Sargasso Sea
atcttattagatgaaattgacaaactaggatccgattggaggggagacccatcatctgctttacttgaggttttagatcccgaacaaaatgataaatttaatgatcattacctagagttagactataacttatctgatgcaatgtttgtatgcactgcaaatacactaaacatacctcatgcactacttgacagaatggagattataagaattccagggtatacagaaaaagaaaaaaataacattgcacaaaaatatttaattcctaaacaaattaaaaaccatatacttaagagaagtgagttaaaatttactattaaaataataaatcagattataagaaattatacaagagaggctggagtaagaaaccttgaaaaagaaatttccaaagtttgtagaaaaactgtaaaattgcttgaaactacaaataagaatagtgttaatctcaatgaagaaatgttgagaacttttctaggtattagtaaatttagatcaagtgaaatagaaaagaaaaatttgattggtgtaactaatggtcttgcgtggactgaagttggtggtgaaattttatcaattgaagtcattctttcaattggtaaaggaagacttacaattactggaaagttaggtgaggttatgaaagagtcagtccaagctgctatttcttatgtaagatcccacagtctagatctcggtattcatccttttgattttgataagtttgatattcatgttcatgtacctgaaggtgcgactccaaaggatggtcctagcgcaggtatagctatatttaattctttggtatcttccctaactgctaataaagtaaggaaagatgtggcaatgacaggtgaaattactcttagaggaagagtcttgcctattggtggattaaaagaaaaaa

SEQ ID NO: 263153 - DNA, 616 bp, Unknown
  Bacterial polypeptide expressing nucleotide sequence isolated from the Sargasso Sea
atcatcaaagcccgcgaaattctcgacgccgaccatcacgggctggcgaaagtcaaggaccgcatcatcgagtttcttgccgtgcagcagcgtacaaagtccgtgaagggaccgatcctctgccttgttggtcctccaggagtcggcaagacctcgcttggcgagtcgatcgcacgcgccaccgggcgcaaatatgtgcgcatggcgcttggcgggatccgcgacgaggctgaaatccgcggccaccgcaagacctatatcggctcgatgcccggcaagatcgtgcagagcctgaaaaaggccaaaacgaacaacccgctgttcatgctggacgaggtcgacaagctgggcgccgactggcgcggcgatcctagctctgcccttctcgaggttctcgatccggcgcagaacagcacctttcaggaccattacatggaactggatctcgacctgtcgaacgtgctgttcatcaccaccgcgaacacgctgaacatgccgcagccgcttctcgaccgaatggagatcatccggctgtcgggttataccgaagacgagaagctggaaatcgcgaaatgccatctgatgggccggcagatcaaaaatcacggccttaaag

SEQ ID NO: 263154 - DNA, 880 bp, Unknown
  Bacterial polypeptide expressing nucleotide sequence isolated from the Sargasso Sea
catgaagtcagataaatccatagttttggttacacaaaaaaactctgaaatagacgatccagttagtaaggatttgtttcaatatgggtgcctaagtaaagtccttcaacttttaaaattacctgacggaactgtgaaagttttagttgagggagaaaaaagggttaaaatattaaaacatatcaatgataatacaaattatttaaattgtgaagttgaaataatagaagacaagaacgtttcaaaagatcttgaccaattagcacttggattagtaaagaaatttgagaaattgcaaattttaaataaaaaagatttaaatgaaaacggaaatagttttaaaaatttaaagaatccttctcaaattgctaacaatatatctgcaaatctaaatattcagattttagagaaacaagagttattagaattagctgatttaaaaataagattagaaaaaatccattcctatattgagaaagaaacaagtgtaattacagttgagaaaaaaattaggggcagagtaaaaaatcagatggaaaaaacacaaagagaatattatttgaatgaacaacttaaagctattcaaaaagaacttggtgagattgacgagggaaaagacgaaatgtcttctttgtctaaagcaattactgacgcaaaaatgccaaaattagcaaaagaaaagtgtatgtcagagttgaaaaaactaaaatcaatgagtccaatgtcagcagaagccacagttgttagaaattatttggactggatgacagaattgccttggtcaaataaatctaaaataaatacagacttatctaatgcacaaaaaattttagatgaagatcactatggattagaaaaagtaaaagatagaataattgaa

SEQ ID NO: 263155 - DNA, 601 bp, Unknown
  Bacterial polypeptide expressing nucleotide sequence isolated from the Sargasso Sea
tgcttggactgaagtaggtggagaaattttaaaaatagagtcggcagtgatgccaggtaaaggcaagatgcaaatcacaggaaaattaggtgatgttatgcaagagtctgttaaagcagctaaatcatatattagatctaaaagtttagagtatggaattatacctccagtatttgataaaaaagattttcatatacacgttccagaaggagcaactcctaaagatggaccttcagcaggaataggaatggttacttcaattatttcagctatcacagaaataccagttgataagaaggtcgcaatgacaggtgaaattactttgagaggaattgttcttcccataggaggattaaaagaaaaattactggcagcacatagagcaggaattaaaaaagtattgataccaatggaaaataaaaaagatctagttgaagttccaaaaaccattttagaaacaatggaaatcattccagtaaaaaatgtagatgaagttttaaaagttgctttaattaaaccattaaaaagagttgaatgggttgaagtagaccagattgctgaaaaaaataaaactaaaaaagaagagctaagcactcattaa

SEQ ID NO: 263156 - DNA, 867 bp, Unknown
  Bacterial polypeptide expressing nucleotide sequence isolated from the Sargasso Sea
aaaatgcgtggtccaattttatgtctagttggtccaccaggggttggcaaaacatctttgggaaaatctatagcaaaagctaccaacaggaaatttataagaatttctttaggaggaattagagatgaagcagaaataagaggtcacagaagaacttatattggttcgttacctggaaaaataattcagatgatgaaaaaagctggtacaaaaaatcctttatttcttttagacgagatagataaagtaggaaatgattatagaggcgatccttcatcagcattattagaggccttagatcctgaacaaaacaaagagtttaacgatcattacttagaagttgattatgatttgtccgatgtgatgtttgtgacaacagcaaacactttaaatattctaccaccacttttagataggatggaagtaataagactatctgggtatactgaagatgaaaaagttaatatttctcaaaagtttttaatacctaatcaaagtaaaaataacggattaaaaaaagatgagtggaatataaatgaagaaataaatagaaaaattataagaaattatacaagagagtcaggtgtaagaaatcttgagagagagatttctaaaattgcaagaaaactagtaaaaaaaattgataataatgagtctattaataatcctattgatgagaaagatttaaaagagttactaggagttcaaaagtttaattatggggaaatcgaggaagagaatagagttggagtagtaacaggtttagcatggacagaggttggtggagaaatcttaaaaattgaaacggtgattatgcctgggaaaggaaaaatgcaaatcactggaaagctaggcgatgtgatgcaa

SEQ ID NO: 263157 - DNA, 943 bp, Unknown
  Bacterial polypeptide expressing nucleotide sequence isolated from the Sargasso Sea
tctttacccaggaaaaattattcaaatgatgaagaaagcaggcacaaaaaaccctctatttttgttagatgaagttgataaaattggaaacgattatagaggagatccatcttcagctttattggaagcattagacccagagcaaaatacagcgttcaatgatcattacttagaagttgattatgatttatctgatgtaatgtttgtgacaacagccaacactttaaatattttaccaccacttcttgatagaatggaagtcataagaattcctggttatacagaggatgaaaagataaatattgccaataggtatctattacccaaacaagttaaagagaacggtgttaaagaaggagaactaaatttagaggatggcaccataaaagagattatcagaagttatacaagagagtctggagttagaaatttagaaagagaaatttcaaaagtaacaagaaaagtagttaagaaagtagtaagtggtgaggctgaaaaagtgctggtaaatgacaaaaatattccagactttttaggaattaaaaaatttaaatatggtgaagtagaggagaaagataaaactggaatagtaataggattagcatggactgaggtaggaggtgaaattcttaaaatcgaaactgtcaatatgccaggtaaaggcagaatgcaaataacgggaaaacttggtgatgttatgcaagagtctgtaaaggctgcaaaatcatttgttagatcaaaaagtttagaatacggaattattccacctttctttgaaaaaaaagattttcacattcatgttccagaaggagcaaccccaaaagacggaccttcagctggtatagctatggttacatcaattgtatcatcaatcacaaacattcctgttaatagagagatagctatgactggtgaagttacaattacaggacaggttctacaa

SEQ ID NO: 263158 - DNA, 778 bp, Unknown
  Bacterial polypeptide expressing nucleotide sequence isolated from the Sargasso Sea
aaagaaatttctaaaatttgtagaaaaatcgttaaaataattgaaacttcaaataaaaaaacagtagtgctaaatgatgaactggtggcaaaatttcttggtcatagtagattcagaacaagtgaaatagaaaaaaataacttaattggagttacaaacggtcttgcttggactgaggttggtggagagattttatcaattgaagcaattttatcaattggaaaaggcaggttgactattactggaaaattaggcgatgtgatgaaagaatcagttcaagcagcaatttcttatgttagatctcacagtattgacctaggaattcatccatttgattttgacaaattcgacattcatgttcacgttccagaaggagctacacctaaagacggtcctagtgctggtattgctatttttaattctatagtttcttcaatgacatctaataaagtcaaaagagatgtagcaatgactggagaaattactcttagaggaagggttttaccaataggaggattaaaagaaaaggtttatgcagcatcaagagcaggaattaaaaaagttttgatccctgaagaaaattcgagtgagattaaggaatttgataaagaagtattaaaatcgataaaaataattccaatcagtgaagctaaggctattcttgaacatactcttctaaaaccaattaatcctcttaacataaccgaatcagacatacttgaagctcaaaaatcaagccaaatagaaaataatattaaggaaaatttaactcattaat

SEQ ID NO: 263159 - DNA, 779 bp, Unknown
  Bacterial polypeptide expressing nucleotide sequence isolated from the Sargasso Sea
gaagatggtaaagatgaaacaacaagtctaaaaaaatcaattttaaaggctaaaatgccaaaagaagttgaaaaaaaatgtatgtcagaacttaaaaaattgaaaaacatgagtccaatgtcagccgaagctacagtggtaagaaattatttagattggatgattgatttaccttggttcaaaaaagataaagttgatattgatttaaataaagcacttaaaattttagaagaggatcattttggtcttgaaaaagttaaagagagaataattgagtttcttgctgttcagaaaagaatggacaaaattaaaggcccaattttatgtttagtcggaccccctggtgttgggaaaacttctttaggtaagtctattgctaaagctacaaatagacagtttgtgagaatgtctttaggaggagtcagagatgaagccgaagttagaggacacagaagaacttatatcggttctttacctgggaaaataattcagatgatgaaaaaagcaggtactaaaaaccctttatttttactagatgaaatagataaagtcggaaatgactatcggggtgatccttcttctgcattattagaggcactagatccagagcaaaatacaacatttaatgatcattatttggaagtagattatgatttatcagatgtaatgtttgtaacaacagctaatacattaaatatactccctccgcttctagatagaatggaagttataagaatacctggttatacagaggatgaaaaaataaatattgcaaacaa

SEQ ID NO: 263160 - DNA, 733 bp, Unknown
  Bacterial polypeptide expressing nucleotide sequence isolated from the Sargasso Sea
acaaaacacgacttttaatgaccattatctagaagtagattacgatctttcagacgtaatgttcgttactactgcaaatacattaaatatactcccaccattactagatagaatggaagttattagactagctggttacacagaagatgaaaaaataaatattgccaataaatatttattaccaaaacaaattaaagataacggtgttaaagataaggaaatgaatttaagtgatgacattattaaagaagtaataagaggttacactaaagagtctggtgtaagaaacctagaaagagagatttcaaaaatagcacgaaaagtagttaagaaaattgttgctggagaagaaaaagaagtcaatgttaataataaaaatttatctgattttcttggagttccaaaatttaattttggtgaactagagaatgacaataaagttggcattgttgttggacttgcttggacagaatatggtggagagatccttaaaattgaaactgttacgatgcctggtaaaggaagaatgcaaattacaggtaagcttggtgatgtaatgcaagagtcagttaaagctgcaaaatcttttgttagatccaaatgcttagaatatggaattattccaccaatatttgaaaagaaagattttcatattcatgttcctgaaggtgctacacctaaagatggtccatcagctggagttggaatggttacatctatagtatcttcaatt

SEQ ID NO: 263161 - DNA, 751 bp, Unknown
  Bacterial polypeptide expressing nucleotide sequence isolated from the Sargasso Sea
tttgcagagagtgttcttaacgaggatcactatggccttgaaaaggttaaagagagaatactagaatatttggctgttcagcaaagaataaagaaaatgaaaggtccaattttatgtttagttggagctccaggcgtgggtaaaacttcattgggtaagtcgattgcaagagctacgggaagaaaatttgtaagaatgtcacttggaggagttagagatgaagctgagataagagggcacagaagaacttatataggatctttaccaggaaaggttctccaaatgatgaaaaaagctggttcatcaaatccattatttctattagacgaaattgataagttaggtgctgattacagaggagatccttcgtcagctttattggaagtgcttgatccagagcaaaataattcatttaacgatcactatctagaagtcgattatgacttgtccgatacaatgtttattacaactgctaatacattaagaatgcctcctgcacttttagacagaatggaaattattagaattgcaggctacacagaagatgaaaaagtagaaattgtaaaacaacatttagcaccacagatgttagagaagcatggcttaaagagtggtgagcttatactggatgatagtgcgataactggattaataagatattatactagggaagcaggagtaaggagtttagaaagagaacttgctaacctcgctcgtaaaaaagttaaaaaaattgtagcaggtgacattg

SEQ ID NO: 263162 - DNA, 874 bp, Unknown
  Bacterial polypeptide expressing nucleotide sequence isolated from the Sargasso Sea
aatgcctaaagaggcttcaaaaaaatgtttatcagaattaaagaaattaaaatcaatgagcccaatgtcagcagaagccacagttgttagaaattatcttgattggatggttgaattaccatgggttaacaaagataaaaaattagatagcataaatatccaagaagctaaaaaaattttagataaagatcattatggtttagataaagtgaaggagagaattcttgagtatttagctgttcaaaaaagagttggtaaaataaaaggagcaattttatgtttagtaggaccgcccggcgtaggaaaaacttctctaggaaagtctatagctagagccacaggtagaaaatttgttcgtatttccttaggaggaataagagatgaagctgagattagagggcacagaagaacttatataggatctttacctggaaaaattattcaacaaatgaaaaaagctggtgcaaaaaatccactttttttattagatgaaatcgacaaggttggttctgactataggggagatccttcctctgcacttttagaagcattagatcctgagcagaatgtaacttttaacgaccattatttagaagtggattatgatctatctgatgtaatgtttgtaactacagcaaatacacttaatattttacctcctttgttagatagattggaagtaattagaatacctggttataccgaagacgaaaaagttaatatcgcaaataattatctgataccgaaacaaattaaagacaatggccttaatgaaggtgaattaaatttaaataacgatgttcttcaagatgtaataagaagttatacaaaagaagctggagtacgtaatcttgaaagagaaatttctaaatta

SEQ ID NO: 263163 - DNA, 862 bp, Unknown
  Bacterial polypeptide expressing nucleotide sequence isolated from the Sargasso Sea
atgcctgaagatgcagagaaagtggcacttaaagaacttgataggttaactaaaattccaacacaatcaccagaatatactgttgcaagaacctacttggattggcttactgatcttccttggtcaagctcatctgaggattctatagatgttaaagaatctaaaaagattcttgatgaagatcattatggccttgaaaaggtaaaagaaagaattattgaatatcttgcagtgcgcgctttaaaaatgaaaaaagaacctaatagtgctattcgaggacccatactttgttttgcaggcccgcctggagttggtaaaacctctttaggtaaatcaattgcaaaatcaatgggcagggagttcgttagaatttcattagggggtgtgcgagatgaggctgaaatacgtggtcacagaagaacatatattggtgctctccctggacgaatcattcagtctttaaaaaaagctggcacaaataaccccgttttcatgctagatgaaattgataagcttggtatggacttcagaggagatccttcttctgccctccttgaggttttagatcctgaacaaaatggaacctttgctgatcactatcttgaagtcgactttgatttaagcaaagttatgtttattgcaacagcaaactatcaggatcctattccacctgccctaaaagatagaatggaagtaattgatttttcaggttatatcgaagatgaaaaattgcaaattgcaaaaaaacatttgattcctaagcagttaaaagagaacgctcttactacatcagatgttacgcttgatgatgcatcaattaaagaattgatgagttcctatactagagaagctggagttagaa

SEQ ID NO: 263164 - DNA, 955 bp, Unknown
  Bacterial polypeptide expressing nucleotide sequence isolated from the Sargasso Sea
cgaggtgacccagccagtgcaatgcttgaagttcttgatccagagcaaaatagtacatttacagatcactacttagaggtcgaatacgatctatccaatgtgatgttcattacgacagctaatagctacaatatgcccgctcctttgttagataggatggaaattattccacttgagggttacaccgaagatgaaaaaatagaaattgccaagagacacttgattgacaaggcaattaagaaccacggcttgcgaaagggcgaatttgaattaactgatagcgctttaacaggtattgtgcgttactacacccgagaagctggcgtgagaaatttagaaagagaaatttcgaaattatcaaggaagtcagttacaaaaattgttaaaaacgaagaaaaaactatttcaattacgattgataaccttgaagacttccttggtgtcaaaaaatttagatttggtctggccgagcaagacgaccaaatcggcgttgtaacaggtttggcatggacgtcggttggtggtgatctgctccatatagaggctctcaaattaccaggaaaaggtaggatgaaaactactgggaaacttggcgacgtaatgaaagagagtatcgatgcagcaaattcatatgttcgatctatcagtgcagaggttggtataaaacctcctcaatttgataaaactgatattcacgttcatgttccagaaggagctactccgaaagatggaccaagcgctggattggcaatggttacatctatagtgtctgttttgaccggcattcctgttaaaaaagatttagcaatgacaggtgaagtcactttgcgaggcaatgctcttccgataggtggtctgaaggagaaattacttgccgccctcaggggtggaattaaacagtacttattccagaagaaaatgagaaggaccttgcagatataccagaaaatgtaaa

SEQ ID NO: 263165 - DNA, 883 bp, Unknown
  Bacterial polypeptide expressing nucleotide sequence isolated from the Sargasso Sea
gagttttctaagtttaagctaatgtcgccgatgtcagcagaagcttcggtcgtaagatcttatcttgattgggtatcaaatttgccttggaagaaaaaaactaagattaaatcaaatataaaaaatgctttatctgttcttgataatgaccattatggattagaggaaatcaaagagagaattttagagtatctagcagttcaaaaaagagttaaaaaactcaaagcaccagtgctttgtttggttggtcctcctggagttggtaaaacatctttaggtcaatccattgcaaatgcaaccaatcgaaagtttataagaatgtccttgggtggggtaagagatgaggctgaaattcgcggtcaccgtaggacatatattggctccatgccaggaaaaattattcaaaagatttctaaagcggattcgaagaacccccttttcttgctagatgaaatagacaaaatgggtatggattttcgcggtgatcccgcttctgctctcttggaagttttagaccctgaacaaaattctacattttcagatcattatcttgaggttgattttgacttatcagaagttatgtttgtttgtacggcaaatagtttaaatatcccaggcccattactggatagaatggagatcattagaattccaggatatattgaagatgagaaattaaatattgccaagcagtacttgatacctaagcagctggaaaggaatggacttgactcaaatgaagtcaattttgatgataaagcaattttagatctcatcagatattacactcgggaagcgggtgttaggggtcttgaaagacaaatttcaaaagttctaagaaagtctgttaaagaaattgaactcagtagcaaaaaacttcaca

SEQ ID NO: 263166 - DNA, 928 bp, Unknown
  Bacterial polypeptide expressing nucleotide sequence isolated from the Sargasso Sea
ccagatggtactttaaaagttcttgtagaaggaaagaaaagggtaaaaataaattttttaccccaaacaaaaaaaataaactatttaatatgtaactatagcgttttaccgaataaaggtatatctaaagttgatagcactaaaattaatattcttcacacagtgtttgaagattatataaatcttaacaaaaaaacaaataatgaaatcattaatataatatcagatataaaagatccttctaaattgtgtgataccattatttcaaatctatcactcgcaattgatgagaaacaaaaatttttagaattaaatgacctatcgtctagaatcgataaactaatttcaaaactggaaattgaaattgacactcttgaaattgataaaaaagttaggaatagagttaaatctcaaatggaaaaaactcaaaaagaatattacttaaatgaacaattaaaggctatacagaaagaacttgggaatgatgatatcgaaaaggatgaatttcaagaaataaaagaaaaaattggcaaagttaaactttcaaaagacgctctggaaaaagttaattctgagtttaaaaaattcaaaaacatgagtccaatgagtgctgaatctggagttattagaagttatattgattgtatactaaatcttccatggaaaaaagtttctaaaattaattatgatttatccttagctaaacaaattcttgatgaagaccattatggtctcaaaaaagtgaaagaaagaatattagaatttttagtagttcaaaaaagatcgaagtctttaaaaggccccatattatgtttagtcggccccccaggagttggaaaaacatcattggggaaatctattgctaaagctacaaaaagaacttatctcagaatggcattaggaggagtacgagatgaggcagaagtta

SEQ ID NO: 263167 - DNA, 712 bp, Unknown
  Bacterial polypeptide expressing nucleotide sequence isolated from the Sargasso Sea
gacgaaacagtacatatcaggcctggaagtcttgataaatatctcggagttcaaaaattcaaatatggtattgctgagaaagataatcaaataggtcaagtgacaggtttggcttggactcaggttggaggagagttgctaacaatcgaatcaacagccataccaggaaaaggcaagctaataaatacagggcagcttggcgatgtgatgaaagagtcaattcaagcagctactactgttgtcagaagtcgctctaaagctcttgggataaaacaggattttcatcagaaaatggatatgcatattcacgtcccagagggcgccacgcctaaggatgggcccagtgcaggtattggaatgtgtacggctctgatctcctctttgacagatattcctgttaaagcaaatgtggctatgaccggtgaaattactctgagaggggaagtgcttccaattggaggattaaaagaaaaactacttgctgctcacagaggcggtatagaagtagttattattcctgaagagaacaagaaagatcttactgaaataccaaagaatattaaggataagcttgaaattattccagttcagtggatcgatcaagtattagagattgctctagaaaggatgccagaaatcaagcttgaaggctcaaaatcaagccaatcaagcaagtcaaagtcttcctcagagaagaatctacctcattaat

SEQ ID NO: 263168 - DNA, 907 bp, Unknown
  Bacterial polypeptide expressing nucleotide sequence isolated from the Sargasso Sea
gccatacagaaagaactgggtgatggtgaagatggttccaacgaatattctgaaatagagaaaaaaattaatgaagtaaaattatcaaaggaggcaaaagaaaaagctttaaatgaatttaaaaaattaaaatctatgagcccaatgtctgcagaagcatcagttattcgcaattacctagaatggatattagatataccttgggaaaaattctcaaaagaagtcatagacataaaaggttctgaaaaaatattaaatgacgaccactatggtctcgaaaaagtaaaagagagaatacttgaatttttagcagtcaaaaaaagatcaaagaaagcatctggtacaatactatgttttgtaggaccccctggtgtgggtaaaacttcattaggtaaatctatagctagagctactggcagagaatttgcaaagatttctcttggtggaattagggatgaggctgaaattagaggccatagaagaacttatattggctcaatgcctggtcgatttattcaggctatgaagaaaaccaaaacatctaatcctattattttattagatgaaattgacaaagtgggtagtgactggagaggagatccatcctctgcattattagaagttttagatcctgagcaaaataatcaatttaatgatcattatcttgaggttgattatgacttatcaaatgtaatgtttatatgtacaggtaatacttacaacatacctggtcctcttcttgacagattagaggtgattgaagtatctggttatacagaaaaagaaaaagttgaaattgcaaaaaaatatttaattccaagaaaaatgaataaaaatattttaaaaaataatgaatataagcttgataaaagctcaattactgaaatagtaagacactacaccagag

SEQ ID NO: 263169 - DNA, 902 bp, Unknown
  Bacterial polypeptide expressing nucleotide sequence isolated from the Sargasso Sea
catagaagaacatatattgggatcaatgccaggcaaaatagttcaagcacttaaaaaggcaaaaacaactaatccgctgattttactagatgaaattgacaaaatgggtcaagattttcgtggagatccagctagcgcaatgcttgaagttctcgatccagagcaaaatagtactttcacagatcactatttagaggttgaatacgatctatctaatgtgatgtttattacaacggctaatagctacaacatgccagctcccttgctagacagaatggaaattatacctttatctggctacacagaagatgaaaaaatagaaattgcaaagcgtcacttaatcgacaaagccattaaaaaccatggcttgcgaaagggggagtttgaattaaccgatagcgctttaaccggtattgttcggtactacacccgagaagctggtgtaagaaatttagaacgcgaaatctcaaaattatcccgaaagtcagttacaaaaattgtcaaaaatgagcaaaagcacattaaggttacaatggaaaacctagaagactttcttggtgtcaaaaaatttaaatttggcctagccgagcaagacgaccaaataggtgtcgtaacaggattggcgtggacttcggttggtggtgatttgcttcatatagaagctcttaagttacctggaaaaggcagaatgaaaactactggaaaacttggtgatgttatgaaagaaagtattgatgcggcaaattcatatgttcggtctataagtgcagaagttggtatcaaaccgcccaagtttgataaaactgatattcacgttcatgttccagaaggagcgacacccaaggacggacctagtgctgggctggcaatggttacttctattgtttctgtattgaccggta

SEQ ID NO: 263170 - DNA, 862 bp, Unknown
  Bacterial polypeptide expressing nucleotide sequence isolated from the Sargasso Sea
aataaaaaaatctcatcagaaacaataacaaatattaaagagttaaaagatccggcaaaaatttcagataatattgcttcccatttaaattctactatttcagaaaaacagcaaatttttgaaacagtagatgttaaaaaaagattaaatggtgttattaaaataatggaaaatgaaacaagtattataggagttgaaaaaagaattagaggaagagttaaaactcaaatggaaaaaactcaaagagaatattatttaaatgaacaactaaaagctatccaaaaagaattaggtgaaattgaagatggtaaagatgaaacttcaaatttaaataaagctatacaaaaagcaaaaatgccaaaagaagtgcagaaaaaatgtatgtctgaacttaaaaaattgaaaaatatgagtccgatgtcagcggaagctacagtagttagaaattaccttgattggatgattgatataccatggtacaaaaaagacaaagtagatatagatttgaataaagctttaaaaactttggatgaagatcattatggattagagaaagtaaaagaaagaattattgaattcttagctgtacaaaaaagaatggaaaaaataaaaggtccaattttatgtttgataggtccaccaggagttggaaaaacatcacttggtaaatctatcgccaaagcaacaaatagacaatttgtaagaatgtcattaggtggtgttagagatgaagcggaaattagaggtcacagaagaacttacatcggatccttaccaggaaaaattattcaaatgatgaaaaaagctggaacaaaaaatcctttaattttgcttgatgaggtagataaagtatggaaatgat

SEQ ID NO: 263171 - DNA, 841 bp, Unknown
  Bacterial polypeptide expressing nucleotide sequence isolated from the Sargasso Sea
caacttttaaaactaccagatggaacagtaaaagttttggtagaaggcataaagagagtaagaatagttgactttaaggatgatgaaaaatttataacttgcacatatgagcatcagaaagatattgtaaataaagatgaagatcttttgcctctagctttaacagctgttagaagattagagaaacttacatcagtaaataaaaaaatttcatctgaaacaatcagcaatattaaacaactaaaagatccttcaaagatagtggataatattgtatcaaatttaaacgcatctatatctgaaaagcaacaaatatttgaaactcttgatgttaaaaagagattaaatgctgcaataaagatgatggaaagtgaaactagtattattggggttgaaaaaagaattagagggagagttaaaactcagatggaaaaaacccaaagagaatattatttaaacgaacaactaaaagctatccaaaaagaacttggagaaattgaagatggaaaagacgaaacaactaatctaaaaaaatcaatacaaaaagctaaaatgccgaaagaggttgaaaagaaatgcatgtcagagttaaaaaaattaaagaacatgagtcctatgtccgctgaagcaacagttgttagaaattatttagattggatgatagatctaccgtggtttaaaaaagataatgttgacatagatttaaataaaggtcttaaaattttagatgaggatcattttggattagaaaaagtaaaagagagaattatagaatttctcgctgttcaaaaaagaatggaaaaaataaaaggaccaattttatgtttggttggaccccctg

SEQ ID NO: 263172 - DNA, 870 bp, Unknown
  Bacterial polypeptide expressing nucleotide sequence isolated from the Sargasso Sea
cttgataaagaccattttcggtttagaaaaagttaaagagagaataattgagtttttagctgtacaaaaaagaatggaaaaaattaagggtccaattttatgtttagtgggacctcctggtgttggaaaaacttcactgggtaaatcaatcgcaaaagctacaaatagagagtttgttagaatgtctgttggaggtatgagagatgaagcagaaataagaggccatagacgaacttatattggatctttgcctggtaaaattattcaaatgatgaaaaaagctggaacaaaaaatccattaattcttttagatgaaatagataagattggaaatgactatagaggagacccttcatcagcacttttagaagctttggatccagagcaaaatacaacattcaatgatcattatttagaggtagattatgatttatctgatgtgatgtttgttacaactgcaaatacattaaatattttacctcctcttttagatagaatggaagtcattagattagctggttatacagaagatgaaaaaataagtatagcaaacaagtatttgctacctaaacaaattaaagacaatggagtaaaagagaaagagatgaaattagatgacgaaataatcaaagaagttattagaggctatacaaaagagtccggtgtacgtaatttagagagggaaatttccaaacttgcgagaaaagtagttaaaaaaattgtagctggtgaagaaaaagaggttgaaatcaataaaaaaaatttatcagattttctaggcgttcccaaatttaaatttggagaattagaaacagaaaatagagttggtatagtcacaggtctcgcttggaccgagtacggaggagaaat

SEQ ID NO: 263173 - DNA, 673 bp, Unknown
  Bacterial polypeptide expressing nucleotide sequence isolated from the Sargasso Sea
aaagatttactaggcgttcaaaaatttaattatggagagattgaagaggagaatagagttggcgttgttactggtttagcttggacagaggttggaggggaaattttaaaaatagagtctgcagttatgcctggtaaaggtaaaatgcaaattacaggtaaattgggtgatgtcatgcaagagtcagtcaaagctgcaaaatcatatataagatcaaaaagcttagactatggaataattccaccaatttttgataaaaaagattttcatatacatgtaccagaaggcgcaactcctaaagatggaccttctgcaggtataggaatggtaacttcaataatctcagcaattacagaaataccagttaataaaaatgtagcaatgactggtgaaataacattaagaggtctagtgttaccaatcggtggtttaaaagaaaaacttttagctgcacatagagctggcataaaaaaagttttaataccaacggaaaacaaaaaagatttagttgaagtgcctaaaacaattcttgactcaatagaagtaattccagttaaaaatgtagatgaagtattgaaagttgccttaattaagcctttaaaaagagttgagtgggtagaggtagatcaaatttctagtaaagaaaaaaaagaagagttaagtacgcactaat

SEQ ID NO: 263174 - DNA, 706 bp, Unknown
  Bacterial polypeptide expressing nucleotide sequence isolated from the Sargasso Sea
atgccactagcattaacagctgtaagaagacttgaaaaattaacaacagtaaacaaaaaaatctcaaatgaaacaatccaaaatattaagcaattaaaagacccatctaaaattgcagataacataggctcacatttaaactccaccatatcagagaaacaacaaatatttgaaacatttgatgtaaaaaaaagacttaatgctgttattaaaataatggaaaacgaaacaagtataattggtgttgaaaaaagaattagaggacgtgttaaaacacaaatggaaaagacccaaagagaatattacttaaatgaacaattaaaagctatccaaaaagaattaggagagattgaagatggaaaagacgaaacatcaaatctcaataaagctatattgaaagccaaaatgcctaaagatgttcaaaaaaaatgtatgagcgaacttaaaaaattgaaaaatatgagtccaatgtctgcagaagcaactgttgtaagaaactatctagattggatgattgatatcccttggtataaaaaagataaagtcgatattgatttaaataaagctgctaaaactcttgatgaagatcattttggtttagataaagtcaaagaaagaattatagaatttcttgcagttcaaaaaagaatggaaaaaataaaaggtccaattttatgcctagttgggcctccaggtgttggaaaaa

SEQ ID NO: 263175 - DNA, 906 bp, Unknown
  Bacterial polypeptide expressing nucleotide sequence isolated from the Sargasso Sea
aaaggaaacaaaaaaatagttttggttacccagaaaaattctgaagtagatgatcctaaaagaaatgatatttttgcttatggttgtgaaagtaatatattgcaattattaaagcttccggatggaaccgttaaagttttagttgaaggaattaaaagagtaaaaattatcgacattaaagatgatgaaaaatttatttcatgcacatttgaatatcaaaaagaaccatttataaaagaagaagatcttttacctttagcattaacagcggtaagaagattggaaaaactaacttctataaataaaaagatttctacagatacaataaataatattaaacaactcaaagattcttctaaaatagctgacaatatagcttctcacttgaactgcacaatctcagagaaacaacaaatatttgaaactctagatacaagaaaaagattaaacagcattattaaaataatggaaaatgaaacaagtattatcggagttgaaaaacgtatacgtggaagagttaaaacacaaatggaaaaaactcaaagagaatattatttaaatgaacagttaaaagccattcaaaaggaacttggagagatcgaagatggaaaagatgaaacaactaatttaaaaaaatcaattcaaaaagctaaaatgccaaaagaagtagaaaagaaatgtttagcagaattaaaaaaattaaaaaatatgagtccaatgtctgccgaagccacagttgtaagaaattatcttgattggatgatcgacttaccttggtataaaaaagataaagttgatattaatttaaacaaagctctaaaaacacttgatgatgatcattatggattagaaaaagttaaagagagaataatcgaatttttagcagttcaaaaagaatggaaaaat

SEQ ID NO: 263176 - DNA, 862 bp, Unknown
  Bacterial polypeptide expressing nucleotide sequence isolated from the Sargasso Sea
gaagtagaattcgatctttttgatgttttatttttgtgtacagctaatgtaaaacaaaacatacctccagcattaaaggatcggatggaagtcattaatttatcaggatatactgaattagaaaaagaacatatagctctaaaacatctgataccaaagcaaatagatgaaaacgggttaaatttgaaaaagatccagtttcaaaaaacttcaataacaaaaatggttaggagttataccagagaagctggagttagaaatttagaaagagaaattgcaaaaacgtgtcgtaaagttgcaacacatttgataaagactaataattcacaaaaaatcattgtcacgccaaaaagattacaagactttctaggagtacctagatataaacatactattgctgaagaacagaatgaaataggttcaacctgtggattagcttggacagaatcaggtggagacatgttagtaactgaggtcaatattatgaaaggtactggtaagttacagctgacaggcaaattgggagatgttatgaaagaatcagcgcaagcagccgttagctatgtaagaaccaacgctaaccaattgggcattttttcttcagtttttgagaaaactgatatacatattcatgttccatctggagcagtccctaaggacggtccttctgctggaataactataacaaattctttagttagtgctttcaattccattcctgtaaaaaaagatgtagcaatgaccggagaaattactttacgtggtaaagttttaccgattggtggacttaaagaaaaactacttgccgccaaaagaggtttcattagaacagttgttataccttatagtaacaagaaaaata

SEQ ID NO: 263177 - DNA, 919 bp, Unknown
  Bacterial polypeptide expressing nucleotide sequence isolated from the Sargasso Sea
ttagaagaaaaaatagaaaatgctaaaatgactgaagaagcatcaaaagttgcaagaaaagaaattgatcgattaagtaaaattcctccacaatctccagaatattcagtttcacgaacttatcttgattggttattggatttaccttggagtaaaacaaccaaagatcgtgtaaacattaaaaaagccaaatctatattagataatgaccattatggattagatgatgtcaaagaaagaattattgaatatcttgccgtaagaaagctaaaagaaaagaaaacaaaggatggcaaagttaaaggtccaatcttgtgttttgttggtccccctggtgttggtaaaacctctttaggaaaatctatagcaaaatccatgggaagagaatttgttagaatttctttaggtggagttagagatgaagcggaaattagaggacatagacgaacttatattggtgctcttcctggaaggataatacaaagtctaaaaaaagcaggaacaaataaccctttatttatgttggatgaaatcgataaagttggatcagattttaggggcgacccatcctctgcattattagaagttttagatccagagcaaaatttttcatttagcgatcattatttagaagtaccttttgatttaagtaatgttatgttcattgccacagcaaatttaaaagatcctattgtccctgctttaagagacagaatggaaattttagatttttctggatatattgaagatgaaaaaattcaaattgccaagaaatatttgattcctaaacaaattgaagaaaacgcattatctgctaaagatattaagttttctgaaacaggaattaaggaattgattagatcatatactagagaagctggagtaagaaaccttgaaagagaaatttctaatgtttaag

SEQ ID NO: 263178 - DNA, 946 bp, Unknown
  Bacterial polypeptide expressing nucleotide sequence isolated from the Sargasso Sea
aatgaaacaataaatactattaaacaactaaaagatccttctcaaattgcagataatatagcatctcatatatcagcttcaatttctgaaaaacaacaaatctttgaaaccaatgatgtgaagaaaaggttgaataccataatcaagattatggagaacgaaactagcataataggagttgagaagagaataagaggaagagtaaaaactcaaatggaaaaaactcaacgtgagtattatttaaatgagcaactaaaagctattcaaaaagaacttggtgaaattgaagaaggtaaagatgagacaacaagtataaataaagcaataactaaggctaagatgcctagagatgtagaaaaaaaatgtcttcaagaattaaaaaaactgaaaaacatgagcccaatgtcagcagaggctacagtagtaagaaattatctagattggatgactgagcttccatggcataaaaaaagtgaagtagatattgatttagctaaagcacaaaatacattagacaaagatcattttggactagaaaaaattaaagaaagaatagtagaatttcttgcagttcaaaaaagaatggaaaaaattaaaggaccaattttgtgtttagttggtccaccaggtgtaggtaaaacttcattaggtaaatcgattgcaaaagcaaccaatagagaatttgtaagaatgtcagttggaggtatgagagatgaggccgaaatcagaggtcatagaagaacttatataggttcactgcctggaaaaattatccagatgatgaaaaaagctggaactaaaaaccctttaatattactagatgagatcgataaaataggaaatgattataggggagacccttcttctgcattattggaggctttagatccagagcaaaacactacttttaatgatcattatttagaagtagattacgatctatcag

SEQ ID NO: 263179 - DNA, 840 bp, Unknown
  Bacterial polypeptide expressing nucleotide sequence isolated from the Sargasso Sea
gctttgcaactatcagaaaagcaaaatctacttgagttgtctagtttgaaaaatagagtcgagcacttaatggctttgattgaatcggagatagatttgtttcaagtcgagaaaagaatccgcgggcgagttaaaaagcaaatggagaaaagtcagcgagagtactaccttaatgagcaaatgaaggccattcaaaaggaaatgggagacttagaagatgttccaaatgaggcggatgagcttcggcagaaaattgacaatgctgggatgcctaaggatgctaaagataaggcgctggcggagttacataaattaaagatgatgtctcctatgtcttcagaggcctctgttgtgaggacttatttggactggatggttagtgttccttggaaaaagcgctctaaggtcaggcttgatttacgtaaagccgaggaaatacttgagtcagatcattacgggctggaagaagttaaagaaagaattctcgagtatttggcagttcataaacgggttaaaaagttaaagggtccaatactatgccttgtcggacccccgggggtaggaaaaacctcgttgggcgaatcaattgctagggcgacgaataggaaatttatccgaatggctttgggcggggttagagatgaagctgaaattcggggtcataggagaacatatatagggtctcttccgggtaaattattgcaaaagctatcgaaagttggggtgaaaaatccattatttctcttagacgaaattgataaaatgagtatggataataggggagatcctgcatctgcgttacttgaagttctcgatccagaacaaaatcatgtttcaacg

SEQ ID NO: 263180 - DNA, 475 bp, Unknown
  Bacterial polypeptide expressing nucleotide sequence isolated from the Sargasso Sea
gaaaaaattaaaggaccaattttatgtttagttggtcccccaggagttggaaaaacatcacttggaaaatctatagctaaggctactaatagacagtttataagaatgtcattaggaggtgtaagagatgaagctgaaataagaggtcatagaagaacatacattggatctttaccaggaaaaataattcaaatgatgaagaaagctggtacaaaaaaccctttatttttattagatgaggtagataaaatcggaaatgactatagaggagatccatcatcagccttgctagaggcattagatcctgaacagaatacagcattcaatgatcactatttagaagttgattatgatttgtctgatgtaatgtttgtaacaacagcaaatactctaaatattttaccaccacttcttgatagaatggaagtaataagaattcctggatatacagaagatgagaagataaatatgcaaa

SEQ ID NO: 263181 - DNA, 590 bp, Unknown
  Bacterial polypeptide expressing nucleotide sequence isolated from the Sargasso Sea
tattattggtgttgaaaaaagaattaggggtagagttaaaactcaaatggaaaaaactcagagagaatattatttaaatgaacagttaaaagcgatccaaaaagaattaggagaaatcgaagatggaaaagatgaaagcgcaagcttaaataaagcaattttaaaagctaaaatgccaaaagatgtagagaaaaaatgtttacaagaattaaaaaaattaaaaaacatgagtccaatgtctgcagaggctactgtagtaagaaattatctagactggatggtagatcttccttggcataaaaaaagtgaagtcgacattgatttatcaaaagcatcaagcattcttgataaagatcatttcggactagagaaagttaaggagaggataatagaatttttagcagttcaaaaaagaatggaaaaaattaaaggtccaattttatgtttagttggcccaccaggagtaggaaaaacttcattgggtaaatcaatagccaaagctactaatagagaatttgtaagaatgtcagtaggtggtatgagagatgaagcagaaattagaggtcacagaagaacttatattggatcat

SEQ ID NO: 263182 - DNA, 910 bp, Unknown
  Bacterial polypeptide expressing nucleotide sequence isolated from the Sargasso Sea
aagagaaaaaattattctagtaactcaaaaaaattcagaagttgacgatccatcaaaaaatgacgtattttcttatgcatgtgaaagtaacatccttcagcttttaaaattaccagatggcacagttaaagtgctcgttgagggaatcaatcgggtaaagataactgattatagcgacaaaaaagatttcataacttgctcttatgaaaaagtaagtgatttaattaacaaggatgaagatttgataccaactgctatgtctgctgtaaaaaaattagaaaagttaacttcaattaataaaaagatttcaagtgaaacaataaataatattaaaattttaaaagatccatctaagatagcagataatattgcatcacatttaaatgcatccatttctgaaaaacaacaaatttttgaaactcaagatgtcaagaagagattaaatcttattataaagataatggaaaatgaaacaagtattattggtgtggaaaaaagaattaggggtcgagtaaagacacaaatggaaaaaactcaacgagagtactatttgaatgagcaattgaaggcgatacagaaagagttaggtgaaattgaagatggtaaagacgaaacatcgaatttaaataaagcaattcttaaagctaaaatgccaaaagatgttgaaaaaaaatgtctatctgaattgaaaaaattaaagaatatgagtcccatgtctgcggaagccacagttgtaagaaattatttagattggatgatagatttgccttggtttaaaaaagataaaactgaaatagatttaaataaagctcaagaagttttagatgaagatcattttggtctagaaaaagtaaaagaaagaataattgaattcttagctgtccaaaaaagaatgaataaattaaaaggc

SEQ ID NO: 263183 - DNA, 874 bp, Unknown
  Bacterial polypeptide expressing nucleotide sequence isolated from the Sargasso Sea
tttgcctcctttactagatagattagaggttattcgaattcccggatatacagaagatgagaaaattaatattgcaaaaaattatctaatacctaaacaaattaaagataatggacttgaagatggagaatttaatttaagcactgaagttcttaaggatgtaattagaagctatacaaaagaagcgggtgttagaaatttagaaagagaaatttcaaaattaggaagaaaaaccgtaaagaaaattttaaccgatgaggataaaaataataaaatttcaacagaaaatttaccagattatctaggtgtaaagaaatttaaatatggagagatggaatcagataataaagttggagtggttactggtttagcatggactgaatttggaggtgaaatcttaaaaattgaatctgctatcatgccaggaaaaggaaaaatgcaaatcacaggtaagctaggtgatgtaatgcaggaatcagttaaagctgctaaatcatatgtaagatcaaaatctttagaatttggtattataccaccaatctttgagaaaaaagattttcatattcatgttcctgaaggtgccacaccaaaagacggaccctcagctggtatagctatggttacttcaataatttcctctataaccggtatagcagttgatagaaatattgctatgactggtgaagttactttaaggggacatgtattacctataggaggtttaaaagaaaaacttttggcagctcatagagctggaatcgcaaaagttgtaatacccgatgataataaaaaagatttagcagagatacctaaaaatatattacaaaatttagaaataaaaacggtaaaatccgtagatgaagtattgaaaatt

SEQ ID NO: 263184 - DNA, 1636 bp, Unknown
  Bacterial polypeptide expressing nucleotide sequence isolated from the Sargasso Sea
atctgttggcttgtcttctgaagctaaagaaaaagtaatgacggaatttaataaatttaaaatgatgtcaccaatgtcagctgaggccacagtggtaaggaactatattgatacggttataggtttaccttggactaaaaaaacagaagtcaacagcgatataggtcatgctggacagatactagatgatgatcatcatggtcttgaaaaagttaaagaaagaatactagaatatcttgctgtaacaaaaagagtagataagctcagaggcccaattctctgtcttgttggccctcctggagtcggcaaaacatcactaggtcaatcaattgccaaagcaacaaatagaaaatttattaaaatgtcccttggtggcgttagagatgaagcagaaatacgaggtcatcgtagaacatatattggttctatgccaggcaaagtaatacaaaatcttgctaaagctaaacaaaaaaaccctttatttcttttagatgaaattgacaaaatggcaatggactttagaggtgatccatcctcggcactgcttgaggtactagatccagaacagaattttgccttcaatgaccattatctggaagttgatttcgatctgtctgatgttatgttcattgcgacggctaattctatggattccatccctgcaccacttcttgatagaatggagataataagattgccggggtatactgaagatgaaaaaactgatatagcaaaaaaatacttaatttcaaaacaatatgaacaaaatggcctcaagaaaaaagagcttttgatcaatactgcctcaatcagagatatcattcgttattatactagagaagctggtgtaagaggcttagacagagctatttccaaagtctgcagaaaagttgttaaatcaatattaatgaaaaataattcttcttcaccaactaaaattacaccctcaaacctcagtgattaccttggtgtaaaaccatatagtcatggcgtcatagataaaaaagatatgataggtcaggttaatggactagcatggacttctgttgggggagaactgcttcgcattgagtgtgcgttaatgtctggtaaaggaaaagttgaacagaccgggagtcttggtgatgttatgcttgaatcaattaaagctgctataactgtcgttagaactcgtgcggtctctctaggaattgatactgaatttcaccaaaataaagatatacatatccatgtaccagaaggtgcaacacctaaagatggccctagcgcaggtattagtatggctttggcagtggcatcatcattatcaaacattccagtcaggtcagatgtggcaatgactggtgaaataaccctgagaggtgaagttcttgagataggcggtctgaaggagaaattactagcagcgctgcgtggaggtattaaagaggtaattattccaaaagataacgaaaaagatcttgttgaaataccagataatgttaaaaagagtttaaaaatacaccccgttaaatttgtagatgaagtttttgcaattgctctaaaaaataagccagtaaaaagcaaacctgtgaaaaaaacagcttctgaagacaataaaaagaataaaacaagtcctaaaatattacctcattag

SEQ ID NO: 263185 - DNA, 1231 bp, Unknown
  Bacterial polypeptide expressing nucleotide sequence isolated from the Sargasso Sea
ccttctacctttaagagatatagtcattttcccatcgactgttgttcctctttttgttggaagaaaaaaatctataaaagcactagaggaagttatgaagtcagataaatcaatagtattggttgcacaaaaaaattctgaagtagatgacccaaaagaacaagacatatattcttatgggtgtttaagtaaaattctacaattacttaaacttccagacggaacagtaaaggtattagttgaaggtcttgaaagagtaaaaatcaaatctattaaaagcgaagaaaaaaaatatttaaattgtgaaattgaaataatctcaacagtaggtgatacagatcaaagcaaagctttggcttcaagtttaattaaaaagtttgaaaaattatctaatttaagcaaaaaagaccttggcgactttacaaaaaaccttaaatcattatccaaaacatcagatatatctgacaatatttcatcaaatctaaacgtgtcaattttcgaaaaacaaaagcttcttgaaatttttgatattacaaaaagattagagagaatttatgaaattatagaaaaagaaactagcgtaataagtatggagaaaaaaataagaggaagagtaaaaaaccaaatggaaaaaacccagagagaatattatttaaatgagcagttaaaagctatacaaaaagaattaggggaaattgaagaaggtaaagacgaggtttcaaatttgagcagcgcaatacttaaagccaaaatgactaaagaggcccaggcaaagtgtttgtcggaattaaagaaattgaagtctatgagcccgatgtctgcagaagccactgttgtaagaaattatctcgattggatgattgatttaccttggagcaataaaagtaaaattataaaagatttaaaatctgctcaacaaattctagatgaagatcactatggattagataaggttaaagagagaattatcgagtttttagctgttcagaaaagaatagaaaaattaaaaggacctatactttgtttagtaggacctcctggtgtcggtaaaacttcattaggaaaatctatagcaagagctacaggaagaaaatttgtaagaatatctttaggcggagttagagatgaagcagaaattagaggtcacagaagaacctatataggctctcttcctggaaaaattattcaaatgatgaaaaaagcaggaactaaaaatcctttatttttgtta

SEQ ID NO: 263186 - DNA, 2065 bp, Unknown
  Bacterial polypeptide expressing nucleotide sequence isolated from the Sargasso Sea
atgaccttagagcgtgaagcgcatatcgaactccccgtgctgccactgagagatgtggtggtctatccccatatggtaattccgttgttcgttggccgagaaaaatcgattcgttgtctcgaaacggcaatggcccaggataagcaaattattttagttgctcagcgtgatgctgagttagatgagccgaccaaggacgatatctttgacgttggtaccgtggcatctattctgcaactgctgaaactaccagacggtacagtcaaggtgctggtcgaaggtggtcgccgcgcccgtattacgcgttatacccaagaagcagatttctttgtggctaaggctgaatatctcgaatctgagcctttagaagacaaagaagaggaagtcttggttcgtagcgcgattggccaatttgaaggctatatcaagctcaacaagaagatcccgccagaggttttaacctcgctttcaggtatcgatgaagcggcacgccttgcagacacgatggcggctcacatgccgcttaagcttgaggacaaacaatctgtccttgagatgaccaatattggcgaacgtcttgaatatttaatggcgatgatggagtcggaaattgacctgttacaggttgaaaaacgcatccgcacccgcgttaaaaagcagatggaaaagagccaacgtgagtactatctgaacgagcaaatgaaagccatccaaaaagaattgggtgacttagacgaaggccatgacgaatttgaagtcttaaatcgtaagattgaagaagccaatatgccaagcgatgccaaagaaaaggcggtcgctgaactgaacaaattacgtatgatgtcgccgatgtctgccgaagcgaccgtggttcgtagctatgtggattggatgacgtctgtgccttggagtcaacgctctaaaatcaaacgtgatttagcgaaagcccaagaggtattggatactgaccactatggtttggaaaaggtcaaagaccgtattctggaatacttggcggtgcagagccgtgtgcgtcaactgaaagggccaatcctgtgtttagttggaccaccaggtgtgggtaaaacctcactcggtcaatcgattgccaaggcgacgggtcgtaagtatgtgcgtgttgccttaggcggcgtgcgtgatgaagcggaaattcgcggacatcgccgcacctacattggctctatgccaggtaaaatcatccaaaaaatggccaaagtgggcgtgaaaaaccccttattcctgctggatgaaatcgacaaaatgagttcggacatgcgtggcgacccagcatcagcactattagaggtgctcgatcctgaacaaaacgcgacttttaacgaccattacctcgaagtcgactacgacttatccgatgtaatgttcgtggcgacctcgaattcgatgaatattccggggccacttttagatcgtatggaagtgatccgtctgtcgggttataccgaagatgaaaaactcaatatcgctaagcagcatttattgacgaaacaaatcgagcgtaacggccttaaagcgaatgaaattcatatcgaagacagtgcgatagtcggcatcatccgctactacacccgtgaagcgggtgtgcgggcgctagaacgtgagttgtctaagatttgccgtaaggtcgtgaaaatgatcctgctggataaatccatcaagtcagttacagtcaccgcggataatctcaagtctttcctcggtgtgcagcgttttgactatggcaaggcggaatcgaacaaccaaatcggtcaagtcacagggttggcttggactgaagtgggtggtgatttgctcaccattgaagcgacttcagtgcccggcaaaggcaagttgacttacacaggctcacttggcgatgtgatgcaagagtcgattcaagcggcgatgacagttgttcgcgcccgtgcggaacaattgggtatcaatggcgacttttatgagaagcgtgatatccatgtgcacgtaccagaaggagcaacgccgaaggatggtccatccgcaggtgctgcaatgtgtactgcgcttg

SEQ ID NO: 263187 - DNA, 868 bp, Unknown
  Bacterial polypeptide expressing nucleotide sequence isolated from the Sargasso Sea
cttaataaaaatgaagctaaatttaatacaacaataataaatcaaataattagaaattatactagagaagcaggtgttagaaatcttgaaaaagaaatttcaaaaacttgtagaaaaatagttaaaattatagagacctcatcaaagcaaatggtgaaactagataacaaaaaaattaataattttttaggcgttcctaaatttagatttaatgaaattgaaaataaaaatttaataggtattacaaatggcttagcttggactgaggtaggtggagaaatattatcaatagaggttttattatcattgggtaagggtaaattaacaattacaggaaaattaggtgaagtaatgaaggagtctattcaggcagctacttcatatgttagatcacaatgtattaacttaggaatacaccctaatgattttgataaatatgatatacatgttcatgttcctgaaggagctactccaaaagatggacctagtgcaggcattgctatctttaactcactggtttcttcacttacatctaataaagtaagaaaagatgttgctatgacaggagaaataactttgagaggcagagttttacctattggaggtctaaaagaaaaaatttatgctgctgtaagggctggtattaaaacagttttaatacctaatgagaataaaggagagatagttgaatttgataaagatttactaaaatctataaaaattattcctgtttttgaggcaacatcaatattaaaacatacgcttctaaaaccagtagtgccattaaatttgaccgaatcagaagtattggaaagtcaaaaaaggcaattttcccaagatgattttaaagaaaatataactcattaat

SEQ ID NO: 263188 - DNA, 714 bp, Unknown
  Bacterial polypeptide expressing nucleotide sequence isolated from the Sargasso Sea
tgaaaaaagtaaataaccctattaatgaaaaagatcttaaagacttacttggtgttcagaaattcaattatggagaaatcgaggaagaaaatagagttggagtagttacaggtttagcctggacagaggttggaggcgagattttaaaaattgaatctgctgttatgccaggtaaaggtaaaatgcaaattaccggaaaattgggagatgtgatgcaagagtccgttaaagctgcaaaatcttacattagatcgaaaagtttagattacggaattattcctcctatatttgacaaaaaagattttcatattcacgtaccggagggagcaactccaaaagacggcccttctgcaggaatcggtatggtaacttcaataatatcagctataactgaaatcccagtagataaaaatgttgcaatgactggagaaataactttaagaggtttagtgcttccaatcggaggtttgaaggaaaagttattagctgctcacagagctggaataaaaaaagttttaatcccaagtgaaaacaaaaaagatttaattgaggtgccaaaaacagttttagagtctgttgaaataataactgttaaaagtgtagatgaagtattaaaagtagctcttacaaaacctttgaaaagggttgaatgggtggatgtagaccaattatcaaaaaaagaaaaattgaaaaaagaattaagcactcattaaa

SEQ ID NO: 263189 - DNA, 1501 bp, Unknown
  Bacterial polypeptide expressing nucleotide sequence isolated from the Sargasso Sea
aggattagaaatcgtgttaaaaggcaaatggaaaaaacacaaagagattattacctaaatgagcaaatgaaagctatacaaaaggaacttggtgacagtgaagacggtaaaagtgaacttgatgaaattaatgatttaataaaaaagtcaaaactaccaaaacatgtattagaaaaaacacaatcggaaattaaaaagttaaaaaacatgtctccgatgtccgccgaggctactgttataagaaattatttagactggattttagctgttccttggtcgaaaaaaagtaaactaaagaataacttatccgatgctcaaaacatcttagacaatgatcattttggcattgaaaaagtaaaggaaagaataattgaatacctcgctgttcagaagcgaactggaaaaattaaaggtccattactttgtttagtaggacctcctggtgttggaaaaacatcattgggtaaatctatcgcaaatgctacgggtagaaaatttgttagaatgtccttaggtggagtaagagacgaggctgagataagaggtcatagaaggacttatattggatctatgcctggtagaataattcaagctctcaaaaaagctggtactaacaaccctttaatattattggacgaagttgataagttaggtgctgattggaggggagatcctagttctgcattacttgaggttctcgaccctgagcaaaataacacatttcaagatcactatttagaagttgactgtgatttatcaaatgtcatgtttgtgacaactgctaattctttaaatatgcccaaaccattattagacagaatggaaattattagattgtctggttacactgagttggaaaaacttgaaattgctaaacatcatttacttccaaaagttattaaagaacatggccttaataaaagtgaattttcactatcagataaagaattattagaagttattcgttcttacactcgagaagctggggtaagaggcttggagagagaaatttctaaattatcaaggaaattaattactgaaatcttaactaaaaataagaaaaaaattaaagttgatcttacagcaattaataatttccttggtgtgcctaaatttaagcattctgaaattgaagataaagatttagttggaataacaaccggccttgcttggacagaagttggaggagagttgttaacaattgagtctgctctttcacctggaaaaggtaagatatcttctactggaaagcttggtgaagttatgaaagaatcaattcaagcagcagaagcttttgtaaaatctagggctaatttatttggtataagttttaaagatattgaaaaatcagatattcatttacatgttcctgaaggtgcaactccaaaagatggcccttcagctggagttgcaatgattacttcaattatatcttcactaactggtaatcctgttaagcacttagttgcaatgactggtgaaatgacgcttaggggcaggg

SEQ ID NO: 263190 - DNA, 1138 bp, Unknown
  Bacterial polypeptide expressing nucleotide sequence isolated from the Sargasso Sea
tgttggcagagacaaatcaatatctgcacttaatgaagtaatgaaaaatgacaaaaaaattatattagttacacagaaaaattcagaagtcgacgaccctaaaaaaacagatgtttttacatatggatgtgaaggaaatattttacaacttctaaaattacccgatggaacagttaaagttttagtagaaggtaacaagagagtaaaaattttagattttaaagatagcgataagtatataacatgcgattttagttatcaaaatgatgtattaactaaagatgaagacttattgcctttagctataactgctgttcgtagacttgaaaaattgacttctgtaaataaaaaaattgcaaatgaaactataaataatattaaacaattaaaagaaccttcaaaaattgctgacaatatagcttcacacctaagtacgactatttctgaaaaacaacaattatttgagacagttgatgtaaaaaaaagattaaatgcagttattaaaataatggaaaatgaagcgagcattataggtgttgaaaaaagaataagaggaagagttaaaactcaaatggaaaaaactcaaagagaatattatttaaacgaacaacttaaagcaatacaaaaagaacttggtgaaattgaagatggtaaagatgagacttcaaatcttaataaacagatattgaaagctaaaatgccaaaagaagttcaaaaaaaatgtatgacagaattaaaaaaattaaaaaatatgagcccaatgtcagcagaagccacggtagtaagaaattacttagattggatgattgatattccttggcataaaaaaagtcatgttgatattaatctaaataaagctttaaaaactttagacgaagatcattatggtttagaaaaagtcaaagaaagaataattgaatttttagcagttcaaaaaagaatggataaaatcaaaggtccaattttatgtttaataggacctccaggagttggaaaaacttctcttggtaaatcaattgcaaaagctacaaatagagaatttgttagaatgtctcttggtggtgttagagatgaagcagaaataagagggcatagaagaacttatataggttcacttccaggaaaattatacagatga

SEQ ID NO: 263191 - DNA, 827 bp, Unknown
  Bacterial polypeptide expressing nucleotide sequence isolated from the Sargasso Sea
tttgggtaacgatattataaaagaagttattagaagctacacaaaagagtccggagtaagaaatcttgagagagaaatctctaaaatagctagaaaagtggttaaaaaagttgtggctggagaagaaaaagaagtcaatattgactcaaaaaacttaccagactttctaggagttccaaagtttaagtcaggtgagctagagtctgaaaatagagttggtattgtaactggcttagcatggacagagtatggtggagaaattttaaagatagagacagtaacaatgccaggtaaaggtcgtatgcaaattaccggtaagcttggggatgttatgcaagagtcagttaaagctgcaaaatcatttgttagatcaaaatgtttagaatatggaataattcctccattattcgagaaaaaagattttcatattcatgtacctgagggagcaactccaaaagatggaccttctgcaggaataggaatggttacatcaatagtttcatcaattacaaacattccggtaaaaagagatgtggctatgacaggtgaagtaacattgactggtcaagtattacctattggtgggttaaaagaaaagctattagcagctcatagagctggtattaaagaggttttaatcccaagagaaaatgaaaaagacctagtagatatgccaaaaaagattattgatgagattaaaattactccagttgagtttgctgatgaagttttaaaaattgctctaactaaagaacttaagaagacagaatgggttgaggttgatatgtctaaaaaggatgacaaatctcaagctagcattcaataaa

SEQ ID NO: 263192 - DNA, 1161 bp, Unknown
  Bacterial polypeptide expressing nucleotide sequence isolated from the Sargasso Sea
tactatcttaatgagcaaatgaaagctatacagaaagaattaggtgatggttctgaaacccaagatgagttagttgaacttgaagaaaaaatttcaaagataaaacttagtaaggaagctaaagataaagcattagcagaattaaagaagttaaaatcaatgtctccaatgtccgctgaagctacagttgtgaggaattatctagattggatactttctatcccatggggaaaacaaagtagagtaaagaaagatttaaatagggcacaaaaaatacttgacgatgatcattgtggtttagaaaaagttaaagaaagaattgttgaatatcttgcaattcaacagagatcaaaaaaaatcaaaggtccaattctttgtttagtgggtcctccaggtgttggcaaaacgtctttaggaaaatcaattgcaaacgctactggcagagagtttattcggattgctttaggtggcgttcatgatgaaagtgagataagaggacacagaagaacttatattgggtccatgcctggtaaaattatacagtccatgaagaaagcaaaaacaaacaacccgcttatactcctagatgaggtagataaaatgggtagagattttagaggtgatcctgccagtgctatgctcgaagtactagatcctgaacaaaacagtacttttacagatcattacttagaagtggaatacgatttatcaaatgtaatgtttattaccactgcaaatacatacaacatgccaagaccattattggatagaatggaaataataagtcttgcaggctacacagaaattgaaaaacgcgatattgctactgaacatttgatttcaaaacaaatgaaagaacacggccttaaagtttcggaattcagcataaacgataatggccttttggaaataataaggagatatacgagagaagcaggtgtacgtaacttagaaagagaaatagcaaaactttgtcggaaatccttaacaaaaataattaaaggagaagcaaaaaaagtaagtgttaatttgaaaaatattgaagaatttttaggggttaaaaaatttaaatttggattagctgaagaagagaatcaaattggagttactacaggattagcttggacagaaacgggtggagatttgttgtctattgaagct

SEQ ID NO: 263193 - DNA, 1300 bp, Unknown
  Bacterial polypeptide expressing nucleotide sequence isolated from the Sargasso Sea
tatggaagttaaacattcatcaccgctcttgccattaagagacatagtagtttttcctagtatggtcataccattatttgtaggaagggataaatctataaacgccttaaacgaagtaatgaaaggaaataaaaaaattgtcttagtaacacaaaaaaattctgaggtagatgatccaaaaaaaacagatgtatttacaaatggatgtgagagttctattttgcaattacttaaattgcctgacggtactgtaaaggttttagttgaaggtgtcaaaagagtcaaaattgttgattttaaagatgaaaaagactttatattatgttcctttgaatataataacgatatagtagcccctcaagaagatttgcttcctttaggattaactgcaataagaagattggaaaaattaacttctataaataaaaaaatatcatcagaaactattacaaatattaaaaatttaaaagatgcatcaaaaattgctgacaatatagcatcacatttaaactgtactatttcagaaaaacaacaattatttgaaacactggatgttaaaaaaagattaaacaacgtgatcaagataatggagaatgaaacaagcattattggtgtagaaaaaagaataagaggaagagttaagacccagatggaaaaaactcaaagagaatactatttgaatgaacaattaaaagctattcaaaaggaattaggtgaaatagaggatggaaaagatgaaacgtcaaatttaaataaagcaattttgaaggcaaagatgcctaaagaagttcaaaaaaaatgtatgtcagaattaaaaaaactaaaaaatatgagtcccatgtcagctgaagctacagtggtaagaaattatttagactggatgattgacataccttggtttaaaaaagataaagttgatatcgacctaaataaggcgctgaaacaattagatgaggatcattatggactggaaaaagttaaagagagaatagttgaatttttagcagtccaaaaaagaatggaaaagctaaaaggtccaattttatgtcttgttggtcctcctggtgttggcaaaacttctcttggtaaatcaattgctaaggcaactaatagacagtttgtcagaatgtctttaggtggagtaagagatgaggctgaaattcgaggtcatcgaagaacttatataggttctttacctggaaaaataattcaaatgatgaaaaaagctggaactaaaaatccactaattctattagacgaaattgacaaagttggaaatgattatagaggagatccatca

SEQ ID NO: 263194 - DNA, 868 bp, Unknown
  Bacterial polypeptide expressing nucleotide sequence isolated from the Sargasso Sea
aatgatcgctgagaataaaaaaccacttttaccattaagagatattgttattttcccatcggtagtagtcccattatttgttggaagaaaaaagtcaattagggctttagaagaagtaatgaaaactgataagtcaattgttttagttactcaaaaaaattcagaagttgacgatccacaagaaaaagatatttattcatttggttgtttaagcaaaattttacaattacttaaattaccagatggcactgtgaaggttttagtggaaggacagaaaagagctaagattaaagaaattagcgatgaaaataaaaaattcttaaattgtaacattgaaactatagaaaatgacaaagaaacagaagaaaataaactttatgcccttaatttaattaaaaagtttgaaaagctgtcaagtctaagcaaaaaagactccttagattttgtaaaaacattaaaatctttaacagattcaaatcaaattgctgataatatttcatcaaatctaaacatatctatcaatgataagcagtttttacttgaaataacaaacctcaaaaaaagattggagaaaatctacgagattttagaaaaagaaaccagcgtaataagtatggaaaaaagaataagaggaagagttaaaaatcagatggaaaaaactcaaagggagtattatttgaatgagcaattaaaagcaattcaaaaggaacttggggaaattgaagaaggcaaagatgaaatttctaatttaagcaaagcaattatgaaagctaaaatgagcaaggacgcgcaaatcaagtgtttagcagagttgagaaagttaaaaactatgagtccaatgtccgcagaagctacagttgttaggaac

SEQ ID NO: 263195 - DNA, 988 bp, Unknown
  Bacterial polypeptide expressing nucleotide sequence isolated from the Sargasso Sea
agcaaatactcttaatattcttccacctttactagatagaatggaagttattagaatacctggttacacagaagacgaaaaaattaatatagctaataaatatcttttacctaagcaaattaaagataacggcataaaagaaggagaaatgaatttacaagaaggtacaattaaagaaataataagaaattatacaagagagtcaggtgttagaaatttagagagagaaatttctaaagtaacaagaaaagtggtgaaaaaagttgtaaacaaagaagaaaaaaatgttgatgtaaatagtaaaaatatttctgattttctaggtgttaaaaagtttaagtttggtgaattagaatcagaaaataaaataggtattgtaattggattagcatggacagagtttgggggtgaaatattaaaaatagaaactgttaatatgccaggaaaaggtagaatgcaaataacaggaaaactcggtgatgtgatgcaagagtctgtaaaagctgcaaaatctttcgtaagatcaaaaagtttagagtatggaataatacctcctattttcgaaaaaaaagattttcatatacatgttccagagggagcaactcctaaagatggaccttcagcaggtatagctatggtaacttcaatagtttcatctataacaaatattccagttaataaagaaattgcaatgacaggtgaagtgacggttacaggacatgttctgccaataggaggattaaaagaaaaattattagctgctcatagagcaggagtaaaaaaagttttaattcctaaagagaatgaaaaagatttagtagatgttcctaaaaaagtaagagaagatataaaaatcattccagttgaaagtgcagatgaagttttaaaaatagctctaacgaaggaacttaaacgtgttgagtggtctgaagtagaaaaaatatctgaagcaaaaaaaaacgaaaaatctcaagccagcattcagtaa

SEQ ID NO: 263196 - DNA, 1666 bp, Unknown
  Bacterial polypeptide expressing nucleotide sequence isolated from the Sargasso Sea
ggcaaggatgaaacctcaaatctaaacaaggcaatactgaaggcgaaaatgccaaaagaagtacaaaaaaaatgtatgtctgagttaaaaaaattgagaaatatgagtcccatgtcagctgaagcaacagttgtaagaaattatttagattggatgatagaccttccttggtataaaaaagacaaggtcgatatagatttaaacaaagctttaaaagttttagacgaagatcactttggattagaaaaggttaaagagagaataattgaatttttggcagtacaaaaaagaatggaaaagttaaaaggtccaatactttgtttggtaggtccaccaggtgttggtaaaacttcacttggaaaatcaattgctaaagctacaaatagacaatttgtcagaatgtcattaggtggaattagagatgaagctgaagtgagaggtcatagaagaacatatattggatctttgcccggaaaaattattcaaatgatgaaaaaagctggaactaaaaacccactttttttattagatgaaattgataaagtagggaatgactatcgcggcgatccatcatctgcattattagaagctttagatcctgaacaaaacacaacttttaatgatcattatttagaagttgattatgatttgtcagatgtaatgtttgttacaactgcaaacacattaaatattttaccacctttactagatagaatggaagttattagaatacctggatacacagaggatgaaaaaattaatatcgccaataagtttcttttaccaaaaacaattaaagaaaatggagttaaaactggagaaatggatttatctgatggtacaataaaagaagttattcgtaattatacaaaagagtctggagttagaaaccttgaaagagaaatttcaaagataactcgaaaagttgttaagaaaatagtaaatgctgaagaaacaaaggttaaagtaaatgaaaaaaatttacaagattttcttggagttaaaaagtataaatttggtgaactggaaaacgaagataaagttggtattgtaacaggtttagcttggactgagtttggtggagagatattaaaaatagaaactgttaatatgccgggaaaaggacgtatgcaaataactgggaaacttggcgatgtaatgcaagagtcagtaaaagctgcaaaatcttacgtaaggtctaaaagtttagattttggtattataccacctctttttgaaaaaaaagactttcatattcacgtacctgaaggtgctaccccaaaagacggaccttctgctggaattgcgatggtaacttctataatttcatctataacaaaagttccagttagaagagatattgcaatgactggagaagtaacaattacagggcaagttcttccaattggtggactaaaggaaaaactattagcagcacatagagcaggaataaaagaagtaataataccaaaagataatgaaaaagatttaactgatattccaaaaaaagttaaggaagatatcaaaattacatcattagatgttgtagatgatgttataaaaatagcacttacaaaagaattaaaaagagtcgaatgggttgatgttgaaaaattatctgatagtaaaaagacgataaatctcaagctagcattcaataattaat

SEQ ID NO: 263197 - DNA, 1151 bp, Unknown
  Bacterial polypeptide expressing nucleotide sequence isolated from the Sargasso Sea
aatgcctggtagaataatacaaagcattagaaaatcaggaacttcaaatccagtctttgttcttgacgaggtagataaaatttcaagtggatctcaaggtgatccaagctctgcacttttggaacttcttgatcccgaacagaataattcattccatgataattttcttgaagttgggtatgatttatctaaagtcatgtttattgctactgcaaatagtttatctacaatgcatcctgcacttctagatagaatggaattaataaacgtatcagggtatacatctgaggagaaagtttcaatagcatcaaaattccttgtcaaaaaacaattaactgaacatggtttgaaaccaactgattttaaattatcaagtaaggtgttaaaagatataattagtggttacacaagggaatctggcgttagaaatttagagaagcaaattgcaaaattaatcagaaatagagcaaagaacatagtttctaattcaaagcttaataattcaaaagaccaaaactttttaaaagatgtgctcggtccaaaaaagttttttagagataaatatgagagcaataatgtagctggtatagttacaggtcttgcatggacttctgttggaggtgaaattttatttattgaatcctctatatctgaaggaaaaggaaatctttctataactgggaacttaggaaaaataatgaaagaatctgctatcattgccttggaattcataaagtcaaatcaaaaagaattaggaattgaaaaagaccttgacttttcaaaatataatatacatattcacgtaccagaaggagcaactccaaaagatggaccaagtgcagggattacaattctaacttcactagtttcactatttactcagaagagagttaaaaaaaatattgctatgactggagaaattactctaagaggtaaagtgctccctgttggtggaataaaagaaaagattcttgcagctaaaagagcaaatattaaagaaattattttaagttcatacaataaaaaagatatacaggagattaatcctaaatatctaaaaggactaaaatttatatatgttgactctatgaaagatgttatttcaaattccattataaatcgaaaagttactaaccctaagttaatttgat

SEQ ID NO: 263198 - DNA, 2407 bp, Unknown
  Bacterial polypeptide expressing nucleotide sequence isolated from the Sargasso Sea
tatgaaaattgaaaaagtaccagttttacctttaagagatgttgttgtatatccgaatatggttgttccattattcgttggtagagataaatcaattaaatctcttgaagacgcaatgaatgataataataaaactattttattggttacacaaaaatctcctgatattgatgacccaaatgaatctgaactttatcaagttggctgccttgcttcaatccttcagctgctgaaacttcctgatggcaccatgaaggttcttgttgagggtctatcaagagcaaatattctcgatgttactgatcatgattcatctctaacagcaagttatgaaatcatagacaaaaaaaaatcaatatctaatacccatgaagatgctcttagtcgtgcattagaggatacttttagtcaatatgtaaaaatgaataaaaaaattcctccggaagtactatcttcaattgccgggattgaggatttatcaaaactctccgatagcattgctgcacatatgacaatgagtctaaaagaaaaacaagatgttcttgaaattactgacactaaaaaacgtgtggaatatttgatgaaaactatgaattctgagcttgatgtgttgcaggtagagaaaaaaattcgtggacgggtaaaacaacagatggagaaaagtcagagagaatattacctaaacgagcagatgaaagctatccagaaagagcttggtgaaataggtgatgaacccaatgattttgatgctattcaaaagagaattgatacagctggattgtctagtgaagcaaaggaaaagattacttctgagtttaataaatttaaaatgatgtcaccaatgtctgcagaggcaacagttgtccgtaattatatagatacagtgctctcgcttccttggaaagataaatctgaggttaatagtgatatagcgcacgcacaaaaagtacttgaccaagaccatcatggtttgctcaaagttaaagagagaattttggaatatctagcagtgaataagagagtgcaaaaattgaaaggaccaatactttgtcttgttggtcctccaggagtaggtaaaacatcactgggtatgtctattgcaaaatcgactaatagaaaatttataaaaatgtcacttggtggtgtaagagatgaagcagaaattagaggtcacagaaaaacctatattggctcgatgcccggaaaagtaatacaaaatttatcaaaagttaaaactaaaaatccactatttttgttagatgaaattgataagatggctatggattttagaggtgacccgtcatcagcacttttagaagttcttgaccctgaacaaaattttgcattcaacgatcattacttagaagttgattttgatttatctgacgttatgtttattgcaacagctaactcaatggagtcaatcccagctccgctcctggatagaatggaaattatcagattgccggggtatacagaagatgaaaaagtagatattgctaaaaaatatttactacaaaaacagtttaagcaaaatggacttaaaacaaaagaattatctatttcaataccaaccctaagagatattattagattttacacgagagaagcgggtgttcgcggtttagaccgatcaatatcaaaaatttgtcgtaaagtaataaaatctctaactcttggtaatagcaaaagtaaaaattttaaaattacgccgttgaatctaagtaactatcttggcgtaaaacaatttaattttggttccgtagaaaaaaaagatatgataggccaagtaaatggtcttgcttggacttctactggcggtgaacttttaagaatcgaatgtgcattgatgtctggtaaaggtaaaattacccaaactggtaaactaggagatgtaatgcaagagtctattaaagctgcaataactgtagtgaggacaagatcttcttcattaggtatagattcagaattttatcaaaacaaagatctgcatatacatgtgcctgaaggagcaacaccgaaagatggtcctagcgcaggcatcacaatggcattagcagtcgcatcatcattatctggtgtgcctgtcaagtccgatgttgccatgacgggagagataacccttagaggtcaagttctagagattggcggactcaaggaaaaattacttgctgccttgagaggtggtattaaagaggtaattattcctaaagataatgaaaaggacttaactgagataccagaaaacgtcaaaaaaggccttaaaatacatcctgtcaagtttgtagacgaagtttttgctattgctttaaagaataaagttactaaaagcaaaaatgtatcaaaaaaatctgggttagaaaataaaaaggcaaaatcttctggaactaagagacttcctcactag

SEQ ID NO: 263199 - DNA, 1336 bp, Unknown
  Bacterial polypeptide expressing nucleotide sequence isolated from the Sargasso Sea
atgaataatacaactttacctgttctgcctttaagagacatagttgttttcccaagcatggtagctccattatttgttggaagagtacaatctgttaatgccttaaatcatgctatgacatcagataaaaaaatttttttactagcacaaaaaaactctgaaattgataatccaaaaaaatcagatctttatgagtggggaacaatagcaaaagtacttcaacttctcaaactccctgatggaacaataaaagttttggttgagggaattactagagcaagattaaatactttaaatttatctaatgattttttaacagctaaaataaataaaatagatattaaacttaaaaaaaacaacaatttaaaagcattagtaaaaattgtaattgatcaatttcaggattactcaaaagtaaataaaaaaataccatctgatatagttaataatctaatttctatcagtgatccaaataaaatagcagatgtagtttccattaatttgaatataaatatggagcaaaaacaagaactacttgaaatgcatgatttggaaaaacgattaaataaaatacatgtatatttagtttctgaaattgattctttccaaatggaaaaaaagattaaaggaagagttaaacgtcaaatggaaaagactcaaaaagaatattatttaaatgaacaaatgaaagcgattcagaaggagcttggtgataacgatgattctgatgatattgctgaaatagaaaagaaaattacttctgttaaattatctaaagatgcaaatgaaaagtgtaaatcagaattaaaaaaattaaaaaatatgagcccaatgtccgcagaagcaactgtcataagaaattatttagattggattttgtcaataccatggaattctaaatcagaaatttcaaaaaatattaaaaaatcaaaaaaaattctagaggaagatcattatgggcttgataaagtaaaagatagaattttagaatatttagctgttcagaaaagaacagaaaaattaaaaggaccaattttatgtttagttggacctcctggagttggcaaaacatctctaggtaaatcaattgcaactgcaacaggaagaaactttgtaagaatgtcacttggtgggattagagatgaggcagaaataagaggtcatagaaaaacatatattggctcaatgccaggtagatttattcaatcgatgaaaaaagcaaagacatccaatccattaatcttgttggatgaaattgataaacttggatcagattggagaggagatccatcatctgccctacttgaggttttagaccctgaacagaatgataaat

SEQ ID NO: 263200 - DNA, 1594 bp, Unknown
  Bacterial polypeptide expressing nucleotide sequence isolated from the Sargasso Sea
gctgataatataatttctcatatcaatgctagtatctcagaaaaacaacaaatctttgaaattttagatgttaagaaaagattaaatagtgtcattaaaataatggaaaatgaggcaagtatcataggtgtagaaaagagaattagaggaagagttaaaactcaaatggagaaaactcaaagagagtattatttaaatgaacagttaaaagccattcaaaaagaattaggtgaaattgaagatggtaaggatgaaaccacgagcttaaaaaaatcaattttgaaggcaaagatgccaaaagaagttgaaaagaaatgcatgtccgaattaaaaaaattaaaaaatatgagtccaatgtctgctgaggcaactgtcgtaagaaattaccttgattggatgatagatttaccttggtttaaaaaagataaagttgacatagatttgaacaaagctttaaagattttagaggaagatcactttgggttagaaaaagttaaagaaagaattatagaatttttagctgtccaaaaaagaatggataaaataaaaggcccaattctatgtttagtaggtccaccaggtgtaggaaaaacttctttaggtaaatcaatagctaaggcaactaatagacaatttgtaagaatgtctctaggtggtgtaagagatgaagcagaggtaagaggtcatagaagaacttatattggttctcttcctggaaaaattattcagatgatgaaaaaagcaggaactaagaatcctttatttttgcttgatgaaattgataaagttggaaatgattatagaggtgatccatcatcagctttattagaggctctggatccagaacaaaacacaacatttaatgatcattaccttgaagttgattatgatttatcagatgtaatgtttgtaacaacagcaaacacactaaatattcttcccccgcttttagatagaatggaagtcataagaattccaggatatacagaagatgagaagattaatattgcaaacaaatatctacttcctaagcaaataaaagataacggtgtgaaagaaggtgaaatgaagttggctgacgatacaataaaagaaattataagaagttatacaagagaaagtggcgttagaaatttagagagagaaatatcaaaagtaacaagaaaagttgttaaaaaagttgttaataatgaagaaaagagtgtcgaggttaatgaaaaaaatatacccgactttcttggaattaagaaattcaaattcggtgaattagaagcaaaggataaagttggaatagtcataggtttagcttggacagagtttggtggagaaatattaaaagttgaaacagttaatatgccaggtaaaggaagaatgcaaataactggtaagctaggtgatgtaatgcaggaatctgtaaaagctgcaaaatcttatgttagatcaaaatgtttagagtttggagtaactcctccactatttgagaaaaaagattttcatatacatgttccagaaggcgcaacaccaaaagatggtccttctgcaggtatagcaatggttacatcaatagtatcttcaattactaaagttccagtta

SEQ ID NO: 263201 - DNA, 1229 bp, Unknown
  Bacterial polypeptide expressing nucleotide sequence isolated from the Sargasso Sea
ctacttaaattacccgatggtactgttaaagttttagttgagggaataaaaagagttaaaattgttgattttaaagatgaacaagaatttatcagttgttcatttgaattcaacaacgatgttttgtcctctcaagatgacttaattgcattaggattgaccgcaattagaagattagaaaagttaacttctataaataaaaaaatatcatcagagactataactaatataaaaaatttaaaagatgcttcaaaaattgcagataatatagcctcccatttaaactgtacaatttctgagaagcaacaattatttgaaacattagatgttaaaaaaagacttaatagcgttataaaaataatggaaaatgagacaagtattattggagttgaaaaaagaattagaggaagagtcaaaactcaaatggaaaaaactcaaagagaatattatttgaatgaacaattgaaggcgatccaaaaagaattgggtgaaatagaagatggaaaagacgaaacatcaaatttaaataagtcaattttgaaagcaaagatgcctagagaagttcaaaaaaaatgtatgtctgaactaaaaaaattaaaaaatatgagcccaatgtcagccgaagcaacggttgttagaaactatctagattggatgatagatataccttggtttaaaaaagacaaagtcgatattgatttaaataaagctttaaaacaattggatgaagatcattatggattagagaaagtaaaagagagaataattgaattcttagctgtacagaaaagaatggataaattaaaaggtccaattttgtgtcttgtagggcctcctggcgttggaaaaacttctttaggaaaatctatagcaaaagcaactaatagacaatttgttagaatgtctttaggtggagttagagatgaagcagaaattcgtggtcatagaagaacttatattggttctttgcctggaaaaattattcaaatgatgaaaaaagcaggtacaaaaaacccacttattttattagatgagattgataaagttggtaatgactatagaggtgatccatcatcagcattactcgaggctcttgatccagaacaaaatactacttttaacgaccattatttagaagttgattatgatctttcagatgtaatgtttgttacaacagcaaataccttaaatattttacaacctttattggacagaatggaagtaataag

SEQ ID NO: 263202 - DNA, 1351 bp, Unknown
  Bacterial polypeptide expressing nucleotide sequence isolated from the Sargasso Sea
aatattttgcaacttttaaaacttccagatggaacagtaaaggttttggttgaaggtattaaaagagtaaaaatagttgatttcatagatgatgaaaaatttataacttgtacgtatgagcatcaaaaagatattttaaataaagatgaggatttattacctctagcacttaccgctgtaagaagattagaaaaacttacatcggtaaataaaaaaatttctactgaaacgattaataatattaaacaaattaaagatccttctaaaattgctgacaatatcgtttcaaatttgaatgcaacaatatctgaaaaacaacaaatatttgaaacacttgatgtaaagaaaagattaaacgcagctataaagatgatggaaagtgagaccagcattattggagttgaaaaaagaattagaggaagagttaaaactcaaatggaaaaaactcagagagaatattatttaaatgaacagttaaaagccatacaaaaagaattaggtgaaatcgaagatggaaaagatgaaacaacaaatttaaaaaaatcaattcaaaaagcaaaaatgccgaaagaagttgagaaaaaatgtatgtctgagcttaagaaattaaaaaatatgagcccaatgtctgcagaagcaacagttgtaagaaattatttagattggatgattgatcttccatggtttaaaaaagacaatgtagatattgatttaaataaaggacttaaaattttagatgaggatcattttggacttgataaagttaaagagagaattatcgaatttctagcagttcaaaaaagaatggataaaataaaagggcctatattatgtttagttggaccccctggagtcggcaagacatcattaggaaagtctattgcgaaggcaactaatcgacagtttataagaatgtccttaggtggagttagggatgaagctgaaattagaggtcatagaagaacttatattggatcgttacctggaaaaataattcaaatgatgaagaaagcaggcacaaaaaatccattgttcttattagatgaagtcgataaaattggtaatgactatagaggagatccatcatcagccttattggaagctttagatcctgaacaaaatactgcatttaatgatcactatttagaagtagattatgatttatcggatgtaatgtttgtaacaacagcaaatacattaaatatattgccaccattattagatagaatggaagtgataagaattcctggttacacagaggatgagaaaataaatattgcaaataaatacttactacctaagcaagttaaagaaaatggtgttaaggaaggagagcttgatatagcggatg

SEQ ID NO: 263203 - DNA, 1441 bp, Unknown
  Bacterial polypeptide expressing nucleotide sequence isolated from the Sargasso Sea
agtagaaagaaactcaaggaaagagtgcagggacagattggggaggactcaaaaagaatattatctcaatgagcaagtcaaggccattcaaaaagagttagggcatggtgaggacggcaaagcagaaatggaagaatatgctgagaagattgaggaagttaagctttcagttgaagcaaaggaaatggcggaaaaagaattgaaaaaacttaaaatgatgccatcaatgtcttctgaagcaaacgttgtacgcaactatcttgactggttactttgtatgccatgggacgaaaagactgaagataatttagacttggaaaaagccgaaaaagtattggatgcgaggcattatggtttggaaaaagtaaaggaacgtattattgagtatcttgcagttgcacagcaggtgggaaaaatgaaagggccaattatttgtcttgtgggaccgccaggtgtaggaaaaacatcgcttgctcggtctgtcgcggaggctttaggaagaaaatttgctcatgtaagtctggggggagttcgtgacgaagccgaaatcagaggacaccgcagaacttacatcggggccatgccaggtaaagtgatacagtctttacgcaaagtgaaatataagaatccgctgctgctttttgatgaaattgacaaaatgacatatggagtaatgggagacccagcagcagcactgctcgaagtacttgaccctgaacaaaaccacaccttcatggatcattatttagaagtggagtttaatatttcagatgtcctatttttttgtactgcgaacgttgcgcataatattcccccagcgctaaaagatcgcatggaagttatcacgcttacaggttacacagagttagaaaaagatcatattgcccgtaaacatttgcttccaaaacaaatggatgaaaatggtctcacagttaaaaagattcagtttcagcaaaaggctattcttgacattattcgcagttatactagagaagcaggagtgaggaaccttgaaagagaaatcgggaaaacatgtcgtaaggttgcaacacaactggttaagaagacaaaacttaataaagtagtggttacatcaagtcgtgtagagaaattcttgggagtgccacgttacaaacatgcaaaagctgaagaacaaaatgaaattggcactacatgtggattggcatggacacaagcaggtggtgaactacttgtcactgaagtaaatctcatgaaaggtacaggaaagttacagttgaccggtaagcttggggatgtaatgaaagaatctgcacaagctgcgcttagttttgtgcgtacgaatgcaaacaggttaggaatattttcttcaatttttgaaaaaacagatattcacattcacgtaccagcaggagctgtacccaaggatggtccatctgctggtgttactatagccacttct

SEQ ID NO: 263204 - DNA, 1306 bp, Unknown
  Bacterial polypeptide expressing nucleotide sequence isolated from the Sargasso Sea
tatggaagttaaagttacacaaccgttattacctttgagagacatagttgtctttcctagcatggtcatacctttgttcgttggtagagacaaatctattacagctctaaatgaagtgatgaaaggtgataaaaaaattgtcttagtaactcaaaaaaattcagaggtagacgacccaaaaaaaaatgatgtgttttcatacggatgcgaaagtaacattttgcaattattaaaattaccagatgggacagtcaaggttctagttgagggaattaaaagagtaaaactcgttgattttaaagatgatgaaaaatttatttcttgcacatttgagtatcaaaaagatattttagttaaagatgaagatctacttcctcttgcactaacagctgtaagaagattagaaaaactaacttctattaataaaaaagtttcgacagaaaccataaacaacattaaacaacttaaagacccttcaaaaattgcagacaatattgcttctcatttaaatgccactatttctgaaaaacaacaaatttttgaaacattagatgttaaaaaaaggctgaacggtgttatcaaaataatggaaaatgagacaagtattatcggtgttgaaaagagaattagaggtcgtgttaaaacacaaatggagaaaactcaaagagaatattatttaaatgagcagctaaaggctattcaaaaagaacttggtgaaatcgaagatggcaaagatgaaaccacaagcctaaagaaatcaattcaaaaagctaaaatgcctaaagaagttgagaaaaagtgtatggctgaacttaagaaattaaagaatatgagtccaatgtcagctgaagcaacagtagttagaaattatctagattggatgatagatattccatggtttaaaaaagataaagttgatatcgatttaaataaagctttaaaaatattagatgaagatcatttcggattagaaaaagtaaaagagagaattattgaatttttagcagttcaaaaaagaatggataagattaaaggtccaattctttgtttagtaggccctccgggtgttggaaaaacttcactaggaaaatctatagcaaaagcaactaacagacagtttgtaagaatgtctttaggtggtgttagagatgaagctgaagtgaggggtcatagaagaacatatattgggtcactacctggaaaaattattcaaatgatgaaaaaagctggaacaaaaaatccattatttttgttagatgaaatagataaaattggaaatgattatagaggagatccatcctcagct

SEQ ID NO: 263205 - DNA, 1009 bp, Unknown
  Bacterial polypeptide expressing nucleotide sequence isolated from the Sargasso Sea
tgatttatctgatgtaatgtttgtaactactgctaacaccttaaatattattcctccattattggacaggatggaagttataagacttccaggatacacagaagatgaaaaaattagtattgctaataattttttattaccaaaacaaataaaagataatggtgtcaaaaataatgaaatgaaaattgatattgacattattcaagaagtaataagaagttatacaaaagagtcaggagttagaaatttagagagagaaatctctaaacttgcaagaaaagttgttaaaaaagttgtgtctaatgaacagaaggaagttcaaattaataaaaaaaatcttccagattttttaggagttgccaaatataaatttggtgaacttgaaagaaataatagagtgggtattgtaactggtttggcctggacagaatatggtggtgaaattttaaaaatagaaacagttactatgccaggtaaaggtagaatgcaaattacaggaaaactaggtgacgtaatgcaggagtcagttaaagctgcaaaatcttttgtaagatcaaaatgtttagaatatggaattattccacctttatttgaaaaaaaagattttcatattcacgtacctgaaggtgcaactccaaaagatggtccttcagctggtattggtatggtaacatcaattgtttcttctttgacaaatatacctgtaagaagagacgtagcaatgactggagaagtaacaattaccggtcaagttctaccaataggtggattgaaagaaaaattgttagcagcacatagagctgggattaaagaagctattattccaaaagaaaatgaaaaagatttagttgatatgccaaaaaaaattgtagatgaaattaaaataacatctgttgaatatgctgatcaagttttaaaaatagctttgactaaagaactaaaaccaacagaatgggttgaggtagatttaagtaaaaaagaagataaatctcaagctagcattcaataa

SEQ ID NO: 263206 - DNA, 1129 bp, Unknown
  Bacterial polypeptide expressing nucleotide sequence isolated from the Sargasso Sea
tttgttagaatgtctctaggaggtgtaagagatgaagctgaaatacgaggtcacagaaaaacatatattggttcaatgcctggaagatttttacaagctatgaaaaagtcaaagacctcgaatcctcttattttattagacgaaattgataaattaggctctgattggagaggagatccttcatcagctttattagaagtattagatcctgagcaaaataataaatttaacgatcattatttggagttagattatgatttatctgatgttatgtttgtatgcacggcaaatactcttaatatacctcctgctttattagataggatggagataataagaataccaggctatactgaaaatgaaaaaaatcaaattgcaaaaagatatttagtaccaaaacaaattaaaaataatggtttaaaaaattcagaaataaattttaattccactttaattaaacaaattattagatattatactagagaagcaggagtaagagggttagaaaaagaaatttcaaaaatatgcagaaaagttgttaaggatttagaaactagaataaaaagaaaaattttattagataaaaaatctatacaaaattatttaggtgtagaaaaatatagaaataatgaaattgaaaagaaaaatttaattggtgtatcaaacggtttagcttggacagaagtagggggcgagatattatcaattgaagttcttttatcaattggaaaaggaaaattaactataactggaaaacttggtgatgtaatgaaagagtctattcaagctgctagttcatatgttagatctcaagctttaagtcttggaatcaatccattagattttgataaatacgatatacatgtgcatgtccctgaaggtgcaactccaaaagatggtcctagcgctgggatagctatatttaatagtcttgtctcttcactaactggtattaaaatcaaaaaagatattgcaatgactggagaaataaccttaagaggaagagttcttccgataggaggattaaaagaaaaactatatgctgcttctagagcaggtatcaaaacagttttaattcctgaagaaaacaaaaaagacttaagtgaaattgataaagatattactagta

SEQ ID NO: 263207 - DNA, 2110 bp, Unknown
  Bacterial polypeptide expressing nucleotide sequence isolated from the Sargasso Sea
atgaatgatatcaaagacaaagatgtacctttacttcccttaagagatgtagttattttcccttcagtagtgactcctttatttgttggaagagaaaaatcaataacggcccttcaggccgcaatggcgggtgagaaacaaataatgcttgttgcacagaaaagtgctcaaaaagacgatccagaacttaatgacttataccctataggtactttatctaccattctgcaacttattaaattaccagatggaactctgaaggttttagtagaaggaaatcaaagggcttcgatagagtcattaaaatctgaagaaggtttcgactctgtaaaagttaagaatctggaagaagaagcagaaagtgaagacacaaatcattatcttctaactttaaagaaacagtttcaggaatatgtaaagttaacaaagaaagcgacacctgaagttttaaacactgtaaatgcaattgattctgtttctagacttacagatactttggtaggccacttatctatagacatagaacaaaaacaaacaattctagaaacacaatcattatccgaaagagcaaataagatattagagcatttagactcgcaacttgatttatctaaagtagagaagaagattagaggaagagtcaaaaatcagatggagaaaagccaaaaagaatactatctcaatgaacagatgaaggctctcaaaaaagaacttggtgaaatggacgaggctgaagaagcagatgcacttgagtctagaattatggaagccggcatgactaaagaagcgcaagaaaaagctctaagcgaacttcaaaaatataaaatgatgtcaccaatgtctgctgaagcgtcagtagtgagaagctatatagattggatgctgaatataccttggaaaaagaaaagcaaaataagaacagacttaacaaaagcaagttcggttttagaagaagatcactatggactagaggaagttaaagaaagaattctagaatatttggcagtccaaaaaagagtaaaaaaattaaagggaccagttctttgcttagtaggtccacctggagtgggtaagacctctttaggagaatcaattgcaagggctacaaatagaaagtttgtaagaatgtctttgggaggagtaagggatgaagccgaaataagaggacacagaaggacctatataggctccatgcctggaaggataatacaaaaattatcaaaatcagaagtgaaaaatcctctatttttgcttgatgagattgataaaatgggaatggatttcagaggtgatcccgcttctgcgctcttggaagttctggatccggaacaaaatcatactttcaatgatcactatttagaggttgattatgatttatccgatattatgtttgtctgcaccgctaatagtctcaacataccatctgctttattggataggatggaaataatcacacttccaggatataccgaagatgagaaagttaatatcgctagcaaatatttaattgaaaaacagaaaaaaaacaatggattaaaggaaaatgaattaagtattacaaaacaatctataaaagatttaatcagatacttcacacgagaagcgggcgttagagctttagagagagaaatagctaaaatttgtagaaaagtagttaaaaagaatgcagaaacaaataagcagaaaaatatatctattaggcctaataatcttgaagattattgtggggtaagaaaatttgaatatggagaagcagaagagaaagaccgaattggacaggtaaccggtttagcttggactcaggtaggcggtgaacttcttacgattgaagcgtcatgctttgctggtaaaggaaagattatcaaaactggatctttaggcgatgtgatgcaagaatctatacaagcagctttatcagtagttagatcaagatcagaaactttagggatagatccgaaattttatgaagatcaagatatacatattcatgttcctgagggcgcgactccaaaagacggacccagtgcaggagctgcaatgtgcactgctgtaacttccgtcctgtctcaaattccagttagatcggatgtgccagacaggagaaattacc

SEQ ID NO: 263208 - DNA, 878 bp, Unknown
  Bacterial polypeptide expressing nucleotide sequence isolated from the Sargasso Sea
tttgttaccgaaacagatcaaagataatggtgtgaaagataaagaaatgaatttacaagacaatattattcaggaaataataagaagttatacaaaagagtcgggtgttagaaatttagaaagagaaatttctaaagttgctagaaaagttgttaagaaagttgtttctggagaagaaaaagaagtcaagattgataaagagaatttgtcagattttttaggtgttcccaagtttaaatcaggtgaattggaaactgaaaatagagtgggaatagttactggattggcatggactgaatatggtggagaaattctgaaaattgaaactgctacaatgccaggtaaaggaaggatgcaaataacaggtaagcttggagatgtaatgcaagagtcggttaaagctgcaaaatcttttgttagatctaaatgtttagagtatggaataatacctccattgtttgagaaaaaagattttcatattcacgttccagaaggtgctacgccaaaagatggtccatcagcaggtattggaatggttacttctatagtatcttctataacaaacattccagttaaaagagatgttgcaatgacaggtgaggttactttaacaggtcaagtattaccaattggtggtttaaaagaaaaacttattgcggcgcatagagcaggaatcaaagaggtcttaattccaaaagaaaatgaaaaagatttagttgatatgccaaaaaaaataattgatgaaattaaaataactcccgttgagtatgctgatgaagttttaaagattgctttaactaaggagcttaaaaagacagagtgggttgaagttgatatttctaaaaaagacgacaagtctcaagcgagcattcaataaa

SEQ ID NO: 263209 - DNA, 1174 bp, Unknown
  Bacterial polypeptide expressing nucleotide sequence isolated from the Sargasso Sea
tatgataaaaaatcaaatacctgttcttccacttagagacatagtagtatttcctaatatggtagctccattatttgtcggaagggagcaatcagtaaatgctcttaatcatgttatgacagttgataagaaaatttttttactttctcaaaaaaattcaaaaattgataatcctaacaaggaaaacctatacgctgtaggaactatagctaaaattatccagctattaaaacttccagatggaacactaaaggttttagtggaaggtattcaaagagcaaaggcaaacaaaataaattttaataaagaattcattactgcatcaattaccgaaattaatcaaaaaactaaaaaaaattcaaatataagagctttgcaaaaacttacaaccgaacagtttgttgagtttcaaaaaataaataaaaaagtttctctcgatgttattaacaatgtaagaacatttaatgatccagataaaattgttgatgtaattatatctaatatttcaatttctttatcaaaaaaacaagagattttagaaatcacaaatacagaagataggctaaataaagtttatggttatttagtatctgaaattgattcctttcaagttgaaaaaaaaattaaaggtcgcgtaaaaagacaaatggagaaaactcagaaagaatattatctaaatgaacaaatgaaagctattcaaagggaattaggtgagaatgaagatttagatgaaattgctgagttagaaaagaaagttaacaattataatttgtcaaaagaagctaaagaaaaatgcacagctgaaattaaaaaactaaaaaatatgagtcctatgtcagctgaagctactgttattagaaactatttagattgggtaatgtcaattccatggaataatcctgatcaaatttctaaaaatatcaataaagcatcaacaatattagagaacgatcactatggattagaaaaagttaaagaaagaattcttgaatatttggctgttcaaaaaaggactaataaacttaaaggccctatattatgtttagtgggaccgcctggtgttggaaagacatctcttggtaaatctattgcgaattcaacaggaagaagttttgtaagaatgtcacttggaggtgtaagggatgaagctgagataagagggcatagaagaaca

SEQ ID NO: 263210 - DNA, 874 bp, Unknown
  Bacterial polypeptide expressing nucleotide sequence isolated from the Sargasso Sea
ttgctaaaaaacattttgattccaaaacagttagaagaaaatgcgctatcaacaaaagatgtttctttagatgatgcatcaataaaagagctaatgagctcgtatactcgtgaggctggtgttagaaatttagaacgagaaattgcaaatgtatttagaaaggttgctagagataagattgaaaagaaagctagaaaaattagggttactaaaaagaagatatcagaatatttaggagcgcctagattttactcagacattgctgaaagaaccaccaaacctggagtagttacaggtcttgcctggactgctgctggtggggatattctttttattgaagcttctcaaatgaaaggaaaaggtaatttaacattaaccggtcaactaggcgatgtgatgaaagaatctgcaacagcagcgatgacttttgttagatcaaactctgagatattagggcttaactctgactttaacgaaaaaacagatatacatgttcatgtaccagcaggtgctattccaaaagatggtccatccgcaggtgtcggaatgtttacctctattgtttccctgctttcaggaaagccagttaaaagtaaactagctatgactggagaaattaccttaaggggtaatgttctacctattggaggcgttaaagaaaaagttaccgctgcacatagatctggaataaaaactattattttaccagatcataatcgaaaagatttagaagatattcctgatcatatcaagaaagatctagacttccattttgcaaaagaaatgatggatgtaattaaggttgctgttccaaggttaaatttgaaacctacaagaaaaaagacaaccccaaaaaataaaaaagtagcgtaac

SEQ ID NO: 263211 - DNA, 1234 bp, Unknown
  Bacterial polypeptide expressing nucleotide sequence isolated from the Sargasso Sea
gatgaagcagaaataagaggacatagaagaacttatattggttcattaccaggtaaaattattcaaatgatgaaaaaagctggtacaagtaatccattatttttattagatgagattgataaagtagggagtgattatagaggagacccatcttctgcactattagaagcattagaccctgaacaaaacaaaacatttaacgatcattatttagaagttgattatgatttatccgacgtcctttttgtaaccactgcaaacactttaaatatacttccaccattgcttgatagaatggaaataatcagacttcctggttacactgaagatgaaaaaattaatatttctcaaaaatttctaatacctaaacaaagtgaggacaacgggttaaaaaaagaagagtgggaaattactgagaacgtaaataaaaaaattatcagagattatacaagagagtcaggtgttagaaatttagaaagagaaatttctaaaatagcaagaaaaatggttaaaaaaattgactcaaaagaaaaagtcaacaaaacaatatctgaaggtgatttaagcaaatatttaggtatcaaaaaatttaattttggcgagattgaaaaagaaaatcaaattggtgtagtcactggtttagcttggacagaagtgggtggagaaatattaaaaatagaatctgttaatatgcctggtaagggtaaaatgcagattacaggaaaattaggagaagttatgcaagagtctgttaaagcagcgaaatcttatgtaagatcaaaatctttagaatacggaataataccacctttttttgaaaaaaaagattttcacattcatgttcccgaaggagcgacacctaaagatgggccgtctgcagggatagcaattgtaacttcaatcatttcatcaataactggagtgccagttagcaaagatgttgcaatgactggcgaagtcacattaaaaggaaatgttctccaaataggagggttaaaagaaaaacttttagcagctcatagagcaggtattaaaaccgctttaattccttttgaaaataaaaaagacttagtagaaataccagaagtaattaaaaaaagtataaatattatcccagtaagtacagttgatgaagttctaaagcacgcattaacaaaaactttaaaaccagttaaatgggcagaaattgatcaagcatcatcgaaaaaagatgaagttacaagtcgacattaaa

SEQ ID NO: 263212 - DNA, 2425 bp, Unknown
  Bacterial polypeptide expressing nucleotide sequence isolated from the Sargasso Sea
aatgtcaggcacccaacttctcccgccggaacgcatcacgctcccgctgctgccgctgcgggatgtcgtcgttttcccgcacatggtgattccgctcttcgtgggccggccgaaatcgatcaaggccctcgaagcagcgatggaaggcggcaagcacatcatgctcgtcgcccagaagaccgcggccaaggacgaaccgaccgaaaaggacatgtacgaggtcggttgtatcgccaacatcctgcagatgctgaagctgccggacggcaccgtgaaggtgctcgtcgagggcctgcagcgcgcgaaggcgttgtcgatcgaagagcaggaaacgcaattctcctgcgacgtgatgccgctcgagcccgatcacgccgacagcgctgaaacggaagcgctgcgccgcgcgatcgtgtcgcagttcgaccagtacgtgaagctgaacaagaagatcccgccggagatcctcacatcgctgtcgggtatcgacgaagcaggccgcctcgccgacatgatcgccgagcgcctgccgctgaagctcgaccagaagcagcacatcctcgagatgttcccggtcatcgagcgcctcgagcacctgctcgcgcagctcgaagccgagatcgacatcctgcaggtcgaaaagcgcatccgcgggcgcgtgaagcgccagatggaaaagagccagcgcgagtactacctgaacgaacaggtcaaggcgatccagaaggaactgggcgaaggcgaggaaggtgcggatctcgaggaactcgagaagcgcatcaacgccgcgcgcatgccgaaggaagccaagaagaaggctgacgccgagctgaagaagctgaagctgatgtcgccgatgtcggcggaagcgaccgtcgtgcgcaactacatcgacacgctgatcggcctgccgtggcgcaagaagagcaaggtcaacaacgacctgtcgaacgccgagcaggtgctcgacgaggatcacttcggcctcgagaaggtgaaggaacgcatcctcgagtatctcgcggtgcaacagcgcgtcgacaaggtgaaggcgccgatcctgtgcctcgtcgggcccccgggcgtcggcaagacctcgctcggccagtcgatcgcccgcgcgacgaaccgcaagttcgtccggatggcgctcggcggcgtgcgtgacgaagccgagatccgtggccaccgtcgtacgtacatcggttcgatgccgggcaagatcctgcagagcctcacgaaggtcggcgtgcgcaatccgctcttcctgctcgacgaagtcgacaagatgggcatggatttccgcggcgatccgtcgtcggcgctgctcgaagtgctcgatccggaacagaaccacacgttcgccgaccactacatcgaagtcgacttcgacctgtcggacgtgatgttcgtcgcgacgtcgaactcgctgaacatcccgccgccgctgctcgaccggatggaagtgatccgcctgtcgggttacacggaagacgagaaggtcagcatcgcccagcgttacctgctgccgaagcagaagaagaacaacgggctgaaggaaggcgagatcgaggtcaccgagcaggcgatccgcgacatcatccgctactacacgcgcgaagccggtgtgcgttcgctcgagcgggaagtgtcgaagatctgccgcaaggtcgtgaagatgctgctgctgaagaaggcatcgggcgcgatcaaggtcgacggcgaaaacctcgatacgttcctcggcgtacgcaagtacgacttcggcctcgcggcgaaggaaaaccaggtcggtcaggtgacgggcctcgcgtggacggaagtcggtggcgatctgctgacgatcgaagccgcggtgatgcctggcaagggcaacgtgatccgtacgggttcgctcggcgacgtgatgaaggagtcggtcgaggcggcacgttcggtcgtgcgctcgcgctcgcgtcgtctcggcatcaaggacgaagcgttcgagaagcaggacatccacattcacgtgccggaaggcgcgacgccgaaggacggtccgtccgccggcggtgcgatgacgaccgcgctggtgtcggtgctgacgggtatccccgtgcgtgccgatgtcgcgatgacgggcgaaatcacgctgcgtggtgaagtcctgccgatcggtggtctgaaggagaagctgctcgccgcgcatcgcggtggcatcaagctcgtgctgatccccgaagagaacgtgaaggatctcgccgagattccggacaacgtgaagaacgcgatcgagatcgtgccggtccgctggatcgacaaggtgctggaactcgcgctcgagcgttcgccgaccccgctgccgccggaagaagaggcgaaggcggcggcaccggtcgccgatgcggcgaaggacgccggctcgacggaattcgtcaagcactga

SEQ ID NO: 263213 - DNA, 829 bp, Unknown
  Bacterial polypeptide expressing nucleotide sequence isolated from the Sargasso Sea
aaaattaaatattggcgaaaaattattttggttccaaggaacaaagaaaaaaatggtctgaaggatgatgaaattaattttagcgataactctattttaaaaattataaggaattacactcgagaagctggagtcaggagtcttgatagagaaataaacaaagtttgtagaaaaaaagttaaggatctttcacttggaggtaaggcaacaaaacttattgataacagagttgtgagaaatattcttggaccagaaaaatttaaatatggccaacatgatgaccaaaattcattaggtcaagttaatggattagcttggacttcagtaggtggtgagcttttgcaaatagaagctgcattaacagcaggcaaaggaagaataattaaaacaggctctcttggcgatgtaatgcaggaatctatacaagctgctttgactgttgcaaaaaatatttttcaaaaaacaaagattaaaaaagatcttttcgaaacgcatgatattcatatacatgtccctgaaggagctacaccaaaagatggcccaagtgctggcataactatgtgtacagctataacttctttagctttaggaaaaaaagtaaaagcaaaccttgcaatgacaggggaaataactttagcagggaaggttcttaagattgggggtttgaaagaaaaactcatagctgcgaagagaagtggaataaccaatgtgattatacctaaagaaaatacaggtgatttagaagagatggagacaaatattttaagagatttaaatatcattccagttacaaatatcgatgaagtcttaaaagaagcgcttatttgaa

SEQ ID NO: 263214 - DNA, 1087 bp, Unknown
  Bacterial polypeptide expressing nucleotide sequence isolated from the Sargasso Sea
agcagcacaaaaagaattaggagacataagtgatgagaagaacgagcttgatgaactgcagaaaaaaattgaagaaacaaaattatcaaaagaagctttagaaaaagttagttcagaattttcaaaattaagacaaatgtctccaatgtctgctgaagcaactgttgtaagaacttatatagaaactttgcttgaagttccatggaataagaccacaaaaataaatgtagatctaaacaaagctaaagaaatactagatgaagatcactatggtttaaaggaagtaaaagaaagaattcttgaatatctagctgtacaaaaaagagtaaagaagatgaaagcaccagtgttgtgttttgttggtcctccaggagttggaaaaacatcacttggtgagtcaattgcaagatcagtgaatagagaatttacaaggttatctcttggaggagtgagagatgaagctgagataagagggcacagaaagacatatattggctccatgccaggcaaaattattcaaaagctttccaaaggcaaggtaaaaaaccctctcttcttgctagacgagattgataagataggaatggaccataggggagacccaagctcggctttactagaagttcttgatccagaacaaaataataaatttaacgatcattacttggaggttgattatgatttatcagaagtaatgtttatctgtacggcaaattcactaaatattcctccagctcttttagacagaatggaaataataagactgccaggatatatagaagatgagaaattaaatatcgcaaaaaattacctagttccaagaaataaagaaaagaatggactaaaagaagatgaaattacttttagtgataactctattttaaagattataagaaattacactcgtgaagctggagtcagaaatcttgatagagaaataaataaagtttgcagaaaaaaagttaaagatctttcacttggaggtaaagcaacaaagcttattgataacagagttgtaagaaatattttaggaccagaaaaatttaagtatggtgaacatgatgatcaaaattcattaggccaagtc

SEQ ID NO: 263215 - DNA, 2356 bp, Unknown
  Bacterial polypeptide expressing nucleotide sequence isolated from the Sargasso Sea
catgcctcttcgtaacacagttttatttcctcagcaggttattccgatttatattggaagagaaaaatcattaaaactcatatctgatcttgagtcagaaaatagaaaatatattatcgttgttgctcaagaggatggctcaatagaagatccaaagcctgaagatttatatgcatatggaactttagctacagttcttaaggtttttgcaatgccagataatagtaagtcagctattgtgcaaggaatttctcgtgtaaaaatattagactacattgaaaaagagccttatttcagggctgcagtcagtacaataagtgatgacccattagttgatgagttggagctagtcagtatttcagataagcttagaaactcattttcagatttaataaaagttgcgccaaatttaacagaagagcatactggtatgttgtctaatatccagaaacctaatagacttgttgatagggctatatctttaatgactttatccaatcaagaaaaacaagatatactcgaagaaactaatgtcaaaaagaggatcgagaaagctatctctataattaatagagagattcaaagaataaagctcggtgatgaaattcaaacggaagtccatgatgaaatagcaaaaacccaaagagaatattatttgcgagagcagatgaaagcgattcaaaaagaattaggtgaagacgaaggtaccgttgaattaaatgagctagaagatagaattaaagctgcaaaaatgcctgaagaatcggaactagttgcaatgaaagaattagataggctttcgagaattcctactcagtcacctgaatataatgtatcaagaacttatatagaatggatagcagatttaccttggagtaagtcatcaaaggatagaatagatgtcaaagaagcgctaaaaattttagatgaagatcattatggtcttgataaggttaaagaaagaataattgaatatcttgcggtaagaaatctaaaacaaaaaagaaacccagatggtaatgtacgtggaccaatattatgtttcggagggcctcctggggttgggaaaacttctctaggcaaatcgattgcaagagccatgggtagagaatttatacgattgtctcttggtggtgtaagagatgaagcagaaattagaggacatagaagaacctacattggtgctcttccaggaagaattatacaaaatattaaaaaggctggtactaataaccctgtcttcatgcttgatgaggttgacaaattgggttctgattttagaggagatccttcatcagctctacttgaggttttagacccggagcagaatcactcattcaatgaccactatttagaacttgattttgatttaagtaaagttatgttcatagctacagcaaataattatggaaatattccacctgccttacgtgatcgtatggaaattctagagttctcaggctatatccaagatgaaaaggttcaaattgcaaaacggcatcttattccaaaacagataaaagaaaatggattgaagaattctgaaataactctagaccttaattcaataaaagaattaattagtgcatatactcgagaagctggcgttcgtcagctagaaagacagattgctaatgttttacgaaaagttgcaagggatattgttgagtcaaagaaaaaacagattaaagtaacaaagacaaaagttcatgaattattaggtgcttccagatttcactctgaattagctgaaagagctactgagccaggtgttgttaccgggttagcatggacagctgctgggggtgatattttatttatagaatcaacaaggatgcagggtaaggggaaactcacattaactggtcaacttggcgatgtcatgaaagaatcagctacagcagggttaacttttgttagagctcatgctaacacttttggtattgatcctaattttaatgaagaaacagatatccatgttcatgttccagctggtgccattccaaaagatggaccatctgctggagttagtatggtaacttctttagtttctttaatgacaaaaactcctgtaaaaggtaaagtagccatgacgggtgaaattactcttaggggtaacgttctaccaatagggggtgtgaaagaaaaagttactgctgcacatagagcaggaattaaagagatagtattgcctgaattaaatcgtaaagatctagaagatgttcctgaacatgtttcaaaagatttaactttccattttgcaaaagaaatttgggatgttttaaaggttgctttacctaatatcaccaaaaaaagaaggaaaaaacctgcagttagtaataataaaaagacttaa

SEQ ID NO: 263216 - DNA, 2196 bp, Unknown
  Bacterial polypeptide expressing nucleotide sequence isolated from the Sargasso Sea
ttgtcggcagagaaaatctgtaaaagctcttgaagtagttatgtctgaggacaaagaaattctgttgtctagccaaatagatgcgacggacgatgatccaagcagtgagggcatatataaggttggtgttttagcaaatgtcttgcaactgttaaaactgccagacgggacagtcaaagtgctggtagaaggtaataaaagggtaaaaatttccgacttcagcaaaaatgatgaattttttgaggcatatgcggaggaattgtcagaagatgaaggggatactgaaacaattaaagcactccaaaaaacaattgcctctgaattcgaaaaatatgcaaagataaagaaaaatattcccgaggaggccttagcttccgtggctaatgcagaagacccgcgtcaactggttgatttgatagctggacatcttggaattgaagttgaagaaaaacagaaattattagaaaatctggtaataagcgagcgtttggaaaaagcttactcccacatgcaaagtgaagtaagcgttttgcaggtcgaaaaaaagataaaaacccgtgtaaagtcacaaatggaacgtactcagagggagtattatctaaacgagcaaatgaaagccattcagaaagaactcggtgatggcgaggatggccaaaacgagattgccgaactagaagccaaagtaaaaagtattaagctgagtaaagaagctaaagagaaagcagaagctgagataaaaaaactaaaatctatgtcgcctatgtcagcagaagcaaccgtggtgagaaattatcttgattggcttctgtgcctaccttggggagctaaatcaagggtgaagaaagatctaaatcgtgctcaaaaaatactggatgatgatcattacagcttggaaaaagtaaaagaacgaattgtagagtatcttgccgttcaacaacgaagtaagaaggtcaaaggcccaattatgtgcttagttggacctcccggagtgggtaaaacttcacttggcaagtcagtagctaaagccactgggcgtgagtttatcagaatttctttaggcggggtgcgagacgaaagtgaaatccgaggtcatcgtcggacatatattggttccatgcctggtaaaatcatacaagcactgaaaaaagcaaagaccactaacccgttaattctgcttgatgaaattgataaaatgggacaggattttcgtggagaccctgcctctgcgatgctcgaagttctcgatccagaacaaaatagtacattcgtggatcattatttggaagttgagtacgatctgtctaacgtgatgtttcttactacagcaaatagctataatatgcctgagccgctactcgaccggatggaaattgttccactagcggggtacacagaagatgagaaaagagagatcgctcttaggcaccttttagaaaaatctctcaagaacaacggtttaaaagcgagtgaattttcgctatccgatgatgcattgaccgcaattattcaattttacacacgtgaagcgggtgtgcgtaatttggaacgtgaaatagcgcggctagcacggaaagttgttacgagaattgtaaaaaaagaaagtcaaaccgtgacaattacggaagaaaatttatctgattatttgggagtaagaaagtttaagtatgggctagcggagctacaggatcaaattggagtggtcaccggtctggcttacacatcggcgggtggtgatctgttgcagatagaggctttgaagttgccgggcaaaggtagaatgaaaacgaccggtaagcttggtgatgtaatgaaagagtcgatcgatgctgccagttcatacgtaaggtctattagcccgaagataggagtgaagcccacgcgttttgacaaactggatattcacgttcatgtcccggaaggtgcaacacctaaagatgggcccagcgcaggtcttgcaatggtgacatcaattgtatctgttttaagcggtattccagtgaaaaaagacttagcaatgactggcgaagtcactctccgtggcaacgcgttgccgataggtggtttaaaagaaaaacttttagctgccttgagaggagggataaaaaccgttcttatccctctggataatgaaaaagatctcgcggaaataccagaaaacgtaaaagaggggctcaacattgtagcggtgtcgcatgt

SEQ ID NO: 263217 - DNA, 1024 bp, Unknown
  Bacterial polypeptide expressing nucleotide sequence isolated from the Sargasso Sea
ttagaagttgattatgatttgtctgatgtaatgttcgtaacgactgctaacactttaaatattttgcctcctttattagatagaatggaagtaataagattagcaggttatactgaagatgaaaaaataagtatcgcaaataaatatttattaccaaaacaaatcaaagataacggtgttaaagaaaaggaaatgaagctggataatgatattataaaagaagttattaggggatacacaaaagagtcaggtgtaagaaatcttgaaagagaaatttctaaacttgcaagaaaagttgttaaaaaaattgtatctggtgaagaagaagaggttaaaataaatagtaaaaatttatctgatttcttaggtgttgctaaatttaagtttggagaattagagagtgagaatagagtaggtatagtaacagggcttgcttggactgagtatggtggagaaattttaaaaattgagaccgttacaatgccgggaaaaggaagaatgcaaatcactggtaagttgggtgatgttatgcaagagtcagtcaaagctgcaaaatcttttgtaagatcaaaatgcttagaatatggaatcattccacctatttttgaaaaaaaagattttcacattcatgttcctgagggagcaactccaaaagatggtccatctgctggtattggtatggtaacttcaattgtttcatcaataacaaacattcctgtaagaagagatgttgctatgactggcgaagtaactttaacaggacaagtattgccaattggtggtttgaaagaaaaattattagctgcacatagagctggaataaaagaagttttaattcctaaagaaaatgaaaaagatctagtagatatgcctaagaaaattatagacgatattaagatcacaccagttgaatatgctgatcaggttataaagttagctttaacaaaagaacttaaaccaacagagtgggttgaagttgatatatctaaaaaagaggataaatctcaagctagtattcaataat

SEQ ID NO: 263218 - DNA, 2119 bp, Unknown
  Bacterial polypeptide expressing nucleotide sequence isolated from the Sargasso Sea
tatgacagacgaatttgaaaaaaatgttaatgaagatttaattgacgaaagtgaaacatatcctgtaatgccgttaaggaatacggtgttattcccacagcaagttattcctatttatattggtcgagataaatctttaaaactgattaatgagctttcttcaaaaacaaaacacgttgttgtagttgcgcaagaagatggatcgatcgaagatccagagcctagcgatatgtattcctatggtactcttgcggtagttttgaaggtttttgatatgcctgataatagcaagtcagctattgtccagggaattgatcgcgttaaaattttagattataaagaaaaagatccatattaccgtgcagtggtacagcgcgtttcaaacaaatcttcaaaggatagtgttgagctagatgcgcttgccaataacctacgccaagtttttgctgaattgattcagattgctcctaatttgagcgaggagcatacaggcatgctttccaatattcaaaaaccagcacgccttgcagatagagcagtatcactcttgacagtttcaaatccagaaaaacaagatattctggaagaattagatgttaaaacccgtgttgacaaagctataaaagttctttcaaaagagattcaaagaattaaactcggtgaagaaattcaaaccgaagtgcatgatgaaataactaaatcacaacgggaatattatttacgtgagcagatgaaagcaatcaagcgggagcttggtgaagatgaatctcaagtagagttgaatgagattgaagatgcgattaagaaagcaaaaatgcctgaagatgctgaaaaagttgcactaaaagagttagatcgattgactaaaatacctactcaatctccagaatataccgttgctagaacatatttagattggttgacagatcttccatggtctatatcctcagaagattcaattgatgtaaaagaatcaaaaaagattttagatgaagatcactatggcttagaaaaagtcaaagaaagaattattgaatatcttgctgttagagcattgaaaatgaagaaagaacctaacggagctattcgcggaccaattttatgtttcgctggaccgccaggagtaggaaaaacttcccttggtagatcgattgcaaaatcgatgggcagggaatttgttagaatttctttaggtggagttagagatgaagctgagattagaggacatagaagaacatatattggcgccttacctggtagaataattcaatctttgaaaaaagctgggacaaataatccggtatttatgttagatgaaattgataagctaggcatggattttcgaggcgatccatcttcagctcttttagaggttttggatcccgagcaaaatggaacttttgctgatcattacctcgaggttgattatgatttaagtaaagtaatgttcattgctactgcaaattatcgagatccaattcctccagctttaaaagataggatggaagtgatcgatttctcaggttacatcgaagacgaaaaacttcaaattgctaaaaaacatttgattccaaaacagttagaagaaaatgcgctatcaacaaaagatgtttctttagatgatgcatcaataaaagagctaatgagctcgtatactcgtgaggctggtgttagaaatttagaacgagaaattgcaaatgtatttagaaaggttgctagagataagattgaaaagaaagctagaaaaattagggttactaaaaagaagatatcagaatatttaggagcgcctagattttactcagacattgctgaaagaaccaccaaacctggagtagttacaggtcttgcctggactgcagctggtggggatattctttttattgaagcttctcaaatgaaaggaaaaggtaatttaacattaaccggtcaactaggcgatgtgatgaaagaatctgcaacagcagcgatgacttttgttagatcaaactctgagatattagggcttaactctgattttaacgaaaaaacagatatacatgttcatgtaccagcaggtgctattccaaaagatggtccatccgcaggtgtcggaatgtttacctctattgtttccctg

SEQ ID NO: 263219 - DNA, 1262 bp, Unknown
  Bacterial polypeptide expressing nucleotide sequence isolated from the Sargasso Sea
gaagtgaaggatcggattctggaacatgtcgctgttctttcgctagtacgtgagatgcgcggcccaatactgtgcctcgtgggaccgcctggggtcggaaaaacatcactggggagcagtatcgcccaagcattagaccgagaatttgtcagcgtcagtctaggcggcgtccgagatgaggctgaaatcagaggacaccgacgcacctacgttggggccctacccggaagaattatccaaggaatgagacgaagtggaactcgcaacccggtattcttgctggacgaaatagacaaaatggctcgtgacttccacggagatccaggttccgctcttctagaagttcttgacccaacacagaacaaatcatttaccgaccactatctggagctagagtacgacctatcagacgtcctcttcatagcgaccgcaaataccctacaggacataccgggccccctgcgtgaccggatggaggtaattcggctacccggttacttggacaccgaaaagagagagatcgcaaagcgcttcctctggccgagacagaaaacgcaacacgggcttaaagagaggccaatcgtattctcagatgaagcaattcacgagatcatcggcaggtacactagagaggcaggagttagggaactgaaccgccgactctcgcgtattgcgagaaagctggcccgtgctgtcgccgatggagccatccccagtgaagtcttggagaagaacgacctaagagacctattaggaccaccaacctatcaagctatagaccgtgatgacgacaaagaccgaataggtatcgccaacgggctcgcatggacctcggtcggaggcgaagtcatggatgttgaagtcgccattgtggccggcagtggaactttgcgcctgacaggtactctaggggatgtaatgaaggaatccgctcaagcggcggtaacttacgcccgatcacgtgcttccgttctgggactcgacccacaattccacaaaaagtttgacatccacattcatatacccgaaggtgctacccccaaagatggaccttctgctggaatcacaatcgcggcagcactgatctctgcactgacagacattcccactcagggcgatatagcgatgactggtgagatcactctacgaggtcgcgttataggagtgggcggtgtaaaagagaaagcggtggcagccctcagaagtggtatgacgcgcgtagtcctccccgcggcgaatgaaagcgatctagaaacactacc

SEQ ID NO: 263220 - DNA, 1585 bp, Unknown
  Bacterial polypeptide expressing nucleotide sequence isolated from the Sargasso Sea
aatgccattaaaaaatacggtattatttccgcaacaggtaataccaatttacgttggcagagaaaaatctttgaagttaattgaagatcttccaagtgataataaatatcttgttgtcgttgcccaacaggatggctctattgaagatcctaaagaagatgatttatattcatatggtactttagcactagtgcttaaaacattcgatatgcctgataacagtaaatctgcaatagttcagggtgtagatagagtaaaaattttaaaattcaatcagggtgagtcatatttcatggctgatattgagagaattcaagaatcaatttcaacacctgatgttcaaatagaagcacttgcaaaaaatttaaaaaattcatttaccgaattaattaaaatttcaccaaatctaaatgaagagcatgctggaatgcttgctaatattgatagaccatcaaggttagcggatagagcaacctcactactatcagtttcaaattctgagaaacaggaagttttagaagaattagatattagaaaaagagttgaaaatgccattaatctattacaaaaggaaattcaaagaataaaacttggagaagaaattcagtccgaagttcaagatgaaatatctaaaacgcagagagaatattatttgcgtgaacaaatgaaaacaattcaaaaagaattaggtgaagatagtcaaactgtagagcttgatgaattaaaaaagaaaattgaagatgttaaaatgagcgatgaagctaataaagtagccaataaagagcttgatcgattgggtaggatttctcctcaatcaccagaatattcagtcgctagaacatatttagaatggttaacagaattgccatggagtaagtcaagcaaagataatttaaatgttaaagaagctcaaaaaactttagatcaagatcactacggactacctaaagttaaagaaagagtgttagagtatttagctgtacgatcattaaagaagaaagtaactaaagaagaaactgtcagaggaccaatattatgttttactggccctcctggagttggaaagacatctcttggaaagtctattgctaaatctatgggtagagagtttgtccgaatttctttaggaggggttcgcgatgaggctgaaattagaggacatagaagaacttatattggtgcacttcctggacgaattattcaatcacttaaaaaggcaaaaactaataaccctgtatttatgttagacgagattgataaattaggttcagattttagaggggatccatcttcagccatgcttgaagtcttagaccctgaacaaaatcatgcattcagtgatcactatcttgaagtagattttgatttaagtaaagttatgtttatttcaactgcaaattatccagataatattccacctgctttatatgatagaatggaaatgattgatttcaggggatatattgatgatgaaaaagtacagattgcgaaaagacatttaattcctaaacagattaaagaaaatggacttaccacaaaacaggtaaaatttaatgatactggaattaaagagattatttcttcg

SEQ ID NO: 263221 - DNA, 1107 bp, Unknown
  Bacterial polypeptide expressing nucleotide sequence isolated from the Sargasso Sea
tatgattgaaaataacattccagtcttgccattaagagacatagttgtgtttcctcacatggtggttccattgtttgtaggtagagataagtcggttaaagcgctagaaaaagtcatggctggtgataaacgcatcatgctcatcactcaaaaaagtgcttcagtggatgacccaaaaaaagatgacctttttgactttggaacaattgcaaatgtattacagttattaaaactacctgacggtacagtcaaagtacttgtcgagggatttcaaagagcttcgattaacatgtttactgataatgaggattttcttgtttccaacattgatcttattgatgagaacaatgacagctcagataaaaagttaagagcattatctaaatcaataacagatctttttgataaatatgtaaatttaaataaaaaaattcctcctgaagtacttgggacaataaacgaaattgatgatttagctaagttgagtgacacaattgcatcacacttatcaattaagttgtctgataaacaagagatattggaagcaatcgaccttaccgagagatttgaaaagataatgaattttattcaagcagaactcgatgttatgcaagttgaaaaaaagattagaggtcgtgtaaaaaatcaaatggagaaaactcaaagggaatattatctaaatgagcaaatgaaagccattcaaaaggagcttggagaaggcgatgatggtaaagacgatattcaggagtatgaggaaaaaatcgagaatactaaactttcaaaagaagcaaaagaaaaatgctactctgaaattaaaaagttgaaatcaatgagtccaatgtccgctgaatccagcgttataagaaattatttagattggatattaacaataccatggggtaaaaagacaaaagtcaaaaaagatatcaaatttgcagagagtgttcttaacgaagatcattatggtcttgaaaaagttaaagagagaatactagaatatttggctgttcagcaaagaataaagaaaatgaaaggtccaattttatgtttagttggagctccaggtgtgggtaaaacttcattgggtaagtcgattgcaagagctac

SEQ ID NO: 263222 - DNA, 1612 bp, Unknown
  Bacterial polypeptide expressing nucleotide sequence isolated from the Sargasso Sea
aaaataactgatttatttaattttggttgtgaagctagtatattgcaattgttaaaattaccagatggaacagttaaagttttagttgaaggtttaaaaagagtaaaaatagtagattttaaagatgaagaaaaatttattaattgtttatatgagtatcataacgatatacttcaagaaaatgaaaatcttgcaccattatcatcaattgctttaagaagattggaaaagcttaattcaataaataaaaaaatttcttcagaaacaattaacaatataaaacaattaaaagatcctagtaaaattggagataatatagcctcacatttgaattgtacgatttctgaaaaacaacaaatttttgaaacaaatgatgtgaagaaaagattgaatggaatcattaaaataatggaaaatgaaactagtattataggagtagagaaaagaattagaggtagagttaagacacaaatggaaaaaactcaaagagagtattatttgaatgagcaattaaaagcaattcaaaaagaactaggtgaaatagaagatggaaaagatgaaacagcaaatttaaacaaatctattcttaaagctaaaatgccaaaagaagttcaaaaaaaatgtatgtcagaattaaaaaaattaagaaatatgagtccaatgtcagctgaggctacagttgtcagaaactatcttgattggatgatagatttaccatggtacaaaaaagacaaggttgacattgatttaaacaaagcactaaaaactttagacgaagatcattatggccttgaaaaggttaaagagagaattatagaatttcttgctgttcaaaagagaatggaaaaaattaaaggacctattttgtgtttgattggacctccaggagttggaaaaacttctttaggaaaatctattgcaaaagctaccaatagacaatttgttagaatgtctttaggtggtgttagggatgaagcagaaatcagaggtcatagaagaacctatattggatctctacctggtaaaataatccaaatgatgaaaaaagctggaacaaaaaatcctttaatactattagatgaaattgataaagttggtaatgattatagaggtgatccatcttcagcattattagaagctttagatccagagcaaaattctacattcaatgatcactatcttgaagttgattatgatttatcagatgttatgtttgtgactaccgcaaacactttaaatatattaccacctcttttagatagaatggagataattagaattcctggatatactgaggatgaaaaaattaatattgcaaataaatatctcttaccaaaacaacttaaagaaaatggagttaaaaaagaagaacttgaattttctaatttaacaataaaagaaataataagacactacactagagaatctggtgtaagaaacttagaaagagaaatatctaaagttgcaagaaaaactgttaaacaaattgttaataaagaaaaagaaaaagtacaagtagatgataaaaacatatcagaatttttaggtgtgaaaaaattcaagtacggtgaagtagaaaatgaagatagagtcggtatagttacaggtttag

SEQ ID NO: 263223 - DNA, 1607 bp, Unknown
  Bacterial polypeptide expressing nucleotide sequence isolated from the Sargasso Sea
agaagtcgaaaaaaaatgcatggcagagttaaaaaaattaaagaatatgagtcctatgtcagctgaagctacagttgttagaaactatcttgattggatgatagatataccatggtttaaaaaagataaagttgatattaatttaaacaatgcattaaagacattaaacgatgatcattatggcttagaaaaagttaaagaaagaattattgagttcttagctgttcaaaaaagaatggaaaaaattaaaggcccaatattatgtttgataggacctccaggtgtaggcaaaacttctctaggtaaatctattgcaaaagctacaaatagacagtttgtcagaatgtcacttggtggtgttagagatgaagctgaagtacgtggtcatagaagaacatatataggatcgctacctggaaaaattattcaaatgatgaaaaaagcaggaactaaaaatcctttgtttttacttgatgaagtagataaaataggaaatgattacagaggagatccatcctctgcattattagaagctttagatccagaacagaacactacatttaatgatcattatttagaagtcgactatgatctttcagatgtaatgtttgtaactacagctaatacacttaatattttaccacccttattagatagaatggaagttattagaatacccggatatacagaagatgaaaagatcaatattgccaataaatatttgttgccaaagcaaattaaagataacggtattagagaaggagaaatgaatcttaaagatgggacaataaaagaaattattagaaattacacaagagagtccggtgtaagaaacttagaaagagaaatttctaaagttacaagaaaagttgttaaaaaagtagtcaatgaagaagaaaaaaatgttgaagttaatgaagaaaatttatcaaaattcttaggtgtcaagaaatttaaatttggggaattggaacaagaaaataaagtaggtattgtaataggtttggcctggacagaatttggaggagagatattaaaaatagaaactgttaatatgccaggcaaaggaagaatgcaaattacaggtaaattaggagatgttatgcaggaatccgtaaaagcagcaaaatcttttgttagatcaaaaagtttagaatatggaattataccccctacttttgaaaaaaaagattttcatattcatgtgcctgaaggagcaacgccaaaagatggtccgtctgcaggtatagctatggttacatcaattgtttcatctattacaaatattcctgttaacggagaattagcaatgacaggagaagtcactgtgacaggccaagttttgccaataggaggattaaaagagaaattattagcagctcatacagctggtgttagaaaagttttaatacctaaagaaaatgaaaaagatcttatagatgtgccaaaaaaagtaagagaagatataaaaattattccagtacaaaatgctgatgaagttataaagatagcattaactaaagaaccaaaacctatagaatggactgaagtagaaaaattatctgagactaaaaaagacgataaatctcaagctagcattcagtaat

SEQ ID NO: 263224 - DNA, 1336 bp, Unknown
  Bacterial polypeptide expressing nucleotide sequence isolated from the Sargasso Sea
aatgagcgaagtaaaatctgatttaccgttaattccattaagagacgttgttgttttccctggaatagtaaccactttatttgttggaaggcctaaatctattgaagcattaaatgttgctatgtcttcaaataaaaaacttgttcttgttagccaaaaagatgcatcattagaagatccaaaaatttcagatatttacaaattcgcatctattagtaatttacttcaattaattaaacttcctgatggaacaatgaaagttcttgtcgaaggccataagagatgctcaatagaaaaagtaatagaaaaagattcatatactgtagcaagagtaattgaagaaattgattctcctttaaaggaaagagaatctgcaaatttagttagattaattaaagctaaatttgaggattatattagtactactaaaagaatacccccagaaattgtttcaactgtagactcattagacgatctgtctagattaatcgatactattacaggccatttaccaattgaaaattcaaaaaaacaagaagtattagaaacatttgaattaaaagatagagctgagaaggttttaacctttattgaatctcaacttgatgttgtagatgttgagaaaaaagttcgagatcgagtgaagaaacaaatggaaaagtcgcaacgagaatattatctaaatgaacaaataaaagctgcacaaaaagaattaggtgaaataggtgaagaaggagatgagttagagaatttagagaaaaagattcatgaagttggcatgactaaagaggcattaaaaaaagctaaaacagaattagcaaaatttaaacatatggcaccatcatcagcagaagcttccgttgttagaacatatttagattgtttggtggatgttccatggaaaaagaaatcaaaaataagatcagatattaaagaatcaatggagattcttgaagaagatcattatgggctagaagaagttaaagaaagaattgttgaatatttagcagtacaaaaaagagttaaatctatgaaagctcctgtgctgtgtttagtaggccctccaggcgttggaaaaacatctcttggagaatcaattgccagagcaactaacagaaaatttgtaaggatgtcacttggtggtgttagagatgaatcagaaattagaggacatagaagaacatatataggatccatgccgggtagaattattcaaaaattaagtaaagttggagtaaaaaacccattatttttacttgatgagattgataaaattggtatggatcatagaggagatccctcatcagcgttattagaagttctgatccagagcaga

SEQ ID NO: 263225 - DNA, 1344 bp, Unknown
  Bacterial polypeptide expressing nucleotide sequence isolated from the Sargasso Sea
tatgaacctagagcgttcagaacgcatcgagattcccgtcctgcctcttcgtgacgtggtggtttacccccacatggtcattccactctttgtggggcgggaaaaatccattcgctgtctggaagcggccatggagcaggacaagaaagttctgctggtggcccagaaggatgcgtcaaccgatgagccgacggtggaggagatcttctccgtcgggacagtggccaatattctacagatgctcaagctgcccgatggcaccgtcaaggtgctggtggaagggggtcagcgtgcccgtcttgagcggatgatcgacgaccgggacttcttcgttggcgaggcgcagtacatcgcctccaaggcgattgaggagaaggaccaggatgtgctggtgcgctccgccatcggtcagttcgaaggctatatcaagctcaacaagaagatcccgcccgaggtgctcacctcgatttcggcgatcgacgatgcggcgcgcctggccgataccatggccgcccacatgccgctcaagctcgaagacaagcagaaggtgctggaaatcgcctccgtgtccgagcgcatcgagtttctgatggccatgatggagtcggagattgacctgctgcaggtcgagaaacgcatccgctcccgggtcaagaagcagatggagaagagccagcgcgagtactatctcaacgagcagatgaaggccatccagaaagagctgggtgagctggaagacagtccggatgagttcgaagccctcaatcgcaagattgaagaggccggcatgccggaagatgcccgtgagaaggcgcaggccgagctcgccaagttgaagatgatgtcgcccatgtcggccgaggccactgtagtgcgcagctacgtcgactggatggtgcaggtgccgtggaaggcgcgctccaaggtcaagaaagacctgggcaaggcgcaagaggtgctggatgccgatcactatggcctggagaaggtcaaggatcgcattctcgagtatctggcggtgcaggcgcgcgtcaacaagctcaagggaccgatcctctgtctggtagggcctcccggcgtgggcaagacctcgctcggtcagtccatcgccaaggccaccggtcgcaaatacgtgcgcatggcgctcggcggggtgcgtgacgaggcggagatccgtggtcaccgccgtacctacatcggctctatgcctggcaagctcatccagaagatggcgaaagtcggcgtgaagaacccgctgttcctgctcgatgaaatcgacaagatgagctcggacatgcgtggcgatcccgcctcagccctgctggaagtgctggatcccgagca

SEQ ID NO: 263226 - DNA, 1324 bp, Unknown
  Bacterial polypeptide expressing nucleotide sequence isolated from the Sargasso Sea
aatgctacaatatcagaaaaacaacaaatttttgagtcatcagatgtgaaaaaaagattaaacgcaattattaaaataatggaaaatgaaactagcatcataggtgttgaaaaaagaattagaggtagagttaaaactcaaatggaaaaaactcaaagagaatattatttgaatgagcaacttaaagctattcagaaagagttaggcgagatagaggatggtaaagacgaaaatacaagtctgaataaatctattttaaaatctaaaatgcctaaagaagttgaaaaaaaatgcttacaagaattaaaaaaattaaaaaatatgagtccaatgtctgcagaggcgacagttgtaagaaattatttagattggatgatagatttgccatggtacaaaaaaagtcaaacaactatagatttagtcaaagcattggatgttcttgataaagatcattatggtttagaaaaagtaaaagaaagaatcgtagaatttttagccgttcaaaaaagaatggaaaaaattaaaggtcctattttgtgtttagttggccccccaggtgttggaaaaacttctttaggaaaatccattgccaaagctactaacagagaatttgttagaatgtctgttggaggaatgagagatgaagctgagataagaggtcatagaagaacttatataggttctcttcctggtaaaattattcagatgatgaaaaaagctggaacaaaaaatccattaattttattagatgaaatagataaaataggaaatgattatcgaggtgatccgtcctcagcattattagaagctttagatcctgaacaaaacactacatttaatgatcattatttagaagtagattatgatttatcagatgtaatgttcgtaactacagcaaacactcttaatattcttcctccgttgctagatagaatggaagttataagacttgcaggttatacagaggatgaaaagattagtatagctaataaattcttattacctaagcaaataaaagataacggggttaaagaaaaagaaatgaacctagatgaagatattattaaagaaataattagaagttacactaaagaatctggggtaagaaatttagaacgagagatttctaagctagctagaaaagttgttaaaaaagtagtttcaggagagcaaaaagaggttggaataaataaaaaaaatctctcagattttttaggagtagccaaatataaatttggggaacttgagacagacaataaggtaggtatagttactggtctagcatggacagagtatggtggagaaattttaaaaattgaaactg

SEQ ID NO: 263227 - DNA, 1276 bp, Unknown
  Bacterial polypeptide expressing nucleotide sequence isolated from the Sargasso Sea
ttggaaaaaacgcaaagagaatactatttaaatgagcaacttaaagcgattcaaaaagaacttggtgagatagaagatggtaaagatgaaacttcaaatttaaataaatcaattttaaaagctaaaatgccgaaagaagttcaaaaaaaatgtatggctgagcttaaaaaattaaaaaatatgagtccaatgtctgcagaagcaactgtagtaagaaattatttagattggatgattgatattccttggcataaaaaagatgatgtcaatatagaccttaacaaagctattaaaacacttgatgaagatcatttcggattagaaaaagttaaagaaagaataattgaattcttagcagttcaaaaaagaatgctaaaattaaaaggtccgattttatgtttagtaggtccaccaggtgttgggaaaacatctttaggtaaatcgatagcaagagcaacaaatagacaatttataagaatgtctttaggcggagttagagatgaagctgaaataagaggtcatagaagaacttatataggatctttaccaggaaaaataattcagatgatgaaaaaagctggaacaaaaaatccactttttcttcttgatgaaatagataaagttggaaacgattatcgaggtgacccttcttcagcattactggaagctttagatccagaacaaaatacaacttttaacgatcattacttggaagtcgactatgatttgtcagacgtaatgtttgtaacaaccgctaatacattaaatattcttcctccgttattagatagaatggaagtaattagaattcctggttacacggaggatgaaaaaattaacatagcaaacaaatatttattacctaaacaaataaaagataatggtattaaagaaggagaaatgaatttaaaagatggaacaattaaagagattataagaaattatacaagagagtcaggcgtaagaaatctagaaagagaaatttcaaaagttacaagaaaagttgttaaaaaagtagtaaatgatgaggaaaaaagcgttgaagttaatgataaaaatatttcagattttttaggagttaaaaagtttaaatttggagaattagaatctgaaaataaagttggtattgtcattggtttagcttggacagaatttggtggagagatattaaaagtagaaacagttaatatgcctggaaaaggacgaatgcaaattactggaaaattaggtgatgtaatgcaagagtcagttaaagcagctaaatctttttgttaga

SEQ ID NO: 263228 - DNA, 1480 bp, Unknown
  Bacterial polypeptide expressing nucleotide sequence isolated from the Sargasso Sea
tatgaatgtaaaacatgatttgccattactaccactgagagacatagtagtttttccaaacatggtgattcctctatttgtagggagagataaatctataacagctttaaatgaagtcatgaaggacaataaaaaaattgttctagtaacacaaaaaaattcagaagtagatgatccaaaaaagacggatgtatttatgtatggatgtgagagtacaattcttcaattacttaagttgcctgacggtacagtcaaagttcttgtagaaggtttgaagagagtcaaaatagttgattttaaagatgatgaaaaatttataaaatgtagttatgaacatgaaaatgacattatagatagcagtgaagatttaatgccattgaccatgatagcagttaaaagacttgagaaattaaattatattaataaaaaaatatcttctgaaaccattaacaatataaaacaattaaaagaacctgctaaaatagctgacaatatttcttcccatctaaacgctacaatatctgagaaacaacaattatttgaaacatttgacgtaaaaaaaagattaaattcaataattaaaataattgaaaatgaagcaagtataattggagttgagaaaagaataagaggcagagttaaaactcaaatggagaagactcagagagaatattatttaaatgagcaacttaaagcaattcaaaaagaacttggtgaaattgaagacggcaaagatgaaacctcaaatcttaacaaggcaattttaaaagcaaaaatgccaaaagaggttcaaaaaaaatgtttatcagaacttaaaaaattaaaaaacatgagcccaatgtctgcggaagcaacagttgtaagaaactatctagactggatggtagatttaccatggttcaagaaagataaagttgatattgacttaaataaagcattaaaacaacttgataaagatcactttggattagaaaaagtaaaagaaagaataatagaatttctagcagttcaaaaaagaatggataaaattaaaggcccaattttatgcttagttggtccaccgggcgtaggaaaaacttctttaggtaaatctattgcgaaagccacaaatagacaatttgttagaatgtcattgggaggtgttagagacgaagctgaaataagaggccacagaagaacttacataggttcattaccaggaaaaataattcaaatgatgaaaaaagctggatcaaaaaatccacttattttacttgatgaaattgataaagttggaaatgattatagaggagatccatcatcagctttattagaagctttagatccagaacaaaataccacttttaatgatcattatcttgaagttgattatgatctatcagatgttatgtttgtaacaactgctaacactttaaacatattacctcctcttctagatagaatggaagtaattcgaataccaggttacactgaggacgaa

SEQ ID NO: 263229 - DNA, 1171 bp, Unknown
  Bacterial polypeptide expressing nucleotide sequence isolated from the Sargasso Sea
taaaattattgattttaaggatgatgaaaaatttattacatgtacatacgaacatcaaaaagatgttttaactaaagatgaggatctattacctctagcacttacggcagtaagaagattggaaaagttgacgtcagttaacaaaaaaatttcatctgaaactattagcaatattaaacaactaaaagatccatctaaaattgtagataatattgtttcaaaccttaatgcatcgatatctgagaaacaacaaatattcgaaacgttagatgttaagaagagattaaatgcagcaattaagatgatggaaagtgaaacaagcattataggtgtagagaaaagaattagaggtagagtaaaaactcaaatggaaaaaacccagagagaatattatttaaatgaacaactaaaggctatccaaaaagaattaggtgaaattgaagacggtaaagatgagactaccaatttaaaaaaatctattcaaaaagcaaagatgccaaaagaagttgaaaagaaatgtatgtctgagctcaaaaaattgaaaaatatgagccctatgtctgcagaagcaacagttgttagaaattatttagattggatgattgatcttccatggtttaaaaaagacaatgtcgatattgatttgaataaaggtctaaagattttagatgaagatcattttggtttagagaaagtaaaagagagaattattgaatttcttgctgttcaaaaaagaatggaaaaaattaaaggaccgatattatgtttagttggacctccaggtgttggtaaaacatcgcttggaaaatctatagccaaggctaccaatagacaatttattagaatgtcattaggaggtgtaagagatgaggctgaaataagaggtcatagaagaacatatattggatctttaccaggaaaaattattcaaatgatgaagaaagctggtactaaaaatcctttatttttgttagatgaagtagataaaatcggaaacgactatagaggagatccatcatcagctttgctagaagcattagaccctgaacagaatacagcttttaatgatcactatttagaagttgattatgatttgtctgatgtaatgtttgtaacaacagctaatactttaaatattttaccaccacttcttgatagaatggaagttata

SEQ ID NO: 263230 - DNA, 1375 bp, Unknown
  Bacterial polypeptide expressing nucleotide sequence isolated from the Sargasso Sea
aaattgggtgaagagattcaaactgaggtacatgatgaaataagtaaatctcagcgtgaatattatttacgagaacagatgaaagcgatcaaacgtgaattaggtgaagatgaatctcaggtagaattaaaggaaattgaagaagcaataaaaaaagctaaaatgcctgaagaagcagagaaagttgctttaaaagaaatggatcgtttatcaaaaatcccatcacaatcaccagaatatacagtctctcgaacttatctagattggttaacagaacttccatggtctaaaaaatctgaagatacaattgatgtgacagatgcaaaaaagatacttgatgatgatcactatggtttagaaaaagttaaagagagaatattagaatatcttgctgttagagcattgaaaatgaaaaaagatcccaatggggcaatacgtggacctattttatgttttgcaggtcctcctggagtaggtaaaacttcacttggtagatctatagccagatctatgggccgtgaatttgtaagaatctctcttggtggagtaagagatgaggctgagattagaggacatagacgtacatatataggtgcgcttcctggtaggataattcagtcactaaagaaggcaggtacaaacaaccctgtatttatgctagatgaaattgataaattaggaatggattttagaggtgatccttcatcagctttattagaagttctagaccctgagcagaatagtacatttgctgaccattacctagaagttgattttgaccttagtaatgtgatgttcatagcaacagcaaattatcaagatccaatacctccagcattaaaagatagaatggaaataattgatttttcaggatatatccttgatgaaaaagttcaaattgctaaaaagcatttgattcctaaacaaatggaagagaatgcacttacaactaaagatgttacccttgatgatattggagttaaggaactcataaattcatatactcgtgaggctggtgtacgaaatttggaacgtgagatagcaaatgtttttagaaaagtagctcgcgataaaattgaaaaaaaatcaaagaaggttcgagtctcaaaaaagaaagtaacagaatatttaggtgcgccaaggttctactcagacattgcagagcggaccacaaaaccaggtgttgtaactggccttgcttggacagcagctggtggagatatactatttattgaagcctcaaaaatgaagggtaaaggatccctaactctaactggccaattgggagatgtgatgaaggaatcagcaacggctgcaatgacctatgttcgttcgcatactgatattcttgatctagcaaatgacttcaatgaaa

SEQ ID NO: 263231 - DNA, 2274 bp, Unknown
  Bacterial polypeptide expressing nucleotide sequence isolated from the Sargasso Sea
aagatcaggagcttttattcctctcacaaaaaaattcagaagttgatgatccttctgaaaccgatctttataaaataggaacaaaaggaaagattcttcaacttttaaaattaccagatggtactgttaaggttcttgtggaaggtatagcaagatgcaaagttaaaaatattaaattttcttcagactttgttaatgctgaaattgaagaactcccaaaaaatgagactatctcagatacgattaaagctttaggaagatcagttgtttctaaatatgaaacctacgctaatattaataataaaacatcttctgaagttttgacttctgttaaagatattgtaaatgaagacaagttagctgatacagtcgcaagtcagattgccattaatattcaagagaaacaaaagatacttgaagaagttgatcttgaaaaaagattaaacatgattttatcatatattgaaggtgagttatcagttcttcaggttgaaaaaaagatacgaagaagagttaaaaaccaaatggaaaagactcaaaaagagtattacttgaatgaacaaatgaaagctatccaaaaagaactagaggatggtgagggcggagcctcagaggatattgctgagttaaatgagaaaattaataaaactaaattatctaaagaggcaaaagaaaaagctctaaatgaattaaaaaaactcaagcaaatgagtccaatgtcagctgaagctactgttgtaaggaattatcttgattggttgcttgatataccttggggtaaaaagaaaagaattaaaaaagatataaataaatctcaggagattttagatagagatcattacggtcttgaaaaagttaaggatagaattactgagtatttagcggttcaaaataggtcttcaaaagtcaaaggtccaattttatgtcttgtaggacctccaggtgttggtaaaacttctctcggaaaatcaatagcaagcgcaacgggtagagaatttataagaatgtctcttggcggtgttagagatgaggcagaaattaggggtcacagaagaacttatataggttcaatgcccggaagaataattcaagcgctaaaaaaagttaaaacatcaaatcccattttccttttagatgaaattgataaattagggcaagattttagaggtgatccagcatctgctcttttagaggttttagatccagagcaaaataatgcttttaatgaccattatttggaagttgattatgatctatctcaagtcatgttcgttactacagctaatacaatgaacattcctggtccacttttagatagaatggaaataataagaatagctggctatacagaggaagaaaaactagaaatcgctaaaagacaccttatagaaaaagttaaagagaataatgcccttaccgataaggagtttaaaatttctgatgatgttataaggtccgtaatacaaaattatactagagaagcaggcgttagaaatcttgaaagagagttaaattctcttggaagaaaagcagttaaagaaatttctcaaaacaaaagtgattcgctaaatgtaagttctgacaatatttctgattatttaggtgtaaaaaagtttagatacggaaaaaaagaaaatgatgatttaataggtgttgttactggacttgcttggactcaagttggaggtgatatcttgaatgttgaagctgttatggttcctggccaaggtaaaattaggactactggaaaacttggtgatgttatgaaggagtcgatagatgcagcatcatcatttgtaagatcaagagctgtaaactatggtattgaaccaccaatttttcaaagaaaagatattcatgttcatgttccagaaggagccaccccaaaagatggtccatctgctggtgtcgcaatgataatagcaattatctcagtaatggcaggaatccctgtaaaaaacgatgttgcgatgactggagaaatgtcactaagaggtcgtgtactacctattggaggtttaaaagaaaaattattagcagccttaagatcaggaattaaaactgtattagttccatcggataatgatcgtgagttatcagaagttcctgataacatcaaagataagcttgatattaaattagtttcaacaatagatgaggcactcgaactagctttagtaagaaagccagatgcaattgattgggatgaagatgcatggcttgcggagcaaagaaaaatatctgagaataacccaaattttacagctcattaaa

SEQ ID NO: 263232 - DNA, 1132 bp, Unknown
  Bacterial polypeptide expressing nucleotide sequence isolated from the Sargasso Sea
tttagaaaaatctttagataaaatttatggttacttgattgccgaaattgactcaatgcaaattgaaaaaaagattaaaggtcgagtaaaaagacaaatggaaaaaactcaaaaagaatattatttaaatgaacagatgaaggctattcaaaaagaattaggagatagcgaagaagtagatgaaattgctgaaattgaaaataaattaaaaaaactaaagctaagttcagaagctcgtgaaaaatgtaaatcagaaataaaaaaattaaaaagtatgagtccaatgtcagcagaggctacagtaataagaaattatcttgattgggtagttaatattccttggaataacccttcaattatttcaaaaaatataaaaaaagctaaatctattttagagtctgatcattatggtttggaaaaagtaaaagatagaatattagagtatttggctgttcaaaaaagaattaataaaattaaaggccccattctttgtttagtaggccctccaggtgttggtaaaacttctttaggcaaatctatagctaattcaacaggaagaaacttcgtaagaatgtcattaggtggtgtaagagatgaggctgaaattcgaggtcatagaaaaacatatattggatcaatgcctgggagattcttacaagctatgaaaaagtcaaagacttcaaatcctcttattttattagatgaaattgataaattgggctctgattggagaggtgacccttcttcagctttacttgaagtattagatcctgaacaaaataataagtttaatgatcattatttagaactagattatgatttatccgatgttatgtttgtttgtactgcaaatactcttaatattcctcctgcattattagataggatggagataatcagaataccaggctatactgaaaatgaaaaaaatcaaattgcaaaaagatatttagttcccaaacaaattaaaaacaacggattaaaaaattctgaaataaattttaattctactttaattaagcaaattataagaaattatactagagaagcaggggtaagagggctagaaaaagaaatttcaaagttatgtagaaaagtcgttaaggatttagaaactagaacaaaaagaaaa

SEQ ID NO: 263233 - DNA, 1454 bp, Unknown
  Bacterial polypeptide expressing nucleotide sequence isolated from the Sargasso Sea
aatggagaaaacacaaaaagaatattatttaaacgaacaaatgaaagcaattcaaaaagaacttggtgaaaatgaagatttagacgaaattgcagaattagaaagaaaactaaatcattataaactatcaaatgaggctagagataaatgtacctctgaaataaaaaaattaaaaaatatgagcccaatgtctgcagaggcaactgtaattagaaattatttagattgggtaatgtcgataccctggaataatccagaaaaaatatctaaaaatataaataaagcttctattattttagaaaatgaccattacggattagataaggttaaagagagaattcttgagtatttagctgtacaaaaaaggaccaacaaacttaaaggacctatattatgtctagttggccctccaggtgttggtaagacttcgcttggtaaatctattgcaaactccacagggagaagttttgtaaggatgtcgttaggaggtgtaagagatgaggctgaaataagaggtcacagaaagacatatataggatctatgcccggaagatttatacaagctatgaaaaaatcaaaatcctcaaacccactcatcttattagatgaaattgataaattaggatctgattggagaggtgatccatcatccgctcttttggaagttcttgatcctgagcaaaacagtaaatttaatgaccattacctagaacttgattacgacctttctgatgtgatgttcgtatgcacggctaatactcttaatataccacctgcattactagatagaatggaggttatcagaatacctggatacacagaaaaagaaaaaaatcaaatcgcgaaaagatatttagtaccaaagcaaattaaaaaccacggtattaaaaaaactgaaatttcatttaactccaaggtattaagttcaataataaggaactatactaaagaagcgggtgtaagaaatcttgaaaaagaaatctctaaagtttgtagaaaaactgtaaaaaaactagagacttcaaaattaaaaaagttaattttaaatgatagagttttgcaagatcttttaggaattccaagatttagaacaagtgaaattgaaaaaaagaatttagttggggttacaaatggcttggcctggacagaggttgggggagagatattatcaatagaggttattttatctattggtaaaggaaagctcactattacaggtaaacttggtgaagtgatgagagaatcaattcaagctgctacttcttacgttaaatcaaaatcagtcagtttaggtataaatcctaaagattttgaaaattatgatatccatattcatgttccagagggtgctacacctaaagatggccctagcgcaggtatagctatttttaactctcttgtatcctcactaacaaataacaaaataaaaagagatgttgcaatgacaggtgaaa

SEQ ID NO: 263234 - DNA, 1663 bp, Unknown
  Bacterial polypeptide expressing nucleotide sequence isolated from the Sargasso Sea
atgtccggacatacccccctgccagctaccccccttgacctgccgctgttgcctctgcgtgacgtggtggtgttcccccacatggtgatcccgcttttcgtgggccgccccaagagcatcaaggctctggagatggccatggaggctgaccgccgcatcatgctggtggcccaaaaggccgcagccaaggatgagccttcggtggcggacatgttcgatgtagggtgtgtctccaccatcttgcagatgctcaagctgcccgatggcaccgtgaaggtgctggtggaaggccagcagcgtgcgctggtgacgtcgattgaagatgcggagtcgcacttcatggccaccgtgacgccggtggaggccacgccggacgccaacaagcccagcgaaattgaggccctgcggcgcgccgtgatgcagcagtttgaccagtacgtcaagctcaacaagaaaattccgcccgagattctgacttccatctccagcattgacgatcccggccgtctggcggacaccatcgctgcgcacctgcccctcaagctcgaaaacaagcaggtggtgctggacctgtcggatgtgaaggcgcgcctcgaaaacctgttcgaacagctcgaccgcgaggtggacatcctcaatgtggacaagaagatccgtggtcgcgtcaagcgccagatggagaagaaccagcgtgacttctatctgaacgagcaggtcaaggccatccagaaggaactgggtgagggtgacgagggtgcggacattgaggagatcgagaagaagatcaagctcgccaagatgcccgccgaggcgcgcaagaaggcagaggctgagctcaagaagctcaagctcatgtcgcccatgtcggccgaagcgacggtggtgcgtaactacatcgacgtgctcactgcgctgccgtggagcaagaagaccaagatcaagcacgacctcgtgaatgccgagggcgtcctcaacgaagaccactacggtctcgacaaggtcaaggatcgcatcctggaatacctcgcggtacagcagcgcgtggacaaagtgaaagcgcctatcctgtgcctggtgggacctcctggcgtgggcaagacctcgcttgggcagtccattgccaaagccaccggacgcaagtacgtgcgcatggccctaggcggcatgcgcgacgaagcagagatccgtgggcaccgccgcacctatatcggcgcactgccaggcaaggtgctgcagagcctttcgaaagtcggtacgcgcaacccgttgttcctgctcgacgagatcgacaagctgggcacggatttccggggcgacccgtccagcgcgctgctggaggtgctggaccccgagcagaaccacacattcggcgaccactatgtcgaggtggacttcgatctgtccgacgtgatgttcgttgccacgtcgaactcgatgaacattccgccagcgctgctggaccggatggaagtgattcgcctgtcgggctacaccgaggatgagaagaccagcattgccatgaagtacctgctgcccaagcagctcaaaaacaatggcgtgaaggacgaagaactgctcatcaccgagcctgcggtgcgcgacatggtgcgttactacacccgtgaagcggggcgtgcgctcgctggagcgcgagctgtccaaa

SEQ ID NO: 263235 - DNA, 2407 bp, Unknown
  Bacterial polypeptide expressing nucleotide sequence isolated from the Sargasso Sea
aatgactgaagacacaaaatcaaataatttacctgtacttccattaagaaacattgtggtgtttcctagtatggttgtacctctttttgtcggacgagataaatcaattaatgctcttgagcaggtaatggatagtgatcaagagcttttatttctttcgcaaaaaaattcagaagttgatgatccttctgaaaatgatttatataaaataggaacaaaaggtaaaatccttcaacttttaaagttacctgatggaactgttaaggttcttgtagaaggcataactagatgtaaggtgaagaaaattaaattttcagaagattttataaatgctgaaattgaagaacttccaaagatagaaataatttcggatacaattagagctttaggaagatctgttgtttctaaatatgaaacatatgcaaacattaataataaaacatcttctgaagttcttacttctgtaaaagatattgaaaatgaagataagttagccgatacagttgcaagtcagattgctattaatattcaagaaaaacagaagattcttgaagaagttgatcttgaaaaaagattaaacatgattttgtcatatatcgaaggtgaattatcagtccttcaagttgaaaaaaagatacgtagaagagttaaaaatcaaatggaaaagactcaaaaggaatattacctgaatgagcaaatgaaagctattcaaaaagaattagaagatggtgaaggcggtgcctcagaagatattgctgagttaaatgaaaagattaataacactaaattatctaaagaagcaaaagaaaaagctttgaatgaactaaaaaaactcaaacaaatgagccctatgtcagctgaagctactgttgttagaaattatcttgattggttgcttgatataccatggggtaaaaagaaaagaatcaaaaaagatataaacaaatctcaggaaattttagataaagatcattatggccttgaaaaagttaaagatagaattactgagtatttagcagttcaaaatagatcttcaaaagttaaaggtccaatattatgccttgtaggaccaccaggtgtcggtaaaacctctcttggtaaatcaatagcaagcgcaacaggaagagaatttataagaatgtctcttggcggtgttagagatgaagcagaaattaggggtcacagaagaacctatattggttctatgcctggaagaataattcaagcacttaaaaaagttaaaacatcaaaccctatattccttttagatgaaattgataaactaggacaagattttagaggtgatccagcatctgctcttttagaggtcttggaccctgaacaaaataatgcttttaatgatcattatttagaggttgattatgatttatctcaaattatgttcgttactactgcaaatacaatgaatatacctggcccacttttagatagaatggaaataataagaatagcagggtatacagaggaagaaaaactagaaattgctaagagacatttactagaaaaagttaaagagaacaatgctcttacagataaggagtttaaaatttccgatgatgtgattaggtctgtaatacaaaattatacaagagaagcgggtgttaggaaccttgaaagagagctaaattctcttggaagaaaagctgtaaaagaaatttcccaaaacaaaagtgattcgctaaatgtaagttctgataatatttctgattatttaggcgtaaaaaagtttagatatggaaagaaagaaaatgacgatttaatcggtgttgttactggcttagcttggactcaggttggaggtgacatcttaaatgttgaagctgttatggttcctggtcaaggtaaaattagaactactggtaaacttggtgatgttatgaaggagtcgatagatgcagcatcttcgtttgtaagatctagagctgtaaattatggtattgaaccgccaatctttcaaagaaaagatattcatgttcatgttccagaaggagctactcctaaggatggtccttctgctggtgttgcaatgattatagcaatcatctctgtaatggcaggaatcccggtaaaaaatgatgttgcaatgactggagaaatgtcattaagaggccgtgtacttcctattggaggtttaaaagaaaaattattagcagctttaagatcaggaattaaaactgtgttagttccatctgaaaacgatcgtgagctatcagaagttcctgataatattaaagataaactcgatataaaattagtttcaactatagatgaagctctcgaacttgccttagtgcgaaagcctgatgcaattgactgggatgaagatgcatggcttgccgagcaaagaaaaatatcagagaacgatcgaaatattacagctcattaa

SEQ ID NO: 263236 - DNA, 1459 bp, Unknown
  Bacterial polypeptide expressing nucleotide sequence isolated from the Sargasso Sea
aaagcactaaaaattttagaagaagaccactttggattagaaaaagttaaagagagaataatagaatttttagccgtgcaaaaaagaatggataaaattaaaggccctatattatgtttagtaggtccaccaggtgttggaaaaacttcattaggtaaatcaatagctaaggcaaccaacagacaatttgtaagaatgtctctaggcggagtaagagatgaagcggaggtaagaggtcatagaagaacttatatcggttcacttcctggaaaaattatacaaatgatgaaaaaagcaggaactaaaaatcctttatttttattggatgaaattgataaagtaggaaacgattatagaggtgatccatcatcagctttattagaggcattagatcctgaacagaatacaacatttaatgatcattacctagaagttgattatgatttatcagatgttatgtttgtaacaacagcaaacacactaaatatacttcccccacttttagatagaatggaagttataagaattccaggatatacagaagatgagaagattaatattgccaataaatatttacttcctaaacaaatcaaagataacggtgttaaggaaggtgaaatgaagttagctgacctaacaattaaagaaattattagaagctatacaagagagagtggagttagaaatttagagagagaaatatctaaagtaacaagaaaagttgtgaaaaaagtagtcaataatgaagaaaagagtgttgaagttaatgaaaaaaatatacctgacttcctcggaattaagaaatttaaatttggtgaattagaggcaaaagataaagttggaatagttataggtttagcttggacagagtttggtggcgaaatattaaaagttgaaactgttaatatgccaggtaaaggcagaatgcaaataactggtaagttaggtgatgtaatgcaagaatctgtaaaagcagcaaaatcttatgttagatcaaaatgtttagagtttggagtaactcctccactatttgagaaaaaagattttcatattcacgttccagaaggtgcaacaccaaaggatggaccttctgcaggtatagctatggttacatcaatagtatcttcaattaccaaagttccagttaagagagaaattgctatgactggagaggtaaccattacaggtcaagttttacctattggtggactcaaagaaaaactattagcagctcatagagcaggtgttaaaaaagttttaatacctaaagagaatgaaaaagatttagttgatgtaccaaaaaaagtaaaagatgatattgaaatagttccagtagaaaccgcagatgaagtaattaaaatagctttaactaaagaattgaagcctactgaatggactgaagtagataaattaaccgaaactaaaaaagacgataaatctcaagctagtattcagtaat

SEQ ID NO: 263237 - DNA, 1231 bp, Unknown
  Bacterial polypeptide expressing nucleotide sequence isolated from the Sargasso Sea
atttaatgtcaaaaaaagattagactcagtaattaaagtaatggaaaacgaagcaagtattataggtgttgaaaaaagaattagaggaagagttaaaaatcaaatggaaaaaactcaaagggaatactatttgaatgaacaactaaaagctattcaaaaagaacttggagaaattgaagacggaaaagatgaaagtacaaatcttaaaaaatctattttaaaagcaaaaatgcctaaagaagtagaaaagaagtgtatgtcagaattaagaaaattaaaaaatatgagtccaatgtcggctgaagctacagtcgttagaaattatttagattggatgattgatttgccttggtataaaaaagataaagtcaatatagatttaaataatgcaataaaaactctagatgaagatcattttggtttacaaaaagttaaagaaagaataattgaatttttagctgtacaaaaaagaatggaaaaaattaaaggtccaatactttgtttaataggtcccccaggagttggaaaaacatcattaggaaaatcaatcgctaaagctactaatagacagtttgttagaatgtctttagggggcgttagagacgaagctgaaataagaggacatagaagaacatacattggttcgttaccaggaaaaataattcaattgatgaaaaaagctggtacaaaaaatccattaatacttttagatgaaatagataaagttggaaatgattatagaggcgatccatcttctgctctactagaagctttagatcctgagcaaaacacaacattcaatgatcattatcttgaagttgattatgacttatcagatgtaatgtttgttaccacagctaacactctaaacatacttcctcctttattagatagaatggaagttataagaataccaggttacacagaagatgaaaaaatcaatatcgcaaataaatatctcttaccaaagcaaataaaagaaaatggagtaaaagatagtgaattagatttaaaagatggaactataaaagaaataattaggtcatacacaagagagtcaggtgtaagaaatttagaaagagaaatttctaaaattacaagaaaagtagttaaaaaggttgtcaacagtgaagaaacaaaggtgccagtaaaccctgacaatattaatgattttttgggagttaaaaaatttaaatatggagaagtagaaacagaaaataaagtggaatcg

SEQ ID NO: 263238 - DNA, 1460 bp, Unknown
  Bacterial polypeptide expressing nucleotide sequence isolated from the Sargasso Sea
aatggttaaagtcacaaaagattatccaattattccattaagagatgttgttgtctttcctggaattgttacaacattatttgttggaagatcaaaatccattgaagctttaaattcggccatggcttctgacaagaagcttgttttagttgctcaaaaagatgcttcaaatgaagacccaacttttaaagatatatatcactttggaactgtaagtaacttactccaactcatcaaactgcctgatggcacaatgaaagttttagttgaaggggccaagagatgcaaaatcgataagatctctgaatctaaaggtttaactaaagcagcagtaacagaaattgatgatgatattatcaaagtttccgattcaatgaatcttgtaagatttatcaaaacaaagttcaatgattatgtttcatctacaaaaaaaattccccctgagattttatctacaattgacgccatagacgatctttcaaagctcattgataacatagtaaatcacttaaatattgatacttctcagaaacaagaaattttagaaatctttgatcttcaaaaaagatcagaaagtattcttacatttatagagtctcaacttgatgttatagatgttgaaaagagaataaggtcaagagttaagaagcagatggaaaaatctcagagagaatactatttaaatgaaaagattaaagctgcccaaaaagagcttggtgagatgggagaagagggagatgagtttgaggtattaaaaaataaaattgaagattctgggatgtcaaaagaagcaatgaaaaaagccaagagtgagttctcaaaatttaaaatgatgtctccaacttctgccgaggcttcggtagttcgctcatatcttgagtgtttaattgacgttccatggaaaaaaagaggaaaagttaaatcagatatcaaggctgctctagaaacccttaatgatgatcattacggtcttgaagaggtaaaagatagaattttagagtaccttgcagttcaaaaaagagtgaaaaatcttaaagccccagttttatgccttgtaggacctcctggcgtaggtaaaacatctcttggagagtctatagcaagagctactaacaggaagtttataagaatgtctcttggtggtgtaagagacgaagctgaaataagaggtcatagaagaacatatattggttctatgccaggaaaaataatccaaaaactaacaaaagttggtgttaaaaatcctctattcttattggatgaagtagataaaattggtatggatcatagaggagatccagcctctgcattattggaggttttagatcccgagcagaatacatcattcagcgatcattatctcgaagtagattatgatctatcagaagtgatgtttgtatgtacggctaacagtttaaatattcctggaccacttttagatagaatggaaattattagga

SEQ ID NO: 263239 - DNA, 2338 bp, Unknown
  Bacterial polypeptide expressing nucleotide sequence isolated from the Sargasso Sea
aatgccattaagaaatacggtattatttcctcagcaggtgattccgatttatattggtagagatcgcagcctcaaattgataaatgatttggatcctaaaaaacgctatattgtagttgttgctcaagaagacggttctatagaagatccaaagccagaagatctttatgcatatggtacacttgcacaggttcttaaggtgtttgacatgcctgataatagtaaatcagcgattgtccaaggaatatccagagttaaggtgttagaatataccaaacacgagccttacttcaccgccgcagtccaatctgtagatgatcagccaatcactgaccaactagaggttgatgccttgacaaccaatttaagacaagcttttgaagatcttatgaaggtggcgcctaacctaactgaagagcattctggaatgttaaaaaatattcaaaagccaaatcgtctaactgatcgtgcaatatcagttatcacgatatctaatcaggaaaagcaagagattcttgaggaattagatattaaaatgagaatggaaaaagctctcaacttaatttctcgagagatacaacgcataaaattaggagaagaaatccaatccgaggtccatgatgagattactaaaacacaaagggaatattatcttcgtgaacagatgaaggctattaaaaaagagcttggagaagatgaggggactgttgaattaaaagaattagaagataagatcaaagcagcaaacatgccagaagaatctgaaaaagttgcaatgaaagagttggacagattatctaggattccaacccaatctccagaatataatgtttcaagaacatatattgattggcttgttgaccttccatggagtgatagtacggaagatcgaattgatcttaaagaggcaatgaagatcttagatgaagatcattatggacttgaaaaagtaaaggaaaggataattgaatacctagctgtcagaaatcttaaacagcagaaagaccctgatggtacagttagaggaccaatattgtgttttggtggacctccgggagtaggaaaaacctctctaggaaaatctattgcacgttcaatgggtcgtgaatttgtacgtttatctctagggggtgtaagagatgaagcagaaatacgcgggcaccgccgtacctacattggagcacttcccggtcgcgttatccaaagtataaaaaaagctggtaagaataaccctgtgtttatgcttgatgagatagataagcttgggtcagatttcagaggtgatccttcatccgcattactggaggtactagaccctgagcaaaatcattctttcagcgatcattatttagaagttgattttgaccttagtaatgttatgtttattgcgacagcaaattatcaagatgcgatacctcctgctttaagagacagaatggagattttagatttttctggatatatcgaggatgagaaaatacaaattgcaaaacgtcacattcttccaaagcaaattgaagaaaatggacttacaaaagatcaggtcacttttgatgctggatctattaaagagctggttcgatcttatacaagagaagcaggtgtaaggaatctcgaacgcgaagttgcaaatgtattaagaaaagtagcacgtgatcttgttgaatcagatattgagaagataaaggtcaataggaagaaagttggtgaatatctaggagcgcctagattccattctgaattagcagaaagaaccacaaagccaggagtagttactggccttgcttggacagctgcgggtggtgatattttatttgttgagtctactttgatgaatggtaaaggtaaattaacactaacaggtcaattaggagatgtgatgaaagaatcagccacagcagcattgacctttgtaagagcaaatgcgaatgattttgatattgacccagaattcaatgagaattctgatatacatgttcacgttcctgctggagcaatcccaaaagatggaccttctgcgggtgttagcatggtcacttccttggtgtctttattaaagggtattccagttaaagaaaaagtagcaatgacaggagagatcactcttagaggtaatgtgctaccaattgggggagttaaagaaaaagtaacagctgcacatcgttctggaataaaagagataattctcccagatcataatcgtaaagaccttgaagatgtaccagaacatgtagcaaaagatcttacttttcattttgcaaaagaaataaaagatgtattaaaggtcgcaattccgggtatttttaaaacaataaaaaaatctaataattcgcattag

SEQ ID NO: 263240 - DNA, 1129 bp, Unknown
  Bacterial polypeptide expressing nucleotide sequence isolated from the Sargasso Sea
caggaaatattagagaaagttaatgtaattgagagagctgaatttctttccagtttgcttgaagcgcaaatagagcttattgaagtggagcagagaatcagaggaagggtcagaaagcagatggagaaatctcaaaaagaatattttttaaatgagcagatcaaagcagcacaaaaagaattgggagacataagtgatgagaagaatgagcttgatgaactacagaaaaaaattgaagaaacaaaattatcaaaagaagctttagaaaaagttagttcagaattttcaaaattaaggcaaatgtctccaatgtctgctgaagcaactgttgtaagaacttatatagaaactttgcttgaagttccatggaataagaccacaaaaataaatgtagatctaaacaaagctaaagaaatattagatgaagatcactatggcttaaaagaagtaaaagaaaggattcttgaatatctggctgtacaaaaaagagtaaagaagatgaaagcaccagtattgtgttttgttggtcctccaggagttgggaaaacatcacttggcgagtcaattgcaagatcggtgaacagagaatttacaaggttatctcttggaggagtaagagatgaagctgagataagagggcatagaaagacatatattggctccatgccaggcaaaattattcaaaagctttccaaaggcaaagtaaaaaatcctctcttcttgctagatgagattgataagataggaatggaccataggggagacccaagctcggctttattagaagttcttgatccagaacaaaataataaatttaacgatcattacttagaggttgattatgatttgtcagaagtaatgtttatctgtacggcaaattcactaaatattcctccagctcttttagacagaatggaaataataagattgccaggatatatagaagatgagaaattaaatatcgcaaaaaattatctagttccaagaaataaagaaaagaatggactaaaagaagatgaaattacttttagtgataactctattttaaagattataagaaattacactcgtgaagctggggtcagaaatcttgatagagaaataaataaagtttgcagaaaaaaagtta

SEQ ID NO: 263241 - DNA, 1722 bp, Unknown
  Bacterial polypeptide expressing nucleotide sequence isolated from the Sargasso Sea
tctgcaattacttaagttacctgatggaacagtaaaagttttagtagaaggtattaaaagagtcaaaataattgattttaaagatgacgaaaaatttatttcatgttcatttgagtatttaaaagaattaattgctaaagaagaagatcttttacctttagcattgacagcagttagaagattagaaaaacttacatctataaataaaaagattacatcagagactattggaaatattaaacaacttaaagatccttctaaaatcgcagataacatagcatcacatttaaattgtacaatatctgaaaaacagcagatctttgaaactttagatattaaaaaaagattaaatagtattattaaaataatggaaaatgaaacaagcataattggtgttgaaaaaagaataagaggtagagttaaaaaccaaatggaaaaaactcaaagagagtactatttaaacgagcaattaaaagcaattcaaaaagaacttggtgaaattgaagacggaaaggatgaaacaacaaatttaaagaaatctattcaaaaagccaagatgccaaaagaagttgaaaaaaaatgtatggctgaactaaagaaattaaaaaatatgagtcctatgtcagcagaggctacagtagtgagaaactatcttgattggatgatagatattccttggtttaaaaaagacaaagttgatattaacttaaataatgcattaaagacattaaacgatgatcactacggtttagaaaaagttaaagagagaattattgagttcttagctgttcaaaaaagaatggaaaaaattaaaggcccaatattatgtttagtaggacctcctggtgttggtaaaacatctttaggtaaatcaattgcaaaagccacaaatagacagtttgttagaatgtcacttggtggtgttagagacgaagctgaagtgcgcggacatagacgtacatatattggttctctacctggaaaaattattcaaatgatgaaaaaagcaggtactaaaaatcctttattcttacttgatgaagttgataaaataggaaatgattatagaggagacccgtcatcagcattattagaagctttagatccagaacagaatactacattcaatgatcattatttagaagtcgattatgatctttcagacgtaatgtttgtaactactgctaacacacttaatattttaccaccgttattagatagaatggaagttatcagaatacctggatatacagaagatgaaaaaataagtattgcaaataaatatttactcccaaaacaaattaaggataacggtattagagatggagagatgaaccttaaagatgggacaataaaagaaattattagaaattatacaagagagtccggtgtaagaaacttggaaagagaaatttctaaagttacaagaaaagttgtgaaaaaagtagttaatgaagaagaaaaaaacgttgaagtaaatgaagaaaatttaccaaaatttcttggtgtcaaaaaatttaaatttggagaattagaacaagaaaacagagtaggtattgtaataggtttggcctggacagaatttggaggtgaaatattaaaagttgaaactgttaatatgccaggtaaaggaagaatgcaaattacaggtaaattaggagatgttatgcaagagtctgtgaaagcagcaaaatcttttgttagatcgaataagtttagaat

SEQ ID NO: 263242 - DNA, 1690 bp, Unknown
  Bacterial polypeptide expressing nucleotide sequence isolated from the Sargasso Sea
gaagagattgataaaccacttaaagaaagtgaattaaaaaatattgttagattaatcaaagctaaatttgaggactacatcagtgtaacaaaaagaatacctcccgaaattgtttcaacagtcgattcgcttgatgagctgtcgagattaattgacacaattactggtcatttaccaattgatacattaagaaagcaagaaatattagaaacatcagacttaaaagataggtcagaaaaagttttaactttcattgaatctcaacttgatgttgtagatgttgaaaagaaagttcgtgacagagtaaaaaaacaaatggagaaatctcaaagagagtattacttaaatgaacaaattaaagctgctcagaaagagcttggtgagattggtgaagatggagatgagcttgaaaatttagaaaagaagatccatgaagttgggatgacaaaagaagctctaaaaaaagctaaaactgaattagctaaatttaaacatatggcaccttcgtctgcagaagctgctgttgttagaacctatttagattgtttagtagatgttccatggaaaaagaaatcaaagattaaaaccgatattaaagcatctatggatattttagagaaagatcattatggtcttgaagaagttaaagaaaggatagtggagtacttggctgttcaaaaaagagtcaagtcaatgaaagctcctgttctatgcttagttggtccgccaggagtaggtaaaacttcacttggcgagtcaattgctagggctactaatagaaaatttgtgagaatgtctttgggtggtgttagagatgaatctgaaatcagaggtcatagaagaacgtatatcggttccatgcctggaaagataatacagaaactttctaaagttggcgtcaaaaaccctctatttcttcttgatgaaattgacaaaattggcatggatcatagaggcgacccagcatcagctttactagaagttcttgatccagaacaaaataatacatttagtgatcactatcttgaagtcgattatgatttatctgaagtaatgttcgtatgtactgctaacagtctaaacattccaactcccttacttgatagaatggaaattattcgcatacctggatatatagaagacgaaaaaattaatatagcaaataaatatttacttcctaaacaaatggagaggaatggtattaatgaaaatgaaattaagattaataaaaacgttatattatcgttgataagatactataccagagaggctggtgtaagaggtctagagaggcaaattgcaaaaattctgagaaaggtcgttaaagagcgacttgtcaatgaagctaaatctgataaggataaagctacatcgattacacaaaaaaacttagagaagtattcaggagttaaaaagtttaaatatggtgttgcagaaaaagataatgctattggccaagtaactggactcgcatggacagaggttggtggggagttattaacaatagaagcgtctcacatcgaaggtaagggcagagttattaaaacaggatcccttggagatgtgatgcaagaatctattcaagctgccttaacagttgtaagatctcgtgctgaatctctaggaatcaagcctaatttttatgagaaatatgacgtgcatattcatgtacctgagggtgcaattccca

SEQ ID NO: 263243 - DNA, 1266 bp, Unknown
  Bacterial polypeptide expressing nucleotide sequence isolated from the Sargasso Sea
attgattttaaggataatgaaaagtttataacttgtgattttacacctcacaatgatgtgattgatggtgatgaagatttgtacccattagccgttacagcaatcagacgaatggaaaaattaacttctataaataaaaaagtttctagtgagactattaatacaattaaacaattaaaagatccttctcagattgcagataacattgcttcacacatcactgcaacaatttcagagaaacaacaaatttttgagactattgatgtaaagaaaagattaaatgcaatcataaaaataatggaaaatgaaacaagcattattggagtggaaaaaagaattagaggaagggttaaaacccaaatggaaaaaactcaaagagagtattatttaaatgaacaattaaaagctatccaaaaagagttaggtgaaattgaggacggcaaagatgaaaatacaagtttaaataaagcaattcttaaatctaaaatgccaaaagatgttgagaaaaaatgtcttcaagaattaaaaaaattaaaaaatatgagtccaatgtcagcagaagccactgtagtgagaaattacttagattggatgatagatcttccttggcataaaaaaagtgatgttgttatagatttaaaaaaagcacttgaagttttagataaagatcattttggtttagaaaaagttaaagagagaattattgaatttctagcagtccaaaaaagaatggataagattaaaggccctattttgtgcttagtaggaccgcctggtgttggaaaaacgtctttaggaaaatcaattgccaaagcaacaaatagagaatttgtaagaatgtcggtaggtggaatgagagacgaggcagaaattagaggtcacagaagaacttatataggttctctaccaggtaaaattattcaaatgatgaaaaaagctggaactaaaaatccactaatacttttagacgagattgataaagttggaaatgattatagaggagatccttcctcagctttgttggaggctttagatccagagcaaaatacgacttttaatgaccactatctagaagttgattatgatttatctgatgtgatgtttgtgactacagctaatacattaaacattttacctccattattagatcgaatggaagtaattagattagcaggctacacagaagatgaaaaaataaatatttgcaacaaatatctttctccaaaacaaataaaagataatggtgtgaaggaaaaagaaatgaat

SEQ ID NO: 263244 - DNA, 1552 bp, Unknown
  Bacterial polypeptide expressing nucleotide sequence isolated from the Sargasso Sea
atcgatgatccttcccgacttgcggatacaattaccgctcatatgagtcttaaaatggatgaaaagcaaaaaatgcttgaaacatttgatactaaagaaagactagaaaagataattaatttaattgaagcggaattagatgtcttaagcgttgagaaaaaaatccgtggcagggtaaagaatcaaatggaaaaaagtcaaagagagtattatttaaacgagcaaatgaaagcaattcaaaaggaattaggtgaaatggaagatgttcctaatgaaattgatgagcttgaagaaaaagttcataaggttggaatgccaaaagatgtaaaatcaaaggcaatttctgatattaacaagttaaaaatgatgtctcctatgtctgcagaggctacagtgcttcgaaattacattgatgttttagtcggcgttccatggaaaaagaaatctaaggtcacctctgatttatcttttgcagaaaaggttcttgaagatgaccattatgggcttgataaagtaaaagaacgtattttagaataccttgctgttcagcaacgtgtaaaaaaacttaagggcccaatattatgtttagttggccctccaggagttggaaaaacaagtttgggtaggtcaatcgccaaagctactggaagaaaattcacaagaatgtcattgggtggagttcgtgatgaagctgagataagaggtcatagaagaacttacattggttcattacccggaaaaatcattcaaaatttgtcaaaagttggtgttaaaaatcctcttttcttacttgatgagattgacaaaatggcaatggactttcgcggtgaccccgcatctgctcttttagaagttttagatgctgaacaaaacgatactttctcagatcattatttagaagttgacttcgatttatcagatgtcatgtttgttgctactgctaataccatgaatatacctggtccattattagatagaatggaagtaataagaattcctggttacacagaggatgagaaaattaatatagcaaaaaactatctttcccctaagcaattggaatttaatggtttaaaagaagatgagataaagtttgagcaaaaatcttttaaggatattattcgttattataccagagaagctggagttagaaatttagagagagaaatttcaaaaatataccgtaaagttgtaaagaaacttcttttaggtaaaaaatctaagaagattgaaataaatcctactaatcttgatgagtttttaggtgtaagaaaatttaaacacggagaaacagagaaaaataatacagttggcctagttaatggtctggcatggactgaagtaggcggtgaacttcttactgtcgaagctgctgttgtccctggaaaaggtaaatacattttaactggtcaattaggtgatgttatgcaagagtcaattagggcggcaatgactgtagtaagagatagaactgaagccctaaatatattaagtgacttttatgaaactaaagatatacatgttcacctccctgaaggagcaacaccaaaag

SEQ ID NO: 263245 - DNA, 1036 bp, Unknown
  Bacterial polypeptide expressing nucleotide sequence isolated from the Sargasso Sea
tatttagaggtagattatgatctttcagatgtaatgtttgttacaactgcaaacaccttaaatattttacctccattattagatagaatggaagttatcagactaccaggatacactgaggatgaaaaagtaaatatttcacaaaaatatttaattccaaaacaaagtaaaaacaacggtcttaaatctaatgagtggaacataggcgaaaatgttaacagaaaaataattagaaattatactagagaggcaggagtaagaaatttagagagagaaatttcaaaaattgctagaaaaactgttaaaagaatagatgcaaatgaaaaagttaataatcctatcaaagaaagtgatgtcagcgattatttgggcgtagaaaaatttaactatggagaaattgaggagcaaaacaggattggtgtagttaccggtcttgcttggacagaggttggcggagagattttgaaaatcgagtcagttataatgccaggtaaaggaaaaatgcaaattactggaaaattaggcgaagttatgcaggagtcagttaaagctgctaaggcatttatcagatcaaaaagtttagattatggaataataccaccagtttttgaaaagaaagattttcatattcatgttcctgaaggagcaacgcctaaagatggaccatcagcaggtatagcaatggttacttcaatcatttcagcaatactagaaataccagttaataaagacgtaggaatgacaggtgaaattactttaagaggaattgttcttcctattggcggactaaaagaaaaactgttagcagctcatagagttggagtgaaaaaagtactaattcctcatgaaaacaaaaaagaccttacagagattcctgaagtaataaagaaaaatatcgagattatacctgtaaagaatgttgaccaagtcttgaaacatgctttaaccaaacctctgaaaagagtggattgggtagaagttgagcaactatcagataaagacaaatcaaaatctgaagtatcaagtaggcattaga

SEQ ID NO: 263246 - DNA, 985 bp, Unknown
  Bacterial polypeptide expressing nucleotide sequence isolated from the Sargasso Sea
aatggctaaagatacaaaatcaaacaatttaccggttcttccattaagaaacattgtagtgtttcctaatatggttgtacctctttttgtcggacgagataaatctattaatgctcttgaacaggttatggataaagatcaagagcttttatttctttcacaaaaaaattcagatgttgatgatccttctgaaactgatctttatgaaataggaacaaaaggaaagattcttcaacttttaaaactaccagatggtactgttaaggttcttgtggaaggcatagcaagatgcaaagttaaaaatattaaattttcttcagactttattaatgctgaaattgaagaactcccaaaaaatgagacaatctcagatacaattaaagctttaggaagatcagttgtttctaaatatgaaacctacgctaatattaataataaaacatcttctgaagttttgacttctgttaaagatattgaaaatgaagacaagttagctgatacagtcgcaagtcagattgctattaatattcaagagaaacaaaagatacttgaagaagtcgatcttgaaaaaagattaaacatgattttatcatatattgaaggtgagttatcagttcttcaggttgaaaaaaagatacgaagaagagttaaaaaccaaatggaaaagactcaaaaagagtattatttgaatgaacaaatgaaagctatacaaaaagaattagaggatggtgagggcggagcctcagaggatattgctgagttaaatgaaaaaataaataaaactaaactatctaaagaggcaaaagaaaaagcccttaatgaattgaaaaaactcaagcaaatgagtcctatgtcagctgaagctactgttgtaagaaattatcttgattggttgcttgatataccttggggtaaaaagaaaagaattaaaaaagacattaataaatctcaggagattttagataaagatcattatggtcttgaa

SEQ ID NO: 263247 - DNA, 1377 bp, Unknown
  Bacterial polypeptide expressing nucleotide sequence isolated from the Sargasso Sea
ggaggcatagcaagatgcaaagttaaaaatattaaattttcttcagactttgttaatgctgaaattgaagaactcccaaaaaatgagaaaatctcagatacaattaaagctctaggaagatcagttgtttctaaatatgaaacctacgctaatattaataataaaacatcttctgaagttttgacttctgttaaagatattgaaaatgaagacaagttagctgatacagtcgcaagtcagattgctattaatattcaagagaaacaaaagatactcgaagaagttgatcttgaaaaaagattaaatatgattttatcatatattgaaggtgagttatcagttcttcaggttgaaaaaaagatacgaagaagagttaaaaaccaaatggaaaagactcaaaaagagtattatttgaatgaacaaatgaaagccatacaaaaagaattagaggatggtgagggcggagcctcagaggatattgctgagttaaatgaaaaaattaataaaactaaactatctaaagaggcaaaagaaaaagccctaaatgaattaaaaaaactcaagcaaatgagtcctatgtcagctgaagctactgttgtaagaaattatcttgattggctgcttgatataccttggggtaaaaagaaaagaattaaaaaagacataaataaatctcaggagattttagatagagatcattatggtcttgaaaaagttaaggatagaattactgagtatttagcagttcaaaatagatcttcaaaagtcaaaggtccaattttatgcctagtaggacctccaggtgttggtaaaacttctcttggaaaatcaatagcaagcgcaactggtagagaatttataagaatgtctcttggtggtgttagagatgaggcagaaattaggggtcacagaagaacttatataggctcaatgcccggaagaataattcaagcgctaaaaaaagttaaaacatcaaatcccattttccttttagatgaaattgataaattagggcaagattttagaggtgatccagcatctgctcttttagaggttttagatccagagcaaaataatgcttttaatgaccattatttggaagttgattatgatctatctcaagtcatgttcgtcactacagctaatacaatgaacattcctggtccacttttagatagaatggaaataataagaatagctggctatacagaggaagaaaaactcgaaatcgctaaaagacaccttatagaaaaagttaaagagaataatgcccttaccgataaggagtttaaaatttctgatgatgttataaggtccgtaatacaaaattatactagagaagcaggcgttagaaatcttgaaagagagttaaattct

SEQ ID NO: 263248 - DNA, 1597 bp, Unknown
  Bacterial polypeptide expressing nucleotide sequence isolated from the Sargasso Sea
ttaaaaaccattcaagaagagttagggggttcatcaaatcatcaagatattgatgaaatgaaattaaagtcaaactcaaaaaaatggaataaagaagttggaaatcactttaacaaggaattaattaaattacagagaatgaatactcaagctgctgagtattcaattcaaagaaattatctcgatctaatgttagatctgccttggaacgaatattctaaagataattttagtttaaataatgctcaaaaaactttaaataaagatcattatggtttagatgatgtcaaaagacgaataattgagcaaattgctgtaatgaaactcagaggtgatatgaattcaccaatactctgtttttatgggccgcctggagttggaaaaacttcgttaggtaaatctattgcagaatcattaggaagggaatatgttaggatatcattaggtggtttaagagatgaggctgaaataagaggacatagaaaaacctacataggagctatgcctggaagaattatacaaaatttgaagagagtaaaaacatctaatccagtatttgtattggatgaaattgataaactttcaattggaaatcagggagacccctcttctgcaatgcttgaggttcttgacccagaacaaaacagttctttttatgataattttttggagcttggatttgatttatctaaggttttatttattgctactgcgaataacttggcaacaattcaacctgccttattagacagaatggagataattaatatctcgggatacagtattgaagaaaaagttcaaatagcaaaaaaacatctaattaataaacagatatctaatcatggattaaataatcataaatttaaaatttcagataacgctctaaaaaatattattaacggatatacaagagaatcaggagttagaaaacttgataaaaacattgctaaggtttgtagatggattgcgaaatcaattgtaaaaaatgaaaagtttaaggagattattcaagccgaagatataaaagaaattttaggtgtttctaatcaacctagaatttatgaaaataatgattatgctggagttgtgactggtttagcctggactcagtttggtggtgagatactatttgttgaatcaacaatttcaaaaggaaaaggaaatttgtctttgactggaaatctaggtaaagtcatgaaggaatctgcaactatatcattagaatacataaaatctaatgcaaaattattgaacattaaagaaagtatatttaatggttataactttcatttacacgttcctgagggagccacacctaaagatggtccgagcgctggtgtaacaatgattacatctttagtttcacttttatcccaaagaaaagtgaaaagtaaattggcaatgacaggcgaaataaccttgagaggtaaagttctacctgtaggcggaataaaggaaaaaatattagcagccaaaagagcaaaaataaattcaataatattacctgctgataataaaaaaaatgttgatgaaattgataaaaagtacctcaaaggtttgaattttttttatgttgaaaatattttagaggttttag

SEQ ID NO: 263249 - DNA, 1291 bp, Unknown
  Bacterial polypeptide expressing nucleotide sequence isolated from the Sargasso Sea
gaaaattaggggtagagtaaaaaatcaaatggaaaaaactcaaagagagtattaccttaatgagcaacttaaagccattcaaaaagaacttggagaaattgacgaaggtaaggatgaattaggcaatttatctaaagctattcatgaggctaaaatgcctaagttagcgaaagaaaaatgtctttctgaattaaaaaaattaaaatcaatgagccccatgtctgctgaagcaacagtggtaaggaattatttagactggatgacagaattgccatggtccaataaatctaaaattaatactgatttaaataatgcgcaaaagattttggatgaggatcactacggtttagaaaaagttaaagagagaattatagaatttttagcagtacagaaaagaatacaaaaaatgaaaggcccaatattatgtttggtaggacccccgggtgttggtaaaacatctcttggtaaatctatagctaaagctaccaacagaaagtttataagaatctctttaggtggaattagagatgaggctgagattagaggtcatagaaggacttacataggatcattaccaggaaaaataattcaaatgatgaaaaaagctggtactaaaaacccgctttttcttttagatgaaatagataaagttggaacagattatagaggtgatccttcatctgctcttttagaagcattagaccctgagcagaataaagaatttaatgatcactatctagaggttgattatgatttgtcggatgtgatgtttgtaacaactgcgaacactttaaatattttaccaccacttctcgatagaatggaagtaataagactatcaggatacacagaagatgaaaaagtaaatatatctcaaaagttcttaatacctaatcagagtagcaacaatggtttgaaaaaagatgagtggaaaatagaggaaaatattattagaaaaattgtgagacattatacaagagagtctggtgttagaaatttagagagagaaatatctaaaattgctagaaaattagtgaaaaaaattgataataaagaaaaagttaacacaccaataaatgaaaaagatctaaaagaattattaggcgtccaaaagtttaattacggtgagatagaagaagaaaatagaataggagttgtgacagggcttgcatggacagaggtgggtggagaaatattaaaaatagagtctgtaattatgccaggaaaaggaaaaatgcaaattactggtaaacttggagatgtaatgcaagagtctataaaggctgcaaaa

SEQ ID NO: 263250 - DNA, 623 bp, Unknown
  Bacterial polypeptide expressing nucleotide sequence isolated from the Sargasso Sea
ttcaacaaaaatagacaatagggcaataagaaatatattaggttctgagccatacaaatttggacaatttgacgagcagaatcaaaaaggccaagtaaatggacttgcctggacttcagttggaggcgagcttcttaaaattgaggctgcattaattgccggcaaaggcagaataattaaaacaggctcacttggtgatgttatgcaagagtccatccaagctgcacttacagtagcaaaaaacatagcgaataaagaaaagataaaaaaagatttctttgaaactcacgatctacatattcatgtaccagaaggtgcaactccgaaagatggaccctcggctggcataacaatgtgcacggctattgcttccgttgttttatcaaaagatattaaagcaaacctcgcaatgactggggagattactttagctgggagagtccttaaaattggtggcctcaaagaaaaactaattgcagccaaaagaagtggaataactaatgtacttattcctaaggaaaatcttggagatactgaggagattgaagcaaacgttttaaagaatctaaacattattccagtcgagaatatagaagaagtattagcagaagcgctaatttgaa

SEQ ID NO: 263251 - DNA, 1777 bp, Unknown
  Bacterial polypeptide expressing nucleotide sequence isolated from the Sargasso Sea
ttaccagacggaacagtaaaagttttggttgaaggtcttaaaagagttaagatagtagactttagagatgatgaaaaatttatcacatgttcttatgaacataaccacgatgtaattcctaacgatgaagatctaatgccgttggctattactgcagtaagaagattggaaaaattaactacaataaacaaaaaaatttcatctgaaacaatttcaaatattaaagaactgaaagatccagccaaaattgttgataatatagcatcacatttaaattcaacgatttctgaaaaacaacaaatttttgagacaattgatgttaaaaaaagattaaatagtgtcattaaagttatggaaaatgaaacaagtattattggagttgaaaaaagaattagaggcagagtcaagacccaaatggaaaaaactcaaagagaatattatttaaatgaacagcttaaagcaattcaaaaagaattaggtgaaattgaagatggaaaagatgagacatcaaatttaaacaaagccatacaaaaggcaaagatgcccaaagaagtccaaaagaaatgtatgtctgaacttaaaaagttaaaaaacatgagtcctatgtcggccgaagcgactgttgttagaaattatctagattggatgattgatataccttggtttaaaaaggataaagtagacatagatttaaataaggctctaaaacaacttgatgaggatcattatggacttgaaaaagttaaagagagaattatagaatttttggctgtacaaaaaagaatggataaaattaagggacctattctttgtttaattggtccaccaggtgttggtaaaacatcacttggtaaatctatagcgaaagcaactaatagacagtttgtaagaatgtctttaggaggagtaagagatgaagcagaaataagaggtcatagaagaacttatatcggttctcttccaggtaaaattattcaaatgatgaaaaaagctggaacaaaaaatcctcttattctacttgatgaaattgataaagttgggaatgactatagaggtgatccatcatcagcattacttgaagctttagatcctgaacaaaatacaacatttaatgatcactatcttgaagttgattatgatctttccgatgttatgtttgttactactgctaatacattaaatatactgcctccattattagatagaatggaagtaataagaatacctggatatacagaagatgaaaaaataaatattgcaaataaatatttactaccaaaacaaataaaagaaaatggtgttaagaatgaagaattagacctagtagatggtacaattaaagaaataataagaagctacacaagagaatcgggtgtaagaaatctagaaagagaaatatcaaaagtagcaagaaaagtagtcaaaaaagtagttagtggtgaagaaaaaaaagtaattgtaaatgacgcaaacgttcatgactttttaggagtcaaaaaatttaaatatggcgaagttgaatctgaagataaaattggaatagttactggtttagcttggacagaatttggaggagaaattcttaaaatagaaaccgttcatatgcctggcaaaggtagaatgcaaataactggaaaacttggtgatgttatgcaagagtcagttaaagctgcaaaatcttttgttagatcaaaaagcttagaatatggaattatacctccagtttttgaaaaaaaagattttcatatacatgtaccagaaggtgccactccaaaag

SEQ ID NO: 263252 - DNA, 1999 bp, Unknown
  Bacterial polypeptide expressing nucleotide sequence isolated from the Sargasso Sea
ctaagaagattagaaaaattaacatcgataaataaaaaaatatcaagtgagaccatcaataacatcaaagaaattaaggacccttctaaagttgctgataatatagcatcacatttgaacactacaatttctgaaaaacaacaaatttttgaaaccttcgatgtgaagaaaagactaaatgcaattatcaaaattatggaaaatgaaactagtataatcggagtagaaaagagaataaggggaagagtcaaaacgcaaatggaaaaaactcaaagagaatattatttaaacgaacaattaaaagctattcaaaaagaacttggagaaatagaagaaggcaaagatgaaacatcaaatttaaataaagctatattaaaagctaaaatgccaaaagaagttcaaaagaaatgtatgtcggaattaaaaaaattaaaaaatatgagcccaatgtctgctgaagcaactgttgtaagaaattatttggactggatgattgatataccttggtttaaaaaagatgatgtaaatattgatcttaaaaaagcaattaaaactttagatgaagatcactatggtttagaaaaaattaaagagagaattattgaatttttagctgttcaaaaaagaatggaaaaaatcaaaggcccaatattgtgtttggttggacctcctggagttggaaaaacttctttaggcaagtcaattgccaaagctactaatcgacaatttattagaatgtcattaggtggagttagagatgaagctgaaatacgtggtcatagaagaacttatattggatcgttgcctggaaaaataattcaaatgatgaaaaaagcaggtacaaaaaatcctttatttcttttagatgaaatagataaagttggaaatgattatagaggagatccatcttctgctttattggaagcgttggaccctgaacaaaatacaacatttaatgatcattatttagaagtagattatgacctatcggatgtaatgtttgttaccactgcgaatactttaaatattttaccacctcttcttgatagaatggaagttattagaataccaggctacacggaagacgaaaaaattaatattgcgaacaagtatttacttcctaaacaaataaaagataacggtgttaaagaaggcgagttagatttattagatggaacaattaaagaaattataagaagctatacaaaagaatctggtgttagaaatctagaaagagagatttcaaaaataacaagaaaagttgtcaaaaaagtagtttctggagaagataaaaaagttaccgtgaatgatcaaaatatatctaattttttaggggttaaaaagttcaaatttggtgaacttgagaacgtaaataaagtaggaattacaactggactagcatggactgaatatggtggagaaattcttaaaattgaaactgtcaatatgccaggaaaaggtagaatgcaaatcacaggtaaactcggcgatgttatgcaagagtcagtcaaagctgctaaatcttatgtaagatctaaaagtttagattttggcattattcctcctatttttgaaaaaaaagattttcatatacatgtaccagaaggtgcaacacctaaagatggaccttctgctgggatagctatggttacttctatagtttcatctataactgaaattcctgtacgcagagacatagcaatgactggtgaagtaacaattacgggtcaagttttgccaattggtggattaaaagaaaaattacttgctgctcatagagcgggaattaaagaagtcttaattcctaaagataatgaaaaggatctagtagatattccaaagaaagttaaagaagacattaaacttaccgcggttgaaatagtagacgatgttcttaaaattgcactaacaaaagaattaaaaagaacagaatgggttgaggttgataaattatctgatggaaaaaaagatgacaaatctcaagctagtattcaataat

SEQ ID NO: 263253 - DNA, 1237 bp, Unknown
  Bacterial polypeptide expressing nucleotide sequence isolated from the Sargasso Sea
tctttatggatgtgaaagtaatattctacaacttttaaagcttccagatggtactgtaaaagttttagtagaaggcacaaaaagattaaaaatcaatgaatttagcgatgatgaaaaatttatttcttgcacctatgaatatttaaaagaggagaactcctcaggtgaggatctaatgcctctagcattaaatgctataaaaaaactggaaaaattgactacgataaataaaaaagtgtcttcagaaataatagataatattaaagaattaaaagatccttccaaaattgttgataatatagcatcacacttaaattcatcaatatcagaaaaacaacagatttttgaaacgttagatattaaaaaaagattaaacacagtaattaaaatcatggaaaatgaggctagcattataggtgttgaaaaaagaataaggggtcgtgttaaaacccaaatggaaaaaacacaaagagaatattatttaaatgaacagttaaaggcaatccaaaaagaacttggagagattgaagatggaaaagacgaaacatctaacttaagtaaagcaatacaaaaagctcgcatgcccaaggatgttcaaaaaaaatgcgtatcagaattaaagaagttaaaaaacatgagtcctatgtcagctgaggccactgtagttagaaattatttggattggatggtagatttaccttggtacaaaaaggacaaggttgatatagatttaaataatgcattgaaagtattagaaaaagatcactttggattagaaaaagtaaaggagagaataatagagtttttagctgtacaaaaaagaatggataaattaaagggtccaattttatgtttagttggtcctccaggtgtaggcaagacttcattgggtaaatcaattgctaaatcaacaaatagacaatttgtaagaatgtcacttggaggtgtaagagatgaagcagaaatcagaggtcatagaagaacttatattggatcattaccgggtaaaattattcaaatgatgaaaaaagcaggaacaaaaaatcctcttatattacttgatgagattgataaagttggaaatgattacagaggtgatccttcctcagctttgttagaagctttggatccagagcaaaatacatcttttaatgatcattatttagaagttgattatgatttatcagatgtaatgtttgttactactgctaatacattaaatattctaccaccactt

SEQ ID NO: 263254 - DNA, 673 bp, Unknown
  Bacterial polypeptide expressing nucleotide sequence isolated from the Sargasso Sea
taagcattctgagattgaagatagagatttagttggaataacaactggtcttgcatggacagaagttggcggagagctgttaacaattgaatctgccctttcacctggtaaaggtaagatatcttctactggaaagcttggtgaagttatgaaagaatcgatccaagcagcagaagcttttgtaaaatctagagctaacttatttggtattagttttgaagatattgaaaaatcagatattcatttacatgttcctgaaggtgctactccaaaagatggtccttcagcaggtgttgcaatgattacttctattatatcttcattaactggtaatcctgttaagcacttagttgcaatgactggtgaaatgacgcttaggggtagagtgcttccaattggtggattaaaagaaaagctcttggcagcgtctaggggaggtattaaaactgttgttattcctaaagaaaatgagaaagatttatctgaaatcccaaataatattaaagattgtttagatattaaaccgatttctgttgtagatgaagctttagaaatagctttggtaaaccccttgattcctattaaagataatttaaaagataatcaaaattccccagatgatagcattaatatacagtcatcagtttcaaaaaatgaaattactgctcattaa

SEQ ID NO: 263255 - DNA, 1222 bp, Unknown
  Bacterial polypeptide expressing nucleotide sequence isolated from the Sargasso Sea
aaaaaaattttagaggaagatcattatgggcttgataaagtaaaagatagaattttagaatatttggctgttcaaaaaagaacagaaaaattaaaaggaccaattttatgtttagttggacctcctggagttggtaaaacatctctaggtaaatcaattgcaactgcaacaggcagaaactttgtaagaatgtcacttggtgggattagagatgaggcagaaataagaggtcatagaaaaacatatattggctcaatgccaggcagatttattcaatcgatgaaaaaagcaaagacatccaatccattaatcttgttggatgaaattgataaacttggatcagattggagaggagatccatcatctgctctacttgaggttttagacccggaacagaatgataaatttaatgatcattatttagagttagattataatttatctgatgtaatgtttgtatgcacagctaatactctaaacatacctcctgcattacttgacagaatggagattataagaattcctggatatactgacaaagaaaaaaataaaattgcacaaaaatatttaatccctaaacaaattaaaaatcattatctgaaaaatagtgaagttagatttacaaacaaaattataaatcaaattattagaaattatactcgagaagctggtgtaagaaatttagaaaaagaaatatctaaagtatgtagaaaaacagtaaaattattggaaacaagtactaataaacttgtaaaacttagcgatgaaagacttagagattttttgggtatcagcagatatagatctagtgaaattgaaaagaaaaatttaattggtattacaaatggacttgcttggacagaaataggtggtgaaattctttcaatagaagtgatattatcaattggtaagggaaagctcactattactggaaagcttggagacgtaatgagagaatcagtccaggctgcaatttcgtatgtaaaatctcatagtttaaatcttggtatacatccatttgatttcgacaaatttgatattcatgtccatgttccagaaggagctactccgaaagatggaccaagtgcaggtatagcaattttcaactcattagtatcttctctaacatcaaacaaagtaagaaaagatattgcaatgacaggtgaaattaccttgaggggcagagttcttcctataggaggacttaaagagaaaatatatg

SEQ ID NO: 263256 - DNA, 1102 bp, Unknown
  Bacterial polypeptide expressing nucleotide sequence isolated from the Sargasso Sea
cgtcgcacacaaagatggatcaattgaagatccaaaacaagaagatttatattcctatggaacgctagcgcttgtattaaaagtatttgatatgccagataatagtaaatctgctattgttcagggagttgatagagtaaagattttaaaatataatgatgagaatacttattttactgctgatgttgaaagaatccctgaagcaaaatctgggactcctgatgttgaagttgaagcattagcaaaaggattaaaaaattcatttactgaattaattaaaatttctccaaatctaaacgaagaacatgcaggaatgttatctaatattgatcgtccttctcgtttagctgatcgcgctacttctcttttatctgtttctaattcagaaaaacaagaagtattagaagaattagatattaaaaagcgtgttgaaaatgcaattaatcttctccaaagagaaattcagcgtattaagctcggtgaagaaattcaaacagaagtacaagatgagatttcaaaaactcaaagagagtattatctaagagaacaaatgaaaacgattcaaaaggagcttggtgaagataaccaaaccgttgaattagatgaattaaaagcaaagatagctgatgcaaagatgagtgcagaagccgaaaaagtagctaataaagaattagatcgtttatcacgtatttcccctcaatcacctgagtattctgttgcaagaacttatttagaatggttgacagatttgccgtggagtaaatcaagtaaagataatttaaatattgaatctgcacataaaacgttagatgaagatcattatggtttagataaagttaaagaacgcgttttagaatatttagctgtacgatcactgaaaaagaaagtgacaaaaagcgatgcagtaaaaggtccgattttatgttttactggacctcctggggttggtaagacatctttaggtaaatccattgctaaatctatgggtagagaatttgtacgtatctcacttggaggagttagagatgaagcagagattagagggcatagaagaacttatattggagcattgccaggaagaattattcaatcattgaaaaaa

SEQ ID NO: 263257 - DNA, 2428 bp, Unknown
  Bacterial polypeptide expressing nucleotide sequence isolated from the Sargasso Sea
aatgtcaggaacccaactccttccgccggaacgcattacgctcccgctgctcccgctgcgtgacgtagtcgtcttcccgcacatggtgattccgctcttcgtaggccgcccgaagtcgatcaaggctctcgaagcagcgatggaaggcggtaagcacatcatgctcgtcgcccagaaaacggctgcgaaagatgagccgaccgaaaaggacatgtatgaagtagggtgtgtcgccaacatcctgcaaatgctgaagctgcccgacggcaccgttaaggtgctcgtcgaaggcttgcagcgcgcgaaaacgctttccatcgaagagcaggaaacgcagttttcgtgcgaagtcatgccgctcgaacccgaccacgccgacagcgctgaaactgaagcgctgcgccgcgcgatcgtgtcgcagttcgaccagtatgtgaagctgaacaagaagatcccgccggagatcctgacgtcgctgtcaggcatcgacgaggctggccgtctggccgatacgatcgcggcgcatctgccgctcaagctcgaccagaagcagcacatcctcgagatgttcccggtgatcgagcgcctcgagcatctgctcgcgcagctcgaagctgagatcgacattctgcaggttgaaaagcgcatccgtgggcgtgtcaagcgccaaatggagaagagccagcgcgagtactacctgaacgaacaggtcaaggcgatccagaaggaactgggcgaaggcgaagagggtgccgatctcgaagaactcgagaagcgcatcacggctgcccgcatgccgaaggaagccaagaagaaggccgacgcggagctgaagaagctcaagctgatgtcgccgatgtcggctgaagcaacggtcgtgcgcaactacatcgatacgctgatcggcttgccgtggcgcaagaagagcaaggtcaacaacgacctctcgaatgcggaacgcgtgctcgacgaagaccacttcggtctcgagaaagtgaaggaacgcattctcgagtatctcgcggtccagcaacgtgtcgacaaggtcaaggcgccgatcctgtgcctcgtggggcctccgggtgtcggtaagacgtcgctgggtcagtcgatcgcacgtgctacgaaccgcaagttcgtgcgtatggcgctcggcggcgtgcgcgacgaagccgagattcgcggtcaccgtcgtacgtatatcggttcgatgcccggcaagattctgcaaagcctgaccaaggtcggcgtgcgcaatccgctcttcctgctcgacgaagtcgacaagatgggccaggatttccgcggcgatccgtcctcggcgctgctggaagtgctcgatccggaacagaaccatacgttcgccgatcactacgtcgaggtcgatttcgatctgtcggacgtgatgttcgtggcaacgtcgaactcgctgaatattccgccgccgctgctcgaccggatggaagtgatccgtctgtcgggttacacggaagacgaaaaggtcagcattgcgcaacgctatctgttgcccaagcagaagaagaacaacggcctcaaggatggcgaggtcgatgtaaccgaggcggcgatccgcgacatcattcgttactacacgcgtgaagcgggcgttcgttcgctcgagcgtgaaatttcgaagatctgccgcaaggtcgtgaagatgcttctgctgaagaaagcggaaggcgcggtgaaggtcgacggtggcaatatcgacaccttcctcggcgtgcgcaagtacgacttcggtctggccgccaaggaaaatcaggtcggtcaggtcacgggtctggcgtggacggaagtgggcggcgatttgctgaccatcgaagccgcggtgatgccgggcaagggcaatgtgattcgcacgggttcgctcggcgacgtgatgaaggaatccgtcgaagctgcgcgctcggtggtccgctcgcgttcgcgccgtctgggtgtcaaggacgaagcgttcgagaagcaggacattcacattcacgtgccggaaggcgcgacgccgaaagacggtccgtcagccggtatcgcgatgaccacggcgctggtgtcggtattgaccggtattccggttcgtgccgatgtcgcgatgacgggtgaaatcacgttgcgcggtgaagtcctgccgatcggcggcttgaaggaaaaactgctggcggcgcatcgcggtggtatcaagctggtgctgattccggaggaaaacgtcaaagacttgacggaaattccggataacgtgaagaacgcgatcgagatcgtgccggtccggtggatcgacaaggtgctcgaactggcgctcgaacgggtgcctcaggcattgccggaagaggaggtgaagccggctgcgcccgtcgcggcgggggagcccggtaaggacgccggcacgacggaagtcgtgaagcactaa

SEQ ID NO: 263258 - DNA, 1445 bp, Unknown
  Bacterial polypeptide expressing nucleotide sequence isolated from the Sargasso Sea
attaaatattcttgataaagatcattttggactagaaaaagttaaagagagaattatagaattcttagctgttcaaaaaagaatggaaaagattaaaggcccaatattatgtttagttggtccccctggtgttggtaaaacatctttaggtaaatctattgcaaaagctacaaacagagaatttgttagaatgtctgtgggaggaatgagagacgaagcagaaataagagggcatagaagaacttatattggatcattaccaggcaaaataatccaaatgatgaaaaaggctggaacaaaaaatcctttaattttattagatgaaatagacaaaattggaaatgattacagaggtgatccgtcatcagcacttttagaagcattagatccagaacaaaatacaacttttaacgatcattatttagaggttgattatgatttatctgatgtaatgtttgtaactacagctaacactcttaatatattaccaccattattagatagaatggaagtaataagacttgctggttacactgaagacgaaaaaattagtatagctaataaatatctactacctaaacaaattaaagataatggtgttaaagaaaaagagatgaaattagacgatgacatcataaaagaagtaattagaggatacacaaaagagtcaggagttagaaacttagaaagagaaatttcaaaacttgctagaaaagttgttaagaaaattgtagccggtgaagagaaagaagttcaaattgataataaaaatttgtctgattttcttggtgtagcaaaatttaaatttggtgagttagaaagtgaaaatagagtaggtattgtaacaggacttgcttggacagaatatggtggagaaatcttaaaaatgaaaacagtaactatgcctggtaaaggaagaatgcagattactggaaagctaggtgatgtgatgcaagaatcagtgaaagcagcaaaatcttttgttagatcaaaatgtttagagtatggaattattccacctttatttgagaaaaaagattttcacattcacgtaccagaaggggcaacaccaaaagatggtccatctgctggaataggaatggttacttcaattgtttcatcgattaccaatatacctgtgagaagagatgttgcgatgactggtgaggtaacattaacaggacaagtattgccaatcggtggtcttaaagaaaaattattagctgctcatagagccggaatcaaagaagttttaattccaaaagaaaacgaaaaagatctagtggatatgcctaaaaaaattatagatgatattaaaattacaccagtagaatatgctgaccaagtaattaagattgctttaactaaagaacttaaacctacagaatgggtggaggtagatttagctaaaaaagacgataaatctcaagctagtattcaataat

SEQ ID NO: 263259 - DNA, 769 bp, Unknown
  Bacterial polypeptide expressing nucleotide sequence isolated from the Sargasso Sea
aatgatgagctaatatttagtgataattcaattttaaaaattataaggaactataccagagaagctggagtaagaagtttagatagagagcttaataaaatatgtcgaaaaaaagtaaaagaaatctcattaggatcaaaaacttcaaagaatatcgataacagagttgtaagaaatattttaggaccagaattatttgactttggccagttggaaaatcaaaactctcttggacaggtaaatggtttggcctggacatctgtcggaggggagctgttaaaaattgaggcagccttaacaaaggggaaaggtagggttacaaaaacaggttcacttggagatgttatgcaagagtcgatacaggccgcacttactgttgtaaaaaatatttctaatgaagcaaaaattaaaaatgatttctttgagaagcatgatctgcacattcacgttcctgaaggagcaactcctaaagatgggcctagtgcaggtataacaatgtgtacggcaatatcatcagtggtcctaaataaaaaagtaaaaggaaatttagctatgactggcgaaataacacttggaggcaaagttttaaaaattggaggtttaaaagaaaaacttattgcagcaaaaagatcaggcataacgaatgtaataattccaaaagaaaatgttggcgacttggaaaaagttgaaaaaaatattttgaaaaaccttaaaattattccagtgaaaaaaattgaagaggttctagagaaagctctagtaaaataaa

SEQ ID NO: 263260 - DNA, 949 bp, Unknown
  Bacterial polypeptide expressing nucleotide sequence isolated from the Sargasso Sea
atggaacttaaagttaatctaccacttttaccacttagagacatagtagtatttccgagcatggttatacctttgtttgtaggtagagataaatcaataacatctttaaacgaagcaatgaaacaagataaaaaaattatccttgttacacaaaaaaattctgaagtagatgatccgaaaaaaaacgatatttttacttatggttgtgaaagcaatattttgcaacttttaaagctaccggatggaacagttaaagttttagttgaaggtaatagaagagttaaaatagttgactttaaagatgatgataaatttataacatgcagttttgagcattttgcagatcaaattgataaaaatgatgatttgttacctttggcaacaactgctgtaagaagactagaaaaattaacatcaataaacaaaaaaatttctagtgaaactattaacagcattaaagaattaaaagatccatccaaaatagctgataatattgcctcgcatttaaataccactatttctgaaaaacaacagatgtttgaaacagctgatgtaaaaaaaagattaaacattgttataaaaataatggagaatgaaaccagtattattggtgttgaaaaaagaataagaggaagagttaagactcagatggaaaaaactcaaagagaatattatctaaacgaacaattaaaagctatacagaaagaacttggcgaaattgaagatggtaaagatgaaacttcaaatttaaataaagctattcttaaatctaaaatgccaaaagaagttcaaaaaaaatgtttgtctgaattaaaaaaattaaaaaatatgagtccaatgtcagctgaggcaacagttgtaagaaattatttagattggatgattgatataccatggtacaaaaaagataaagttgatattgatttaaataaagctttaaaaatataga

SEQ ID NO: 263261 - DNA, 894 bp, Unknown
  Bacterial polypeptide expressing nucleotide sequence isolated from the Sargasso Sea
gtatagctaacaaatatctactccctaaacaaattaaagataatggtgttaaagaaaaagaaatgaaattagatgatgacatcataaaagaggtaattagaggatatacaaaagagtcaggagttcgaaacttagaaagagaaatttcaaagcttgctagaaaagtagttaagaaaattgttgctggcgaagaaaaagaagttcaaattaataataaaaacttatctgattttcttggtgtagctaaatttaaatttggggaattagaatctgaaaatagagtgggtattgtaactggacttgcttggacggaatacggtggggaaattttaaaaattgaaaccgtaactatgccaggtaaaggaagaatgcaaattactggtaagctaggtgatgtaatgcaagaatctgtaaaagctgcaaaatcttttgttagatcaaaatgtttagagtacggaattattccacctttatttgagaaaaaagattttcacattcatgtaccagaaggagcaactcctaaagatggtccatctgctggaataggaatggttacttcaattgtttcttcgattacaaatatacctgtgagaagagatgttgcgatgacaggtgaggtaacattaacaggtcaagtattgcctataggggggcttaaagaaaaattattagcagctcatagagctggaattaaagaagttttgattccaaaagaaaatgaaaaagatttagtggatatgcctaagaaaattatagatgatattaaaattacgccaattgaatatgctgaccaagtcattaagattgcattaaccaaagaacttaaacctactgaatgggttgaggttgatttggctaaaaaagatgataaatctcaagctagtattcaataat

SEQ ID NO: 263262 - DNA, 769 bp, Unknown
  Bacterial polypeptide expressing nucleotide sequence isolated from the Sargasso Sea
tatgaacataaacaagataccagttcttcccctgagagatatcgtagttttcccacatatggttgttccactatttgtcgggagagataagtctgttaaggctcttgaaagcgttatgaagggtgacaaaaaaataatgttgattactcaaaaaagtgcttcagttgatgaccctaagaaaaatgatctatttgattttgggacagtagctaatgtgttgcagctactaaaactccctgatggaactgttaaagtgttagttgagggactaaatagagcctcgattaatgttttttttgaaaacgaagagtttttacaagctgatgttgatcagattattgagactatagactcttctgataagcaactaagagcaatgtctaagtcaacaacggatgagtttgataagtatgtaaacttaaataaaaagattccaccggaggttcttggaacgatcaatgaaatagatgagcttggaaaattaagcgacactattgcttcacacttatcaatcaaactatctgataaacagcaaatattagagtccgttgatttatatgaacgatttgaaaaaatcctttcttttattcagtcagaactagacgtcttacaggttgagaaaaaaattcgtggaagagtaaaaaaccaaatggaaaaaactcaaagagaatattatttgaatgagcaaatgaaagctattcaaaaagagcttggtgagaatgaagatggcaaggatgatatttctgagtacgaagaaaagatcgaaaag

SEQ ID NO: 263263 - DNA, 1077 bp, Unknown
  Bacterial polypeptide expressing nucleotide sequence isolated from the Sargasso Sea
aatgaaagcgattcaaaaagaacttggtgatcttgacaatgcaaacagtgaatttgatgaacttgaagaaaagattaaaaagtccggaatgacaaaagaagcagatgaaaaagcatcatctgagcttaaaaaattacaaatgatgtctccgatgtctgccgaagccacagtcgtgagaaattttctggatgttttgctttctgcgccatggaaaaagaaaacaaaagcaaaagtatccttagatcaagctcataaaatccttgatgaggatcattatggattaaaaacagtaaaagaaagaatcattgaataccttgctgttcaaaaaagggtcaaaaaactcaaaggaccaatactttgtttagtaggtcctcctggggtcggtaaaacatccttgggcgcaagcattgcaagagcaacgggcagaaaattcgtgagaatgtctctaggcggtgtgagagacgaagcagagatcagaggtcatagaagaacttacataggggcaatgccaggaaagatcatgcagaacctcaataaagcgggcgttagaaacccactttttttacttgatgaaattgataaaatgtcgatggacttcagaggcgatccatcatctgcacttcttgaagtactagatcctgagcaaaacaccacctttaatgatcactacatggaagtcgattttgacctttctgatgtcatgttcatttgcactgccaatacacttaatatacctcctcctttgctggatagaatggaagtaatacgtattgaaggttacacagaagatgaaaaaatgaatatcgctgagaagtacttagttaataaacaaacagaagccaatggcctcaaagattcggagatcaaaattacaaatagcgcaattctctcaattattcgtcactatacacgcgaggctggtgtcagaaatctagatcgtgaaattgcaaaaatcgctaggaaagtggtgaagtcattgatcatgaaatcaaaagatgaaaaggtgcatataaggcctggcagcctagaaaaataccttggcgtcaaaaaattcaaatacggcattgcagagaaaga

SEQ ID NO: 263264 - DNA, 637 bp, Unknown
  Bacterial polypeptide expressing nucleotide sequence isolated from the Sargasso Sea
gagaaagataatcaaatcggccaagtgactggtttggcttggactcaggtgggcggagaattgctgacaatagaatcaacagcgattccaggcaaaggcaagctaatcaatacaggacagcttggtgatgtcatgaaagagtcaattcaagctgctacaactgttgtcagaagtcgttccaaagcactaggaataaaagaggattttcatcagaaaatggatatgcacattcacgtcccagagggcgccacgcctaaggatgggcccagtgcaggtattggaatgtgcactgctctgatctcttctctaaccgatattcccgtaaaagcaaacgtagctatgacgggagagatcactctcagaggtgaggtgcttccaatcggtggactaaaagagaaattacttgcagcacatagaggtggtatcgaggtcgtcatcattccagaagagaacaagaaagacctctctgagataccaaagaatataaaggataagctcgaaattattccagtacaatggattgatcaagttctagaaattgctcttgaaaggatgccagaaatcaaacttgaaggttcaaaatcaaggcaatcagccaagtctaagccttcttcagaaaagaatctcccccattaat

SEQ ID NO: 263265 - DNA, 1357 bp, Unknown
  Bacterial polypeptide expressing nucleotide sequence isolated from the Sargasso Sea
atgagttcagagacaaaaaaaccattattgccattaagagacatagttatatttccatcaatcgtagtacctttatttgttggtagaaaaaaatctataaaagcactggaagaagtgatgaaaactgacaaatcagtagttttggttacgcaaaaaaactctgaagtagatgaccctactgaaaaagatatttattcgtatggttgtttgagtaaagttctccaattattgaagctgccagatggaacagtaaaagtgttagttgaaggcttagcaagagtgaaaatattagagatcgaagatgacactaaaaaatatttaagttgcaaaactaaaattattgaagccgaaaaagagaatgaggagcacaaaacatttgcatcaaacttaattaaaaaatttgaaaaactttctacgcttaataaaaaagatgtatcagattttacaaaaggattaaaatctttaaaaaacgctaatcaactagcagataatatttgttcaaatttaaacattcaaatatttgaaaaacaaactcttcttgaaactatcgatctgaagaaaagattagaaaaaatttatgaacttatagaaaaagaaacaagtgtaattagcatggaaaaaagaattagaggtagagttaaaaaccaaatggaaaaaactcagagagaatattatttaaatgaacaacttaaagcaattcaaaaagaattaggagaaatagaagatggaaaagatgaaatctcaagcttgaataaagctattgcaaaagccaagatgcctaaggaagctcagacaaaatgtttagctgaacttaaaaaactaaaaggtatgagcccaatgtcagcggaagcaactgttgtcagaaattacttagactggatggttgatcttccttggaataataaaagtaaaatcatttcagatttaaatacagcacaaaaagttcttgatgaagaccattatggtttagcaaaggttaaagagagaattattgaatatttggcagtacagaaaagaattgagaaactaaagggaccaattctatgtttagtcggaccaccaggagtaggcaaaacctcccttggtaaatcaattgctaaagctactggaagaaaatttgtgagaatttcacttggtggtattagagatgaagcagaaattagaggacatagaagaacttatattggttcattaccaggcaaaattattcaaatgatgaaaaaagctggtacaagtaatccattatttttattagatgaaattgataaagtagggagcgattacagaggagacccatcttctgcattattagaagcattagatcctgaacagaacaaaacattaacgatcattatta

SEQ ID NO: 263266 - DNA, 2380 bp, Unknown
  Bacterial polypeptide expressing nucleotide sequence isolated from the Sargasso Sea
atggataagcctcttctgccccttagagatgtcgtcgtttatccacacatggtaatccctctatttgtcggcagagagaaatcaaaactcgctttagaagaagccatgagcgacgataagaagattcttctgtcgtcacaaaaaagatctgatattgatgatccatcaattaaagacgtcaatacggttggtacacttgcaaatattttgcaattggtgacattgccagatgggacagttaagttgcttgtagagggcgtatcaagggttgatcttttggacatccgttcagatgaatattttaaggcagactattgcccactagatgagtttggtgatgaaagtgataaggatatacaggcattaagaagaacgatgatttcgcaggtagagagttatgtgcgaattactaaaaaagtcccagctgaggtagtgaatactcttgcaagtatcaaagaaagcggaagattggtagataccatagtggcccatatgtcattgaagcttgatgagaagcagaagatcttggaacaaatcaacatcaaagagagacttgaatatgtcattggcctgatagaagttgaaatagacatgattgaagttgagcagaaagtgagaggtcgtgttaaagatcagatggaaaagagccagaaagagtactatctaaatgagcagatgaaagcgatccaaaaggagctcggtgatttagataatgccaataatgaatttgatgaacttgaagaaaagattaagaaatcaggaatgacaaaagaggctgatgaaaaagcatcatcagaactcaaaaaacttcaaatgatgtctcccatgtcagcagaagcaactgtggttagaaactttcttgatgttttggtttctgcaccatggaaaaagaaaacaaaagcaaaagtatcattggaccaggcacatgaaattctagatgaggatcattatggacttaaaacagtcaaagaaaggattatcgagtatctagctgtccaaaaaagagtgaaaaaactcaaagggccaatactatgcttggtaggtccaccaggagttggaaaaacctcattgggagcaagtattgcgagagcaaccggcaggaaatttgtaagaatgtctcttggtggtgtaagagatgaagcggagatcagaggtcacagaagaacttacatcggagccatgccaggaaagatcatgcagaatctaaataaagtaggagtaaggaacccactttttcttcttgatgagattgataaaatgtcgatggattttagaggagacccatcttctgcgcttttagaagttctagatccagagcaaaacacgactttcaatgatcactatatggaagttgattttgatctctctgatgtaatgtttatttgtacagccaacactcttaatatacccccacctttattggatagaatggaagtcattcgcatagagggttatacagaagatgaaaaaatgaatatcgctgagaagtatttagtgaagaagcaaacagaagcaaatggtctcaaagattctgagattaaaatcacaaatagcgcaattctctcaattattcgtcactatacccgtgaagcaggagtcagaaacttggatcgtgaaatcgcaaaaattgccaggaaagtagtgaaatcattggtgatgaagtctaaagatgaaacagttcatgttagaccaggcagccttgataaatatcttggcgttcaaaaattcaaatatggcattgctgagaaagataatcaaattggtcaagtgactggtttggcttggactcaggtgggcggagaattgctaacaattgaatcaacagcgattccaggcaaaggcaagttaatcaatacaggacagcttggtgatgtcatgaaggagtcaattcaagcagctacaactgttgtcagaagccgttccaaagcactaggtataaaagaggattttcatcagaaaatggatatgcatattcacgtcccagagggcgccacgcctaaggatgggccgagtgcaggtattggaatgtgcactgctctaatctcctctttgaccgatattcctgtaaaagcaaacgttgctatgacaggagagatcacgctcagaggtgaggtacttccaatcggtggattaaaagagaaattactcgcagcacatagaggtggtatcgaggttgtcatcattccagaagagaacaagaaggacctcactgagataccaaagaatatcaaggataagcttgaaattattccagttcaatggattgatcaagtgctagaaattgcacttgaaaggatgccagaaatcaagcttgagggttcaaaatcaaggcaatcagcgaagtctaagcctacttcagaaaagaatctaccccattaat

SEQ ID NO: 263267 - DNA, 1621 bp, Unknown
  Bacterial polypeptide expressing nucleotide sequence isolated from the Sargasso Sea
gatggatataaaagtgacattaccattattgccattaagagacatagttgtattcccaagtatggttatccctttatttgttggaagagataagtccatcactgcattaaatgaggtaatgaaaggtgataaaaaaattgttcttgtcacacaaaaaaattctgaagttgatgacccaaagaaaaatgacgttttcacatatggatgtgaaagtaacatattgcagctacttaagcttccagatggaacggttaaagtattagtagaaggtaccaaaagagtaaaaatagtagattttaaagatgatgaaaaatttatcaaatgttcgtttgagtatcaaaaagatattatatcaaaagaagatgatctgcttccattaagcttgactgctataaaaagactagaaaaacttactacagtaaataaaaaaatatcttctgaaacaattaacaatattaaacaattaaaagatccatcaaaaattgcagataatataatttctcatatcaatgcaagcatctctgaaaaacaacaaatctttgaaactttagatgtaaagaaaagattaaacagtgtgattaaaatcatggaaaatgaggcaagcatcatcggtgtggagaagagaattagaggaagagttaaaaatcaaatggagaaaactcaaagagagtattatttatatgaacaattaaaagctattcaaaaagagctcggcgaaattgaagatggaaaagacgaaagtacaaatttaagaaaatcaattttaaaagctaaaatgcccaaagaagtagaaaaaaagtgcatgtcagaattaagaaaattaaaaaacatgagtcctatgtcagcagaagctacagttgttagaaactacttagattggatgattgatctaccttggtttaaaaaagataaggtagatattgatttaaataatgcaataaaaactttagatgatgatcattttggccttcaaaaggtaaaagaaagaattatagaatttttagctgtccaaaaacgaatggataaaataaaaggtccattgctttgtttaattggacccccaggtgtgggcaaaacttcacttggcaaatctattgcaaaagcaacaaatagacaatttgtaagaatgtccctaggtggggttagagatgaagctgaaataagaggtcatagaagaacttatatcggatctttgcctggaaaaataattcaaatgatgaaaaaagctggcacaaaaaaccccttaatacttttagatgaaattgacaaagttggtaatgattacagaggcgacccatcttcagctttattagaggctttagatcctgaacaaaatacaacatttaatgatcattatctcgaagtagattacgatctgtcagatgttatgtttgtgacaacagcaaatactttaaatattcttccaccactattagacaggatggaagtaataagaattcctggttatacagaagatgaaaaaataaatattgcaaataaataccttctacctaaacaatttaaagagaacggtgtaaaaaatagtgaattaaacttgaaagatggaactatgagaaaaataattagatcttatacaagagagtctggtgtaagaaattta

SEQ ID NO: 263268 - DNA, 1541 bp, Unknown
  Bacterial polypeptide expressing nucleotide sequence isolated from the Sargasso Sea
actacaattacttaagctgccagacggtactgtaaaggtgctagttgagggattaaaaagagtaaaaattttagattttaaagatgatgataaattcatttcgtgcacttacgaatataataatgacacaattcccaaagatgaagatttaatgccattagcaatgactgcagttagaagattagaaaaactaacatcaataaataaaaaaatatcctctgatacaattacaaatatcaaagagttaaaggacccaacaaaaattgtagataatattgcatcacatttaaatgctacaattttagaaaaacaacaaatttttgaaacaaccgatgttaaaaagagattaaacggtatcataaaaattatggaaaatgaagccagtataattggtgttgaaaaaagaattagaggaagagtaaaaactcaaatggaaaaaacacaaagagaatattatttaaatgaacaattaaaagctattcaaaaagaactaggtgaaatcgaagatggaaaggacgaaacatcaaatctaaataaagctatacaaaaagctaaaatgccaaaagatgttcaaaaaaagtgcatgtcagagctaaaaaaattaaaaaatatgagtccaatgtcagctgaagcaactgtagtaagaaattatcttgattggatgattgatataccatggtttaaaaaagacaaagtggatatagatttaaccaaggctttaaaaactttagacgaggaccattatggtttagaaaaggtcaaagaaagaattattgaatttcttgctgttcaaaaaagaatggagaaaatcaagggcccaatactatgtttaataggcccaccaggtgttggcaaaacatcacttggtaaatcaattgctaaagcgactaatagacagtttgtaagaatgtccttaggtggtgtaagagatgaagctgagataagaggtcatagaagaacatatattggatctttaccaggaaaaattattcagatgatgaaaaaagctggtacaaaaaacccattggtacttttagatgaaattgataaagttggtaatgattatagaggagatccatcttctgctttacttgaagctttggatccagaacaaaatacaaattttaacgatcattatttagaagttgattacgatctttctgatgtaatgtttgtaactacagctaataccttaaacattttacctcctctactagatagaatggaagtaataagaattcccggttacacagaggatgaaaaaatcaacatagctgataaatatttattaccaaaacaaataaaagagaatggcgttaaaaaagaagaattagaacttgagaatggtacaattaaagagattatacgaagctacacaagagagtcaggcgtaagaaatttagaaagagaaatatctaaagtagcaagaaaagtagtcaaaaaagttgttagcggagaagaaaaaaaagttaatgtaagtgataaaaatatatcagactttttaggtgtcaaaaaatttaaatatggagaggttgagccag

SEQ ID NO: 263269 - DNA, 1252 bp, Unknown
  Bacterial polypeptide expressing nucleotide sequence isolated from the Sargasso Sea
aatttgttagaatctctcttgggaggagtaagagacgaagctgaaatcagaggtcataggcggacatatataggcgcacttcctggaagaataattcagtcattaaagaaagcaggcacaaataatccagtatttatgttagatgagatcgataaactggggatggattttcggggagacccatcatctgctttattagaagtactggatcctgaacaaaataatacatttgcggatcattaccttgaagtagattttgatcttagtaatgttatgttcatagccactgcaaactatcaggacccaatacctcctgcattaaaagataggatggagatcattgatttctccggatatatactagatgaaaaagttcaaattgctaaaaaacatttgattcctaagcagatggaagagaacgcacttacaactaaggatgtttctcttgatgaagtgggtgtaaaggaattaatcaattcatatactcgtgaagctggtgtcaggaatctcgaacgagaaatagcaaatgtttttagaaaagtagctcgagataaaattgaaaaaaattcaaagaaagttagagtttcaaaaaagaaagtaacagaatatttaggtgcaccaagattctattctgatattgctgaacggactacaaaacctggtgttgtaacaggccttgcttggacagcagctggtggagatatattgtttattgaagcttctaaaatgaaaggtaaaggtgccctaacactaaccggtcaattgggggatgtgatgaaggaatcagcaacagcagcgatgacttatgttcgatcacatacagatattctcgatcttgcaaatgacttcaatgaaaaaacagatattcatgtacacgtgcctgcaggtgcaattccaaaagatggtccatcagctggcgtaggtatgtttacatctatagtttccttactcacaggtaaacctgtaaaaagtaaggtagctatgactggcgaaattaccttaagaggtaatgtcttgcccattggaggtgtaaaagaaaaagttactgcagcccataggtctggtattaaaactataatattacctgaccataatcgcaaagaccttgaagatattcctgatcatattaaaaaagatctagattttcattttgctaaagaaatgatggatgtgattgatgtagctataccggggataaatgggaagaaaaaaccaaaaaaatcttcttcaagaataaaaaaggcagtttaaa

SEQ ID NO: 263270 - DNA, 553 bp, Unknown
  Bacterial polypeptide expressing nucleotide sequence isolated from the Sargasso Sea
catgtcaggtaagggaaaaattacccaaactggtcaacttggagatgttatgcaagagtcaataaaggcagcgattacagtagtcaaaaccagatgtcatgatttaggcattgatgtagaacaatttgataataaagatattcacattcatgttccagaaggtgctacaccgaaagatggaccgagcgctggtattactatggctttagcagttgcttcaaccttgtcatctatcccaataaagtcagatatagcaatgacaggtgaaattacactcagaggcgaagtattagaaattggtggcctcaaagaaaagctattagcagcattaagagcaggcattaaagaggttattatacctaaggataatgaaaaagatttaagagaaattccgaaaaatatcactgacaaacttagaattcatcctataaaatttgtcgatgaactatttacaattgctcttaagactaagccagtaaaattaaagcctcgtcagaaaaagcctctagatgacaaggacacaaataataatattacaaaaaaccttcagtaa

SEQ ID NO: 263271 - DNA, 1282 bp, Unknown
  Bacterial polypeptide expressing nucleotide sequence isolated from the Sargasso Sea
ttggagaaagtaaaagagagaattattgaatttttggcagttcaaaaaagaatggataaaattaaaggtccaattctttgtctagtaggtcccccaggtgttggtaaaacatctttgggaaaatcaattgcaaaagctactaatagagaatttgtgagaatgtcagttggcggaatgagagatgaggctgaaattcgtggtcacagaagaacttatattggatcattgccaggtaagattattcaaatgatgaaaaaagctggaacaaaaaatccactaattttattagacgaaattgacaaaataggaaacgattatcgaggtgatccttcatcagcacttttagaagctttagatccagagcaaaatacttcatttaatgatcattatttagaagttgattatgatttatcggatgtaatgtttgtgactactgcaaatactcttaatattttaccaccactattagatagaatggaagttattagattacctggttacactgaagatgaaaaaattagtatagctgataaatatttgttaccaaaacaaataaaagataatggtgtcaaagaggatgagatgaaactagaaaatgacataattaaagaaattattagaagttatactaaagaatcgggtgtaagaaatcttgaaagagaaatttcaaaacttgcaagaaaagtagtcaaaaaagttgtatcaggcgaacaaaaaaaggtcgaaataagtaaaaaaaatctctcagattttttaggtgttgctaaacacaagtttggagaactagagaccgataatagggtaggtattgtgattggtttggcgtggacagaatatggtggagaaattttaaaaatcgagacagtaactatgccaggtaaaggtcgaatgcaaattacaggaaagttaggagatgtaatgcaagagtctgtaaaagctggaaaatcttttgtaagatctaaatgtttagagtatggaataatacctcctctttttgaaaaaaaagattttcatattcacgttccagagggggcaacaccaaaagatggcccttcagcaggaataggtatggtaacatcaatagtttcatcattaacaaatattccagttagaagagatgttgcaatgacaggggaagttacaataactgggcaggttctaccaattggtggattaaaagaaaaattattagcagctcatagagctggaatcaaagaagtaattattccgaaagaaaatgaaaaagatctagttgatatgcctaaaaagattatcgatgaaa

SEQ ID NO: 263272 - DNA, 1598 bp, Unknown
  Bacterial polypeptide expressing nucleotide sequence isolated from the Sargasso Sea
aatgcgggaagaaatcatttatccgggttccaccacgcctttttttgtcggccgcaagagttccatggaagcccttgacaaggctctttcaggagaccgccagatcattgttgtcgcccaacgcgtctcttcggtagaagagcccaaagatgaagatctttatgaggtgggtgttttggggcgtatcctccaggtgatgcgacttcccaatggaacagtgaaggcgctcttcgaaggacaacaccgagccagggttcttgaatcgatgctccgagacaaagactactcggcccggattgaggtaatggatgcaaaagaatctgaaaaagaccttgaaaaactgactgatctctctaccaaggcccgtgttctggcccgtgaatactttaaaaagaaaaaatcaaaaacccgcgaggaggtgttgaaaaacatcgaagatactgaaccccattcacttgcggaccgcttggcctcaatgatggaaattgagcgtgagttaaaacaaaaactgctcgaagaaatcaaaccgatcgtgaggctcgaaacattgatcgggatcatggaagaagaaaagaagatctcgaaactcgagtcccaattgaaaaagcaggtcaaagagcagatgagcagcagccaaaaggaagattaccttgaagatcaactcaaatcgatccagaaagagctgggtcagatggatgatccaaagggagagatggatgaactggcccgtaaggtaaaagaagccaagatgccgaatgaggtccgtgaatcggcagagaaggaagtcaaaaaactgaaaatgatgtctcctctttccgccgaggcaaatgtgatccgaaactaccttgaatggctggtcgcgatgccctgggatgtcactactgaagataacttcgacctgaaacgggcccagaagattttggatgaagatcactacggcctggaaaaagtgaaagaacgaattatcgaatacctggcggtggcctcactgaaaaaatccttgaaaggcccgattctctgcctcaccggtcctcccggggtcggaaaaacctcccttgcccagtccatcgcaggtgcactggaccggaagtttgtccgaatcagcctgggtggagttcgagatgaagcggaaatccgcggacaccgccggacctacatcggcgcacttcccggaaaaatcatccagtccatccgaaaagccaagagccgaaatcctgttttgctgatagacgaaatcgacaaactctaccaaagcgccctcagcgatccctcggcggcaatgctcgaggtactggatccggagcaaaacaacacctttatggatcactatcttgaggccgagtgggatctctcaagtgtgctatttatttgtactgccaataccacccaaagcatttccagccctctgcttgatcgtatggaacagattccgctttcgggatacaccgaactggaaaagcaggaaatcgcaaaccgcttcctgattccaaggcaggctaaagaccatggtctcaaggaaaactggattcgtttcaagaaagatgcacttcaggaagtcatcatcggatatacccgtgaagccggggttagaaacctga

SEQ ID NO: 263273 - DNA, 1021 bp, Unknown
  Bacterial polypeptide expressing nucleotide sequence isolated from the Sargasso Sea
attgatacctcaaaaaaacaagaaattttggaaaccattaatttaaaagatagagcagagaaagtattaacatttttagaatctcaactagatgttgtggatgtagaaaagaaggtaagagatagagttaaaaaacaaatggaaaaatctcaaagagaatattacctaaacgaacaaatcaaggcagctcaaaaagagttaggtgaaattggtgaagaaggcgatgagttagaaaacttagaaaaaaagattcatgaagtagggatgagtaaagaagctttaaagaaagccaaaagtgaactagcaaaatttaaacatatggctccttcttcggcagaggcatccgttgttagaacatatcttgattgtttggttgatattccatggaagaaaaaatcaaaagtaaaatctgatattaaagcatcaatggagattcttgaagaagatcactatggacttgaagaagtaaaggaaaggattgttgaatacttagctgtccaaaaaagagtgaaatctatgaaagctcctgttttgtgcttagttggcccaccaggagttggaaaaacgtcattaggtgaatctatagcaagggccactaatagaaaatttgtaagaatgtcacttggtggtgttagagatgagtctgaaattagaggtcatagaagaacttatataggttcgatgccaggaaaaataattcaaaaactttctaaggttggagtcaagaatccactgtttttgttagatgaaattgacaaaataggcatggatcatagaggagatccggcgtcagctttattggaggttttagatccagaacaaaataatacttttagcgatcattaccttgaggtagattatgatctatctgaagtaatgtttgtttgtactgcgaatagcttaaatattccaacgcctcttctggatagaatggaaattattagaatccctgggtatatagaagacgagaagattaatattgctgaaaaatatttattaccaaaacaaatgactagaaacg

SEQ ID NO: 263274 - DNA, 1699 bp, Unknown
  Bacterial polypeptide expressing nucleotide sequence isolated from the Sargasso Sea
gatggaaaagagccagcgtgagtattatctgaacgagcagatgaaagccatccaaaaagaattgggtgacttagacgaaggccacgacgagtttgaagtcttaaatcgtaagattgaagaagccaacatgccaagcgatgccaaagagaaggccgtcgccgagctgaataaattacgcatgatgtcacctatgtctgccgaagcgaccgtggttcgcagctacgtggattggatgacctcagtgccttggagccaacgctctaaaatcaaacgcgatttagccaaagcccaagaagtgctggataccgatcactatggtctggaaaaggtcaaagaccgcattctggaatacttggcagtacagagccgtgtgcgtcaacttaaagggcctatcctgtgcttagtcggcccaccaggggtaggtaaaacctcattgggtcaatcgattgcgaaagcaactggtcgtaagtatgtgcgtgtagccttgggcggcgtgcgtgatgaagcggaaatccgtggtcatcgccgtacttacattggttctatgccgggtaaagtcattcaaaagatggcgaaagtgggcgtgaaaaaccccttattcctgctcgatgaaatcgacaaaatgagctcggatatgcgcggcgacccagcgtcagcactgttagaggtgcttgatcctgaacaaaacgcgacctttaacgaccattacctcgaagtcgactacgacttatccgatgtgatgttcgtggcgacttcgaactcgatgaatattcctggcccattgctggaccgtatggaagtcattcgcctgtcgggttacaccgaagatgagaagctcaatattgctaagcagcatttactgaccaagcaaatcgagcgtaacggtcttaaagcgaacgaaattcatatcgaagacagtgcgatagtcggcattatccgctactacacccgtgaagccggtgttcgtgcactagagcgtgaattgtcgaagatttgccgcaaggtagtgaaaatgatcctgctggataagtccatcaagtcagtcacagtgaccgcggacaatctcaagtctttccttggtgtacagcgttttgactacggtaaggcggagtcgaacaaccaaatcggtcaagttacaggtttggcgtggaccgaagtgggtggcgatctgcttaccattgaagcgacctctgtgccaggcaaaggcaagttgacctacacaggctcacttggcgatgtgatgcaagagtcgattcaagcggcgatgacggtcgtgcgtgcccgtgcggaacaattaggtatcaatggcgacttttatgagaagcgggatatccatgttcacgtgccagaaggggcgacgcccaaagatggtccatctgcgggcgcggcaatgtgtactgcgttagtctctagcttaacgggtaacccagtgcgtgccgatgtggcgatgacgggggaaattaccttacgcggagaagtgttacctatcggcggtttaaaagaaaaactgctcgcggcacaccgtggtggcattaaattggtacttattccaaaagaaaacgagcgtgatctggaagaaattcctgccaatgtgattgccgatttggaaattcgtcccgtgcgttgggtcgacgaagtgttaaaactggcgctagaaagaccggttgaaggcttcgaagtggttaaaaacttggcataa

SEQ ID NO: 263275 - DNA, 2380 bp, Unknown
  Bacterial polypeptide expressing nucleotide sequence isolated from the Sargasso Sea
atggatgttaaaatctcactgccgttacttcccttaagagatatcgtagtctttccaagtatggttattccattatttgtaggcagggataaatcaatttctgcattaaatgaagtaatgaagaaagaaaaaaaaatcatactagtaactcaaaaaaattctgaaattgatgacccaagtaaaactgatgtttttatgtatggatgtgaaggaaatattttacaactattaaaattaccagatggtactgttaaggtcttagtagaaggaataaaaagagttaaaattttagattttaaagataatgaaaaatttattacttgtgactatacttattttaacgatgtcctctctaaggatgaagatctgtttccattagcagcaaccgctttaagaagactagaaaagttaacatctattaataaaaaaatttctaacgaaacaataaatacaattaagcaactaaaagacccatctcaaattgcagacaatattgcatcacatatagcggcttcgatttctgaaaaacaacaaatttttgaaaccaatgatgttaaaaaaaggttaaacgccataattaaaattatggaaaatgaaactagtataattggtgttgagaaaagaattagaggaagagttaaaactcaaatggaaaaaactcaacgtgagtattatttaaatgagcaactgaaagcaattcaaaaagaacttggagaaattgaagatgggaaagatgaaactacaagcataaacaaagcaatcactaaagctaagatgcctaaagatgtggaaaaaaaatgtcttcaggaattaaaaaaattaaaaaacatgagtcctatgtcagctgaagctactgtagtaagaaattatttagattggatgacagaacttccatggtataaaaaaagtgaagttgatattgatttggcgaaggcacaaaatactttagacaaggaccatttcggcttagaaaaaattaaagagagaatagttgagttccttgcagttcaaaaaagaatggaaaaaattaaaggaccaattttatgtttagttgggccaccaggtgttggtaaaacttcattaggaaagtcaattgctaaagcaactaatcgagaattcgtgagaatgtctgttggaggcatgagagatgaagctgaaatcagaggccatagaagaacctatataggctcactaccaggcaaaattattcagatgatgaaaaaagctggaacaaaaaatccattaattttattagatgaaattgataaaataggaaatgattatagaggagatccttcatctgctttattggaagctttagatcctgaacaaaacacaacctttaatgaccattatttagaagtagattatgatctttcagatgtaatgttcgttacaactgcaaatacattaaatattcttccgccattattagatagaatggaagtcattagactagctggttatacagaggatgaaaaaataaatattgctaataaatatttgttacctaaacaagttaaagataacggtgttaaagataaagaaatgaatttaagtgatgatgttattaaagaagtaataagaggttacactaaagagtctggagtaagaaatctagaaagagaaatttcgaaaatagcacgaaaagtcgttaagaaaattgttgctggagaagaaaaggaagtcaatgtaaataataaaaatttgtctgactttcttggagttgcaaaatttaattttggtgaattagagactgatgataaagttggtattgttgttggacttgcttggacagagtatggtggggagatacttaaaattgaaacagtaactatgcctggtaaaggtagaatgcaaattacaggtaagcttggtgatgtaatgcaagagtcagttaaagctgcaaaatcttttgttagatctaaatgtcttgaatatggaattattcctccattatttgagaagaaagattttcacattcatgttcctgaaggtgccactcctaaagatggtccatcagcgggtgttggaatggttacgtcaattgtatcttcaattacaaatatcccagtaagaaaagatttggcaatgactggagaagttactttaacaggtcaggttttacaaattggtggattaaaagaaaaattattagcagcacatagagctggaattaaagaagttttaataccaaaagaaaatgaaaaagatcttgtggatatgccaaaaaaaataatggatgatattaaaatcactccagtagaacatgcagatcaagtaattaaaatagctttaacaaaagaattgaaacccactgaatgggttgaagtagacataactaaaaaagacgataaatcacaagctagtattcagtaat

SEQ ID NO: 263276 - DNA, 1123 bp, Unknown
  Bacterial polypeptide expressing nucleotide sequence isolated from the Sargasso Sea
gacagtcgaggcgatcctgcatcagctcttttagaggttttggatccagagcaaaacaatacattctcagatcattatttagaggttgactttgatttatctgagattatgtttgtctgcaccgcaaacagtttgaatattcctggtcctcttttagataggatggaaatcattagacttccaggatacatcgaagatgagaaattaaacatcgctaaacagtatcttattccaaagcagttagagagaaatggactggatattagcgaagttaaattaagcgataaatctattttagacatagttcgttattacacaagagaagcaggagtaagaggtcttgaaagacagattgcaaagatatttagaaaatctgttaaggagcgtgtcttatctaactctaaaaagtcaaaatcttcaattaatattactccaaaaaatcttgagaaatattgcggagttgcaaaattcaaatatggcgaagctgacgttgaagatattgtgggaaaagttgctgggcttgcttggacagaggttggtggcgagctacttaccattgaatcttcatatgttccagggaaagggcaagtaatcaaaactgggtctttgggggatgttatgcaagaatctattcaggctgcattgacagtagttagatcaagatctaaaaacttaggaataccaagtaatttttatgaaaaatatgatgtccatattcatgtaccagatggcgcaactccaaaagacggtccaagtgcaggtgttggaatgtgcacagcacttatctcagtttttactggtattcccgtaagatcagatactgcaatgactggagaaattacattacatggtcaagtaactaaaattgggggattaaaagaaaagttattagctgcaaaacgtgctggaattaaaagagttataattccccaagacaatgctgctgatttaagagagattccttctcaaataactcatgcacttgaaatcatgcctgttagatgggttgatgaggccatatcgctggctcttacgtctgagccaaaaccaagcaaaaaaagagcttcagcaaaaaatattgctaaaccaaaaacaagtagctcaagatcgaccaatagaaaac

SEQ ID NO: 263277 - DNA, 1282 bp, Unknown
  Bacterial polypeptide expressing nucleotide sequence isolated from the Sargasso Sea
ccaaatggagaaaactcaaaaagagtactatttaaatgagcagatgaaagcgattcaaaaagagctcggagaccctgacagtactgacgaattaggtgaatatgctgagaagataaattctataaaactttctaaagaagcaaaagaaaaggcagagggtgaactaaaaaagttaaaaacaatgtcgccaatgtctgcggaggccacagttgtacgaaattatttagattggataatttctgtgccttggaaaaagcgtggaagggttaagaaagatttaaacgaggctcagagtattttggacaaggatcattatggcttagagaagataaaagagagaataattgagtttcttgctgttcaaaataggagtaaaaagatgaagggtcctatcttgtgtttggtaggcccaccgggagtaggaaaaacctcactaggaaaatctttagcaaaagctactggcagagaatttctaaggatatctttaggaggggttagagatgagagtgaaatcagaggacatcgaagaacatatataggtgcaatgccgggaaaaattatccagtcaatgaagaaagtcaaaacagttaacccgcttatactattagatgaaatagataaaatgggtcatgatttcagaggagatccagctagtgcaatgctggaagtattggatcctgagcagaattcagcattttccgatcattatctggaagttgaatatgatctttcttctgtaatgtttgttacaactgctaataactacaacatgcctagaccgttacttgataggatggagataatttcactctccgggtacacagagcaagagaaggttgaaattgctaaattgcacctcttggataaacaaatggaagcacatgggctgaaaaaagaagaatttagtgttaaagatgaggcactggttgaggtagtaaggtattatacccgagaagctggcgtaagaaatatggaaagagagttggccaagctttgtagaaagtctcttacaaaaattttgaaaggtgaatttaattcaatagagataaattccagtaatatcgaagaatttcttggggttaaaaggtttaagtacggcatagctgaggagcaaaatcaaataggcgttactacaggtttggcgtggacagaaatggggggagatcttcttcatattgaggccctgagtttgccaggaaaagggaaaatgaaggccactggaaaattaggagatgtcatgaaagagagcatcgatgcagcttccagttatgttaggtctaaa

SEQ ID NO: 263278 - DNA, 934 bp, Unknown
  Bacterial polypeptide expressing nucleotide sequence isolated from the Sargasso Sea
ttctgggatatactcgaggacgaaaaattaaatatttctcaaaaatttttaatacacaaccaaagtaaaaataatggtttaaaaaaagaggagtggacaatagatgagaacattattagaaaaataataagacattacacaagagaatcaggagtacgaaaccttgaaagagagatttcaaaaattgcgagaaaattagtaaaaaaaattgataataaagaaaaagtcaacaacccaattaatgaaaaagacttaaaagatttacttggagttcaaaaatttaattatggagaaatagaggaagagaatagagttggagtagtaacaggtttagcttggacagaagttggaggagaaattttaaaaatcgagtctgccataatgccaggtaaaggaaaaatgcaaataactggtaaattaggtgatgttatgcaagagtctgtaaaagcagctaaatcttacataagatcaaaaagtttagattttggaataattccaccaatctttgacaaaaaagatttccacattcacgttccagagggagcaactccaaaagacgggccatctgctggtgttggaatggttacttctataatttctgcaattacagaaattccagtaaataaagatgtagcgatgacaggcgaaattactttaagaggtttagttcttccaataggcggtctcaaagaaaaacttcttgcagctcacagagctggtattaaaaaagtattaatacctgaagaaaataaaaaggatttagttgaagtgccaaaaacaatattaaataatattgaaatcattgcagtcaaaaatgtggatgaagtattaaaagttgctctaattaaacctttaaaaagagtagagtgggtagaagttgaccagatgagtaaaaaaggcaaagataaaaaagaagaacttagcacgcattagt

SEQ ID NO: 263279 - DNA, 1533 bp, Unknown
  Bacterial polypeptide expressing nucleotide sequence isolated from the Sargasso Sea
tcctcctgaagtacttgggacaataaacgaaattgatgatttagctaagttgagtgacacaattgcatcacacttatcaattaagttgtctgataaacaagagatattggaagcaatcgaccttacagagagatttgaaaagataatgaattttattcaagcagaactcgatgttatgcaagttgaaaaaaagattagaggtcgtgtaaaaaatcaaatggagaaaactcaaagggaatattatctaaatgagcaaatgaaagccattcaaaaggagcttggagaaggcgatgatggtaaagacgatattcaggagtatgaggaaaaaatagagaatactaaactttcaaaagaagcaaaagaaaaatgctactctgaaattaaaaagttgaaatcaatgagcccaatgtccgctgaatccagtgttataagaaattatttagattggatattaacaataccatggggtaaaaagacaaaagtcaaaaaagatatcaaatttgcagagagtgttcttaacgaagatcattatggtctcgaaaaagtcaaagagagaatactagaatatttggctgttcagcaaagaataaagaaaatgaaaggtccaattttatgtttagttggagctccaggtgtgggtaaaacttcattgggtaagtcgattgcaagagctacgggaagaaaatttgtaagaatgtcactcggaggagttagagatgaagctgagattagggggcacagaagaacttatataggatctctgcctggaaaggttcttcagatgatgaagaaagcaggatcatctaatccattatttctattagatgaaattgataagttaggagctgattacagaggagacccttcatcagctttattggaagtgcttgatccagagcaaaataattcatttaacgatcactatctagaagttgattatgacttgtccgatacaatgtttattacaactgctaatacattaagaatgcctcctgcacttttagacagaatggaaattattagaattgcaggctatacggaagatgaaaaagtagaaattgtaaaacaacatttagcaccacagatgttagagaaacatggtttaaaaagtggtgagcttatactagatgatagtgcgataactggattaataaggtattacactagggaagcgggtgtaaggagtttagaaagagaacttgctaacctcgctcgaaaaacagttaaaaaaattgttgctggtgacattggatcattaacaataaacgaagataatctgcatgagtttgctggcgttagaaagtttaaatttggtgaaattgataatgacgaccaggttggaatagttacaggacttgcttggacagaggttggtggcgatatattgccaatagagtcagttataatgcctggaaaaggtcgtatgactattactggaaaattaggcgacgttatgaaagaatctattcaagctgcaaaatcttatgttcgttcaagatgcattgagtttggaattaaaccatctatttttcc

SEQ ID NO: 263280 - DNA, 1177 bp, Unknown
  Bacterial polypeptide expressing nucleotide sequence isolated from the Sargasso Sea
catggatgttaaaataactcaacctttgttaccactaagagacatagtggtatttccaagcatggtaatacctctttttgtaggcagagataagtcaatcaccgctttaaacgaagtaatgaaaaatgataaaaaaattgtattagttacccaaaaaaattcagaagttgatgatccaaaaaaaaatgatgtttttagttatggttgtgaaagtaatattttacagcttttaaaattacctgatggcacagtaaaagttttagttgaaggtgtaaaaagagttaaaatagttgaatttaaagatgatgaaaaatttatcacttgtgcttttgaatatcaaaaagatttaataaataaagatgaagatttaatgcctttagcattaacagccgttagaagactagaaaaattaacatctataaataaaaaaatatcgtcagagacaattaacagtatcaaagaattaaaagaagcatctaaaatagttgacaatattgcgtctaatttaaatgcaacaatttcagaaaaacaacaaatatttgaaactctagatgttaaaaaaagattaaattcagtaataaaaattatggaaaacgaaacaagtattattggagttgagaaaagaattagaggaagagttaaaactcaaatggaaaaaactcaaagagaatattatttaaacgaacaacttaaagctattcaaaaggaattaggtgaaattgaagatggaaaagatgaaacaacaaatttaaaaaaatccattcaaaaagcaaaaatgccaaaagaagttgaaaaaaaatgcatgtcagaattaaagaaattaaaaaatatgagccctatgtcagcagaagcaacggttgtaagaaactatcttgattggatgattgatttgccatggtttaaaaaagacaaagtagatattgatttaaataaagccttaaaaactttagatgaagatcattttggtttagaaaaagttaaagaaagaataatagaatttttagcagttcaaaaaagaatggaaaaaattaaaggtcctattttatgtttagtgggtccacctggtgttggaaaaacatcgctaggtaaatctattgctaaagcaactaacagacaatttataagaatgtctttaggcggagtaagagatgaggcagaaataagaggacatagaaga

SEQ ID NO: 263281 - DNA, 1947 bp, Unknown
  Bacterial polypeptide expressing nucleotide sequence isolated from the Sargasso Sea
attgaaagatttagataaaacaaaaaataataacagtatagatatcaaaaaacaggatatcaccagtattcctggtatctcattgagagatgttgtcgtatttccaagcatggtcatcccgctctttgttggaagagaaaaatccataactgctctgaatattgcaatggactcatcaaaggaaataattttgattgcccagaaaaaagcagatcaggatgatccgactatagttgatctatatagagttggaacagttgcgaagattcttcagttattaaaattacctgatgggacagtaaaagttttagttgagggtatcaaaagaataaaaatcaaagaaataagagatgaaaactgtttctacgtaatacctgaaataaatgttgaaaatgaattcaatgaacgtgaattagacatcctatccagggctctagtgtctcagtttgagcaatatataaagttaaataagaaaataccatcagagatattgaatacagtctcaaatattgatgataacgaaaagctttgttatacgatcgctgctcacattcaggtgaaaataaatataaaacaaaaaatattggaaataggtgatccaaaattaaaatcagaatttatattagaagttttgcagggtgagattgatgtgcttgaggttgaaaaacaagttagatctaaagttaaatctcaaatggaaaaaagccagagagagtattacttgaatgaacaaatgaaggctattcaaaacgagcttgatggaggctctggttctgctaaagatgacttcgcaaaactagaagatgacataaagaacgcatcaatgtcaaaagaggccaatgaaaaagcaacttcagaattatctaaattaaaactgatgtcaccgatgtcagccgaggcaactgtctcaagaaattatttagattggctggtgaatctcccatggaaaaaaagtagcagaatatcaagtgatatttcaaaagcatcgaatacgctcaatgaggatcactttggactagatgaggtaaaagaaagagttatagagtatctagcagtccagaaaagggtaaaaaaaccaaaaggcccaattttgtgccttgtaggaccaccgggtgttggaaaaacctccttagggaggagtattgctagggctgcaaatagaaaatatatacgaatgtctcttggcggcgtaagagatgaagctgagataagaggccaccgaagaacatacattggttcaatgcccggaaaaataatacaaagtttgtccaaggctaaatcaaacaatccgctatttcttttagacgaaatagataaaatgactatggatttcagaggtgatccatcgtcagcactccttgaggtgcttgatccggagcagaatcattctttctctgatcattatcttgaggttgattatgacttatcaagtatcatgtttgtttgtactgcgaatacactggatatacctgcaccactccttgatagaatggaagttattcagttatctggatatacagaggatgagaaattaaatattgctgaaaaataccttgttcctaaacaatttaacgaaactggaataaaggataatgagttaagcatttctcgatcggcattaactgaaatcattcaaagatataccagagaggctggtgtgagaagtttagagagaatgatttctaaaatatgtagaaaatcccttaaattgatcatcactaaaccttcaaaaattaaaaaaagggtctcaagcaagaatttagcaaaatatttgggcgctcataaatataactatgaatcaatatcgaaagataaccaaattggccaagtaaatggtttagcatggacaagagtaggaggtgagatccttaccattgaatcggctgttgttaagggaaaaggtaaacttatacatactggtaaattaggtgatgtaatgactgagtc

SEQ ID NO: 263282 - DNA, 2284 bp, Unknown
  Bacterial polypeptide expressing nucleotide sequence isolated from the Sargasso Sea
atgccaatgatccctttgagggatgtagttatctttccaaacacggtctcaactctatttgtaggaagagaaaaatctattttctctttagaagatgcactaagaagcaataaaaaaatatttttaattgctcaaaactctccatctaacgaagaaccaactattaaagaccttccttcgattggaactatttctactttattgcaaatgatcaaactgccagatggaactgtaaaaatcttagttgaaggaattcagagagcaaaactagatgatatatcaacttctgaagggtattttgcagaaatagaaaaaatagaagagatgattgaggattcaaaatatgaaagagatctcctctcaaccataaaaaaccagttcactgaatttgtttcagtctcaaggaaagtttctcacgaaataatcaaccaagttgaatcaatgggcaatctatctaaggcagtggatataatctcttcaaatattcatctttcagttaaagacaagcaggaaatattagagaaagttaatgtaattgagagagctgaatttctttccagtttgcttgaagcgcaaatagagcttattgaagtagagcagagaatcagaggaagggtcagaaagcagatggagaaatctcaaaaagaatattttttaaatgagcagatcaaagcagcacaaaaagaattgggagacataagtgatgagaagaatgagcttgatgaactacagaaaaaaattgaagaaacaaaattatcaaaagaagctttagaaaaagttagttcagaattttcaaaattaagacaaatgtctccaatgtctgctgaagcaactgttgtaagaacttatatagaaactttgcttgaagttccatggaataagaccacaaaaataaatgtagatctaaacaaagctaaagaaatattagatgaagatcactatggcttaaaggaagtaaaagaaaggattcttgaatatctagctgtacaaaaaagagtaaagaagatgaaagcaccagtattgtgttttgttggtcctccaggagttggaaaaacatcacttggtgagtcaattgcaagatcggtgaatagagaatttacaaggttatctcttggaggagtgagagatgaagctgagataagagggcacagaaagacatatattggctccatgccaggcaaaattattcaaaagctttccaaaggcaaggtaaaaaaccctctctttttgctagacgagattgataagataggaatggaccataggggagacccaagctcagctttactagaagttcttgatccagaacaaaataataaatttaacgatcattacttggaggttgattatgatttatcagaagtaatgtttatctgtacggcaaattcactaaatattcctccagctcttttagacagaatggaaataataagactgccaggatatatagaagatgagaaattaaatatcgcaaaaaattacctagttccaagaaataaagaaaagaatggactaaaagaagatgaaattacttttagtgataactctattttaaagattataagaaattacactcgtgaagctggagtcagaaatcttgatagagaaataaataaagtttgcagaaaaaaagttaaagatctttcacttggaggtaaagcaacaaagcttattgataacagagttgtaagaaatattttaggaccagaaaaatttaagtatggtgaacatgatgatcaaaattcattaggccaagtcaatggtttagcttggacttcagtaggcggcgaacttttacaaatagaagctgcactaactgctgggaaagggagaataataaaaacaggttctcttggtgatgttatgcaggaatctatacaagcagcattgacagttgcaaaaaatatttttcaaaaaacaaaaataaaaaaagatctttttgaaaagcatgatattcatatacacgttcctgaaggggcaacaccaaaagatggtccaagtgctggcataactatgtgcacggctataacctctttagctttgggaaagaaagtaaaagcaaatcttgcaatgacaggagagattacattggcaggcaaagttcttaagatcggcggcctgaaagagaagctaatagcagcgaagagaagtggaataacgaatgtaattatacccaaagaaaatactggtgatttagaagagatggaaacaaacattttgagagatctaaatattattccggtcacaaatattgacgaagtcttaaaacaagcgcttgtataaa

SEQ ID NO: 263283 - DNA, 1030 bp, Unknown
  Bacterial polypeptide expressing nucleotide sequence isolated from the Sargasso Sea
gttgcttgatcctgaacaaaatagttcttttcatgataatttcttagaaataggttatgacctttcaaaagtaatgtttgtcgcaacagctaataatctatcaacaatgcatcctgctttacttgatagaatggagctaattaatgtttctgggtatacatctgaagaaaaagtttcaattgcgaataagtttttaattaaaaaacaattgtctgagcacggtatgaattcttctgattttaaaatatctaataaaaatatcaaagaaattattagtagctacacaagagaatctggggttagaaatcttgagaaacaaattgctaagcttattagaaacagagctaaaaatattgtttcaaattctaagttgaacgactataatgatgaaaattatctaaaagatgtattaggacctcagaaattttttagagataaatatgaaaataataatgtcgctggagtggttacaggtcttgcatggacttctgtaggtggcgaaattttattcattgaatcgtcattatcagaaggtaaaggaaacttatcgattacaggaaaccttggaaaaataatgaaggaatccgccgttattgcattagaatatattaaatctaattaccaagatctcggaatcaataaagaaattgactattcaaaatataatatacatattcacgtccctgagggagcaactcctaaagatggtccaagcgcaggtataaccatacttacatcccttgtttcattatttactcaaaaaagagttaaaaagaatattgctatgacaggcgagattactttaagaggaaaggttcttcctgtaggaggaataaaagaaaagattttggcagctaaaagagcaaatattaaggaaattattttaagttcatataataaaaaggatattgaagaaatagatcaaaaatatcttaaaggtttaaactttatatacgttaataacatgagtgatgtaatatctcactctctaacaaatagaaaggtcttaaatccaaaaaatataaattaa
